United States Patent Application Publication US 2004/0253606 A1 - sequence listing, part 5

SEQ ID NO: 4994 - DNA, 4770 bp, Homo sapiens
  misc_feature (2068)..(2093): n is a, c, g, or t
  misc_feature (2390)..(2420): n is a, c, g, or t
tttttttttttttttttcacaggctttaaattttattattctttagttactacgtgctagcatataaataaatagtacaaaaccaagaaggcatccaccttttggttgtctcttcacgtgtaaaacaacactttgtgttaagtatcttcacacacgggggggccaaagggttggaacccgggtttctaaaaaaggcggtgtgggaaattgcttcccaagcctgggcaacaccagggaggccctccatttctacaaaaaataattcgccaaagcataggtggtgcgcacctgcggttcccaggtacttggagagggtgagatgggaaagttgcttgagctcgggcagcaggagttccaggctgcagtgagctaagaatgcgccactggactccagtatgggcgacagcgtgagaccctgtctcaaacaaaaacaaaagcccgttactccaccaagaaggcgcttttgcacattgttttaatgcttaacgccttcaggatgccagcgtgacggaagcaagtaaccaaccaaggcatcaccactggcgctaaacttctcacttccggagtgctgcaagcgcagaaaatatacgtcatgtgcggaggcggagcttccgccctgcgcgtcgtattagacggaaaccgagcgggcccatcggacgcgtgggtgcggacccaccagcgaaggcgggaggtgtcgcagggacatcttctggctgtttccgtcgcctgcgtggcccttgcaccccggtcttccattagcggcgcagacgtttgggcctaagcgctgggcgaggcgaggccctgcccctccccgccaacggccattctctggacctgtctttcttccgggaggcggtgacagctgctgagacgtgttgcagccagagtctctccgctttaatgcgctcccattagtgccgtcccccactggaaaaccgtggcttctgtattatttgccatctttgttgtgtaggagcagggagggcttcctcccggggtcctaggcggcggtgcagtccgtcgtagaagaattagagtagaagttgtcggggtccgctcttaggacgcagccgcctcatgggggtccaggggctctggaagctgctggagtgctccgggcggcaggtcagccccgaagcgctggaagggaagatcctggctgttgatattagcatttggttaaaccaagcacttaaaggagtccgggatcgccatgggaactcaatagaaaatcctcatcttctcactttgtttcatcggctctgcaaactcttattttttcgaattcgtcctatttttgtgtttgatggggatgctccactattgaagaaacagactttggtgaagagaaggcagagaaaggacttagcgtccagtgactccaggaaaacgacagagaagcttctgaaaacatttttgaaaagacaagccatcaaaactgccttcagaagcaaaagagatgaagcactacccagtcttacccaagttcgaagagaaaacgacctctatgttttgcctcctttacaagaggaagaaaaacacagttcagaagaggaagatgaaaaagaatggcaagaaagaatgaatcaaaaacaagcattacaggaagagttctttcataatcctcaagcgatagatattgagtctgaggacttcagcagcctgccccctgaagtaaagcatgaaatcttgatgatatgaagagttcaccaagcgcagaagaacattatttgaagcaatgccagaggagtctgatgacttttcacagtaccaactcaaaggcttgcttaaaaagaactatctgaaccagcatatagaacatgtccaaaaggaaatgaatcagcaacattcaggacacatccgaaggcagtatgaagatgaagggggctttctgaaggaggtagagtcaaggagagtggtctctgaagacacttcacattacatcttgataaaaggtattcaagctaagacagttgcagaagtggattcagagtctcttccttcttccagcaaaatgcacggcatgtcttttgacgtgaagtcatctccatgtgaaaaactgaagacnnnnnnnnnnnnnnnnnnnnnnnnnntccttctccaagaactttactagctatgcaagctgccctgctgggaagtagctcagaagaggagctggagagtgaaaatcgaaggcaggcccgtgggaggaacgcacctgctgctgtagacgaaggctccatatcaccccggactctttcagccattaagagagctcttgacgatgacgaagatgtaaaagtgtgtgctggggatgatgtgcagacgggagggccaggagcagaagaaatgcgtataaacagctccaccgagaacagtgatgaaggacttaaagtgagagatggaannnnnnnnnnnnnnnnnnnnnnnnnnnnnnncatctagtgtgaactctgcagaggagcacgtagccagcactaatgaggggagagagcccacagactcagttccaaaagaacaaatgtcacttgttcacgtggggactgaagcctttccgataagtgatgagtctatgattaaggacagaaaagatcggctgcctctggagagtgcagtggttagacatagtgacgcacctgggctcccgaatggaagggaactgacaccggcatctccaacttgtacaaattctgtgtcaaagaatgaaacacatgctgaagtgcttgagcagcagaacgaactttgcccatatgagagtaaattcgattcttctcttctttcaagtgatgatgaaacaaaatgtaaaccgaattctgcttctgaagtcattggccctgtcagtttgcaagaaacaagtagcatagtaagtgtcccttcagaggcagtagataatgtggaaaatgtggtgtcatttaatgctaaagagcatgagaattttctggaaaccatccaagaacagcagaccactgaatctgcaggccaggatttaatttccattccaaaggccgtggaaccaatggaaattgactcggaagaaagtgaatctgatggaagtttcattgaagtgcaaagtgtgattagtgatgaggaacttcaagcagaattccctgaaacttccaaacctccctcagaacaaggcgaagaggaactggtaggaactagggagggagaagcccctgctgagtccgagagcctcctgagggacaactctgagagggacgacgtggatggtgagccacaggaagctgagaaagatgcggaagattcgctccatgaatggcaagatattaatttggaggagttggaaactctggagagcaacctcttagcacagcagaattcactgaaagctcaaaaacagcagcaagaacggatcgctgctactgtcaccggacagatgttcctggaaagccaggaactcctgcgcctgttcggcattccctacatccaggctcccatggaagcagaggcgcagtgcgccatcctggacctgactgatcagacttccggaaccatcactgatgacagtgatatctggctgtttggagcgcggcatgtctatagaaacttttttaataaaaacaagtttgtagaatattatcaatatgtggactttcacaatcaattgggattggaccggaataagttaataaatttggcttatttgcttggaagtgattataccgaaggaataccaactgtgggttgtgtaaccgccatggaaattctcaatgaattccctgggcatggcctggaacctctcctaaaattctcagaatggtggcatgaagctcaaaaaaatccaaagataagacctaatcctcatgacaccaaagtgaaaaaaaaattacggacattgcaactcacccctggctttcctaacccagctgttgccgaggcctacctcaaacccgtggtggatgactcgaagggatcctttctgtgggggaaacctgatctcgacaaaattagagaattttgtcagcggtatttcggctggaacagaacgaagacagatgaatctctgtttcctgtattaaagcaactcgatgcccagcagacacagctccgaattgattccttctttagattagcacaacaggagaaagaagatgctaaacgtattaagagccagagactaaacagagctgtgacatgtatgctaaggaaagagaaagaagcagcagccagcgaaatagaagcagtttctgttgccatggagaaagaatttgagctacttgataaggcaaaacgaaaaacccagaagagaggcataacaaataccttagaagagtcatcaagcctgaaaagaaagaggctttcagattctaaacgaaagaatacatgcggtggatttttgggggagacctgcctctcagaatcatctgatggatcttcaagtgaagatgctgaaagttcatctttaatgaatgtacaaaggagaacagctgcgaaagagccaaaaaccagtgcttcagattcgcagaactcagtgaaggaagctcccgtgaagaatggaggtgcgaccaccagcagctctagtgatagtgatgacgatggagggaaagagaagatggtcctcgtgaccgccagatctgtgtttgggaagaaaagaaggaaactaagacgtgcgaggggaagaaaaaggaaaacctaattaaaaaatatgtatcctctataattagttatgacagccatttgtaatgaatttgtcgcaaagacgtaataaaattaactggtagcacggtcaaaaaaaaaaaaaaaaaaaaaaaaaaaaaaaaaaaaaaa

SEQ ID NO: 4995 - DNA, 638 bp, Homo sapiens
  misc_feature (52)..(52): n is a, c, g, or t
gtggcgcgcgctgatagtcccagctactcgggaggctgaggctggcagagancttggggcgagaatttattctctcagagaaatggtagtgatggaccatggaaacttgtctatggtaatctgtgttagaatatattcttgaaagttctaagaatacattatatccacaagtagattatgccatcctagagactgcagctgacccttgaacaatgtgagtttgacccatgtggatccacatacacatggatttgacttttttttttttaagagatggggtcactctctgttgcccaggctggagtgcagtgtacagtcatagcacattacagcctcaaacatctgggctcaaacagtcctcccatctctgcctcctgagtatctgggactgcatccacacactaccttgtctggctacacttggagtttcttctgcatctgccactctactgccaccctaagtcgtaatccctatgttgttcaagggtcgattgtattttcctttcacagtctatttgtgtagctagtaggcaatcttccaaaaacttcaatttaggtcgttccggagtgcttttcgagttttcagttttcttctatgccagtgaaggagagggatggaggaaaaaaaaaaaaaaaaa

SEQ ID NO: 4996 - DNA, 656 bp, Homo sapiens
  misc_feature (531)..(531): n is a, c, g, or t
  misc_feature (546)..(546): n is a, c, g, or t
  misc_feature (592)..(592): n is a, c, g, or t
  misc_feature (606)..(606): n is a, c, g, or t
  misc_feature (636)..(636): n is a, c, g, or t
aatatcaaagttttctcattttttaaaaaaactaaatctctggttttattataatttatacatagcactatttcatactctatgtataaaatctcctttcttgagcatgtcttatttcccctattaaattacggggtcctagtggacagagattatgtcttacacaagatttactttgtactccaataagacctaggaaagaagctaacaaatataaccatttcctgtgcaggacacactattcaaaggagaagaaacaaaaggacacatagaggaaagtcaggggtgctgaggacaagaagttttgacttgtcaactcagccttaactcctgtccatatacccagaaacaactgctttttctctctactgaaagcctggaagtctgaatgatttatccagttctacaaaggacaacctggtcccaactcccaaggttaattcagtagcctgctatcttctttggtacttttcagtctatctgtagttttgttgtctttgggaattgcaggttccatttttaataatcctnctttcccattgctancctcaaccttcaccaaaatcatacggccggagccttaaaaaacatnattttgggccctgnactggtgcaataggcctttggtggtgaaanctgaccagtgccagataggg

SEQ ID NO: 4997 - DNA, 2476 bp, Homo sapiens
tggatttggtccaggcacgagggtggagtttgaattgggtggcggttgactgtagagccgctctctctcactggcacagcgaggttttgctcagcccttgtctcgggaccgcaggtacgtgcctggcgacttcttcgggtggtccccgtccgccctcctcgtccctacccagtttcttgcttccctgccccatctccgccgctccccgcagcctccgccgagcgccatggctcctaggaagggcagtagtcgggtggccaagaccaactccttacggaggcggaagctcgcctcctttctgaaagacttcgaccgtgaagtggaaatacgaatcaagcaaattgagtcagacaggcagaacctcctcaaggaggtggataacctctacaacatcgagatcctgcggctccccaaggctctgcgcgagatgaactggcttgactacttcgcccttggaggaaacaaacaggccctggaagaggcggcaacagctgacctggatatcaccgaaataaacaaactaacagcagaagctattcagacacccctgaaatctgccaaaacacgaaaggtaatacaggtagatgaaatgatagtggaagaggaagaagaagaagaaaatgaacgtaagaatcttcaaactgcaagagtcaaaaggtgtcctccatccaagaagagaactcagtccatacaaggaaaaggaaaagggaaaaggtcaagccgtgctaacactgttaccccagccgtgggccgattggaggtgtccatggtcaaaccaactccaggcctgacacccaggtttgactcaagggtcttcaagacccctggcctgcgtactccagcagcaggagagcggatttacaacatctcagggaatggcagccctcttgctgacagcaaagagatcttcctcactgtgccagtgggcggcggagagagcctgcgattattggccagtgacttgcagaggcacagtattgcccagctggatccagaggccttgggaaacattaagaagctctccaaccgtctcgcccaaatctgcagcagcatacggacccacaaatgagacaccaaagttgacaggatggacttttaatgggcacttctgggaccctgaagagacttcttcccttcaggcttattgtttgagtgtgaagttccagagcaaggagccatgttcctctaagggaattcaggaattcagacgtgctagtcccacaccagttaggtagagctgtctgttcaccctcccatcccagctgatcccagtcactgcttgctggggccatgccatggaagcttcccatcagtctcccagctgaatcctccctgctctctgagctgctgccttttgcctcctgcaactcaacatcctcttcaccctgccctgcctgcagttgagggggcgaagaagaaccctgtgttctcaggaagactgcctccaccaccgctacccagagaacctctgcatctggcatttctgctctctatgcttgagaccgggaggtttaggctcagataagtgagctctgggccatgagagggtaggtccagaaggtggggggaactgtacagatcagcagagcaggacagttggcagcagtgacctcagtagggaacatgtccgtctaccctctcgcactcatgacacctccccctaccagccctcctcttcctcctcctcctcctcctgtgggaggtggtcagtgggacttagggatctttcacctgctgtgcccagtagttctgaagtctgcttgtggagcagtgttttatgtttatccctgtttactgaagaccaaatactggtttggagacaacttccatgtcttgctcttctacctccctagttagtggaaatttggataagggaactgtagggcccagattctggaggttttatgtcattggccacagaataactgtctctaagctatccatggtccagtggtccctgccaagtctgtagacttcagagagcacttctctcttatggggttcatgggaacaggggcgggtgtgacttgcttggtggcctcattccatgtgtgcctgtgcctggggcatggactttgttaagcagagtcagcagtgaggtcctcattctccagccagcctctctgccctggagaatcatgtgctatgttctaagaatttgagaactagagtcctcatccccaggcttgaaggcacatggctttctcatgtagggctctctgtggtatttgttattattttgcaacaagaccattttagtaaaacagtcctgttcaagttgtattcttttaagttcttttattctcctttccctgagatttttgtatatattgttctgagtaatggtatctttgagctgattgttctaatcagagctggtacctactttcaataaattctggttttgtgttttcaaaaaaaaaaaaaaaaaaaaaaaaaaaaaacgcggaataaataacgactagtttaaaagggt

SEQ ID NO: 4998 - DNA, 3948 bp, Homo sapiens
  misc_feature (1230)..(1265): n is a, c, g, or t
gagctgccgggccgcggcgagggacgcgcggcgacagcggacggcgctgcccgggccggaacatcagtagtcggcggtcgcgcgcaggactcgagggcttctagccaccgtccccgccagcgccgcgccccgccacagggcggcatgagcccacccgcggccgcagccctagcgccctgctcctccgcctgggcggcccggctgcggtgacggctctcgctgcccgactgggggccatgaagccgagtccggccgggacggcgaaggagctggagcctccggcgccggcccgaggcgagcagcgcacggcggagcccgaggggcgctggcgggagaagggcgaggcagacaccgagcggcagcgcacccgggagcggcaggaggccacgctggccgggctggcggagctggagtacctgcgccagcgccaagagctgctggtcaggggcgccctgcgcggcgccgggggtgcgggagccgctgcgccccgcgctggggagctactgggggaggcggcgcagcgcagtcgcctggaggagaagttcttggaggagaacatcttgctgctaagaaagcaattgaactgtttgaggcgaagagatgctggtttgttgaatcagttgcaagagcttgacaagcagataagtgacctgagactggatgtagaaaagacatctgaagagcacctggagacagacagtcggcctagctcagggttttatgagctgagtgatggggcttcaggatccctttccaattcctctaactcggtgttcagtgagtgtttatccagttgtcattccagcacctgcttttgcagccccttggaggcgaccttgagtctctcagatggttgccccaaatctgcagatctcataggattgttggaatataaagaaggccactgtgaagaccaggcctcaggggcagtttgccgttccctctccacaccacaatttaattcccttgatgtcattgcagatgtgaatcccaagtaccagtgtgatctggtgtctaaaaacgggaatgatgtatatcgctatcccagtccacttcatgctgtggctgtgcagagcccaatgtttctcctttgtctgacgggcaaccctctgagggaagaggacaggcttggaaaccatgccagtgacatttgcggtggatctgagctagatgccgtcaaaacagacagttccttaccgtccccaagcagtctgtggtctgcttcccatnnnnnnnnnnnnnnnnnnnnnnnnnnnnnnnnnnnnagcctggtccagaaaaaaacacaccctgtaaggaccaacaaaccaagaaccagcgtgaacgctgaccccacgaaagggcttctgaggaacgggagcgtttgtgtcagagccccgggcggtgtctcacagggcaacagtgtgaaccttaagaattcgaaacaggcgtgtctgccctctggcgggataccttctctgaacaatgggacattctccccaccgaagcagtggtcgaaagaatcaaaggccgaacaagccgaaagcaagagggtgcccctgccagagggctgcccctcaggcgctgcctccgaccttcagagtaagcacctgccaaaaacggccaagccagcctcgcaagaacatgctcggtgttccgccattgggacaggggagtcccctaaggaaagcgctcagctctcaggggcctctccaaaagagagtcctagcagaggccctgccccgccgcaggagaacaaagttgtacagcccctgaaaaagatgtcacagaaaaacagcctgcagggcgtccccccggccactcctcccctgctgtctacagctttccccgtggaagagaggcctgccttggatttcaagagcgagggctcttcccaaagcctggaggaagcgcacctggtcaaggcccagtttatcccggggcagcagcccagtgtcaggctccaccggggccacaggaacatgggcgtcgtgaagaactccagcctgaagcaccgcggcccagccctccaggggctggagaacggcttgcccaccgtcagggagaaaacgcgggccgggagcaagaagtgtcgcttcccagatgacttggatacaaataagaaactcaagaaagcctcctccaaggggaggaagagtgggggcgggcccgaggctggtgttcccggcaggcccgcgggcgggggccacagggcggggagcagggcgcatggccacggacgggaggcggtggtggccaaacctaagcacaagcgaactgactaccggcggtggaagtcctcggccgagatttcctacgaagaggccctgaggagggcccggcgcggtcgccgggagaatgtggggctgtaccccgcgcctgtgcctctgccctacgccagcccctacgcctacgtggctagcgactccgagtactcggccgagtgcgagtccctgttccactccaccgtggtggacaccagtgaggacgagcagagcaattacaccaccaactgcttcggggacagcgagtcgagtgtgagcgagggcgagttcgtgggggagagcacaaccaccagcgactctgaagaaagcgggggcttaatttggtcccagtttgtccagactctgcccattcaaacggtaacggccccagaccttcacaaccaccccgcaaaaacctttgtcaaaattaaggcctcacataacctcaagaagaagatcctccgctttcggtctggctctttgaaactgatgacgacggtttgagtgacatcattggtgtagaaagtttgtgtgtttttttttcttctccctagttgccaaaattaaaaaggtggtgttttcatttttgtataatactttaatggaatgctttttaaaaaaatataaaaccaaggtaaattattgtttcatcttcacgtatggatgctagtgcctttaatggaaggtaaagaatgttttgctagttagaagtacatattgaggttttaatggtggtgatagtgagttttgtggcaccagctgttttttattttaaactttctgagcatccggcaaggtacaggttttgatgttcaagttttattgggataagatcttttgatcccaaggtcaggtggatggaatttttggatttatatttgttccttgagtcttcagggcagtgtctccatgagggttttcctgttgaggggcaccacatacaatagtgtgaagtaggtatgaggggcagtcattgtattctatagtttttttatgtagtctacatttctcagatgtatccccattcggttttattctcagaactgttactagactcatgacttggaggccaaaccttaaatccagagatagcagcctcgatagggaccttaaaaggattcacaaaaacttttgccacacttggtgcctaggccctgttcctaataaccccttctagggccgtttatccaacatttagatgccttcttttccctccctaatttgtagccagtccaacctttcattccttggaggatttagttttgggataaaattttggtccttgggcacagagacattcactattaatgaagtaacccttgggcatgactccaatcccagaattgctcactgagcgctatgccaccgaagcgttgacctgaacatattagtgcaatccagtccagattggacctttgatcctatgtggaagggctgttttttaagaaaaaatttttggtaaacagtattgtgtaaaattgctttttgtataccaatatatgcatgttttgtgcatgagtagtacttgtgttgatactcctgttgatgttaaattactatataatataaacagtatgtgtttttatatatcattgtgtaaatttaatataacatatgcagtaataaaccatttgttttactgctgttaagtttgttatttgggtataaaaccagatgtttacacctgtaaaaaaaaaaaaaaaaa

SEQ ID NO: 4999 - DNA, 8014 bp, Homo sapiens
gcaggagagacactgcatattgtaacataaaatattacaaatatcatttttagagcaaaggtagaagcacattttatataaatctagaagtatcctttgatacaaattaaggcataatgtaaaaatcggattctggaggaactaggtgatatgatacaagtatactccagtgaagtaataataataacatcaactaaatttactgagctcttactctgtgccagctactctgtctccaggctacctatgtgcaaattccaactcagtcacttattaactgtgtaaccttgggcaattctgtagctctctttgtaaaatgaggaaggtattaattgcattagtacccacttcctagagttactgtgagcttttaaagtatgggtctggtgtgcatgagtgtgcacgtgtgtgggcatgagagagagagagagagagagagaagattatattcttatataaatgaatcttgcctcttcctgttttctattccattcatttatctaccataagggattccactgtgatgaaaaaaaaagtatcttgtttcctcagaaagacatttagaaatatgtaaacattttgctttcatctttatatttatggtaattctaaggatattataaacttgcagtggtaattctgaagtataatatatattcagggtcacaaaacagggcggcaaggatgataactctattagcatttaaaaagcataaaaatactaataagcacaaattttcctactatagtaactgtagcctgaagttaagaataatagcatagtgattgtaattaataataatatatatttgaaaattgatgagagattaaaactcaaatgttcttatcaaaaaatgataagtatgtaacgtattggatgtgttaattagctttaattatttcacaatgtatacacatatcaaaatgtcacattgcacaccataaatatatacactttttatttgtcaattataccctaataaagcttgaggaccaggagaggaaaaataagaatatacaaaaatggaaccagcatgatagttcacgtctgtaatcccagcgctctgtgagaccgaggcagaagaatcatttagcccaggagttccagaccagcccgggcgacacagcaagatcccatacctactacacgttaaaaagttagccaggcatggcattaaaaaattagccaggcatggtggcacacttcctcctgtagtcccagcctgtcgggaggctgaagcaggaggaccactcgagcccaagagtccaaggctgcagtgaaccataactgtgccgctgcactccagcctaagcaacagagcaagatcctgtctcaaaaaaaaaaaaaggaagaatattattgaaaaatgaggtctgcaagaaatggcatatcacagtggctagaagacacagtgatacgccctcaggacgttccctctagctggagttctggacttcaacagaaccccatccagtcattttgattttgctgtttatttttttttttctttttctttttcccaccacattgtattttatttccgtacttcagaaatgggcctacagaccacaaagtggcccagccatggggcttttttcctgaagtcttggcttatcatttccctggggctctactcacaggtgtccaaactcctggcctgccctagtgtgtgccgctgcgacaggaactttgtctactgtaatgagcgaagcttgacctcagtgcctcttgggatcccggagggcgtaaccgtactctacctccacaacaaccaaattaataatgctggatttcctgcagaactgcacaatgtacagtcggtgcacacggtctacctgtatggcaaccaactggacgaattccccatgaaccttcccaagaatgtcagagttctccatttgcaggaaaacaatattcagaccatttcacgggctgctcttgcccagctcttgaagcttgaagagctgcacctggatgacaactccatatccacagtgggggtggaagacggggccttccgggaggctattagcctcaaattgttgtttttgtctaagaatcacctgagcagtgtgcctgttgggcttcctgtggacttgcaagagctgagagtggatgaaaatcgaattgctgtcatatccgacatggccttccagaatctcacgagcttggagcgtcttattgtggacgggaacctcctgaccaacaagggtatcgccgagggcaccttcagccatctcaccaagctcaaggaattttcaattgtacgtaattcgctgtcccaccctcctcccgatctcccaggtacgcatctgatcaggctctatttgcaggacaaccagataaaccacattcctttgacagccttctcaaatctgcgtaagctggaacggctggatatatccaacaaccaactgcggatgctgactcaaggggtttttgataatctctccaacctgaagcagctcactgctcggaataacccttggttttgtgactgcagtattaaatgggtcacagaatggctcaaatatatcccttcatctctcaacgtgcggggtttcatgtgccaaggtcctgaacaagtccgggggatggccgtcagggaattaaatatgaatcttttgtcctgtcccaccacgacccccggcctgcctctcttcaccccagccccaagtacagcttctccgaccactcagcctcccaccctctctattccaaaccctagcagaagctacacgcctccaactcctaccacatcgaaacttcccacgattcctgactgggatggcagagaaagagtgaccccacctatttctgaacggatccagctctctatccattttgtgaatgatacttccattcaagtcagctggctctctctcttcaccgtgatggcatacaaactcacatgggtgaaaatgggccacagtttagtagggggcatcgttcaggagcgcatagtcagcggtgagaagcaacacctgagcctggttaacttagagccccgatccacctatcggatttgtttagtgccactggatgcttttaactaccgcgcggtagaagacaccatttgttcagaggccaccacccatgcctcctatctgaacaacggcagcaacacagcgtccagccatgagcagacgacgtcccacagcatgggctccccctttctgctggcgggcttgatcgggggcgcggtgatatttgtgctggtggtcttgctcagcgtcttttgctggcatatgcacaaaaaggggcgctacacctcccagaagtggaaatacaaccggggccggcggaaagatgattattgcgaggcaggcaccaagaaggacaactccatcctggagatgacagaaaccagttttcagatcgtctccttaaataacgatcaactccttaaaggagatttcagactgcagcccatttacaccccaaatgggggcattaattacacagactgccatatccccaacaacatgcgatactgcaacagcagcgtgccagacctggagcactgccatacgtgacagccagaggcccagcgttatcaaggcggacaattagactcttgagaacacactcgtgtgtgcacataaagacacgcagattacatttgataaatgttacacagatgcatttgtgcatttgaatactctgtaatttatacggtgtactatataatgggatttaaaaaaagtgctatcttttctatttcaagttaattacaaacagttttgtaactctttgctttttaaatcttaaaaaaaaaaaagttgctgaagtactgtacagggttgtacaatgagaacccaatgccaaggcaaaaagaacgagtgatttttccttaggatacacatcaaccactttgctgttgaagctgtcagaataaattcctggtggtcagatgaaagggcagattaaatggactcatcagggtaagaggaataatatgggtaaaacaagaaatggcccgatagtttcacactattcctatacctccaggtccggaagacaggtaaaaaaattctataatgtaagaatggaggtagttaccctgatttgaccctgtgtgggaaatgctgaaagcaccaggaggaagccggttcccgtgagataagttaacccggcctgacagaatcaagaaaattgagatgagatttgaaaggacccgaaaatgcaggggttggctttctgactgggaacttaaaaatcactcttcatgcttccctggtcctatgtgataacagagttagagacttgagtctgatttcagtcatcttcagggaccagtctgatgttgtagcaagaagactccctttaaaagtgttactgttcaaatcatatatcaggttgaatcacattcaacagagatatattctagaatacttttttagaagaggctaataaagggaagaattatattgaatggaattatttttgataatgagaattatttgggtagattcactgaggctatgtcaacatgatatttagaccaacaggtgatcaatgtttggaaaatacaacaatgacttatttaaaaattacccttcctgctatttagacaaaaacaactgatcagtggttctgttatgtcagctgactttgttagtatcatgttgaaatagcttgaagtaatatcttttatccccttgcaaattcttgtcttccaatcatctcccatatattttcataattagttgtttatgacacctttgtttttctccctctgttcagtatttcaaggaaaattatggatgccagtcttggctgcacaagatatccattacgtacttatacattttaaaatgagtactaattttcactgctaataattctgtaaggacacatcaaagctggccaaaataatgaattttttttaaaaagcaatacctggtttccaccttggactgactttgatcctgttccacttttgaaattttatttgttccttttccatcgtggatgttcctctactttggcaattgtggagggctaatcaatcttatgttagcaggacaacccatgaaaaacaagtcagagagtgaaggctttttcccctaatcctggcagagcagggcgtagaaaagagaggatgtccatgcttaattctagatacttttgagacaacaccttcagaaaacacataatttaatctttgccatccttagatagagaagggctatagatcacatacgttatcaaaaactactcccttggaaaaaatatctttcgaaaatcaaatttaaacatttcactctgtgctgcatatttcttttaccattgaccattattatagggacccatgaagtaaatgtcacaatcatcttactagctctctctctctcagcaaaataaaactgtgatgtgtcttctttgtaaaagtttaggtataaaatgctatgcaactttttctttatagtaagagctttattttctttaataatatagcccaacttatatgttttaatctcccttgtccctcagaataagcagaaaatataactgcagctgtatgtcgtagacacaagaattgaaactgtgcagtcagtagagctgaacttagctatgaattaatttaaattaattctaaagtgactctggtttccattagtctattagctagagggttttggctgttgctttttttaaagttaggtccacacagtgaagggaaaagagtctgtgaaggtgatcagtgtagcagtaagacatctaaaatcaagacaatgacatgggggctttgtgtacttagctggataattcccttctactgtcctcttccccttggctgtgtagataaaattgtgcattcaaatgatggtactttgacttttgagggtttttatttctgttattcacaaaatactcattctcatttatgtatattgtatgtttaacccccagtgggatttctggctgctgaaaccactttgggccaggaagaacaaggatgaagaggttcctgtcatttcttatggggttcacagaattatttggggcttaaatggtacaatggagacagtcatgtgcaatgcttaagatggtctgacagggtcccttttgctggaggtgttcctgaagagattgaacctagtaacaggctttattttcaccttgtgtacaacatggcaaagactgctaagattaaaatccgtctcccatttgttacagcctcacctgcaccaggatagaaagcacgtgatggaatctgtgatgtctaatgtgtcttatgaaaattgccaaacaactgtccctggggattctgctttgattggcatttttagtcatgggaatgtatatttgctgatatatctgctctgtgtttgggcctctcttgctgtcattatgatgtattttgagatgattagtcaagagtcaaggttgcgagtacaggccaagaccatgggaaaaaagccatgctcactggccaataaagagcttgatgctgcctggccaaatgaggtgactcagatagaatctgatcccattcagagcttggtaaatgtcactgtacagaagacattgaaaaggaagaggcatagtcatgatcaaaaggatatattgacagttatctatagccagggtagttgttaatacctgcttgtttggggagatatgtttgattatagagagactctgggccaccctcaaacaccgtcagatgcattagcagcccactgcatgggacaatcgcaggcagatacgaggaatgtatcccctgcctattttccttgtgtaacaaatggaaaacattctcccctgtgagaaataatgcaatttctaattatctggatgttcgttgaaaatatattagacattctccctgaggttaaaaacaaaaagtacgtgaccagtctggtaagaagtattaatgaagtagctaatattacagcttcattttctactagcacctatcataatggtcttagtcatttcacacaaatcagaacttccttccccaccagggaggacaacatcttcatgctgtgattgaagcatccattcagaacacgaggcaatattgcagtccacagggaatggatgcttcacttgatctccggaccttggctgcagaggccatcgcagcttttgaaaagtgaaggggttaattcccattggtgtctttgcttatagcatttttctctaacctataacaaggagacattacattttactttagaacatgagaatagcagttttgctcatgacttaccattccagctgcatgggaaagcaaagcagaaaacagtgccccaaatggaaaaaagatactcacacagaacaaaacagttcttggtcttgttcttggtcttgtcaaaccttgcctgatgctctttctaaagtcaaaatatgaatgctaagaaggcataacctacatccttctctgatttcttcagcagggtcaaaagacagttactagcaatggggaatgcttgtcactgtggagaaagagttttgtatatgtctgataccgttgttataacaaaacaaatttttttactatagttttttgttttctacctgcacacccaccagaagagcacaaagcaaggccattgcaacaggcatttaaaaattattatcaaacatgcacatgcttgtacacacacacacacacacacacaaacaggggcatttgtaaaggtgtccctggaatgtaagatttataatgtttaaggcaaggtgaaggcattgccaagtgtgtgtcgctcataggactagtgtatattcactgaaagttaacctgatgatttgttattgtttgaaccatatgctgatttgcttctggtttctgtttagtgtgttctctctgataaggggctgaaagattctgcatcacacatcctctgagacctaccatgtcgcacactttgttaatgacaaacttcactctacactatacagtaccttgttgatatattcagtaaagtcttattttaaaagaaaaaaaaaaaaaaaaaaaaaacaaaatatcggccgctccaacatcagaatggtaac

SEQ ID NO: 5000 - DNA, 1904 bp, Homo sapiens
tggagagactacaactcccagtatgcaccgcgatgcgcgcctcaccctgcatctcccagcccgcagccagctggcatcctagaccctctgccctgcgaccaacagccgggagcggaccagacaccagaactcccggaacggttgaagacggttccgctccctgtcccgcctttcgcagcccagcagtttcgccctgcggagaggagccttgctgtttccaaatctctcctgctgaagagacattggagctagggcggctagtttcacctggtaattgtgacaccctgtctcctcgagctgcaggcttttatgcttgtcatgttcgaagtttgataccttgcagatcaacaaagggccggtggcctctcactgcctccgcggcagggttgtcaagacatgcgcagtgcggcccgtccctagggctgggttaagggccgcggacgtggcagttctcaggcctcttgggatcgcctcaagaagccccctcacgagtgtctcgatttcctgtcagccaacaaagggccgttcgcctttcatggcctccacagcagcgttgccgtggctgtcacaaatcctctgcaccccaggagcgccgcttggacccccgggctcgctgcgtggtccatatctaggtcgggcctctcacggagactttcccaccagtgtaataaagaggagaaaacgtcacagcggaagggcctgaccctgctgcatccactaaggaaacagctacggggatgggaccctgggagctgctgtggagcctcatccaccgcttctctgaccccacccaggctgcttcccaggcctcagggtcttagtgtggacctccgggccgtgattaatgcagtttttcaggttaagtactgcacgactactcgcttctgaaactgatagacactgcctcagctccgtgcagggcagacgcacaagagcagaatctccgtgggacatctctctggagcatcaatattactgcagtatttggaagaaacaaatttaaataagttctaaggtgaagaatggaacatttaagacaagtctggaaagtcatctgcctttaataactgtcgtttgtccttaacgtcagactttctccaagaccaaaactctaagaacttatttccattcttacaaatagtaaaaatgataaatcatatcaagtcaattgaaagtcctgcctgctgctttcctaaattgcaatatggccttggtatggttttatttgtactttggtgggggattcgtggatctttagattaaaaaaaaaaataggtttttgaacaatttttgcaagtttgcagctgttagttattgatttatttttgcaacccatctaattcttctgtctctctcctctcctcaggctcaataattccatgggtctctaaggctgtgtttattttctttaaattttgttgatttacttttatactccatttgattttttctatctctcaccttttctcagactcagtcatcccacaggtctgtaaggctctgttcattttctttaaacttttttttttcctctcctcagattggataaattatattgctatgtctctgtttctgaactatagaaaagctcaaaattactatttttatttctcattttttatatggctattttttctctgctgatgtttcacatctattcatttatgagaatattttcctttgccctcatgagcgtgtttataatagctgccttcaaattcttgtctgccgtttacatcttggacatcttggagatggctactgcctgctttttatcttgtgtatttattacattttcacgtgtcttcacgcatctcttgaattggaaattgtgccctggagactgtatacaagactggattaaaaagactggattctgaaaaaaaaaaaaaaaaaaaaaaaaa

SEQ ID NO: 5001 - DNA, 854 bp, Homo sapiens
taaagcttgaacacaggaacactacaactgccagatgctgaggagaatcaggaaagcaatgagctagactctttttttagtcaattaagtgggttgttttagatgtatagagtattgatatgagttaacactttttagtagatggcaaagtgggcttgatgttcaaaagtaatgttcgagttagggttcatggtccctttctcagtaattttttcttaataaaagtaaacactggttcaaagacaaatagcaagtattccctcctgtgctatttatagagggctcaattcgtagaaaggcataccctccaatgcaattctgtggctgtcccttacagtggtttcagaatcacgaaaaaacagctagtaaataggatagaaacaataaaagaaagagtttagaagttccctgtgagcaatctgtgtgtcttcagcgagcttgaaccaaagtcttcatatcctgacccactgaattataagcaattgctacttgcccatcttgccaaagtagtccaaacacacttcaatgaggacagttatatttagcaggtcctcacccctgcaagagacagcatatcctcactattattattcatgtgttattggcaaaaacatagcttgcatctttccagaggcagagtttccaaagaaagggttttctttgagacataggcaattgcttacgtcataacagggtcataacctggcctccgggaacggactactttggcagtaatggtggacttcaaaaaagcgtgcggtataactagactgggtcacatgccacccttaatttgcggtacaccatgtcggggtccaacaagttgccccaccatttaccactattctcgtcgt

SEQ ID NO: 5002 - DNA, 1204 bp, Homo sapiens
  misc_feature (1150)..(1150): n is a, c, g, or t
  misc_feature (1162)..(1163): n is a, c, g, or t
  misc_feature (1198)..(1198): n is a, c, g, or t
tcttcggggacctgtttggacactgtagtgtttacgtggggcgggggctccagagaggggtgtagaaagattttcagagcgctgggtgcgccgaaagagttttgttgttgtgtgtgtgatattttttttttttacatcaaaaaccatactttattttatgtatagcaatacaatttacatattaaataacactataatagaatgatttgatatagtttaaacagaagaaaaagggaaaaatttcaggttacaaaacccctccccctgaacaaatttaaaaaaaaaaaaaaagcacactttttccaaatgggtcaatgtgacgaatgttttcagtgactaattatgtctaattcctattgcacaaatggtcaatggaattaaaaagaaaacccaactttcacaatcactgcctcaaagaaataacacatgttggattcttttggaatgtaaagatggtttttgctacttcaatacacagaaagttgaattcacatatccaccacaaaaaggaaaaaaaactatgacggagttgaaactagaaaaaaattagctttatatgaaaatataaaattctatgattatataccatagatacaaagttcccagaagatgcttacccaagcaacaaaatatttacagttttaatgatttttagctatttcaaaatggagtgaaagaaacatgagtcaatgtgaagccagaattctttagaaacaatggctgcttgctagtttcaaatgtcctaacaaaaaaggagtcactaccccaaatgttggagagttgcgacattttataaaatcgactttctccttttctggagatgtttatttcttaaaactcaagatatttttcttgaaattaattatcctctgtagaaaatgcttccctttgcaaatatttaacaaaaatactaaaaacagtttaacagctaagacaaagtagaggccaaatatcattattacaattccttcctatttgtagcatgccttcttctttctagagataagtaaagccagtattgtatgttaaatgacaactaagggaaagcgcaaagggttaagtgaaattacatctgttaaaaaaaaaaaaaaagcaggcattttcccttcatataaaaattcactggcaccatttgaacataaactttagnacataggagttnnaaatgcatttccagtataaccactaaaatcttaanacaaac

SEQ ID NO: 5003 - DNA, 5425 bp, Homo sapiens
  misc_feature (86)..(87): n is a, c, g, or t
cctgttggaggcgcgggcggctgcactgttggtacctgcggtacgtagcctggctttgctctgacggcgatctcgcggccgagagnngcgggcggtgccactgtcttggtacctgcggtagtagcctggctttgctctgacggcgatctcgcggcccgagagccttttataggttgcttttcccggggatgtgaaggatacagaaatgactgtgaatcaacccatatcatcaaggagctgataatctagtggaagagttagacgtgtgcatacttcactatgatatgaggcagtctctgagcttatattctctgtggaagatgtgacatatccaggcggaacatcatgatgcagggaaacacatgtcacagaatgtcgttccacccgggacgagggtgtccccgaggacgaggaggacatggagccagaccctcagcaccatcctttaggccccaaaatctgaggctgcttcaccctcagcagcctcctgtgcaatatcaatatgaacctccaagtgccccttccaccactttctcaaactctccagcccccaattttctccctccacgaccagactttgtacccttccccccacccatgcctccgtcagcgcaaggccctcttcccccctgcccaatcaggccgcctttccccaaccaccagatgaggcaccccttcccagttcctccttgttttcctcccatgccaccaccaatgccttgtcctaataaccccccagtccctggggcacctcctggacaaggcactttccccttcatgatgccccctccctccatgcctcatcccccgccccctccagtcatgccgcagcaggttaattatcagtaccctccgggctattctcaccacaacttcccacctcccagttttaatagtttccagaacaaccctagttctttcctgcccagtgctaataacagcagtagtcctcatttcagacatctccctccatacccactcccaaaggctcccagtgagagaaggtccccagaaaggctgaaacactatgatgaccacaggcaccgagatcacagtcatgggcgaggtgagaggcatcggtccctggatcggcgggagcgaggccgcagtcccgacaggagaagacaagacagccggtacagatctgattatgaccgagggagaacaccatctcgccaccgcagctacgaacggagcagagagcgagaacgggagagacacaggcatcgagacaaccgaagatcaccatctctggaaaggtcctacaaaaaagagtataagagatctggaaggagttacggtttatcggttgttcctgaacctgctggatgcacaccagaattacctggggagattattaaaaatacagattcttgggccccacccctggagattgtgaatcatcgctccccaagtagggagaagaagagagctcgttgggaggaagaaaaagaccgttggagtgacaaccagagttctggcaaagacaagaactatacctcaatcaaggaaaaagagcccgaggagaccatgcctgacaagaatgaggaggaagaagaagaacttcttaagcctgtgtggattcgatgcactcattcagaaaactactactccagtgaccccatggatcaggtgggagattctacagtggttggaacgagtaggcttcgtgacttatatgacaaatttgaggaggagttggggagcaggcaagaaaaggccaaagctgctcggcctccgtgggaacctccaaagacgaagctcgatgaagatttagagagttccagtgaatccgagtgtgagtctgatgaggacagcacctgttctagcagctcagactctgaagtttttgacgttattgcagaaatcaaacgcaaaaaggcccaccctgacggcttcaaaggaactttggtacaacgatccaggccagatgaatgatggaccactctgcaaatgcagcgcaaaggcaagacgcacaggaattaggcacagcatttatcctggagaagaggccatcaagccctgtcgtcctatgaccaacaatgctggcagacttttccactaccggatcacagtctccccgcctacgaactttttaactgacaggccaactgttatagaatacgatgatcacgagtatatctttgaaggattttctatgtttgcacatgcccccctgaccaatattccactgtgtaaagtaattagattcaacatagactacacgattcatttcattgaagagatgatgccggagaatttttgtgtgaaagggcttgaactcttttcactgttcctattcagagatattttggaattatatgactggaatcttaaaggtcctttgtttgaagacagccctccctgctgcccaagatttcatttcatgccacgttttgtaagatttcttccagatggaggaaaggaagtgctgtccatgcaccagattctcctgtacttgttaaggtgcagcaaagccctggtgcctgaggaggagattgccaatatgcttcagtgggaggagctggagtggcagaaatatgcagaagaatgcaaaggcatgattgttaccaaccctgggacgaaaccaagctctgtccgtatcgatcaactggatcgtgaacagttcaaccccgatgtgattacttttccgattatcgtccactttgggatacgccctgcacagttgagttatgcaggagacccacagtaccaaaaactgtggaagagttatgtgaaacttcgccacctcctagcaaatagtcccaaagtcaaacaaactgacaaacagaagctggcacagagggaggaagccctccaaaaaatacggcagaagaatacaatgagacgagaagtaacggtggagctaagtagccaaggattctggaaaactggcatccgttctgatgtctgtcagcatgcaatgatgctacctgttctgacccatcatatccgctaccaccaatgcctaatgcatttggacaagttgataggatatactttccaagatcgttgtctgttgcagctggccatgactcatccaagtcatcatttaaattttggaatgaatcctgatcatgccaggaattcattatctaactgtggaattcggcagcccaaatacggagacagaaaagttcatcacatgcacatgcggaagaaagggattaacaccttgataaatatcatgtcacgccttggccaagatgacccaactccctcgaggattaaccacaatgaacggttggaattcctgggtgatgctgttgttgaatttctgaccagcgtccatttgtactatttgtttcctagtctggaagaaggaggattagcaacctatcggactgccattgttcagaatcagcaccttgccatgctagcaaagaaacttgaactggatcgatttatgctgtatgctcacgggcctgacctttgtagagaatcggaccttcgacatgcaatggccaattgttttgaagcgttaataggagctgtttacttggagggaagcctggaggaagccaagcagttatttggacgcttgctctttaatgatccggacctgcgcgaagtctggctcaattatcctctccacccactccaactacaagagccaaatactgatcgacaacttattgaaacttctccagttctacaaaaacttactgagtttgaagaagcaattggagtaatttttactcatgttcgacttctggcaagggcattcacattgagaactgtgggatttaaccatctgaccctaggccacaatcagagaatggaattcctaggtgactccataatgcaactggtagccacagagtacttattcattcatttcccagatcatcatgaaggacacttaactttgttgcgaagctctttggtgaataatagaactcaggccaaggtagcggaggagctgggcatgcaggagtacgccataaccaacgacaagaccaagaggcctgtggcgcttcgcaccaagaccttggcggaccttttggaatcatttattgcagcgctgtacattgataaggatttggaatatgttcatactttcatgaatgtctgcttctttccacgattgaaagagttcattttgaatcaggattggaatgaccccaaatcccagcttcagcagtgttgcttgacacttaggacagaaggaaaagagccagacattcctctgtacaagactctgcagacagtgggcccatcccatgcccgaacctacactgtggctgtttatttcaagggagaaagaataggctgtgggaaaggaccaagtattcagcaagcggaaatgggagcagcaatggatgcgcttgaaaaatataattttccccagatggcccatcagaagcggttcatcgaacggaagtacagacaagagttaaaagaaatgaggtgggaaagagagcatcaagagagagagccagatgagactgaagacatcaagaaataaaggagggcatgcaagtgtggagtatttacttgctcagtaactgtgactgttgtctattgagacctagcctagttttcctgcagacaatgaacgaagtgtgctcattgaaataaaatacagagtcaaatcgctattgttgttttaatgatctgtttttagctggatggtctttattacaaagtattagatttttcttctatttaacggaaaacttgactttggtgaatgtgcattacttccttttattttgctctttaaataataaaattcaagaagcatattctatgtggaatagatcctgtttttccatctgtgtcccagattgtgaccctagactttcaattgacaagtaaaaaattgactttactagtaaaaaaaaaaaaaaaaaaaaaaacatctatcctttttcaaatctctggatttttaagtagattgttcagctttcatccggtggctgttcatcaagttatcagctgcaaatattgaacttacctctctctaagcagtgagtgttttgtagaaggaatccgtttaacgattaattggctaatgggagaaggggaaagactgatattcaagtcatacagattctttgaatcattagaataggagagaaatcatgattctaagccaggccacactttaaaccaagtgctctcaccctggggttagtggaacctttaagaagttaatgaacagacttcaaggaagtcaaaaacctcccaatactatattcaattttctgtgtgtgtttgagatttgagagggcatggggagcaggaaggaggagggtttatagcttttatcagcctctctaagtgggccctgcagtaaaaggctaacatgacattcaaagacataacattttaaaaaaagttattccaaactaaacatcactggtttcttattaataaaggcaaaacttctttgtaaaacaaaaaaaaaaaaaaaaaaaaa

SEQ ID NO: 5004 - DNA, 870 bp, Homo sapiens
  misc_feature (753)..(784): n is a, c, g, or t
tttttttttttttttttacagagaatcactttgctttatcaagtgttgagtcaaagtgttaagtaaaagttgacatgcctgcaacttatttttaaatagcaaatcataatcatcccacactgtctaaagcactaaacttaacatataaatcatatacccttactagaaagagctagctagaaaaatgtaaataataaaattaaaattgctaaactccctcattatgtatttataattagcagccaaattattaactctgttttcagaatttctgaaataggttgttgatattaaggaagccattcaacaaaaacctcaacaagtatagtcttaaaatcaaatcagcgaaataatcttttaaatgtttagctattcattagcatttgcattaaatttcagcagcagtggttgcttttagctttttgggatgttatttttctgcacaaacatactgcaaagaacacacttgaaaaaaataaaagttattcattttcatgctttacacatgactttgcaattgcactaatcagattttatttctcaaatagtagtcatggatcctagcaagtacttcttcatttatatggttgctctcctgtccatattctttgctcatatttactgtgtcatttgccttcaggtaccacagttacctggacatatgcccatttgcctagtttgacacagctacttaagggtaagcatcccgatctgtggaaaagtataaaaacaaaatcagggatctcagaatcnnnnnnnnnnnnnnnnnnnnnnnnnnnnnnnntaagtgaaaaacaaggaaggaaattctctgaaagataatgtcatgtattcagggatgggctttccactgggaatacggtgccacgt

SEQ ID NO: 5005 - DNA, 2857 bp, Homo sapiens
  misc_feature (2310)..(2310): n is a, c, g, or t
agcgggacgtttcctcattgggcggaaggttcgctggcactccgttggcacttccagctggtgggagttgacgacgtggtgctgggcgttgggaccctactttatctagttcgggaagttgggttgtggggtcatacctgtctgtctgctcccagctttcttgggtttcttccgacggcgtggggcctcgctaaggaattcccggcccctcagggccacggctttagcggtgtcttttgcgagttcttcgtaagtacatcttaaagctgtcaagatggttctagcagaccttggaagaaaaataacatcagcattacgctcgttgagcaatgccaccattatcaatgaagaggtattgaatgctatgctaaaagaagtctgtaccgctttgttggaagcagatgttaatattaaactagtgaagcaactaagagaaaatgttaagtctgctattgatcttgaagagatggcatctggtcttaacaaaagaaaaatgattcagcatgctgtatttaaagaacttgtgaagcttgtagaccctggagttaaggcatggacacccactaaaggaaaacaaaatgtgattatgtttgttggattgcaagggagtggtaaaacaacaacatgttcaaagctagcatattattaccagaggaaaggttggaagacctgtttaatatgtgcagacacattcagagcaggggcttttgaccaactaaaacagaatgctaccaaagcaagaattccattttatggaagctatacagaaatggatcctgtcatcattgcttctgaaggagtagagaaatttaaaaatgaaaattttgaaattattattgttgatacaagtggccgccacaaacaagaagactctttgtttgaagaaatgcttcaagttgctaatgctatacaacctgataacattgtttatgtgatggatgcctccattgggcaggcttgtgaagcccaggctaaggcttttaaagataaagtagatgtagcctcagtaatagtgacaaaacttgatggccatgcaaaaggaggtggtgcactcagtgcagtcgctgccacaaaaagtccgattattttcattggtacaggggaacatatagatgactttgaacctttcaaaacacagccttttattagcaaacttcttggtatgggcgacattgaaggactgatagataaagtcaacgagttgaagttggatgacaatgaagcacttatagagaagttgaaacatggtcagtttacgttgcgagacatgtatgagcaatttcaaaatatcatgaaaatgggccccttcagtcagatcttggggatgatccctggttttgggacagattttatgagcaaaggaaatgaacaggagtcaatggcaaggctaaagaaattaatgacaataatggatagtatgaatgatcaagaactagacagtacggatggtgccaaagtttttagtaaacaaccaggaagaatccaaagagtagcaagaggatcgggtgtatcaacaagagatgttcaagaacttttgacacaatataccaagtttgcacagatggtaaaaaagatgggaggtatcaaaggacttttcaaaggtggcgacatgtctaagaatgtgagccagtcacagatggcaaaattgaaccaacaaatggccaaaatgatggatcctagggttcttcatcacatgggtggtatggcaggacttcagtcaatgatgaggcagtttcaacagggtgctgctggcaacatgaaaggcatgatgggattcaataatatgtaaagaaaatgccttaatataaactgactcagttgaatacctaatttgctgagacctcagcgtttcccttctttttgcgaattggggggaaagtgtatttttcttgcttatcatgcactctttccttttcttctcgcccgcttttcccctccttttctttttccttccttctttcctccctttaatataagggagaaatacatggtttttgtggaaatcattatatgtttgctttagattttcttctgttttcaccatcataacacttaagttaaatcatgatgtaaaattttagtacttaaaggtttttaattatctcgaaggccaagcattgcatttgtaaacagtcctggtcagtagttaaataatgtttcaattaaagtgctgtaaaataaacttcaaagtggttataagttaaaaaaaaaaaaaaaaaaaaaaaaaaaaaaaaaaaaaaaaaaaacaaacaaaaaaaaaaaaaaaaaaaaaaaaaaaaaaaacaacaacacaaaacaacacacaaaaanccgggggggcgcccccctaaaaaataccccccgggggggggcgcacattttccgcccccacccccttttttttttaaacaagggaggccctctatagggggggcccctttttaaaaactagggggcgcggggcgcgctttttttataaaacccccgggggaggggggaaaaacggcccgccgtggggggtttctttggggaaggaaaccctttctttttgtgggggggggggggactctttggcgcacaactctcccctctagaagagtgtttaagagcccccccgggcgacaaaatcaacaaaaccttttttaaagcgcgcaaaaaagtggtgtcggcaccctacgccgcgcaaaaatccctcctggccgccctcaacaaaaaaactttcccgtcactcctcgcacgctaaaattcttccttggaacacatctttcttctgccctcgcggccgcgcgatggggtgtctccccttatgtgcggccggcgccgcgtctctcttataaaagaacccgccctcccgtcgcctgagcggtcttatttcttc

SEQ ID NO: 5006 - DNA, 5876 bp, Homo sapiens
cgcactcgtccccagcccgcccgggagctgcgagccgcgagctggattatggtggcctgagcagccaacgcagccgcaggagcccggagcccttgcccctgcccgcgccgccgcccgccggggggaccagggaagccgccaccggcccgccatgcccgcccctcccagccccgccgggagcccgcgcccgctgcccaggctggccgccgccgtgccgatgtagcgggctccggatcccagcctctcccctgctcccgtgctctgcggatctcccctgaccgctctccacagcccggacccgggggctggcccagggccctgcaggccctggcgtcctgatgcccccaagctccctctcctgagaagccaccagcaccacccagacttgggggcaggcgccagggacggacgtgggccagtgcgagcccagagggcccgaaggccggggcccaccatggcccaagccctgccctggctcctgctgtggatgggcgcgggagtgctgcctgcccacggcacccagcacggcatccggctgcccctgcgcagcggcctggggggcgcccccctggggctgcggctgccccgggagaccgacgaagagcccgaggagcccggccggaggggcagctttgtggagatggtggacaacctgaggggcaagtcggggcagggctactacgtggagatgaccgtgggcagccccccgcagacgctcaacatcctggtggatacaggcagcagtaactttgcagtgggtgctgccccccaccccttcctgcatcgctactaccagaggcagctgtccagcacataccgggacctccggaagggtgtgtatgtgccctacacccagggcaagtgggaaggggagctgggcaccgacctggtaagcatcccccatggccccaacgtcactgtgcgtgccaacattgctgccatcactgaatcagacaagttcttcatcaacggctccaactgggaaggcatcctggggctggcctatgctgagattgccaggcctgacgactccctggagcctttctttgactctctggtaaagcagacccacgttcccaacctcttctccctgcagctttgtggtgctggcttccccctcaaccagtctgaagtgctggcctctgtcggagggagcatgatcattggaggtatcgaccactcgctgtacacaggcagtctctggtatacacccatccggcgggagtggtattatgaggtgatcattgtgcgggtggagatcaatggacaggatctgaaaatggactgcaaggagtacaactatgacaagagcattgtggacagtggcaccaccaaccttcgtttgcccaagaaagtgtttgaagctgcagtcaaatccatcaaggcagcctcctccacggagaagttccctgatggtttctggctaggagagcagctggtgtgctggcaagcaggcaccaccccttggaacattttcccagtcatctcactctacctaatgggtgaggttaccaaccagtccttccgcatcaccatccttccgcagcaatacctgcggccagtggaagatgtggccacgtcccaagacgactgttacaagtttgccatctcacagtcatccacgggcactgttatgggagctgttatcatggagggcttctacgttgtctttgatcgggcccgaaaacgaattggctttgctgtcagcgcttgccatgtgcacgatgagttcaggacggcagcggtggaaggcccttttgtcaccttggacatggaagactgtggctacaacattccacagacagatgagtcaaccctcatgaccatagcctatgtcatggctgccatctgcgccctcttcatgctgccactctgcctcatggtgtgtcagtggcgctgcctccgctgcctgcgccagcagcatgatgactttgctgatgacatctccctgctgaagtgaggaggcccatgggcagaagatagagattcccctggaccacacctccgtggttcactttggtcacaagtaggagacacagatggcacctgtggccagagcacctcaggaccctccccacccaccaaatgcctctgccttgatggagaaggaaaaggctggcaaggtgggttccagggactgtacctgtaggaaacagaaaagagaagaaagaagcactctgctggcgggaatactcttggtcacctcaaatttaagtcgggaaattctgctgcttgaaacttcagccctgaacctttgtccaccattcctttaaattctccaacccaaagtattcttcttttcttagtttcagaagtactggcatcacacgcaggttaccttggcgtgtgtccctgtggtaccctggcagagaagagaccaagcttgtttccctgctggccaaagtcagtaggagaggatgcacagtttgctatttgctttagagacagggactgtataaacaagcctaacattggtgcaaagattgcctcttgaattaaaaaaaaaaaaaattgactatttatacaaatgggggcggctggaaagaggagaaggagagggagtacaaagacagggaatagtgggatcaaagctaggaaaggcagaaacacaaccactcaccagtcctagttttagacctcatctccaagatagcatcccatctcagaagatgggtgttgttttcaatgttttcttttctgtggttgcagcctgaccaaaagtgagatgggaagggcttatctagccaaagagctcttttttagctctcttaaatgaagtgcccactaagaagttccacttaacacatgaatttctgccatattaatttcattgtctctatctgaaccaccctttattctacatatgataggcagcactgaaatatcctaaccccctaagctccaggtgccctgtgggagagcaactggactatagcagggctgggctctgtcttcctggtcataggctcactctttcccccaaatcttcctctggagctttgcagccaaggtgctaaaaggaataggtaggagacctcttctatctaatccttaaaagcataatgttgaacattcattcaacagctgatgccctataacccctgcctggatttcttcctattaggctataagaagtagcaagatctttacataattcagagtggtttcattgccttcctaccctctctaatggcccctccatttatttgactaaagcatcacacagtggcactagcattataccaagagtatgagaaatacagtgctttatggctctaacattactgccttcagtatcaaggctgcctggagaaaggatggcagcctcagggcttccttatgtcctccaccacaagagctccttgatgaaggtcatctttttcccctatcctgttcttcccctccccgctcctaatggtacgtgggtacccaggctggttcttgggctaggtagtggggaccaagttcattacctccctatcagttctagcatagtaaactacggtaccagtgttagtgggaagagctgggttttcctagtatacccactgcatcctactcctacctggtcaacccgctgcttccaggtatgggacctgctaagtgtggaattacctgataagggagagggaaatacaaggagggcctctggtgttcctggcctcagccagctgcccacaagccataaaccaataaaacaagaatactgagtcagttttttatctgggttctcttcattcccactgcacttggtgctgctttggctgactgggaacaccccataactacagagtctgacaggaagactggagactgtccacttctagctcggaacttactgtgtaaataaactttcagaactgctaccatgaagtgaaaatgccacattttgctttataatttctacccatgttgggaaaaactggctttttcccagccctttccagggcataaaactcaaccccttcgatagcaagtcccatcagcctattatttttttaaagaaaacttgcacttgtttttctttttacagttacttccttcctgccccaaaattataaactctaagtgtaaaaaaaagtcttaacaacagcttcttgcttgtaaaaatatgtattatacatctgtatttttaaattctgctcctgaaaaatgactgtcccattctccactcactgcatttggggcctttcccattggtctgcatgtcttttatcattgcaggccagtggacagagggagaagggagaacaggggtcgccaacacttgtgttgctttctgactgatcctgaacaagaaagagtaacactgaggcgctcgctcccatgcacaactctccaaaacacttatcctcctgcaagagtgggctttccagggtctttactgggaagcagttaagccccctcctcaccccttccttttttctttctttactcctttggcttcaaaggattttggaaaagaaacaatatgctttacactcattttcaatttctaaatttgcaggggatactgaaaaatacggcaggtggcctaaggctgctgtaaagttgaggggagaggaaatcttaagattacaagataaaaaacgaatcccctaaacaaaaagaacaatagaactggtcttccattttgccacctttcctgttcatgacagctactaacctggagacagtaacatttcattaaccaaagaaagtgggtcacctgacctctgaagagctgagtactcaggccactccaatcaccctacaagatgccaaggaggtcccaggaagtccagctccttaaactgacgctagtcaataaacctgggcaagtgaggcaagagaaatgaggaagaatccatctgtgaggtgacaggcaaggatgaaagacaaagaaggaaaagagtatcaaaggcagaaaggagatcatttagttgggtctgaaaggaaaagtctttgctatccgacatgtactgctagtacctgtaagcattttaggtcccagaatggaaaaaaaaatcagctattggtaatataataatgtcctttccctggagtcagtttttttaaaaagttaactcttagtttttacttgtttaattctaaaagagaagggagctgaggccattccctgtaggagtaaagataaaaggataggaaaagattcaaagctctaatagagtcacagctttcccaggtataaaacctaaaattaagaagtacaataagcagaggtggaaaatgatctagttcctgatagctacccacagagcaagtgatttataaatttgaaatccaaactactttcttaatatcactttggtctccatttttcccaggacaggaaatatgtccccccctaactttcttgcttcaaaaattaaaatccagcatcccaagatcattctacaagtaattttgcacagacatctcctcaccccagtgcctgtctggagctcacccaaggtcaccaaacaacttggttgtgaaccaactgccttaaccttctgggggagggggattagctagactaggagaccagaagtgaatgggaaagggtgaggacttcacaatgttggcctgtcagagcttgattagaagccaagacagtggcagcaaaggaagacttggcccaggaaaaacctgtgggttgtgctaatttctgtccagaaaatagggtggacagaagcttgtggggtgcatggaggaattgggacctggttatgttgttattctcggactgtgaattttggtgatgtaaaacagaatattctgtaaacctaatgtctgtataaataatgagcgttaacacagtaaaatattcaataagaagtcaaaaaaaaaaaaaaaaaaaaaaaaaaaaaaaaaaaaaaaaaaaaaaaaaaaaa

SEQ ID NO: 5007 - DNA, 2133 bp, Homo sapiens
  misc_feature (228)..(264): n is a, c, g, or t
agcggacgatgcaccgcgccagccccgaccgacggacgagactgacccggacttaggcgttccgcctggcccggcggcgaggaaaaaaggcagttttgaagcatttagtggcaaaaggggtaggagacggctgctgaagtgtctactacattcaggggacctggaaggcttccagatatccgcaatgaacaatgaaaagaaattgtgaaagaaggcgcttccctcaannnnnnnnnnnnnnnnnnnnnnnnnnnnnnnnnnnnncgcgccaaaggcacacgataaaggaaaacgcgggcttatcgtggccttaaaaatccggcttggtgagcttgggtcgcctctgaaggagaaccattttccatctctttcatagttttttcccccagtcagcgtggtagcggtattctccgcggcagtgacagtaattgtttttgtctctttagccaagacttccgccctcgatcaagatggtggttggacggccttcctaacctttacggggcctggcggtgctgacgcctgagctggtaggggtggagcaggtaggaaacagcaaatgcagaagctgctgcgcgggagtcggccatggactggaaagaagttcttcgtcggcgcctagcgacgcccaacacctgtccaaacaaaaaaaaaagtgaacaagaattaaaagatgaagaaatggatttatttacaaaatattactccgaatggaaaggaggtagaaaaaacacaaatgaattctataagaccattccccggttttattataggctgcctgctgaagatgaagtcttactacagaaattaagagaggaatcaagagctgtctttctacaaagaaaaagcagagaactgttagataatgaagaattacagaacttatggtttttgctggacaaacaccagacaccacctatgattggagaggaagcgatgatcaattacgaaaactttttgaaggtgggtgacaaggctggagcaaagtgcaagcaatgttcacagcaaaaagtctttgctaaactccttcatacagattcatatggaagaatttccatcatgcagttctttaattatgtcatgagaaaagtttggcttcatcaaacaagaataggactcagtttatatgatgtcgctgggcaggggtaccttcgggaatctgatttagaaaactacatattggaacttatccctacgttgccacaattagatggtctggaaaaatctttctactccttttatgtttgtacagcagttaggaagttcttcttctttttagatcctttaagaacaggaaagataaaaattcaagatattttagcatgcagcttcctagatgatttattggagctaagggatgaggaactgtccaaggagagtcaagaaacaaattggttttctgctccttctgccctaagagtttatggccagtacttgaatcttgataaagatcacaatggcatgctcagtaaagaagaactctcacgctatggaacagctaccatgaccaatgtcttcttagaccgtgttttccaggagtgtctcacttatgatggagaaatggactataagacctacttggactttgtccttgcattagaaaacagaaaggaacctgcagctctacaatatattttcaaactgcttgatattgagaacaaaggatacctgaatgtcttttcacttaattatttctttagggccatacaggaactaatgaaaatccatggacaagatcctgtttcatttcaagatgtcaaggatgaaatctttgacatggtaaaaccaaaggatcctttgaaaatctctcttcaggatttaatcaacagtaatcaaggagacacagtaaccaccattctaatcgatttgaatggcttctggacttacgagaacagagaggctcttgttgcaaatgacagtgaaaactctgcagaccttgatgatacatgatctctgaaagactagactgtcttatattatgagatacttgaatgctgcatgtaaagcctttaaagcaaaatcctcagaaatggtctaaataaaacacttgatatgcctagaaaaaaaaaaaaaaaaaaaaaaaaaaaaaaaaagggcggccgctctaaaggattccctcaggggccccaacct

SEQ ID NO: 5008 - DNA, 3135 bp, Homo sapiens
  misc_feature (889)..(936): n is a, c, g, or t
gatctgagcgccggccgcggtgcccaggcactcccttggcgggccggatggcggaccccggcccagatcccgaatctgagtcggaatcggtgttcccgcgggaggtcgggctctttgcagactcttactcggagaagagccagttctgtttctgtgggcatgtgctgaccatcacgcagaactttgggtcccgcctcggggtggcggcgcgcgtgtgggacgcggccctgagcctgtgcaattatttcgagagtcaaaatgtggatttccgaggcaagaaggtgatcgaactgggtgcggggacaggcatcgtggggatcttggcagcgctgcagggagcttatggtctagtgagggagacagaggacgatgtcatagaacaagaactctggcgaggtatgcgtggagcctgtggacatgctctatccatgtctaccatgactccctgggaatccatcaagggaagctctgtcagggggggatgttaccatcactgacctgcccctggccctagaacagatccagggcaacgtccaggccaatgtgccagctggaggccaggcccaggtgcgtgccttgtcctgggggattgaccatcatgtcttccctgcaaactatgacctggtgctgggggctgatatcgtgtacctggaacccaccttccctctgctgctggggaccctccaacacctgtgcaggccccatggcaccatctatctggcctccaagatgagaaaggagcatgggacagagagcttctttcagcacctcctgccccagcatttccaactggagctggctcagcgggatgaggatgaaaatgtcaacatctatagggccaggcacagggaaccaagacctgcttgacatcacccttgctgttcttctnnnnnnnnnnnnnnnnnnnnnnnnnnnnnnnnnnnnnnnnnnnnnnnnccagagccacaaacatgaggaccaaaaaggatggatttccctggcctctctcactttcctccttccctctttgttaccccagatactcttgggcaggtgcagtgaggtgcctgcttacaaggaatcccagagttctggcagcactagtgttagaacaccaaggaggttcctggctcctgttctcagagaaggaggatggtaaggtatccaggatttttagggggtaagggagatatatgggatgtgagagcagtgattgtagacagactgtcactgatcacttccattcctgttgctgtttacacagaatggactttaaaaaaattctgtgggatttttttttctttttttcttttttttgagacagggtctcactctgtcatccaggctggagtgcagtggtgtgatcacagctcactgcagcctcaacctctgaaggcccagatgatcttcctgcctcagctccccaagtagctgggactagaggcatgcgccaccacacccggctaatttttgtattttcagtagagacagggtttcgccatgttgcccagggtggtctcaaactcctgggctcaagtgatccacccgccttgcctcccaaagtgctgggattgcaggcatggcccactgtgctagcctaggatttttttttttttttaagaaagaattaagccttaaaaatctattgtgcaagaacccaacttttactcaggagctgagaaggaagaagcctcaaaccacccatttcctgctttttagagatagagtctagtggaaccatggctctaactgggtcaagtcctcctagctctgaagctaaggctgcagagctgtcctttggactgtatttcttcatgctttccagagttagagccttgatcacggaacatcattgtgtgcagaagaatactgtacctagtactaagttcttttcatctttgatttttctttagcttcatcagtccttccttcctaatctctaatcccctgaagcctaacacagttcctaatgtgttttgccttaacctcttttctcttcccacattggtacttctggttggggctctctttacttactgcttaggcacatagtcaccttctctggactccctgcttccatgctttctccttcagtccattccgcaaactcttgtgatcttccaaaattagctctgattagctttcacttcctgtagaagcaagaacaagctcctctgcttggtacttagtctgtgtccatgtgatccaaaattaccttcctattgcatttcctactcctttgctacgtgtattggacctctggccaaattacaaaagatgtactctttgttctctaaaaccacactaaagttttctgacttctttcacactctttatgataatcctctgcctgaaaggctattgccacctgtcaaaatcttcattattctttgcctctttcctgagcctcttgcttgaatgtgatttctttctccctgagacccataaggttcatcttatgggaccttaatttgtcttgcatggacatttgtgattctcattttctcaccattaaattaccttggagggtagggctgtggtttactcctgtctaaacccctgaagcctaacacagttcctggcacacaacaggtgttcaacagatattgtgctcattcaataaatatttactcgctttgtttaatggattccacccctgccttcctaggtgaccttggacaaattctcgaacccattcaccaaccacacaagtttgttgtgagtcataaatggataatgaatataaatgcgcattgaaaataaacataaaatgttacccacaaaaaaaaaaaaaaaaaaaaaaaaaaaaactgttgtgtgcgggcgcgcgcttggggccctgagaaaaagcgtttttaaacaccacttcccgtgttgggggcgcggggggcccagtgtgggtaagttgaaccctgtgggcaaaatgcgtggtcccaagggagaagatccggggccagtgagactaaggtcgttggggtgtttctctccccaaatttaaaaaaacgcgcgcgggggggacacccgagcgggtctctgtgagaaaaactctccaagaggggggagtcccggaggaggccataaccgggagttcttatcaacagggagctgtccacggaagcgtctggatataaaattacgcgggcccgctggggggag

SEQ ID NO: 5009 - DNA, 2691 bp, Homo sapiens
  misc_feature (2414)..(2414): n is a, c, g, or t
atcaaaaccaattcagagcctggcacaaaatgtatacttcctagtgaaagctgtctcaaaagcacagcctttttgatggatcatattagctcatatctgccatagaaaggcaatcaagcttactccctgcaatcggagtcaatatcaattcttgctcaagcaaacatgttttacagtgttggcgcaatggcaggaactagtcaagggcactttcagatctggaaagaggaaagagaaaatcactcttttgtgtttcttaaacatgccaatcaagcaagaaaatttattccaccccttcatatttgctctaaaatctggggccagtagttgaaatgtgatcttgttctttctcagccttttggcaatttaatgccaaatattccaaatgttagatgaatggcagtaataaaatgattcaaatgtttgataaatacaagctgagagcaaaatctggactctgaaaaatcggaactattttatcatgttgctaaaatgagagcatcattttcttccctctctgtaagtgcggtagtttaatttcctagaaaaagttgctagtgccttgtttaagatgatcatgttatcatttcatgtggatattattggtctaattagaaggagaagattgattggatttactttaaagaaaattattctcctatgtctctttgaactcaggaatagaaaatgaccaagaagcacatcatcttcagatatgatttttgccctcactggggatgtagaaccagaataggtacaacatatgctcagaagagaggtgacttcagtattagccttctagaaactaacatcactttaatttttacatgttccaaaaaaaatcatagtgattgttctgtaataagaatgttaacgtgatgcctatagaagttagaggtttttgtttctgtttctcttcaggcaagtccatagatagaggaaaatcagacacaggctggtgacaactggtatagatacagtgagcatggaatgagaaccacctacaacattgcctgattatttttaagtttatatcaaaactgcttcacaagttcacaaaagttgtcactcttaatttgggttaagaaaagtaatagtattatctctgctgaagttgattgtttttctcttttaccatgactgttggccaaaagcaagctgaacctctgcactttggaaacaaagcacagtatggaatctttaacccaagcacttagtttcaccactgaggattctacatcatctgcaaggaaaatgcacaaacttttgggtcccaatgttggattcttcaaaagtgcatagcaaaacttttgtgctatgccgcttgatgtaacttttaaagatgttatcaaatgttaaatgcctcattctgcgttaatttgctgttggctgttttgtgaacacaaaataaacttgagatttttttttttttttttttttgtgaaactcctccaaagccaatttcagcccttggtaagcttgcagacagttactgatcttaaatttaattttaaaagacaatgtatcttaattataatttagctttttaaaacaatgagatagctttacatttcccctttgtttgaatgagaaaatggatcttgggttgctatgctagaacacttgtagattgctgggtcctttgtaagggggccatggacacaccacactttctttcaatccttacatttgaagcattgatattcttcaaaaccttcttgttacatgtgcgcaatagaaatttctaatgttcatgacttttatctttcctgtccatcaattcactggttgtaaatgcttcctgagagctgtctaggtctgtatcccagattgttgcttaatgacatctgacagatgcattgttttctgaaatcagcttaagacaccaattgtggcaactggaaactcattacctgctgcattggatcaactatggaagttggagcaggggtgggcggaggtcacctaaccaatcaatggaaggcaactcacacctgctccaagcctcagctttgagaaacaaacacgtttataagaaaaaatatatagctattattacagaagtgaatatgttgtgctctcttactgctcttggtgcattgacagtttctgtatctcaaccctattcatctttatgaaaaagcattctgaagatctatcctcagcactgctgagtgtgcagtcacactttcctaccaacccccttcttaccatctctagctgccatttgtggggggaacaaaacaagggaatcctgattgtgtacagtataaattgtattatattttttgtacttatgttttatgtaaatagtttgtctcattcaattgtatgtgagcattgaaataaatcctaccatttaggggaaaaaaaaaaaaaaaaaaaaaaaaggggggggggaaaaagtaccccgngagggggcccaaagtataacccgtcccgccgagctttttcttggtcacagagtgtagcccctataaagggagacgcgatataaatggaccaaggacaccggccccgtcttatcacacgcctcgtcccggggacacagcgttcttgggacaatctgtgggaaaggaccctatcttgtgtgggggggccatagtggcaactctctagaatataagggctagggtcaatatcaacttcggtttcgggtaacaacgctattgcggtgtaatggtccgaaaa

SEQ ID NO: 5010 - DNA, 4509 bp, Homo sapiens
  misc_feature (2220)..(2238): n is a, c, g, or t
  misc_feature (2242)..(2242): n is a, c, g, or t
cacgaggcgtgccgcgaaccaagcgcacgatggcgcgtcccccagggcctcgaagcctgctctgcctgcgcgctgctcctgctctgctacctgaatgttgtaccatctttgggtaggcagacttccctgacgacatcagtgatacccaaagctgagcagagcgtggcttacaaagactttatttattttactgtctttgaaggaaacgttcgcaacgtttctgaagtctcggttgagtatttatgctctcagccttgtgttgtcaatttggaagcagttgtttcatctgagttcagaagtagcattcccgtgtacaaaaaaaggtggaagaatgagaaacatcttcacaccagcaggacacaaatagtacatgtgaaatttccaagcattatggtttacagagatgattatttcatcagacattccatctctgtatctgcagtgatagtacgcgcctggattactcacaaatacagtggcagagactggaatgttaaatgggaggaaaacttgctccatgctgtagcaaagaattataccctcctgcagaccatcccgccttttgaacgccctttcaaagatcatcaagtgtgccttgagtggaacatgggttatatttggaaccttcgggcaaacaggattccacagtgtcctctggaaaatgatgtggttgccctgcttggctttccttatgcctccagtggagaaaacacaggcattgtcaagaagttcccgaggtttcggaaccgagagctggaggccactcgacgccagaggatggattacccagtgtttactgtttcattgtggctttatttactccattattgcaaggccaacctctgtgggattctgtactttgttgactctaatgagatgtacggcacaccttctgtatttcttacggaagagggctatttgcatattcagatgcatcttgtcaaaggggaagaccttgctgtaaaaactaaattcatcatacctttgaaggagtggtttcgactggatatctcttttaacggaggccagatagtagtaaccactagcattggacaggatttgaaaagctaccacaatcagaccattagcttccgggaggatttccattataatgacacagctgggtacttcattattggagggagcaggtatgtggctggcattgaagggttttttggacccctgaagtactatcgccttcgcagtctgcacccggcacgaggatttttaatcccctccttgagaagcaacttgctgaacaaatcaagttatattatgaaaggtgtgctgaggttcaagaaatagtatctgtgtatgcatctgcagcaaagcacgggggcgagagacaagaagcatgccacctccacaactcctacctggacctccagcgcaggtatgggagaccctcgatgtgcagagccttcccctgggagaaggagctgaaagacaaacaccccagcttgttccaggcattgctggagatggatctgctgaccgtgccaaggaaccaaaatgaatctgtatcagaaatcggtgggaagatatttgagaaggctgtaaagagactctctagcattgatggtcttcaccaaattagctctatcgtcccctttctgacggattccagctgctgtggataccataaagcatcctactaccttgcagtcttttatgagactggattaaatgttcctcgggatcagctgcagggcatgttgtatagtttggttggaggccaggggagtgagaggctgtcttcaatgaatcttgggtataaacactaccagggtattgacaactaccccctggactgggaactgtcgtatgcctactacagcaacattgccaccaagacaccccttgaccagcacacactgcaaggagatcaggcatatgttgaaacaattagactaaaagatgatgaaatactcaaggtacaaaccaaagaagatggagatgtctttatgtggttgaagcatgaagctacccgaggcaatgcagcagctcagcaacgattggcccagatgctgttctgggggcagcaaggtgtggccaagaatcccgaagcagcaattgagtggtacgccaagggcgccctggagacggaggatcctgcgttaatctatgactatgccattgtgctattcaagggtcaaggagtaaaaaagaacagacggcttgccttagagctgatgaagaaagcagcttccaagggattgnnnnnnnnnnnnnnnnnnnggcntgggatggtattaccacaaattcaagaaaaattacgccaaagcagcaaagtactggttaaaagcagaagaaatggggaacccagatgcgtcatacaatcttggagtcctgcatttggatggcatcttccctggagttcctggaaggaatcaaactttagctggtgaatatttccataaggctgcgcaaggtggacacatggaagggaccttgtggtgttctctctactatatcacaggcaacctggagacattccctagagatcctgagaaagctgttgtatgggcaaaacatgtagctgagaaaaatggctacttgggccatgtcatccgcaaaggcctcaatgcctacctggaaggttcatggcatgaagctttgctgtattatgttttagcagcagaaactggaattgaagtgtcacagacaaatttagcacacatctgtgaggagaggccagacctggccaggagatacttgggtgttaactgtgtttggagatactataatttctctgtttttcaaatcgatgctccttcctttgcatatttgaagatgggagacctttactactatggccaccaaaaccagtcacaagacctggagttgtctgtgcagatgtacgcccaagccgccctggatggagactcccagggattttttaacctggccctgctaatcgaggaaggtacgataatcccacaccatatcttggatttcttggaaattgactcaactctccattctaataacatctccattctccaggaactgtacgaaaggtgctggagccacagtaacgaggagtccttcagcccctgctccttggcctggctttacctgcacttgcggcttctctggggtgctatcctgcactcagccctgatctactttctgggaacctttctgctatccatattgatcgcctggactgtgcagtatttccagtctgtctcagcaagcgatccccctccaagaccatcccaggcctccccagacactgccacgtccactgcaagtccagctgtgactccagctgcagatgcctctgaccaagaccagcccacagtaactaataacccggagccacgtgggtgaactgtgcactccagttctctccagatgagagagaatcttttcaacagctggtattgggaagctggggccagggcatgatcctgataaacaccttaaatgtcttgtcaactggatgcaaattttgcaattggtgtcattttttttaaagtcaaattacaaggaagtacccagatcaggcagtggtaataccaaaggtcatcaaacacatacaaggaacatcttgatcatagggcatgtggggaagtttactgggccatcacagacttttgttctagtgattgtatgtattaggagtcatagcatgccctacggcagatctggattcttatacactaagatgtgtcttaagaatcacagtgcgtgcttcatccctttattgaagaacagaaaattatgactactctacaaggtggataatattttggtacctgtgcttgccacagccctgttcctcaaagctgaattgatagatttctctttgacttccaagacctagcagttataaggcaccttgaaataaattgtttgtgcctggaaatgcagggagggcaatagctttgtaaattggtttacatttttctccttgaatttttctagggtcctagtgcttccgaatcatttaatggcattgtcggatatcttttacatttcaattgcaatccatgaaattacatttagaagattcttagtacttaactgtagtcttctccatgaattacacgttagaatagactggcagcaacggaatatgcagcaagtaagcctctagcttatagtttcatccctacccctcatgcctgcgtgagtctgtacagggatatgtgtgtgtgtgtgtgtgtgtgtgtgttagagaggaagaggaagagcagaatgtctgtatactacatgctgctaaggtagtgaataaatcagtaatgcaatattgtgggtccaaactactctttgcactactttatttacagtagtaaataaaattatttttatacaattgaaaaaaaaaaaaaaaaaaaaaaatcttaatagttcactgaggggcaaggttaagcgtaccagtttggtaaaagggcctataggagtgtttaaaaaggaggcggagtaaaggtgaggaaaagatggaatgggagaaccttgggggaaaggaacaagaataggaggaaaaaaggaggaaagtaa

SEQ ID NO: 5011 - DNA, 1758 bp, Homo sapiens
taattaaaatagagagggaggcaccacagatgccagaagaactctgttggtcttggtggacgggcccagaggaattcagagttaaaccttgagtgcctgcgtccgtgagaattcagcatggaatgtctctactatttcctgggatttctgctcctggctgcaagattgccacttgatgccgccaaacgatttcatgatgtgctgggcaatgaaagaccttctgcttacatgagggagcacaatcaattaaatggctggtcttctgatgaaaatgactggaatgaaaaactctacccagtgtggaagcggggagacatgaggtggaaaaactcctggaagggaggccgtgtgcaggcggtcctgaccagtgactcaccagccctcgtgggctcaaatataacatttgcggtgaacctgatattccctagatgccaaaaggaagatgccaatggcaacatagtctatgagaagaactgcagaaatgaggctggtttatctgctgatccatatgtttacaactggacagcatggtcagaggacagtgacggggaaaatggcaccggccaaagccatcataacgtcttccctgatgggaaaccttttcctcaccaccccggatggagaagatggaatttcatctacgtcttccacacacttggttggcttttacaaacccctaagcttcttctttacctttccttaaaatttcaaccttctcttttcttactctataattgagaatgataacacagagagttaataacagtcaccctgctaactttccttagcatgagtgaacagtgagagataaaaatgaaatcttggttaaccttgccaaatctccaggacaccgaagagttaaaaagagagaaaaacaaaaagattaagctctttttcaaaaaaacaaaaccacttaatttttttctacctaaaaccataacaagaaaaaatgctaacacttatttatttgaatggcacatggagaccgggcatgtggctcacacttgtaatcccagcaccttggaaggcggaggcgggtggatcacctgaagtcaggagttcaagaccagcctggccaacatggtgaagtcccgtccctactaaaaatacaaaaattagccaggtgtggtggtgcgcacctgtaatcccagctactcaggaggctgaggcaggagaatcacttgaatccgggaggtggaggttgcagtgagaggagattgagccattgcactccagcctgggcaacagagtgagactccatctcgaaaaacaaacaaacaaacaaaaaacagaatggcacattgatgagcattcattgattgattctttagtttttttatgttctctaaagaatttttaagatttaaagaagcatgtgctatttatttgtaggaaatcctcagaaaaggtacaaataaaaaataaaaattatccataattaataccagagattataattgttaattattatggtgttttctttgctagtatttaagatcattattaagatcacatacacatttttgcttactatcattagcatttgatgatatgatttttttaatttttatacattgttttaatggctgcacgatatttcattgtgtacaaataaaataactactgttccgctttgaaaaaaaaaaaaaaaaaaaaaaaaaaaaaaaaaaaaaaaaaaaaaaaaaaaaaaaaaaaaaaaaaaaaaaaaaaaaaaaaaaaaaaaaaaaaaaaaaaaaaaaaaaaaaaaaaaaaaaaaaa

SEQ ID NO: 5012 - DNA, 3931 bp, Homo sapiens
  misc_feature (83)..(139): n is a, c, g, or t
  misc_feature (1497)..(1521): n is a, c, g, or t
  misc_feature (2147)..(2164): n is a, c, g, or t
tgaactttgaaatagccagtttcagcagcctttcagggactcagcccatcacgtggcaggtggagtacccacggaaggggacnnnnnnnnnnnnnnnnnnnnnnnnnnnnnnnnnnnnnnnnnnnnnnnnnnnnnnnnntcccttggctatggacactgaaattctgaacaccgccgtactcacaggaaagacagttgccatgcctatcaaggtggtctctgtggaggagaacagtgccgtgatggacatctcagagtcggtggagtgcaagtccacagacgaggacgttatcaaagtgtctgagcgctgtgactacatctttgtcaatggcaaagagatcaaaggaaagatggatgcggtggtgaacttcacataccagtacctgagcgcccccctgtgtgtcaccgtgtgggtgccccggctgcccctgcagatcgaggtctctgacacggagctcagccagataaagggctggagggtccccattgtgaccaataagaggcccactcgtgagagcgaggatgaggacgaggaggagcggcggggccggggctgcgcactgcaataccagcacgccaccgtgcgggtcctcacccagtttgtgtctgagggcgccggtccatggggccagccgaactacctgcttagtcctaactggcagttcgacatcactcacctggtggcagacttcatgaagctggaggaacctcacgtggccaccctccaggacagccgggtcctggttgggcgagaggttgggatgacgaccatccaggtgttgtctccactgtctgactccatcctggcagagaagacgataaccgtgctagatgacaaagtgtcggtgacagacttggccatccagctcgtggctgggctgtctgtcgccctttaccccaacgcagaaaacagcaaggccgtaacagctgtggtcacagctgaggaggtgctgcggacccccaaacaggaggctgtattcagcacgtggctgcagttcagtgatggctctgtgacgcccctggacatctacgacaccaaggacttctccctggcagccacctcccaggacgaggctgtcgtgtcagtcccccagccccgctctcccaggtggcccgttgtggtggccgaaggggaaggccagggcccactgatccgagtggacatgacgatcgccgaggcctgccagaaatctaaacgcaagagcatcctggctgtgggcgtcggcaacgtcagggtcaagttcggacagaacgatgctgactccagccccggcggggactatgaggaagatgagatcaagaaccacgccagcgaccgccggcagaagggccagcaccatgagcgcacaggccaggatgggcacctctatggcagctctcccgtggagcgtgaggaaggggctctccgaagagccactaccacggccaggtccctgctggacaacaaagtggtgaagaacagtcgggcagacgggggcaggctggcaggagaggggnnnnnnnnnnnnnnnnnnnnnnnnntcaccaacttccctgcccacgtggacctccccaaggccgggagtgggctggaggaaaacgacctggtgcagactccgcggggcctgagtgatctggagatagggatgtacgccctcctgggggtgttctgcctggccatcctcgtcttcctgatcaactgcgccacctttgccctgaagtacaggcacaagcaagtgcccctggaaggtcaggcctccatgacccactctcacgactgggtgtggcttggcaatgaggccgaactcctggagagcatgggggatgcaccgccgccccaggacgagcacaccaccatcatagaccgcggaccgggggcctgcgaggagagcaaccatctcctgctcaatggtggctcccacaagcacgtgcagagccagattcacaggtcagccgactccggggggcggcagggcagagaacagaagcaggaccccctgcactcgcccacctccaagaggaagaaggtgaaatttaccacctttaccaccatccccccggacgacagctgccccacggtgaactccatcgtcagcagcaatgatgaggacatcaaatgggtgtgtcaagacgtggctgtgggtgcccccaaggaacttagaaactannnnnnnnnnnnnnnnnntaaggcttaggcccctctagccaaagggccctgcccagatgccttccttgtactggaaactggcccaagtggggcagaaggcgttgtcagtggggttaagaagggacggtcccagggtccatgctagaccagttggaaagttttgaagtcaggaaaagacgtttttgtatcaagggatttttagcagttaatggtggtggatttttaaaggtcaggggaataaagtctggggcatggggagtgcagaccaagttactgaactgcacaggcaaaattaggaaggttattttatgagtcaaaacatactacagacaagctaccaaaaattatttgttaaaaaatgcaacaagacaaataaaaagagaaataatcatctgtttatatttctaataaaggagcaaaatataaaaataggacctgctaagagacattttccattctaattcacgattcacttttccaaggacagccttcaactgtcaccacacagctgggggggagtcatttcttaacaagggatgcctcttgggatagaactagggagttttaaatctttacttgatcatcttttattttcttttccactttttccttttctctctctctctgtgtcctagacttccattgcatttatatttaatgtttatttctgagaatcaagcagtatatttttcctaaatgaaacataaattatattcctattcattagataggttcctaggaacaatgccaattaatccattgtttaagtagtaacttgaatgtttttctatatccctccagctttgttgatagtggcgggttttgtacaattggagggagccctcagagccttctgggggaggagaggaactgtccttaatccatcaccactaccatagggcaaagccagcaggtgtggccctgtgaggggctgtacagacgggatgtggccaggagaacagagccccacctggaccacctgacccctcgggattccacccctgtcatcgtggggatgttcctatataggagaaagttgggttaaatcaaaaaagaggccacgcccaggtgtaatcagagccaacctggtgggctgggtctatcacaagacataactgatgctgaacatgaacaaagataaaaactgtttggagggtttttgagttgtttttcttatgttgttgggtggggtataccagcataaactctaaagataaaatctatgttagattgtcaatcaactgtgtttttgaacagcataattgtgtagcagcacattgcaaaaatgcattcatccaaagcgacacatgtggcaacgtagaccacgccagtgaaataagccccttcgtgatcacctgactccagttctccgtgtgctccattggctgcggctgcaggaggaagatgcctgacagccctcatgctctccgcaggggggcgctcacaaagatgccaggggtgtttattgtgtttatttttttaattactaaaatcagtagctaagaaagggtccttgaagcctcctaacctgggttggacctttgaaaaatatatttgtagcacatattatagatggaaagaagaagatatttatttatacctgtgatgccaattgtcattaaaaggcttttcatggcttgacaaaaaaaaaaaaaaaaaaaaaaaaaaaaaaaaaaaaaaaaaaaaaaaaaaaaaaaaaaaaaaaaaaaaaaaaaaaaaaaaaaaaaaaaaaaaaaaaaaaaaaaaaaaaaaaaaaaaaaaaaaaaaaaaaaaaaaaaaaaaaaa

SEQ ID NO: 5013 - DNA, 4649 bp, Homo sapiens
agaggtctggctgggagttagggatggagcaggacaactccaaggctcccctctggcagccagacctgctcatgaagaaggctcctcggtgaggagggtgaggctcaaagagcagagttcctggagcgcccccagcaggcctgaattgcagttcctgtgccctggcactaagactggcacctcctgcggcccatgcccttcgcctgcattgcccactgagtcccactcgactgtcttcagcgcggttcacactgagacccagccctctcccgctggccccgagcaggcccacctttaggagggcgtgatggaaaggcccctggagaatggggatgagtccccagactctcagggccatgccaccgactggagatttgctgtgtgcagtttcagggatgcctgggaagaggaggaacctgcttcccagatgcacgttaaggacccaggtcctccaagaccaccagccggggccacccaggatgaggagctacagggcagccccttgtccaggaaattccagttacccccagctgcagatgagtcgggggatgcccagaggggcacagtagaaagctcctcagtcctgtcagaagggccaggcccctctggagtggagagtctcctatgccccatgtcctcccacctcagcttggcacagggtgagagtgacaccccaggggtagggttggtaggggacccaggtccaagcagggcgatgccatctggcttgagccctggggcattggacagcgaccctgtgggccttggagaccctttatcagaaatatcaaagctgctggaggcagcccccagtggatccggcctccctaagcctgctgactgcctcctggcccaagacctctgttgggagctgctggccagtggtatggccaccttgccagggactcgggatgtccaaggccgggcagtgctgcttctgtgtgcccacagcccagcctggcttcagtctgagtgcagcagccaggaactcatccgcctcctgctgtacctgcgaagcatccccaggcccgaagtacaggcactgggactgacagtgctagttgatgcccgaatttgtgctccaagttcttccctcttctctgggctcagccaactacaagaagcagccccaggggccgtgtaccaggtgctgctagtgggaagcacgctgctgaaggaagtgccttccgggctgcagctggagcagttgccttctcagagcctgctgacccacatcccaacggcggggctgcccacttcgctaggaggaggcctgccttactgccaccaggcctggctggatttccgaaggcggctggaagctctactacagaactgccaggcagcttgtgccctgctccagggggccatcgaaagtgtgaaggctgtgccccagcccatggagcctggggaggtcggtcagctgctacagcagacagaggtcctgatgcagcaggtgctagactcgccatggctggcatggctacaatgccaggggggccgggagctgacatggctgaagcaagaggtcccagaggtgaccctgagcccagactacaggacggcaatggacaaggctgacgagctatatgaccgggtggatggattgctgcaccaactgaccctgcagagcaaccagcgaatacaggccctagagttggtccaaacactggaggcccgggaaagcggactgcaccagattgaagtgtggctgcagcaggtgggctggccagcactggaggaggctggggagccctcgctggacatgctgctccaggcccaaggctcttttcaggagctgtaccaggttgcccaggagcaggtcaggcaaggggagaagtttctgcagccgctgactggctgggaggcggctgaactggacccccctggggcacgctttctggccctgcgagcccagctgactgaattctctagggctttggcccagcggtgccagcggctggcggatgctgagaggctgtttcagctcttcagggaggccttgacgtgggctgaggaggggcagcgagtgttggcagagctggagcaggaacgcccgggggttgtgttgcagcagctgcagctgcactggaccaggcaccctgacttgcctcctgcccacttccgaaagatgtgggctctggccacggggctgggctcagaggccatccgccaggagtgccgctgggcctgggcgcggtgccaggacacctggctggccctggaccaaaagcttgaggcttcactgaagctaccaccggtgggcagcacagctagcctgtgtgtcagccaggtccccgctgcacctgcccaccctcccctgaggaaggcctacagcttcgatcggaatctggggcagagtctcagtgaacctgcctgccactgccaccatgcggccactattgctgcctgccgcagaccagaggctggaggaggtgccctgccccaggcatcccctactgtgcctccaccaggcagctctgaccccaggagcctcaacaggctacagctggtgctggcagagatggtggccacggagcgggagtatgtccgggctctagagtacactatggagaactatttccccgagctggatcgccccgatgtgccccagggcctccgcggtcagcgtgcccacctctttggcaacctggagaagctgcgggacttccactgccacttcttcctgcgtgagctggaggcttgcacccggcacccaccacgagtggcctatgccttcctgcgccatagggtgcagtttgggatgtacgcgctctacagcaagaataagcctcgctccgatgccctgatgtcaagctatgggcacaccttcttcaaggacaagcagcaagcactgggggaccacctggacctggcctcctacctgctaaagcccatccagcgcatgggcaagtacgcactgctgctgcaggagctggcacgggcctgcgggggccccacgcaggagctcagtgcgctgcgggaggcccagagccttgtgcacttccagctgcggcacggaaacgacctgctggccatggacgccatccagggctgtgatgttaacctcaaggaacaggggcagctggtgcgacaggatgagtttgtggtgcgcactgggcgccacaagtccgtgcgccgcatcttcctttttgaggagctgctgctcttcagcaagcctcgccatgggcccacaggggttgacacatttgcctacaagcgctccttcaagatggcagaccttggtctcactgagtgctgtgggaacagcaacctgcgcttcgagatctggttccgccgccgcaaggccagggacacctttgtgctgcaggcctccagcctggctatcaagcaggcctggacagctgacatctcccacctgctttggaggcaggccgtccacaacaaggaggtgcgcatggctgagatggtgtccatgggtgtggggaacaaggccttccgagacattgctcccagcgaggaagccatcaacgaccgcaccgtcaactatgtcctgaagtgccgagaagttcgctctcgggcgtccattgccgtagccccgtttgaccatgacagcctctacctgggggcctcgaactcccttcctggagaccctgcctcttgctctgttctggggtccctcaacctgcacctgtacagagacccagctcttctgggtctccgctgtcccctgtatcccagcttcccagaggaagcagcactggaggctgaggcagagctgggcggccagccctctttgactgctgaggactcagagatctcgtcccaatgcccatcagccagtggctccagtggctctgacagcagctgtgtgtcagggcaggccctgggtaggggcctggaggacttaccctgtgtctgagcccgggactggacgagcagtagatccagcagcctgcagctccaaggaacattgcctctctggatctgctgtgaccagggtgtggctgacacctgggctacctccaacctacatgtgcaacgctgttgactaccctttctgatgtgtgtggccattggactaactggcacggggcctctctagggaagtctggttgtagagcctgaataggctcctggccccatgaccccttctcctgtccccagctcccatcccagttgtgggttaagaataggctagagcagacattgggtgtttccatgctgtaggctggtgggggaccatgtgcctctaggcagtgactagggtgcccccacccctcaggaagaacacaggtgggctcctagcagctgatccccaatgcctggccttaaagccgagctcagttaccatagggacaggtccacctctactgggccctcatgcttgcctttcctggcccccaggcccagcccctttttactggggcagtttcgttattttgacttgatgccttttgaataactttcaatagaattgtctaaaattatcttactggttgttaggcctttggtgtctcagagaaggagtctaggtctttgatgtgtgatttaatcttttatttgtttataataaaaaatagactgatttgtaaaaaaaaaaaaaaaaaaaaaaaaaaaaaaaaaaaaaaaaaaaaaaaaaaaaaaaaaaaaaaaaaaaaaaaaaaaaaaaaaaaaaaaaaaaaaaa

SEQ ID NO: 5014 - DNA, 1372 bp, Homo sapiens
ggccgtcggagcccttgcacgcctgctctcttgtagcttctctcagcctagcccagcatcactatggtggacgctttcctgggcacctggaagctagtggacagcaagaatttcgatgactacatgaagtcactcggtgtgggttttgctaccaggcaggtggccagcatgaccaagcctaccacaattcatcgaaaagaatggggacattctcaccctaaaaacacacagcaccttcaagaacacagagatcagctttaagttgggggtggagttcgatgagacaacagcagatgacaggaaggtcaagtccattgtgacactggatggagggaaacttgttcacctgcagaaatgggacgggcaagagaccacacttgtgcgggagctaattgatggaaaactcatcctgacactcacccacggcactgcagtttgcactcgcacttatgagaaagaggcatgacctgactgcactgttgctgactactactctgccaatcggctacccctcgactcagcaccacattgcctcatttcttcctctgcattttgtacaaatccacgaattcttctggggtcaggtgccactgaccgggatccagttccagttcccatggtgtatgtggttttttttttttttttttaactgcactcatagggtgctctgaggtcaataaagcagagccaaggccacccagttgcctttttgcctttggtaacataactctgggagtcttggtttatcctgtgtgtcagagagtgggcagaaataacggcctgaaggttactgaggaagaagcactggatgggagactgaaatggacagtctcggagcctgttaatcagctgatcaccttacacatttaataataaaagagctgtacctacacgttgcctttacactgccccccctccatggtcaaatgacctagttcagtcagtgatggggcttccccaggtttggctattgaactgtcacttcaggcccatcctacactgaaagctcttgggtctggctgttctctgtgaaatgctgtagtctctccctttccagaattcaggttcagggcacagaacccaggcttgtaccatggtggtgggagaaaatgaccactggccaagaggactgctgacctgtgcaccaggctagtacttatgactacaaattcttactgcttctctaatcaactctgagggaagagggcatctgatcattacaaaagggagggcttataagtgatctcccaagaaggcagtgatctgctagtgcctttggctctgtacctctgctgggcatctctccaaggtctaaggtaacatattaaatgtttttgtcagctaatgcaggctcagtgactttaagtctgta

SEQ ID NO: 5015 - DNA, 2880 bp, Homo sapiens
cttagtttttatatagtccaactcatgtactctgcttccgtcattaagaattcatagtgggagaaataggctgttgccttttctctagaatgcatggggcaaggctgtttgtttgtttgtttgtttgctttagacagtcttgctatgttgcccaggctggagtgcagtggcacaatcacagctcactgcaacctctgtctcccgggttcaggagattcttctgcctcagcctcccgagtagctgggattacaggcacatggcaacatgcccctggctaatttttgtatttttagtagagatggagtttcgccatgttggccaggctggtcttggactcctgacctcaagtgatctgcctgccttggccttccaaagtgctgggattacaggactgagccaccacgcctggccagggcgttttcttaaaaaagtgattgaaatctgctcatgccctgtgccacgtgggtctcacgcaggtctgttctctgctccaggtctgccatgtgaatctggaggggcagccgttctactccaagaaggacagacccctgtgcaagaagcacgcacacaccatcaacttgtaggcggccaaggccgcctgtgctgacgaggcccggagctgctcctgctgctggcaacaaaggattcgggaggctgatgtttcttctgaggggaatggggagagagaggaagcgactgagccctttggaagtataattttaggttttttcttctgtacacagatcgtgcatttgcatagttcagactaggagccaaatgaagactcaaaaccaagctagttattaatccaagactggaattgtacttcagacatttagagcagaattccaagaactcaaaagtgaaaagcaacaagcagctttcccaaagcgatacacttgctttggtcaccagaggaggacagagcttagagcagctgtggagaatctgaagcattctgcggagttcttaagcgctcccctggcaaacaaattgaagtgccaaacagcactcgctgcagggtatttttagagtcatagctgagagcttgttagctaagacccattgggctttcctcaccaaaaaaggaagtgttattccattactagcgtcatggagctacctctgcgcatcagacttcagaccttgaacaaacttaaaaccttcttgggagcccggacgtccaaagagatgtcttctgggagccactgggcaattgccagggctccaggaagggctctggctcaggttgcagacagctgagaaaagatggccctgtcagccaccctctctcagtctgaaacatccaacatccccagaaggcttagctcctttttgaattgtgatgggaaagtagagttgggtttttccagttttgctctgtggtgtgtgagagatttttttaaaggctttgggttgtctttggcctttgtttagctttaagggttcgttagcatgagtgtccagtcgtgtgcacgaatttcaccccaacttgtgactgctcacttatgacgtctcccccagtaccctccatctcaaataggcttggtggcctgtggaaaagaagagagacagagagacagtgtctgaaacaggatggcagaataggctcacatgcccaaactctgggtggggaagaggaaacttactttctgccaccctcagtaagaacacacgaggaggcaggaccccccaccttcaggtctgcatcatccttttcaaatgttcctttaaatgcagcacactgagtttgtacaattgtgttaactgctggaagggacagatgcactgatatatatgcatttgctgttttggccaatattttgaaaatgtatgagctgagttgatctagctattatttaagtatttattgaagtagaggggccttcaaactactttatactagtgatagtttgagttaggtaagcatcttaaagctgtttggtgataaagaaggcagcttagattctgtggttggaaacagtgtagtcgcttccctttttaggaagccctgttaatatgctcattgaaaacatggcattgaagcaggcacttgcgtggatgtttctcacttgagcacgatatttaggctctcttccaactcactctattctgtcctcactcctgttttgggtttttctctttgcatgtttgaaatgttttatgggaatgtattagaactcttttcttctaaggactgagacttccaggggattgccatcttacctgtctcttctccatgagggagaaggaagcagctagctatgtccctagctgcaggaagcccctattttttccaagcacgaagccaccagtctcccccagggagcatcaggaagggacatggatgtgctcctgccacagggcccttcctacctttggatctgtgagaaggtgaatacaaagcagcaggcagagtaaaatctgctgggactgcctggagatttgtcaggagctgcagacaagtaccttggagcattctgttatttttggaaagttcaaatatgcagggacaaggaggttgctgactgtactgacaggctctaagtcattttctccaaaaactatctattcaattatcaggggctggtcttgaggaagaaaaaaaaaaaaaaacgttcccagaattcagtttccaaaatctctttttaaagggtttacacacacacacacacacacacacacacacacacacacacacacacacgatcattaaaaagtgtatgctctttaagaagaaaagtaaaatatctcaaaggacggtttcaccaccgtcctttattgaatcaatttttctacatttcagagcaagtgtagattctgagggactcctatttgccaaaaagacaaaactagcaaaaaaaaaaacaaaaaaaaca

SEQ ID NO: 5016 - DNA, 991 bp, Homo sapiens
  misc_feature (953)..(988): n is a, c, g, or t
cattcccagcctcacatcactcacaccttgcatttcacccctgcatcccagtcgccctgcagcctcacacagatcctgcacacacccagacagctggcgctcacacattcaccgttggcctgcctctgttcaccctccatggccctgctactggccctcagcctgctggttctctggacttccccagccccaactctgagtggcaccaatgatgctgaagactgctgcctgtctgtgacccagaaacccatccctgggtacatcgtgaggaacttccactaccttctcatcaaggatggctgcagggtgcctgctgtagtgttcaccacactgaggggccgccagctctgtgcacccccagaccagccctgggtagaacgcatcatccagagactgcagaggacctcagccaagatgaagcgccgcagcagttaacctatgaccgtgcagagggagcccggagtccgagtcaagcattgtgaattattacctaacctggggaaccgaggaccagaaggaaggaccaggcttccagctcctctgcaccagacctgaccagccaggacagggcctggggtgtgtgtgagtgtgagtgtgagcgagagggtgagtgtggtcagagtaaagctgctccacccccagattgcaatgctaccaataaagccgcctggtgtttacaactaaatgaaaaaaaaaaaaaaaaaaaaagaccaatccacacacacactcacaactagcacacggacaccgctacaccataaaagagcggcggcgcccctcataaagaatttcccgccgcgggggcccccacacaaaagccgaacaaccaagacatgttgtgaacaaaaggtggcccccaaaacgagacactcaataaccaccagagaacacgccccgagctacaaaaagacaccgagggggaaacagcgcaacccgcgacacatctgggcagnnnnnnnnnnnnnnnnnnnnnnnnnnnnnnnnnnnnacc

SEQ ID NO: 5017 - DNA, 5922 bp, Homo sapiens
  misc_feature (44)..(62): n is a, c, g, or t
  misc_feature (3845)..(3883): n is a, c, g, or t
  misc_feature (4914)..(4928): n is a, c, g, or t
gctcacccaggaaaaatatgcaatcgtcccattgatatacaggnnnnnnnnnnnnnnnnnnntaacctcagcaccgaggttgtctacaaaaaaggccaggattataggtttgcttgctacgaccggggcagagcctgccggagctaccgtgtacggttcctctgtgggaagcctgtgaggcccaaactcacagtcaccattgacaccaatgtgaacagcaccattctgaacttggaggataatgtacagtcatggaaacctggagataccctggtcattgccagtactgattactccatgtaccaggcagaagagttccaggtgcttccctgcagatcctgcgcccccaaccaggtcaaagtggcagggaaaccaatgtacctgcacatcggggaggagatagacggcgtggacatgcgggcggaggttgggcttctgagccggaacatcatagtgatgggggagatggaggacaaatgctacccctacagaaaccacatctgcaatttctttgacttcgatacctttgggggccacatcaagtttgctctgggatttaaggcagcacacttggagggcacggagctgaagcatatgggacagcagctggtgggtcagtacccgattcgcttccgcctgggcggtgatgtagacgaaaggggaggttatgacccacccacatacatcagggacctctccatccatcatacattctctcgctgcgtcacagtccatggctccaatggcttgttgatcaaggacgttgtgggctataactctttgggccactgcttcttcacggaagatgggccggaggaacgcaacacttttgaccactgtcttggcctccttgtcaagtctggaaccctcctcccctcggaccgtgacagcaagatgtgcaagatgatcacagaggactcctacccagggtacatccccaagcccaggcaagactgcaatgctgtgtccaccttctggatggccaatcccaacaacaacctcatcaactgtgccgctgcaggatctgaggaaactggattttggtttatttttcaccacgtaccaacgggcccctccgtgggaatgtactccccaggttattcagagcacattccactgggaaaattctataacaaccgagcacattccaactaccgggctggcatgatcatagacaacggagtcaaaaccaccgaggcctctgccaaggacaagcggccgttcctctcaatcatctctgccagatacagccctcaccaggacgccgacccgctgaagccccgggagccggccatcatcagacacttcattgcctacaagaaccaggaccacggggcctggctgcgcggcggggatgtgtggctggacagctgccggtttgctgacaatggcattggcctgaccctggccagtggtggaaccttcccgtatgacgacggctccaagcaagagataaagaacagcttgtttgttggcgagagtggcaacgtggggacggaaatgatggacaataggatctggggccctggcggcttggaccatagcggaaggaccctccctataggccagaattttccaattagaggaattcagttatatgatggccccatcaacatccaaaactgcactttccgaaagtttgtggccctggagggccggcacaccagcgccctggccttccgcctgaataatgcctggcagagctgcccccataacaacgtgaccggcattgcctttgaggacgttccgattacttccagagtgttcttcggagagcctgggccctggttcaaccagctggacatggatggggataagacatctgtgttccatgacgtcgacggctccgtgtccgagtaccctggctcctacctcacgaagaatgacaactggctggtccggcacccagactgcatcaatgttcccgactggagaggggccatttgcagtgggtgctatgcacagatgtacattcaagcctacaagaccagtaacctgcgaatgaagatcatcaagaatgacttccccagccaccctctttacctggagggggcgctcaccaggagcacccattaccagcaataccaaccggttgtcaccctgcagaagggctacaccatccactgggaccagacggcccccgccgaactcgccatctggctcatcaacttcaacaagggcgactggatccgagtggggctctgctacccgcgaggcaccacattctccatcctctcggatgttcacaatcgcctgctgaagcaaacgtccaagacgggcgtcttcgtgaggaccttgcagatggacaaagtggagcagagctaccctggcaggagccactactactgggacgaggactcagggctgttgttcctgaagctgaaagctcagaacgagagagagaagtttgctttctgctccatgaaaggctgtgagaggataaagattaaagctctgattccaaagaacgcaggcgtcagtgactgcacagccacagcttaccccaagttcaccgagagggctgtcgtagacgtgccgatgcccaagaagctctttggttctcagctgaaaacaaaggaccatttcttggaggtgaagatggagagttccaagcagcacttcttccacctctggaacgacttcgcttacattgaagtggatgggaagaagtaccccagttcggaggatggcatccaggtggtggtgattgacgggaaccaagggcgcgtggtgagccacacgagcttcaggaactccattctgcaaggcataccatggcagcttttcaactatgtggcgaccatccctgacaattccatagtgcttatggcatcaaagggaagatacgtctccagaggcccatggaccagagtgctggaaaagcttggggcagacaggggtctcaagttgaaagagcaaatggcattcgttggcttcaaaggcagcttccggcccatctgggtgacactggacactgaggatcacaaagccaaaatcttccaagttgtgcccatccctgtggtgaagaagaagaagttgtgaggacagctgccgcccggtgccacctcgtggtagactatgacggtgactcttggcagcagaccagtgggggatggctgggtcccccagcccctgccagcagctgcctgggaaggccgtgtttcagccctgatgggccaagggaaggctatcagagaccctggtgctgccacctgcccctactcaagtgtctacctggagcccctggggcggtgctggccaatgctggaaacattcactttcctgcagcctcttgggtgcttctctcctatctgtgcctcttcagtgggggtttggggaccatatcaggagacctgggttgtgctgacagcaaagatccactttggcaggagccctgacccagctaggaggtagtctggagggctggtcattcacagatccccatggtcttcagcagacaagtgagggtggtaaatgtaggagaaagagccttggccttaaggaaatctttactcctgtaagcaagagccaacctcacaggattaggagctggggtagaactggctatccttggggaagaggcaagccctgcctctggccgtgtccacctttcaggagactttgagtggcaggtttggacttggactagatgactctcaaaggcccttttagttctgagattccagaaatctgctgcatttcacatggtacctggaacccaacagttcatggatatccactgatatccatgatgctgggtgccccagcgcacacgggatggagaggtgagaactaatgcctagcttgaggggtctgcagtccagtagggcaggcagtcaggtccnnnnnnnnnnnnnnnnnnnnnnnnnnnnnnnnnnnnnnnggtaaaatggaggccagtgccatttcagaggggaggctcaggaaggcttcttgcttacaggaatgaaggctgggggcattttgctggggggagatgaggcagcctctggaatggctcagggattcagccctccctgccgctgcctgctgaagctggtgactacggggtcgccctttgctcacgtctctctggcccactcatgatggagaagtgtggtcagaggggagcaatgggctttgctgcttatgagcacagaggaattcagtccccaggcagccctgcctctgactccaagagggtgaagtccacagaagtgagctcctgccttagggcctcatttgctcttcatccagggaactgagcacagggggcctccaggagaccctagatgtgctcgtactccctcggcctgggatttcagagctggaaatatagaaaatatctagcccaaagccttcattttaacagatggggaaagtgagcccccaagatgggaaagaaccacacagctaagggagggcctggggagccccaccctagcccttgctgccacaccacattgcctcaacaaccggccccagagtgcccaggcactcctgaggtagcttctggaaatggggacaagtcccctcgaaggaaaggaaatgactagagtagaatgacagctagcagatctcttccctcctgctcccagcgcacacaaacccgccctccccttggtgttggcggtccctgtggccttcactttgttcactacctgtcagcccagcctgggtgcacagtagctgcaactccccattggtgctacctggctctcctgtctctgcagctctacaggtgaggcccagcagagggagtagggctcgccatgtttctggtgagccaatttggctgatcttgggtgtctgaacagctattgggtccaccccagtccctttcagctgctgcttaatgccctgctctctccctggcccaccttatagagagcccaaagagctcctgtaagagggagaactctatctgtggtttannnnnnnnnnnnnnncaccagagtctccctgggtcttgtgatgaactacatttatcccctttcctgccccaaccacaaactctttccttcaaagagggcctgcctggctccctccacccaactgcacccatgagactcggtccaagagtccattccccaggtgggagccaactgtcagggaggtctttcccaccaaacatctttcagctgctgggaggtgaccatagggctctgcttttaaagatatggctgcttcaaaggccagagtcacaggaaggacttcttccagggagattagtggtgatggagaggagagttaaaatgacctcatgtccttcttgtccacggttttgttgagttttcactcttctaatgcaagggtctcacactgtgaaccacttaggatgtgatcactttcaggtggccaggaatgttgaatgtctttggctcagttcatttaaaaaagatatctatttgaaagttctcagagttgtacatatgtttcacagtacaggatctgtacataaaagtttctttcctaaaccattcaccaagagccaatatctaggcattttcttggtagcacaaattttcttattgcttagaaaattgtcctccttgttatttctgtttgtaagacttaagtgagttaggtctttaaggaaagcaacgctcctctgaaatgcttgtcttttttctgttgccgaaatagctggtcctttttcgggagttagatgtatagagtgtttgtatgtaaacatttcttgtaggcatcaccatgaacaaagatatattttctatttatttattatatgtgcacttcaagaagtcactgtcagagaaataaagaattgtcttaaatgtcaaaaaaaaaaaaaaaaaaaaaaaaaaaaaaaaaaaatgtacctagagccaaggaaattggctctggtttggaaaaattttgctgttattatagtaaacatacaaaggatgtcaaaaaaaaaaaaaaaaaaatcgagggggggcc

SEQ ID NO: 5018 - DNA, 2401 bp, Homo sapiens
tttttttttttttttttttaatcagcaaggaatgtctttaacaaggaagaagtaaattatgataattactctgaatggtcggatccttgagcattactaattagcatttattgcctggattatagaacaatacatgtgaaaccgaactgcgattgctcttttacgttgaagacttgaaaaggcaatggagcaaaaagccagcatcatcggtagtgtagtcagtagtttacatctccttgataggacgcagaacccctcactttggaaacacgcaaatatggtcctcagtatttatggcccattcattttttttttgttagtcacatatttacataagatatcatagtcatggtagactaatgagaggagaagcattttggttatgtcatttcgggataattttatcagttgtgagagtttaacaataaagaacataaaacttgctgtttcataaaaatatgaaattttcctggagaaattttgacttaataaaggaacaaagaactcagtttgtagtgaataaaattttacattcacttccccactttctcatagaagatctacagttggggataaccgataagaggcaattggtttctggcttaagagcctttttcattaggaattttcggtaaattaaagtctgaaattagaaaaacattagacattaatcaacagaccaacaccagtcacgtaaataaatggcattcgtataatttggcagctgaaattcttaaataatctggcaagtacaaggagagaaagaggaaaaatgaaccgttcatcattctcactgcggtctcaccgtttccctccacaccccattacagcgaatgaagagaaagaacatcgtaaaatataaagccggtactaaatacagtcactagtcttccaataccttccatggattccccaccctgatcctttctagtttgaaagaataactttgactaaatctgtgaggagataaaacaggctggtgataaaaattaattctgctgaatgagcaaatgcatttggattgcagagatgcaaataagataatacctttcttttcctttgacataccaagaggattactttagaatgttaaatttgattttattagaatatattagcagtgttttaattaataccaatcaaacattttctttccctgaggcttgatgtgttcctcgctttctaaatcatctgtctttttttcatcaaaaagcccctctaccaaattaccaaagcctttgttacattctttataattttactgtattcaatggaaaattatgagctctttacctaaaggtgtcttgcctatagtaatatattcccaggttctagatttaaaatgaatactgttcattagtacacatattttttaaaggtagaattagagacttgaaaagaaatatcttctgtatttttcttttggggaaaaatgttgcaaaaggaattttggctggttcatattatttggcttttattctcactagagcttcctagagctgttaaattccaactgccttggttttgagctggcatttctttggaaacagaggcaaaaaaggaatttttaaaaaggaggtggggagagaaacggtgagaccgcagtgagaatgatgaacggttcatttttcctctttctctccttgtacctgccagattatttaagaatttcagctgccaaattatacgaatgccatttatttacgtgactggtgttggtctgttgattaatgtctaatgtttttctaatttcagactttaatttaccgaaaattcctaatgagaaaggctcttaagccagaaaccaattgcctcttatcggttatccccaactgtagatcttctatgagaaagtggggaagtgaatgtaaaattttattcactacaaactgagttctttgttcctttattaagtcaaaatttctccaggaaaatttcatatttttatgaaacagcaagttttatgttctttattgttaaactctcacaactgataaaattatcccgaaatgacataaccaaaatgcttctcctctcattagtctaccatgactatgatatcttatgtaaatatgtgactaaaaaaaaaaaaaaaaaaaggccataaatactgaggaccatatttgcgtgtttccaaagtgaggggttctgcgtcctatcaaggagatgtaaactactgactacactaccgatgatgctggctttttgctccattgccttttcaagtcttcaacgtaaaagagcaatcgcagttcggtttcacatgtattgttctataatccaggcaataaatgctaattagtaatgctcaaggatccgaccattcagagtaattatcataatttacttcttccttgttaaagacattccttgctgattagaaaaaaaaaaaaaaaaaaaa

SEQ ID NO: 5019 - DNA, 2538 bp, Homo sapiens
  misc_feature (645)..(645): n is a, c, g, or t
  misc_feature (1688)..(1720): n is a, c, g, or t
ctttttacagctagacctgtgtgctgcaaggagctaaggccttcagtgtccccttccttacccaggtttctcacagaatggattcccagcgggaacttgcagaggaactgcggctttaccaatccacccttcttcaggatggtctaaaagatctcctggatgagaaaaaattcatcgattgcaccctaaaagcaggtgacaaaagtcttccttgccacagattgattttgtcagcttgtagtccttacttccgtgagtactttttatctgaaattgatgaggcgaaaaaaaaggaggtagtgctagacaatgtggatcctgctatacttgatttaatcatcaaatacctgtactctgccagtattgatctcaatgacggaaatgtgcaagatatttttgcattggccagccgctttcagatcccctcagtgtttactgtctgcgtttcttatcttcagaaaagacttgctcctggtaactgtctagccatcctaagattaggacttcttcttgactgcccgagactcgccatttctgcccgtgaatttgtgtctgatcgctttgtacagatttgtaaggaagaggactttatgcaactggtctccacaggaactgatctcagtcattcaatgaacagccaatgtngagaaaaagaagaagcagtatttgaggcagtgatgaaatgggtgcgaacagacaaggaaaacagggttaaaaaccttagtgaagtgtttgattgtatccgttttcgccttatgacagaaaaatattttaaggatcatgttgagaaagatgatataattaaaagcaacccagacctccagaaaaaaatcaaagttctaaaagatgctttcgcaggcaaactcccagaacctagcaaaaatgccgcgaagactggggctggtgaggtgaatggtgatgttggtgatgaagatttacttcctggttacctgaatgacattcccaggcatggaatgtttgtaaaagacctcatcctcttggttaatgacacagcagcagtggcttatgaccccacggaaaatgaatgctaccttactgcactggctgagcagattcccagaaatcattccagcattgttacccagcaaaatcagatatatgtggtaggaggactatatgtggatgaagaaaataaggatcaacctctacagtcatacttcttccagctcgatagcatagcatctgaatgggttggacttccacctctgccttcagccaggtgtctcttcggtctgggagaggtggatgataaaatctatgtagttgcaggcaaagaccttcaaacagaggcttcgctggattcagtattatgctatgatcctgtggctgcaaaatggaacgaagtaaaaaaactccctatcaaagtctatggccataatgtgatttcacataaagggatgatatattgtctaggaggaaagacagatgacaaaaaatgtacaaacagggtgtttatcttcaaccccaaaaaaggagattggaaagatctggctccaatgaaaattcctcgttccatgtttggagtagcagtccataaaggcaaaattgtgattgcaggaggtgtcactgaagatggtctttcagcttcagttgaagcttttgaccttacaacaaataaatgggatgtaatgaccgaatttccccaagaaagaagctccatcagtttnnnnnnnnnnnnnnnnnnnnnnnnnnnnnnnnnttggtggttttgctatgattcaactggagtctaaagaatttgcacccactgaagtcaatgacatatggaagtatgaagatgataaaaaagaatgggctgggatgttgaaggaaatacgttatgcttcaggagctagttgcctagcaacacgtttaaatctcttcaaactgtctaaactgtgaacaaggtgacaaaacataatagattgggaggtggtttgtttggtgaatggggctttaatttattctgttttttaaaagcttgtacagacactcatgtagaaattattcaagaagttattgtctaagagatgagcagtaggtaagaaaacctcagtcattgactcttcaatgtaatgatcagagtttaaaaccattttctaataataaattaaatcttcagttgaacaaattattttgtgaatctgtttcactcaatggattgtaaagaaggctcctaaatttgagttgtttgctaatcatttcatttgcatcattagggtatccttaaactgattttctattacaattggaagtggagaatatgtgcatctacactaaaaaaatgtttaagatatcaaaaacctctcctcgtgcttcaaaatgacaggaatcctgtgcattatactaagaattacatgccataagatgacttcagaaatcctacttcagaagtgtaataaatggatggggaaatcgtttgatggggaaaagtctcttgtaagtaaaagtagtcaaattcaaaaaaaaaaaaaaaaaattaaattggggcagaaaaagagaatagagggaagggcaaaggggggaaatgtgtgttaa

SEQ ID NO: 5020 - DNA, 4786 bp, Homo sapiens
  misc_feature (1626)..(1633): n is a, c, g, or t
agcggaggaggcccggccgcgacccgggccgcgcgctgaggagccgcccggtcgcctgcgcgctcactccggcggcgtccccagcccgcggcccctctgctgccggcccccggctcgccggctgcgggagtggcctcaagatggatgaagacggcggcggcgagggtggtggcgtgcctgaagacctctcattagaagagagagaagaacttctagacattcgtcgaagaaaaaaggaacttattgatgacattgagaggctgaaatatgaaattgcagaggtgatgacagagatcgacaatctaacttccgtagaggagagcaaaacgactcagaggaacaaacagatagccatgggaagaaagaaattcaacatggatcccaaaaagggaattcagtttctaatagaaaatgacctgctacagagttccccagaagacgtcgcccagttcctttataaaggagaaggcctaaataagaccgtcattggggactacctgggtgaaagggatgaatttaatattaaagttcttcaagcctttgctggaactccatgagtttgctgatctcaaccttgtacaagccttaaggcagttcttatggagcttcaggctgcccggggaggcgcagaagattgatcgcatgatggaggctttcgcttctcgctactgcctgtgcaaccccggggtcttccagtccacagacacgtgctacgtgctgtcattcgccatcatcatgctcaacaccagcctccacaaccacaacgtgcgtgacaagcccacggcagaacggttcatcgccatgaaccgcggcatcaacgagggcggggacctccctgaggagctgctgaggaatttgtatgagagcattaagaacgagccatttaagatcccggaggacgacgggaacgacctgacccacaccttcttcaaccccgaccgcgagggctggctcctgaagctgggagggcgtgtgaagacctggaagcgccggtggttcatcctgaccgataactgcctctattactttgaatacacaacagataaggagcccaggggaatcatcccgttggaaaacctcagcatcagggaggtggaggacccccggaaacccaactgttttgagctctacaatcccagccacaaagggcaggtcatcaaggcctgtaagacggaggccgacggccgcgtggtagaggggaaccatgtggtgtaccggatctcagccccgagcccggaggagaaggaggagtggatgaaatccatcaaagccagtatcagcagagatcccttctatgacatgttggcaacgaggaaacgaaggattgccaataaaaaatagctttcctggctaaaagacccaggtaaaagacccaaccccagcagaaagacaccgcgggcggcccctccgcggaaggcgtggcagggaggcagtcgccctgcggtgcaagctgctgctccagagcataccgtggcccaggtggtatccccaaggcctcgtgccgtggctggggtcctgggaggtggtcgccctgcagtgcaagctgctgctccagagcgtaccgtggcccagactgatcctcgaggcctcctgccgtggctggggtcatggtcggctgcgcatgtnnnnnnnnatttcccttcctgcgaccatcccggcgcccctagggggagaagccaggacagcagcttccgctgtctccacagcagacacgggacggattccacagacgggagcctcattcgtaccatgccaaacgcattcactcggggcagtattaaccgttctagaaagccactgttttatagcaaaacaggaaaggaaaagctaccagttttttattcagaatttttctcagatatataggattatagcttttatatgcctttttatattctgaaattataacaaaagatactttctaacagtagtatttttagaatggcagctataaagttaactcctggacacaagtatatactgtgcactgaaaaaatatccatctacacagcacccaaggggagggctgggggcaccggcacgggggcagcgtgcagccctgccctgtcaggctgtcagacaagccccggggggcagcaggtgggctcgggacgggctgggggagggacggccatggcacttgggggctccagggtgactcccatgaggcctcccttcaaccaggctttttggccccacaaatactttaagcaaatcattaaaattataacagttaatggtttgggggtgtttaggctgtaactgctaactcctaggaaacagccttttccctggacacagatggtccatacgctgagccacgtgaaactgctgatgttttgtttagatgcacacacatggcagcgtttcatacaggtcagcaggttagaccggcttttgaccatattcatcgctatttaaaacctgtggcaaaatgaacgcttattttacagactttctaatttgaccagatttcttaatgaatagacacagaattaactaaaaacagtctcaccccatgtagtgcgccgtgtcctgagagaggtgccctccctacgaggagggaagaacaggccctggggtgcagaggcccggcacgtagagaacccagatagacgccggtggtggaactggtcaaactccacgcccgcctgggaggttgtcaggttgctgtggatgtaaggataggaggtgcccagtgctccgctcaaggaaggctggatctgggccccacctacagagagggctcagggctggaccgggggcattgtgtgcttgggccgacccgggccggtggcagacgctgttctctgtcgggagatttgcgtccccaggaccctgttacacagtgggctgttgggttggtggctggcttttcctctatggacttcctcttcctgccccacctgcataggcacacacaccttgaatctgcaccctctggagggcatctgtactcctgtgcaaaatgcccagtccagagacaaaacctcagactttgtgcacctaggtttccttctcagcagcggagactgttctttgagttgccttgaagtggaggccgagcggctgcgggcccttcgcctccctgcggctgaccttgatgtagctttaagtcacactagactgcagaggggtccgaggccagaaacccctgtcctgcatcagactttcattcccacgttcttaggctttgttactgatacctcaaatcggaagttttagttctgagaaaggcaagtcagcgttcttgaaatgcctgactggtagatatgcaactctggcctccagtcttccatgaaaataaatgctgcctggacccccacccagaccacacactgacggccggctccggcggtgcccacccctcaggctggcccggcacccaagactggccacagccagctctgtcagcatgttgtgctcggacaagctgtttccttcttctgaccaacccaggtgtgacctggggatgcagagctttctgttttgggtgttgggagaagcagcaggaaggagtcgccagatgatcaagctccccctttgctgtcatctgtgaatgagcttcgccaggtggtgggcacctgggagccatgcagaggctgtggtgctgagttagactccaggtactttgtggtcaaaggaaatcgcctagctccaggctgtgttaggacagtattagcatgaaggctgtgcgaccatcatgcctgctgatccttgaggcaggcctggtccagaaaactctgggtcagtgactgcgcagggccagccgctaccaggacggccctgaaacaggacacatctgttttttgtccctcaccctgggcaggccgcgtcacaatcacagtcctcctcctccccaccctgacgtctgagcgcagggcttgaattgttagtcccaactctggccaaagatacttttttccagagacagaggccaggaggcagtgaggggagccccgcggggaggcggcggcgactgccacagcccttccagcctgtcttgctggccgccctggttcatatttgagtttaattgtactgaccctggacccagataagcagcaactttgtgtctttggggtcacagaacattttggggcagtttaatgtggtaccaaactgaaaataggagctatttatagatggagcagcacttagtgcttcatagaaagcaatgcctatttttaaagttacaaacgcagatatctacatagatatgctttgctgagaagttaggtctgtggtagaccagaaaccacaaattgactttttttcttagaaaatatttctatttgcggtaaatatagtaatatgtaaataatgtacatctgttgatttctggagtgtctgttattcaatgatgtatatactcccacagctcgcatgaaggaacagcctctattgatacttggttgtaaagtgaagtaagattggagggtggatggctgtcagagctcttgcagatactgtgttcactaaataaaaatcacatgtattgttaaaaaaaaaaaaaaaaaaaaaaaaaaaaaaaaaaaaaaaaaaaaccaaaaaaaaaaaaaaaaaaaaaaaaaaaaaaaccttgtataccacttaacccaaaaccaattttagattaaaacaccctttatgaacgatccctaaattagggctcattggtccaattccccctatggggcgtgcaattccatttaacgggaccccctttaaaaacgccgtaacttggcaaatccctggggttccccaatttcgcttttgcatccccttttccccttggcgcatatcc

SEQ ID NO: 5021 - DNA, 1552 bp, Homo sapiens
  misc_feature (1255)..(1255): n is a, c, g, or t
gggaacgcggcggagctgtgagccggcgactcgggtccctgaggtctggattctttctccgctactgagacacggcgggtaggtccacaggcagatccaactgggagttgaagtgtgagtgagagtgaagaggaaccagcaggcttccggagggttgtgtggtcagtgactcagagtgagaaggccctcgaagtcgtcgtccctctcatgcggtgccacgcccatggaccttcttgtctcgtcacggccataactagggaggaaggagggccgaggagtggaggggctcaggcgaagctggggtgctgttgggggtatccgagtcccagaagcacctggaaccccgacagaagattctggactccccagacgggaccaggagagggacggcatgagcgacacacacaaacacagaaccacacagccagtcccaggagcccagtaatggagagccccaaaaagaagaaccagcagctgaaagtcgggatcctacacctgggcagcagacagaagaagatcaggatacagctgagatcccagtgcgcgacatggaaggtgatctgcaagagctgcatcagtcaaacaccggggataaatctggatttgggttccggcgtcaaggtgaagataatacctaaagaggaacactgtaaaatgccagaagcaggtgaagagcaaccacaagtttaaatgaagacaagctgaaacaacgcaagctggttttatattagatatttgacttaaactatctcaataaagttttgcagctttcaccaaaaaaaaaaaaaaaaaaaaagagaaaaaaagaaaaaaagaaaaaaaaaaaaaaaaaaaaaaaacaaaagaaaaaaaaaagcgggggggcggacccaaaaaaaaagcccggagggagggaacaaggacatgagagcccacaccatgtgtggtacaagagaagcggcaccaaaaaggagaaccatactaaaacacacagcgcggcgcgcaagaaaaaaaaacaacgacaagagagaaggaaaaaagatcaagcaggagacaatctaggaagaaagaaccccccacaaacgaggggggggaaacacacagagggcgaaaaccacaacaagagaaaaaagcacgccgagagaaaaccataaccgcaccgcgcaacacacatacgtgcgtgacaaccacacaagcgacactgcccgcggcgggaaagaacaagcgtacgccacagacgcgcgcctgcttcatcaacaatacaaccgggaggagntacagacaaccaacacacaacaacacaaacaaagaccacacacagcaggcaaagcaagacacaaccactcacgccagaacagcagaaacaacaagagaaacgaaaagaacaacaaaaggaagagaaaacgaagaagaaaaagaaaaaaaaaaagaacgaagagaaaagaggagagagggagagacgaacaaggcagaaacagaaaacggaaacaaaagaggaacacaaagagcacagaccaaaccaacgagaccaacagaaacaaagaagaaagaagcgcacgaagaaagcacaaag

SEQ ID NO: 5022 - DNA, 2422 bp, Homo sapiens
  misc_feature (220)..(235): n is a, c, g, or t
cttgcccacccatgctcaagatgggcgggatgccagcctgttacataaatgtgccaaaagcctggccatgcctggaaaatggaccaatccgcccgccaagaggttgggtctcgttccctagagagaaggaagtttcctctccttgaagtgagagctagaatcgcactttctgtcaagctgagagaaagactcttttccagaggctaaaaggacaagaaannnnnnnnnnnnnnnntctaactttgcgttttaaagggggaaggaggaaaggaaagagggggagggtggttctgcttatgccccacccctccggctaccccaggtccagccgtccattccggtggaggcagaggcagtcctggggctctggggctcgggctttgtcaccgggacccgcaggagccagaaccactcggcgccgcctggtgcatgggaggggagccgggccaggagtaagtaactcatacgggcgccggggacccgggtcgggctgggggcttccaactcagagggagtgtgatttgcctgatcctcttcggcgttgtcctgctctgccgcatccagccctgtaccgccatcccacttcccgccgttcccatctgtgttccgggtgggatcggtctggaggcggccgaggacttcccaggcaggagctcggggcggaggccgggtccgcggcagaccagggcagcgaggcgctggccggcagggggcgctgcggtgccagcctgaggctgggctgctccgcgaggatacagcggcccctgccctgtcctgtcctgccctgccctgtcctgtcctgccctgccctgccctgtcctgtcctgccctgccctgccctgtgtcctcagacaatatgttagccgtgcactttgacaagccgggaggaccggaaaacctctacgtgaaggaggtggccaagccgagcccgggggagggtgaagtcctcctgaaggtggcggccagcgccctgaaccgggcggacttaatgcagagacaaggccagtattgacccaacctccaggagccagcaacattttgggacttgaggcatctggacatgtggcagagcttggggcctggctgccagggacactggaagatcggggacacagccatggctctgctccccggtgggggccaggctcagtacgtcactgtccccgaagggctcctcatgcctatcccagagggattgaccctgacccaggctgcagccatcccagaggcctggctcaccgacttccagctgttacatcttgtgggaaatgttcaggctggagactatgtgctaatccatgcaggactgagtggtgtgggcacagctgctatccaactcacccggattggctggagctattcctctggtcacagctggctcccagaagaagcttcaaatggcagaaaagcttggagcagctgctggattcaattacaaaaaagaggatttctctgaagcaacgctgaaattcaccaaaggtgctggagttaatcttattctagactgcataggcggatcctactgggagaagaacgtcaactgcctggctcttgatggtcgatgggttctctatggtctgatgggaggaggtgacatcaatgggcccctgttttcaaagctactttttaagcgaggaagtctgatcaccagtttgctgaggtctagggacaataagtacaagcaaatgctggtgaatgctttcacggagcaaattctgcctcacttctccacggagggcccccaacgtctgctgccggttctggacagaatctacccagtgaccgaaatccaggaggcccataagtacatggaggccaacaagaacataggcaagatcgtcctggaactgccccagtgaaggaggatggggcaggacaggacgcggccaccccaggcctttccagagcaaacctggagaagattcacaatagacaggccaagaaacccggtgcttcctccagagccgtttaaagctgatatgaggaaataaagagtgaactggaaaaaaaaaaaaaaaaaaaaaaacagcaaaaagaaagaacagcgaagacacacagacaaaacaaaaacaaacacaacaaaacagcgagacaggccgacacaaaaaagcatccacagcgcggggagccacagagaccagacgacaacatttttgaaaagaacgcgggcccacagatgagaggaaaaaaaaaagaaggagacgaagcaagagaacaaaccaaaaccgaagcagcaggaaagaacaaccgcacagagcgacaatcagtgaggagccaaccaactgtgcgggagacaaaccaacgcgaaagcaacgcagcacaaatacaaacccacgagacaatatccaccgcggcaagaagtagagaccacgacaaacaatgacggaggcaaagcatacgaataacagaaaacaaaacaagg

SEQ ID NO: 5023 - DNA, 2980 bp, Homo sapiens
aagtagctatggcagtgcctgatacaaaataaactccaaatgtgtatttattagatggttggatggaagttatttgcgtgtgaaagcgcgttttacccgaaggcgctctgtgagggccagcgggtccccttcggccctggagccggggtcacacgctccccaccgcgtgcggtcacgagacgcccccaagggagtatcctggtacccggaagccgcgactcctggccctgagcccgggcttagccttcgggtccacgtggccggaggccggcagctgattggacgcgggccgccccaccccctggccgtcgcgggacccgcaggactgagaccatggaggcggtggcggtggccgcggcggtgggggtccttctcctggccggggccgggggcgcggcaggcgacgaggcccgggaggcggcggccgtgcgggcgctcgtggcccggctgctggggccaggccccgcggccgacttctccgtgtcggtggagcgcgctctggctgccaagccgggcttggacacctacagcctgggcggcggcggcgcggcgcgcgtgcgggtgcgcggctccacgggcgtggcggccgccgcggggctgcaccgctacctgcgcgacttctgtggctgccacgtggcctggtccggctctcagctgcgcctgccgcggccactgccagccgtgccgggggagctgaccgaggccacgcccaacaggtaccgctattaccagaatgtgtgcacgcaaagctactccttcgtgtggtgggactgggcccgctgggagcgagagatagactggatggcgctgaatggcatcaacctggcactggcctggagcggccaggaggccatctggcagcgggtgtacctggccttgggcctgacccaggcagagatcaatgagttctttactggtcctgccttcctggcctgggggcgaatgggcaacctgcacacctgggatggccccctgcccccctcctggcacatcaagcagctttacctgcagcaccgggtcctggaccagatgcgctccttcggcatgaccccagtgctgcctgcattcgcggggcatgttcccgaggctgtcaccagggtgttccctcaggtcaatgtcacgaagatgggcagttggggccactttaactgttcctactcctgctccttccttctggctccggaagaccccatattccccatcatcgggagcctcttcctgcgagagctgatcaaagagtttggcacagaccacatctatggggccgacactttcaatgagatgcagccaccttcctcagagccctcctaccttgccgcagccaccactgccgtctatgaggccatgactgcagtggatactgaggctgtgtggctgctccaaggctggctcttccagcaccagccgcagttctgggggcccgcccagatcagggctgtgctgggagctgtgccccgtggccgcctcctggttctggacctgtttgctgagagccagcctgtgtatacccgcactgcctccttccagggccagcccttcatctggtgcatgctgcacaactttgggggaaaccatggtctttttggagccctagaggctgtgaacggaggcccagaagctgcccgcctcttccccaactccaccatggtaggcacgggcatggcccccgagggcatcagccagaacgaagtggtctattccctcatggctgagctgggctggcgaaaggacccagtgccagatttggcagcctgggtgaccagctttgccgcccggcggtatggggtctcccacccggacgcaggggcagcgtggaggctactgctccggagtgtgtacaactgctccggggaggcctgcaggggccacaatcgtagcccgctggtcaggcggccgtccctacagatgaataccagcatctggtacaaccgatctgatgtgtttgaggcctggcggctgctgctcacatctgctccctccctggccaccagccccgccttccgctacgacctgctggacctcactcggcaggcagtgcaggagctggtcagcttgtactatgaggaggcaagaagcgcctacctgagcaaggagctggcctccctgttgagggctggaggcgtcctggcctatgagctgctgccggcactggacgaggtgctggctagtgacagccgcttcttgctgggcagctggctagagcaggcccgagcagcggcagtcagtgaggccgaggccgatttctacgagcagaacagccgctaccagctgaccttgtgggggccagaaggcaacatcctggactatgccaacaagcagctggcggggttggtggccaactactacacccctcgctggcggcttttcctggaggcgctggttgacagtgtggcccagggcatccctttccaacagcaccagtttgacaaaaatgtcttccaactggagcaggccttcgttctcagcaagcagaggtaccccagccagccgcgaggagacactgtggacctggccaagaagatcttcctcaaatattaccccggctgggtggccggctcttggtgatagattcgccaccactgggccttgttttccgctaattccagggcagattccagggcccagagctggacagacatcacaggataacccaggcctgggaggaggccccacggcctgctggtggggtctgacctggggggattggagggaaatgacctgccctccaccaccacccaaagtgtgggattaaagtactgttttctttccacttaaaaaaaaaaaaaaaaaaagtctgtcaaaatgagaaggtcactgctgccacgcttgggaggactcagggctatagcatggccctggggtgggacctgttctcccatcccttgcctcacgtccctgtttttgtttgtttgtttgtttgtgacggagccttggtctgttgcccaggcttgagtacaatggcacagtctcggctcactgc

SEQ ID NO: 5024 - DNA, 1206 bp, Homo sapiens
gaccacgcgtccggacccacgcgtccgcagaaactcagagttgatggtgagaggaggccgcctgagtcaggacacctggcttcttgaaaagttcgctctgccagaaaccacctagggaccacgttagctgccttccttgagctccccaggagtcggtttccacatctgtgaggtggagggctggtgtggaggtgctcatggggtgcggtgcttgggagacagccaggcccaggtggctgctgcttcctgctaagtgggggaggtgagacagatctggaaagccgtctccctcagatggtttcatttaatgctttatactgccgagtctgggggcttgttttggtttgggggcagccatcctccaccagaaagggggagctccttccgctgcggctccagatagatggggatgccgggctccaggccgaccagcacttgggatctgatgggacacggccagtgcctaggggtgccaagtccaaggcctcccactgggagtcatcgctgagaagatgccaatgtttcatccaccggctgcacaggcacaaactcccccacccaggacggctgtgatgaggtggccctccctgtcaaccctggtccctggagtccccagcacctggggccctggtggggctgatgtcacaggtgtttactgtgctgctgcactggtcctatgccagcctcacccatgtggggaccacggaaggcacactcccttacccccggtgccgggccgtgcggtcccccagacggacagcagctgtggcgacctgcgtttctccctgggcctgtgcttcctgtagttagtccgtcccctggttcccctgtggctcagaggccgcgtccctggcttgtacatatgtgattgctgtgggcacaccccagaccccatgtcatagctgccgtcccgacgtcacgacgcctgtcccgatgtcttacacccgagtgttagccctaggctcctgtactgtgcgtgcacttgaggctctgtccaattaagaaataaatgtggctcttactcaacacaaaaacaaaacaatacaaaacaacaaacccacatttggaacataaaaaatagagagacaacgccatcttatggggcccccgtgtatgaacaagaaagttggccccataagcgaccccccagggtgaggttcccgcacacccccgggggtaaacgctcacccccgcacttgggttaag

SEQ ID NO: 5025 - DNA, 1057 bp, Homo sapiens
atgggaaacaccaccagcgaccgggtgtccggggagcgccacggcgccaaggctgcacgctccgagggcgcaggcggccatgccccggggaaggagcacaagatcatggtggggagtacggacgaccccagcgtgttcagcctccctgactccaagctccctggggacaaagagtttgtatcatggcagcaggatttggaggactccgtaaagcccacacagcaggcccggcccactgttatccgctggtctgaaggaggcaaggaggtcttcatctctgggtctttcaacaattggagcaccaagattccactgattaagagccataatgactttgttgccatcctggacctccctgagggagagcaccaatacaagttctttgtggatggacagtgggttcatgatccatcagagcctgtggttaccagtcagcttggcacaattaacaatttgatccatgtcaagaaatctgattttgaggtgttcgatgctttaaagttagattctatggaaagttctgagacatcttgtagagacctttccagctcacccccagggccttatggtcaagaaatgtatgcgtttcgatctgaggaaagattcaaatccccacccatccttcctcctcatctacttcaagttattcttaacaaagacactaatatttcttgtgacccagccttactccctgagcccaaccatgttatgctgaaccatctctatgcattgtccattaaggacagtgtgatggtccttagcgcaacccatcgctacaagaagaagtatgttactactctgctatacaagcccatttgaagggatcccttcttgcctctaaggattcaggagaagcatctcccttgcatttctggactgaaccagtcttacctgagactggaaggctgatttgctttgaggctgatatgtgtgtttcagagcctctgagtaggatgctctgcttttgcatttgattgcagatgagagctttatgagttcacggaatttattttaagaaaaaaaaatataaatatgagaagaaggtaaatggaaaaaa

SEQ ID NO: 5026 - DNA, 1321 bp, Homo sapiens
ggggaaacgcttatgggagcgagcgcgaggaggaagacgaagaggaggacgaggaggacggcaaactgcgagctagagctggaggaggaggagctcgggggggaggaggaggacacggggggcgagggcctggctgacgacgacgaggacgaggagatcgatttggagaacttagacggcgcggccaccgagcctgagctgtccctggctggggcggcgcgcagggatggcgacctaggcctgggacccatttcggactccaaaaatagcgactcggaagatagctctgagggcttagaggaccggccactaccggtcctgagtctggctccagcgccaccaccagtggccgtggcctcgccgtctgccgtcgccccccgtgagcctggacccctgcgctcccgcaccagcccccgcctccgccctgcagaagcccaagatctggtccctcgcggagactgccacaagcccggacaacccgcgccgctcgcctcccggcgcgggggggtctccaccgggggcagcggtcgcgccttccgccctgcagctctctccggccgccgccgccgccgccgctcacagactggtctcagcgccgctgggcaagttcccggcttggaccaaccggccgtttccaggcccaccgcccggcccccgcccgcacccgctctccctgctgggctctgcccctccgcacctgctgggacttcccggagccgcgggccacccggctgccgccgccgccttcgctcggccagcggagcccgaaggcggaacagatcgctgtagtgccttggaagtggagaaaaagttactcaagacagctttccagcccgtgcccaggcggccccagaaccatctggacgccgccctggtcttatcggctctctcctcatcctagttctttaaaaaaaaacaaaaaaacaaaaaaaactttttttaatcgttgtaataattgtataaaaaaaatcgctctgtatagttacaacttgtaagcatgtccgtgtataaatacctaaaagcaaaactaaacaaagaaagtaagaaaaagaaataaaaccagtcctcctcagccctccccaagtcgcttctgtggcaccccgcattcgctgtgaggtttgtttgtccggttgattttggggggtggagtttcagtgagaataaacgtgtctgcctttgtgtgtgtgtatatatacagagaaatgtacatatgtgtgaaccaaattgtacgagaaagtatctatttttggctaaataaatgagctgctgccaaaaaaaaaaaaaaaaaaaaaaaaaaaaaaaaaaaaaaaaaaaaaaaaaa

SEQ ID NO: 5027 - DNA, 1528 bp, Homo sapiens
  misc_feature (1219)..(1219): n is a, c, g, or t
  misc_feature (1236)..(1527): n is a, c, g, or t
cggtgtatagagggtggtggaggtggctgtgtgttaccgtgaggtggtgtgtgcaggtgtaggatggagtacggaagtttagtatattgcgtggagggtgtctggtgagggtgtgggtggttgagatgatttcgcctatatggtagtaaggtggtggttgtaggacgtgtgatcgttgaatgttaataatattttgatgagtgtggttgagagttacgggagatgacaatcgtttattgtgtcagttggatgttaggtgtatctggaggttcaggtaattgtcctattctgtaagtattgttagatggaggcaagtcggaaggaagggtgtgatatcagggtgcggcagtacgttcggtggccttgaatttaccgacactggatatgcctgccaactaatcttggatagattggtgaaggcagttccatttagctggccagttgagacaatcacgcacagttattacccgtatactatgaacatattggttgtaaaccagtcattcgtgaatgtatagtgatgagaatttaaatatatgctgttctagaatttgatgtttgaccatttatgacttaattaccagagagccagtagaattaggacagtgtttcgaacaagcctaggctatctcgtaagttgaaaaatatgcgccagctatagttgcttcatgagtatgaagtaagatggcctctgatttacactggttcaatttacaaattttcaactttatgataggtttatcagggtactaaatgcatttcaacttgatagtttcaacttatgataggttaacccaggatgtaagtcccactgttgaggagcatctatttaggggttaattactttagtaataagtggaaagtaagataccttgagtaatgtttgcctataaaattgtcagcgtatttttacactattggctcaagaatgttataatgctaagggacataagttggcaaccacttggtttttggaaggactttcggtattgtattagaagtctgccctagctgttaaatttctgggtatttatcctaaggaattaattaaagagttaattgttcctttcttcagtgggccattgttttagatatttaaaaaatccaacagtttctatcataatgtaactgtaaaaatgtaaacacattattagcatggacttttaaataaagatttaaagaaagcaaaaaagaaaaaaaaaaaaacccttctacagcncccttgtcggccgcctnnnnnnnnnnnnnnnnnnnnnnnnnnnnnnnnnnnnnnnnnnnnnnnnnnnnnnnnnnnnnnnnnnnnnnnnnnnnnnnnnnnnnnnnnnnnnnnnnnnnnnnnnnnnnnnnnnnnnnnnnnnnnnnnnnnnnnnnnnnnnnnnnnnnnnnnnnnnnnnnnnnnnnnnnnnnnnnnnnnnnnnnnnnnnnnnnnnnnnnnnnnnnnnnnnnnnnnnnnnnnnnnnnnnnnnnnnnnnnnnnnnnnnnnnnnnnnnnnnnnnnnnnnnnnnnnnnnnnnnnnnnnnnnnnnnna

SEQ ID NO: 5028 - DNA, 1309 bp, Homo sapiens
  misc_feature (41)..(41): n is a, c, g, or t
cctgtacagagacaggacgctgcgagccgactccagcgtcnccgtttcctaatgtttccttgctacgcatctgggacgtattattaccccccggtcactcgttgctcttcttggggataaacacccccggggtaaaacttgctcttgttattacccctcgtccatttgacgcttcgtcttgcatcatgccgatcccttgtgcgccccactgtgcgtccctccttcacgcccttatcagatggaccgtcccaaacttaagttggctcttgggtcctgcagcacgagaagggctccggacttcccccaaagacaggcgccattgaggtgcccaacgtccccctgtatttctgaggaaaaactcagcaggacccgatagtgctaattcttagttttccaatttggggatccactggcctctgcttgcgggctcttgctctgatcacctttgattaccccaaagtggctgagcaggtgctgcaacaaaaggagcacacgatcaacatggaggagtgccggctgcgggtgcaggtccagcccttggagctgcccatggtcaccaccatccaggtgatggtgtccagccagttgagtggccggagggtgttggtcactggatttcctgccagcctcaggctgagtgaggaggagctgctggacaagctagagatcttctttggcaagactaggaacggaggtggcgatgtggacgttcgggagctactgccagggagtgtcatgctggggtttgctagggatggagtggctcagcgtctgtgccaaatcggccagttcacagtgccactgggtgggcagcaagtccctctgagagtctctccgtatgtgaatggggagatccagaaggctgagatcaggtcgcagccagttccccgctcggtactggtgctcaacattcctgatatcttggatggcccggagctgcatgacgtcctggagatccacttccagaagcccacccgcgggggcggggaggtagaggccctgacagtcgtaccccaaggacagcagggcctagcagtcttcacctctgagtcaggctaggggcctccccttctcatcctccccacccccccgccaaggttctcacactggcctgggcttgggtgcccatataggaggtctgtatgttcaccaacagtgcggaggggtcacacattgcaaaacactgcccagaacagtaaaaagagcctgcatgccaaaaaaaaaaaaaaaaaaaaaaggaagcgcctaaaattcccgggagaaaattttcgtatcccgttttttccagggccataggaggctttaacca

SEQ ID NO: 5029 - DNA, 849 bp, Homo sapiens
tgctgactccttgcttctttccagccggagccgctgccttgccccccggagactgaagacatggcacccaagagggccaagagaaggacagtagagagggcggaagctccagcgtcttctccatgttcgaccagactcagatccaggagttcaaagaggccttcactgtgatcgaccagaaccgtgatggtattatagacaaggaggaccttcgggacaccttcgcagccatgggccgcctcaatgtgaagaatgaggagttggatgccatgatgaaggaagccagcggtcccatcaacttcaccgtcttcctgaccatgttcggggagaagctcaagggtgccgaccctgaggatgtgatcaccggagccttcaaggtcttggaccctgagggaaagggcaccatcaagaagaagttcctggaggagctgctgaccacgcagtgtgaccgcttctcccaggaggagatcaagaacatgtgggcggccttcccccccgacgtgggcggcaacgtcgactacaaaaacatctgctacgtcatcacgcacggcgacgccaaggaccaggagtaggggcacccgcgggcctccgctgcccgacgcttctgttcggcccgacctccaccccggctcccaataaaatttaactgatctttgtttcttaaaaaaaaaaaaaaaaaaaaaaaaaaaatgcgggggcgaccccccaaaacatgaaacactacgtggggcgggccagaaggatagacacaggcgcacacgtgccagagaaccgcgagacggggggttcaccaaaaacccggggaggcgcttaaaacacagggaggccacggcaaaggaaaccgtacaa

SEQ ID NO: 5030 - DNA, 669 bp, Homo sapiens
ctttagtaaattgtattaatgggagaatctgtaagttacgtctgaactttcaggttgtcttataattgtctttttccttatgtcagatgttctatgtcataagaataaaatggttcacaccaatacaagtacttagttgtggaaagggagagtagaagataaaaatggagattttcctgtgctacaggcttagtcaagcttatggtctatttaatggttatcaaaggcaattaaatagtgttgagtgttctgcttttacctacatttcatttttcatgtacttagttacaaattgaaccctcttctatttttttcctgctcctgtttctgtttcattttagttttccttttccctgattatcatttaggcatgtaagtgacacccagtagcattgctttaattctgctggtgacagtgccaaagcttttactatactctttttgttgtctgttgcttttctcttgctaatttgcttgactagataactaagaattcaggtaagcattagctctttgctcactgagaataatacaacttgcaagataattaatttggattgttctacatgtatttcgtttatttctctttaccttgttcatttattacgacattttgaattatttacatacccatatttcttctttcttttatggctcagcacatgaaaa

SEQ ID NO: 5031 - DNA, 2371 bp, Homo sapiens
  misc_feature (2370)..(2370): n is a, c, g, or t
acaatatgaaaatatcttggccagtctttgagggttaggcacctggcaacagttgtggtgatttgggccattgtactaggggattcaagggaagttgggtttccccctacatttggtgattattacattaatatatgatcattccataagtctcctaagaaatcagatttttaaagaaagacacggattcagagacaatggtctgtaacatgaccaacttttgacaaatatggctgtactaggttttcatttttgctgttgttgttgtttgtttttgtgattgctcttatgtcggtaggtaatgtcaggaaaagtgactgtttcagatccccagtacaaacatcagaactaggatcaaatgacttgacttttaagctgttccattttctaagaagttacaattacaaaaagtaagcattttctacattcttacttctaagtaatgaccttctcattaatctttccttggcttaaaatgacaaataagaatccaaagtttttccactcctcctgtgggagataggaatagttgtgaagagtctgatggaataaaatgactccagagatttacacagccaccatttgatcccagcctttgtccttgtgttatttaaacaatggcttcctgctttctcaggggtcaggaaaatgatttaaaaatttgtcttcttgacaaggcctgaaaacgaagggaggtgtcgtggagaaatggtgatttttctggttacatcacttgattcaagcactccctggagctttcaaagccttttttatctgctcagagttgacacccaactcagagtcagaactcaccagaagatgaggaacacccccgaaatcaatgtttcctttctccatgggatttttttcaatcttggtacagctgcatatctcccaaactcggatgctcttgtgaaatgacagccacatcagtgtggttactccccacaaataacactagggggaaatgaccttttttatttaaaaaaaaaaaaaaggctaatgctatagaatgatcatgtaaagaatgttgaataaaatttggcccatgttttaattgactctaggcacctctattgaaataagtctgaggcatagtttgtgaaacatgtttcaaaagtgtttgatgtataataaatgctagaaatttacagtacagaaatagtaaaaaaataaaataaaaataaacctgtagattacagctctgttcctaagaacctcagcctttattgtgtcttagtaaagttgatctgctttatttttagtttattgaatttctggtgtactagcctcttaagatagaacttttaatacatatgtactggttaatgcctgtttacgcagaaaatggcactttgttctttcagtgtgtttccctcagtgtcacagggtatatcaatttgatagatcatttgacatttgtcaaaaatacgtttcccattttaaaaatatgtataattggttgcatagacatatgtcactttttgcagtgtcttcatcttgatcatagttttagacatcaactatgtctcactttccaactgccatagaaatttggtacatttgcaaattctggtggaatctagtgagctgaatgtattggtagatcaaatgatccaaaggacttgggtgttatccttcagtctgtgttgaaccattcagatattgggaatggtccttacacgggggaagtcttttgagaatatttgttctcttattttttgtttgtttgttgctggcaaaaaaaaaagtaactttaaaaactcagaaaagccactgaactgtattttgtgaccttatgattagttttatctttcaactgatttttattgttacttttactcaatatcaacagtacttcaatagatatttattagttatgttcaatctaatgacttaaaacagttgaaaaggaggaaaatcaactccagtccacacatacagtcatgttacattaagatgtcatgttgtatgtcacacagtttctagattgatttctcttgtgtataagttataacatcaaaaatgccaaagggtatataaaataagctacaataatattcaacagaacttaacctggaccttatgttgtaataatttattcatattagctgtagtcttctgtatttatattttcagtatttattatgaatgacatggaaattcgtgtatttattgtggctttttattgcagtgtgtatatatatataacaaataagcatttttaagtcttatccttaagtttcttttattagtggcacttgtattatgctgtactttttattacatattgtacaatatcttgtccatttgtttgcagcagagtaaaaccggtttctaagttgtaaaaaaaaaaaaaaaaaaaaagtna

SEQ ID NO: 5032 - DNA, 1481 bp, Homo sapiens
aggaggcagtggccaggaaggcacaggcctgagaagtctgcggctgagctgggagcaaatcccccaccccctacctgggggacaggtgcctgggtctcagcgcagtgccgatggtggcccgtccttgtggttcctctctacctggggaaataaggtgcagcggccatggctacagcaagacccccctggatgtgggtgctctgtgctctgatcacagccttgcttctgggggtcacagagcatgttctcgccaacaatgatgtttcctgtgaccacccctctaacaccgtgccctctgggagcaaccaggacctgggagctggggccggggaagacgcccggtcggatgacagcagcagccgcatcatcaatggatccgactgcgatatgcacacccagccgtggcaggccgcgctgttgctaaggcccaaccagctctacttcggggcggtgttggtgcatccacagtggctgctcacggccgcccactgcaggaagaaagttttcagagtccgtctcggccactactccctgtcaccagtttatgaatctgggcagcagatgttccagggggtcaaatccatcccccaacctggctactcccacgcctggaccactctaacgacgctcatgctcatcaaactgaaacagaagaattcgtcccactaaagatgtcgagacccatcaacgtctcctctcatagtccctctgctgggacaaagtgcttggtgtctggctgggggacaaccaagagcccccaagtgcacttccctaaggtcctccagtgcttgaatatcagcgtgctaagtcagaaaaggtgcgaggatgcttacccgagacagatagatgacaccatgttctgcgccggtgacaaagcaggtagagactcctgccagggtgattctggggggcctgtggtctgcaatggctccctgcagggactcgtgtcctggggagattacccttgtgcccggcccaacagaccgggtgtctacacgaacctctgcaagttcaccaagtggatccaggaaaccatccaggccaactcctgagtcatcccaggactcagcacaccggcatccccacctgctgcagggacagccctgacactcctttcagaccctcattccttcccagagatgttgagaatgttcatctctccagcccctgaccccatgtctcctggactcagggtctgcttcccccacattgggctgaccgtgtctctctagttgaaccctgggaacaatttccaaaactgtccagggcgggggttgcgtctcaatctccctggggcactttcatcctcaagctcagggcccatcccttctctgcagctctgacccaaatttagtcccagaaataaactgagaagtggaaacttaaaaaaaaaccccgatcatataaacgcagcacacttcacccaccggcactacccgccacgccagccacccccaccacaaacggccgctccttacccg

SEQ ID NO: 5033 - DNA, 3487 bp, Homo sapiens
  misc_feature (587)..(622): n is a, c, g, or t
ttatagaactcactggatcgcccttcatctctctccctccatctgaaatgtatgaattaaatcaggactcagctaggactgaatcaaatgaaaaagaaattttcgattaattgcttcttcaatgttagacctatataagtgatgctaaatttacaccagcaaactcctatcagacagtttcaaggaggatttgactcatgcataacccaggaaacatttcaggaaacttttaagacaacagtgtggaacacaatcactcttacttctatttataaaaagcctatcaaaacagcaaaatcctgttgcaaattccaaagacatcactttgcagcaggtggaaaacagagaggttgttagactccatcactttcagctggagttacaaaccatcaaattagcaggtggaaaatttatattctcagaagccaacaggagactgcctttttaaaaggtgtcatgaagccttctatttctccaaacaactcaatatttctctttaaaatggcatctctgttccttattctcttgatgacagtttgcagtgccattatagccagtgtattaaataccaggctttaatgggaagnnnnnnnnnnnnnnnnnnnnnnnnnnnnnnnnnnnnttttaaattagaactgttggttgtattcttaccacaaccaaaacccaaagtttaaaggcttgattactctatattaggtctaatatgaattttcaccttctgattgcattactttttcgaaatctgctaactagtgctggaataacaaaaatgcctaagccaaaatgctgtagctctgcaccaacagcacagctcatcagatgttttctatagtagtaaagaatttgattgacttaattgaatatcagcaattttaatacccactagaattatggaagtatcagagtggaagtgaggacgcaataaaagcttaataagtggtggtgtcttctaggaattatgaaaaaaaaagctcagcagagctaagccagatcttattacatcataaagactagagttacaaatggcagccccaaacctagaaggggcagttacaatgtggacaccctttcagcccagttggtgctcacatctgctgaccaacattcatatcaattacatttttacagtctgtaagtcatttgatgctttagaaaataaaaacacacacctacagcattctaaagaaactattttgttaaaaaatttaaacacattttatattaaaataagtgatcaatgactttcatgattgtcaaaagtaaaaagtgcagacatttaaaaaagctcttctttcacattttacctaccaaatctagatattcaacgtgagtccttaaaacagtcacttctaaattttattttgactcctttcttggctttttcaaactggaccatgagacccccttcctaaacaatgcagttgttttgttttattctttttttccagaaattcaagctgaaacatttgatatgacctgtgttttacctggtgatcagttctcaggctagtctaagtctgtgctgtcttggcatgccttgggtttcctatcctgagagtggtaatgccagtagaatgatgggaaccaggagagtgaatacgaccagattcaaagcccaaaacaatatgtttcagtttacttttatatgtagattttttaaatattcacatctagcctggaattttagtaaatacagatacttgttgtatccatgggaaatgaggtcatttcaaagatgtaagtcacgttggtgactactttcttttacttgtgataaatatatcactatacagggtaattgcttttataaatttgatcctttgcattggcttataattcaagaaatgtcaacttcactgtgtcactttatgtcatctctcataaaagtttctggcaggactaaagtttcaaaggaatgtgatagaatttattttggataacatttgtattcagcatgctaatgatgtaactcctctctttatcattaccacggtgatagttaagttcattcgttaactcattttagtgacatgtgaggccatttaaatatttttaagataatgtatattgattagaaagggttagaaggagacaaatttatggtagaaattagccttgccattgtctaagttaatttatgtgacctgattgaacagttttagttgtaactttagagtagcttctttgttagaggatctctttcctttctcttttggttttctcccaatatttttatctgtcttgggattatcttaaaaggtatttattaatgagtatttggaagaaaattgacctagaaaatgtctcttttaaatttatctaggtacttgtatcaccagagaccttcatcaagtcctactgccacactggataaggccactacccccgacccttcttgtcagggacatggcttcctaataatggttttgctgttgtctctacataggggacctatggaaaaggagtttgaaatttctacctttgtagtacattgtatccaattttgttttgctcctccttttcatgtggtcaccaagcttttttccttagccattaaaaaagccacccctctttaaaacaaatttaaagatctatatacatttttgcaactttatttaataaaaaagagaagaaaaaaataaaatctaaatctcaattaccctaaagtggaaaaacctaagtatctaacctaggaacttgttgcctggtggtggttgttgttgttgttgttttttaatttatttagtgttgatccttgagttatttaatggtatccaaatgatatctgaaagtgattgattttaagatgtaatagttggcaaagtcatttcatttgtgtctcaaacaaataaagcccactgccatgggttaccatctgaaccctgattcattaggcactagtcatgccaaatggggatctcagaatagtttaatcttttcaaagatactcacaatggccaactgtgtgtgaatactggaaagtttgagattcttctatattcttcaaatttatggtcctgagactaggagggatctccagaggtcatatggctcatcgatctaccaccagggaagactgtcacttaggcatgcccaacaggagagatcgccatctattcttaacatctctagggaaggcagtttccttggcaacacaattcagctctcttaggttttctcacaataagaaaatatcttggccagtctttgagggttaggcacctggcaacagttgtggtgatttgggccattgtactaggggattcaagggaagttgggtttccccctacatttggtgattattacattaatatatgatcattccataagtctcctaagaaatcagatttttaaagaaagacacggattcagagacaatggtctgtaacatgaccaacttttgacaaatatggctgtactaggttttcatttttgctgttgttgttgtttgtttttgtgattgctcttatgtccgtaggtaatg

SEQ ID NO: 5034 - DNA, 1810 bp, Homo sapiens
  misc_feature (1170)..(1191): n is a, c, g, or t
aatccagaggcaggggagggacggtgcaggcgcagagtattgggtttggctggcctcgatttaaagagacagaagctgtcggggtcctggaagacggtccccaataccctccccccaagtccttgggaccacttgggtccccagagctggggagatggtttgtggcggctttgcctgctccaagaatgcgctttgcgctctcaacgtggtctacatgctggtgagcttgttgctcattggagtggctgcttggggcaagggcctgggtctggtgtccagcatccacatcatcggcggagtcattgctgtgggagtcttccttctccttattgcagtggctggactggtgggtgctgtcaaccaccaccaagtcctgctgttcttttacatgatcatccttggtttggtcttcatcttccaatttgtaatctcttgctcatgtctggctattaaccgaagcaaacagacagatgtcatcaatgcttcttggtgggtcatgagcaacaagactcgggatgaactggaaagaagttttgattgttgtggcttattcaacctcacaaccctgtatcaacaagattatgatttctgcactgcaatctgcaagagccagagccccacatgccagatgtgtggagaaaagtttcttaagcattcagacgaagccctgaaaatcctagggggtgttggactcttctttagctttacagagatccttggtgtttggctagcaatgagatttcggaatcagaaggatcctagagccaaccccagtgcctttctatgagactttggatccttctgacttttcttctgctctctctaagctttctcttcctcccttagggaatatctagggtctgtaaccgttttggtttgagaaaaaggaaaggccccttgtcacatcctctaaaattgatggaatagcaagactttatgccttgacatattttagtgggagccagactataaggaataaaaggaaaaactttcttcctctctctccaagaggatatgggaagcttctgtgagtgcataggatgggggctggagtcattcttagctgtttcccttcctctgtccatatactggatcacctcaacataccctggtgtggctctaagggtaaatcagggatagggccaaggagaaaacaaccaagaactcttnnnnnnnnnnnnnnnnnnnnnntttgagaaagtttagcgaatataaaagtaaaagccatttaaaaatctatattcttttttttttttgacacagagtcttgctctgttgcccaggctggagtgcaatggcatgatctcggctcaccgcaacctctgcctcccgggttcaagcgatcctcctgcctcagtctcccaagtagctgggattacaggtgtgcaccaccacgcctgactaattttgtatttttagtagagacagggtttcaccatgttagtcaggctggtctcgaactcctgacctcaggtgatccacccgcgttggcctcccaacgtgctgggattataggcgtgagccaccacgccccgcctaaaatccatattcaaagaagcaatttcagttcctttctaagctttgtcagtcaaggggctccactgacttcctaggccctgtaatttaaccagtctttaaggttttgcaggaaagtcccttcttccaagtggtttttccaaatcgcacaatggcaaagccaaacagaggaagaaacattaaaaaaaaaaaaaagaccattaaaaaaaaaaaaaaaaaaaaaaaaaaaaaaaaaaaaaaaaaaaaaaaaaaaaaaaaaaaaaaaaaaaaaaaa

SEQ ID NO: 5035 - DNA, 2535 bp, Homo sapiens
agcatttttccggcgtttgggcggggcccgggcagggcgcgcggcacgaggcctgggttgcgctgccggccacgtccccgcgccgggcctcaggctccttcctactgtccgagggccaccaggccgccgggggcctgctgcgcccggatgcgtctgttactagagtggagagtctaccttcgtctcacatgtgccacaaaggatggcatggcccgggagtgccccaccacgtggctttcaccccctgcaaagccagacttcgcccagcgacacagtgtcaagcccacagctctccaaggaggaagatggtccaggctgggagcatccccttagcagcagcctctgatcccttggccaagcaggagggaaccattagcagcctgaggagctggctggctgggagcctcggggaccgcccagccttgctcccagctcacccacaagatgtggacagctcttgtgctcatttggattttctccttgtccttatctgaaagccatgcggcatccaacgatccacgcaactttgtccctaacaaaatgtggaagggattagtcaagaggaatgcatctgtggaaacagttgataataaaacgtctgaggatgtaaccatggcagcagcttctcctgtcacattgaccaaagggacttcggcagcccacctcaactctatggaagtcacaacagaggacacaagcaggacagatgtgagtgaaccagcaacttcaggaggtgcagctgatggtgtgacctccattgctcccacggctgtggcctccagtacgactgcggcctccattacgactgcggcctccagtatgactgtggcctccagtgctcccacgactgcagcctccagtacaactgtggcctccattgctcccacgactgcagcctccagtatgactgcggcctccagcactcccatgacacttgcactccccgcgcccacgtccacttccacagggcggaccccgtccactaccgccactgggcatccatctctcagcacagccctcgcacaagtgccaaagagcagcgcgttgccaagaacagcaaccctggccacattggccacacgtgctcagactgtagcgaccacagcaaacacaagcagccccatgagcactcgtccaagtccttccaagcacatgcccagtgacaccgcggcaagccctgtaccccctatgcgtccccaagcacaaggtcccattagccaggtgtcagtggaccagcctgtggttaacacaacaaataaatccacacccatgccctcaaacacaaccccagagcccgcccccacccccacagtggtgaccaccaccaaggcacaagccagggagccaactgccagcccagtgccagtacctcacaccagcccaatccctgagatggaggccatgtcccccacgacacagccaagccccatgccatatacccagagggccgctgggccaggcacatcccaggcaccggagcaggtagagactgaagccacaccaggtactgattccactgggccaacacccaggagctcagggggcactaagatgccagccacggactcgtgccagcccagcacccaaggccagtacatggtggtcaccactgagcccctcacccaggccgtggtagacaaaactctccttctggtggtgctgttactcggggtgacccttttcatcacagtcttggttttgtttgccctgcaggcctatgagagctacaagaagaaggactacacccaggtggactacttaatcaacgggatgtatgcggactcagaaatgtgaggggggcgggggcctggcgggaggcctggccccttcctcgtcctttccttttgcctttgagaccaaaccaagtgcttccaaattcttttggtgcaattgaggagatatgccagatgcttaaacacatttaattgctgtcagattaattccatgatcactaaagagttgctgcttttttcatatttatttttgtaaatgattctgtgcccaggagcagctgggggttccacctcagggtggggcgggcaggaccccgtctccccaggtgtcggagcctgacctgaattaaagtactgactgctcgccacaaaaaaaaaaaaaaaaaaaaaaaaaaaaaaaaaaaaaaaaaaaaaaaaaaaaaaaaaacaaaacacacgaaccacacacaacacgggacacatccatcgagggcggaaacaaccacaaacaagggcgccacgcacacacggtcccacaccccccctttgtaaaacgggagaaaatcggggggccccccaccaagaggggccgcccaacatctacagcagacacccgggtcctccgtatagggcgcgacgaacgagacagcagcacgccatgcgcgcacgcgcgcgcctgcgccgcgcgaggtctagtaacgcgcggggagcacactaccgcgaagcacacaaacagtccacggaggactaacggacgcacagcctcaccgccgcagaaacacgacaacagaccaacgtaagcaacgaaagcatgcgcacggcc

SEQ ID NO: 5036 - DNA, 2267 bp, Homo sapiens
tgtggttgctcgtagtgagttgcgctcgctatgtctggacgtggcaagcagggaggcaaagcccgcgctaaggccaagactcgctcttctagggccggtctccagttccccgtgggccgagtgcaccgcctgctccgcaaaggcaactatgccgagcgggtcggggccggcgcgccggtgtatctggcagcggtgctggagtacctgaccgccgagatcctggaactggcgggcaacgcggcccgcgacaacaagaagacccgcatcatcccgcgtcatctccaactggccatccgcaacgacgaggagctcaacaagctgctgggcaaagtcaccatcgcacagggcggtgtcctgcccaacattcaggccgtgctactgcccaaaaagactgagagccaccacaaggcgaagggcaagtaactatctgtactagtttgtggcagctcaagtaaaatcgagtccaaaccaacggctcttttcagggccacccacgtcttctctaaaagaacttaacatttattccatgtgaaagaaagtgagacatggacaagactctagtcataaattacccatctttttgaaaacagtgtagcgaacaccgcagatttaaaagaaaaactagagggaaggtggtccagattttaccacgcttaaaagttaagatgtgaacaaatctcttaggccattacttaattttaaacttaatcagtgtgtgtccacagagcaccagtggcttcgtgagttcttgaagcactttggcccaaaagagttatcgcccgggctagaatttagcagacagctgttccacgcgggccagggcggcatgaagaagtcccgccgctacgtgcccggcacagtggccctgcgcgacgttcggcgctaccagaactccgagctgctgatcagcaagctgccgctcctgcgagagctcggcggtgacgccgctgcacgagagcgaggctgaagaactttgtgacacaatagtccacctccctgcaaaggctctgtcagagactcacatctttcctgatggatagctgtgaagcattctcttacccaccctactgcatgttgcaaagtattcctttaaaatgaagtgagtaaaatactgggatgacgttatctggagcccaagaaagatggctcatttggaaaggcctaatatcccaagttgcttacctagaagaacttgacaggatagttaataataaaccttaaaacccatgaagaaatctgaggtaaagtgttagcacacagactgttaaaatgtctgcctcacagataggagggaaaatatatagaggattataatatggttcaacaaatgttgatgagtattagaaatgtacattagaaatattagaaatgtttatgactattagaaaagtacagggtattgggcgttcctgacacaaactgaggcctcctagcaagactggcagttttctgtaaaggagggttatttactacggtagtgcaaataacttttggtgttgtagctaaataaggaatactcatgccaagattgcacaattgtgcctcctccctctgttcactgaactctgatgtaattttttttttttttttgagacggagtctcgctctgtcgcccaggctggagtgcagtggcgctatctcggctcactgcaagctccgcctcccgggttcacgccattctcctgcctcagcctcctgagtagctggggctacaggcgtctgccaccatgcccagctacttttttgtatttttagtagatacggggtttcaccgtgttagccaggatggtcttgatgtcctgacctcgtgatccaccggcctcggcctcccaaagtgctgggattaccggcgtaagccaccacgcccggcccactctgaagtaatcttaagaagacgttaactcatttttcttgtgtattgtagacacttttggctgtctggtaacatggaaaatctcagaatgatgttttaagtatataaaatgccaaacaaagttaaattacagttatcaaagtatttttaaaacttcatagtgataaatgagactatatagttatattgttaatatagttaacacattacatgatttggtgagcctaattgctgttactaattagaggagtaaaaatgtttcacgataactcagcaattgtaatgagaaatgaaacatctaatgtcttttgggttacaaagtaacaggtactgagatttgtggcctaaattcataataaagtgaaatgttcaagttcaaaaaaaaaaaaaaaaa

SEQ ID NO: 5037 - DNA, 5549 bp, Homo sapiens
  misc_feature (1237)..(1304): n is a, c, g, or t
ccacgcgtccgctcggctccgccccggcgctctcccagggcccctagctttccgctgggtcgggcggaaatgagccgtggcttttggctggcggagccgctggcagggaccgggccccaccctgccccagtggctgccgactcacgcgggtgcagctctgttccgcggaggcacgccccctcccgtctctccgtctcgaccccctcgcggggcccaggtggggcccaagtcgccgccagcgtctgtgccgcgtcccttgctctgtgaaggacaggcctcgcgccaggaccccggtggacttctgaggtgccaggatggtgggagaactccgctacagggaattcagggtgcccctggggcccggcttacatgcctatcctgatgagctgatccgccagcgcgtgggccatgatgggcatcctgagtaccagatccgttggctcatcctgcggcgtggcgatgagggggacgggggctctggccaagtggactgcaaggctgagcacatcctgctgtggatgtccaaggatgagatctatgccaactgccacaagatgctgggcgaggatggccaggtcatcgggccctcccaggagtctgcaggggaggttggggccctggacaaatctgtgctggaggagatggaaaccgatgtgaagtccctcattcagagagcccttcggcagctggaggagtgtgtgggcactatccctcctgctcctctacttcacactgtccacgtgctcagcgcctatgccagcattgagcccctcactggagtattcaaggacccaagggtcctggacttgctcatgcacatgttgaggaagcctgattatcagattcgctggagtgcaggccggatgatacaagccctgtcctcccatgacgctgggacccggactcagatccttctgtcactgagccaacaagaagccattgagaaacacctggattttgacagccgctgtgctctgctagcactgtttgcacaggccacgctctctgaacaccccatgtctttcgagggcattcagctaccacaggtcccaggaagggtgctcttctccctggtgaagcggtatttgcatgtcacctcgctcctggatcagctgaacgacagtgctgcggagccaggagcccagaacacctctgctcctgaggagttgagtggggagaggggtcaactggagctggagttcagtatggccatgggcaccctgatctcggagctggnnnnnnnnnnnnnnnnnnnnnnnnnnnnnnnnnnnnnnnnnnnnnnnnnnnnnnnnnnnnnnnnnnnnttccagcctcagctggcagatgtgagcccagggctccccgctgcccaggctcagccctccttcaggaggtcaagacgttttcgccctcgttctgagttcgcaagtggcaatacctatgctttgtatgtgcgggacacactgcagccggggatgcgagtgcggatgctggatgattatgaggagatcagtgccggggatgagggcgagtttcggcagagcaacaacggtgtgcctcctgtgcaggtattttgggagtcaacaggccgcacctattgggtgcactggcacatgctggagatcttgggctttgaggaagacattgaggacatggttgaggctgatgagtaccaaggggcagtggccagtagagtcctgggtagagccctgcctgcctggcgctggaggcccatgacagaactctatgctgtgccttatgtgctgcctgaggatgaggacactgaggagtgtgaacacctgaccctggctgagtggtgggaactcctcttcttcatcaagaagctggatggacctgaccatcaggaggttctccagatcctccaggagaacctagatggggagattctggatgatgagatcctagctgaactggccgtgcccatagaattggcccaggacttgctgctgactctgccacagcgactcaatgacagtgccctcagggacctgatcaactgccatgtctacaagaagtatgggcctgaagccctagcagggaaccaagcctacccatcccttctagaagcccaagaagatgtcctcctgctagacgcgcaggcccaggctaaggactcagaagatgcagccaaagtggaagcaaaagaacccccatctcagagtcccaacactcccctgcagcgtctggtggagggttatggtccagctgggaaaatcctcctggatctagagcaagccctcagctcagaggggacccaggagaacaaggtcaagccactcctgctgcagctgcagcggcagccgcagcccttcctggcactgatgcagagcctggacactccggagactaacaggaccctgcacctgactgtgctgagaatcctgaagcagctggtggacttccccgaggcactgctgctcccctggcacgaggccgtggatgcctgcatggcctgcctgcggtccccaaacactgatcgagaggtgctccaggaactgattttcttcctgcaccgcctgacctcagtgagcagggactatgccgtggtgctgaatcagctgggagcaagagacgctatctccaaggccctggaaaagcacctgggaaagctggagctggctcaggagctgcgggacatggtgttcaagtgtgagaagcatgcccacctctaccgcaaactcatcaccaacatcctgggaggctgcatccagatggtgctgggccagatcgaagaccacagacgaacccaccggcccatcaacatccctttctttgatgtgttcctcagatacctgtgccagggctccagtgtggaagtgaaggaggacaagtgctgggagaaggtggaggtgtcctccaacccgcaccgggccagcaagctgacggaccacaaccccaagacctattgggagtccaacggcagcgccggctcccactacatcaccctgcacatgcgccggggcatcctcatcaggcaactgactctgcttgtggctagtgaggactcgagttacatgccggcccgagtggtggtgtgcgggggtgatagcactagctctcttcacacggaactcaactcggtgaatgtgatgccctctgccagccgggtgatcctcctggagaacctgacccgcttctggcccatcatccagatccgcataaagcgctgccagcagggtggcattgatacgcgcattcgggggttagagatcctaggccccaagcccacgttctggccagtgttccgggagcagctctgtcgtcacacacgcctcttctacatggttcgggcacaggcctggagccaggacatggcagaggaccgcaggagcctcctgcacctgagttctagactcaacggtgctctgcgccaggagcagaattttgctgaccgcttcctccctgatgacgaggctgcccaagctctgggcaagacctgctgggaggccctggtcagccccgtggtgcagaacatcacctcccctgatgaggatggcattagccccctgggttggctgctggaccagtacctggagtgtcaggaagctgtcttcaacccccagagccgcggcccagctttcttctcgcgggtgcgccgtctcactcacctgctggtgcatgtcgagccctgtgaggcaccccctcctgtggtggccactcctcggcccaaaggcagaaacagaagccacgactggagctccttggctacccggggccttccaagcagcatcatgagaaacctgacgcgctgttggcgggccgtggtggagaagcaggtgaacaattttctgacctcatcctggcgggatgatgactttgtgccacgctactgtgagcactttaatattctgcagaactcaagctctgaactgtttgggcctcgggcagccttcttgctggcgctgcaaaatggctgtgcgggagccttgctgaagctcccttttctcaaagctgcccacgtgagtgagcagttcgcccggcacattgaccagcagatccagggcagccggatcggtggagcccaggaaatggagaggctggcacagctgcagcaatgcctgcaagctgtcctgattttctccggcttggagatagccaccacttttgagcattattaccagcactacatggcggaccgtctcctgggcgtggtctcgagctggctggagggggccgtgctggagcagatcggtccctgcttccccaaccgcctcccccagcagatgttgcagagcctgagcacctctaaggagctgcagcgccagttccacgtctaccagctccagcagctggatcaggaactcctaaagctggaggatacagagaagaaaatacaggtgggccttggggccagtggcaaggagcacaagagcgagaaggaagaggaagctggggcagcagcagtggtggatgtggcggagggagaggaggaagaggaggagaatgaggacctctactatgaaggggcaatgccagaagtgtctgtgcttgtcctgtcccgacactcctggcctgttgcctcaatctgccacacactgaaccccagaacctgcctgccctcctacctgaggggcactttgaacagatactccaacttctacaacaagagtcagagccaccctgcccttgagcgaggctcacagaggcgactgcagtggacgtggctgggctgggctgagctgcagtttgggaaccagaccctgcatgtgtccaccgtgcagatgtggctactgctgtatctcaacgacctgaaggcggtctctgtggagagtctgctggcgttctcagggctctccgcagacatgctcaatcaggcgattgggcccctcacctcttcaagaggccccctggaccttcacgagcaaaaggatataccaggaggggtcctcaagattcgagatggcagcaaggaacccaggtcgagatgggacattgtgcggctcatcccacctcagacgtacctgcaagctgagggtgaagacggccagaacttggagaagagacggaatcttctgaactgcctcatcgtccgaatcctcaaggcccatggagatgaggggctgcacattgaccagcttgtctgtctggtgctggaggcttggcagaagggcccgtgtcctcccaggggtttggtcagcagccttggtaaggggtctgcatgcagcagcactgacgtcctctcctgcatcctacacctcctgggcaagggcacgctgagacgccatgacgaccggccccaggtgctgtcctatgcagtccctgtgactgtcatggagcctcacactgagtccctgaacccaggctcctcaggccccaacccacccctcaccttccataccctacagattcgctcccggggtgtgccctatgcctcctgcactgccacccagagcttctctaccttccgtcagccctagacttggggtcaggggaaggtagagctggagcttttacagaaataaaacccaagagtttgattataaaaaaaaaaaaaaaaaaaaaaaaaaaattgggggcgcctccggccccagaaaagttcttaacacctg

SEQ ID NO: 5038 - DNA, 4800 bp, Homo sapiens
  misc_feature (7)..(9): n is a, c, g, or t
  misc_feature (12)..(12): n is a, c, g, or t
  misc_feature (19)..(19): n is a, c, g, or t
  misc_feature (285)..(316): n is a, c, g, or t
caggtgnnnttntgggtanctctgcccctgatgaggagaggacccagggtgtggagcctgactcccatcgccagactaggggcttaggggaggaagggttttgggagagtgagctcttgtggccaggaggccacggtcctggactccaggagtgtcacttggaggaccggtgccacctccttccccagagtgcctaagacaggagcaggacattgtgttcctgatcgatggctcaggcagcatctcctcccgcaactttgccacgatgatgaacttcgtgagagnnnnnnnnnnnnnnnnnnnnnnnnnnnnnnnncagttttccctgatgcagttctccaacaaattccaaacacacttcactttcgaggaattcaggcgcagctcaaaccccctcagcctgttggcttctgttcaccagctgcaagggtttacatacacggccaccgccatccaaaatgtcgtgcaccgattgttccatgcctcatatggggcccgtagggatgccgccaaaattctcattgtcatcactgatgggaagaaagaaggcgacagcctggattataaggatgtcatccccatggctgatgcagcaggcatcatccgctatgcaattggggtagggcgtgggatggcttcccacttctcccacggcttcctctcagggcaactcccctttctgtgtatgttcttttctctttgagacagggtcttgctctatcacccaggaagtggtgcaatcctagctcactgcagccttgaactcctgggctccagtgatcctcccaccccagcctccccagtagctgggaccacaggtgtgtgccatcaagcctggctattttctttttggttgagatggggtcttgctatgttgcccaggctggtctcaaattcctggccttaagcaattctgccaccttggtctcccaaagcacagggattacaggcgtgaaccaccgccaacaacatccctttcaaggatagaaacaccagctctctcggctcttactgccttaaggatgaaaactctgccccagactggagaccatgatcctttctcctaaactccctgatgctgtccgggcttcgtgtttctcctgtgtccaccgggtgtgatcatgttgatcttgtggggttattggaagatgttgcacccagtgcacacaggcacatttgatttattatttttactgagttgatcttttctggggacaggttggattagcttttcaaaacagaaattcttggaaagaattaaatgacattgcatcgaagccctcccaggaacacatatttaaagtggaggactttgatgctctgaaagatattcaaaaccaactgaaggagaagatctttgccattgagggtacggagaccacaagcagtagctccttcgaattggagatggcacaggagggcttcagcgctgtgttcacacctgatggccccgttctgggggctgtggggagcttcacctggtctggaggtgccttcctgtaccccccaaatatgagccctaccttcatcaacatgtctcaggagaatgtggacatgagggactcttacctgggttactccaccgagctggccctctggaaaggggtgcagagcctggtcctgggggccccccgctaccagcacaccgggaaggctgtcatcttcacccaggtgtccaggcaatggaggatgaaggccgaagtcacggggactcagatcggctcctacttcggggcctccctctgctccgtggacgtagacagcgacggcagcaccgacctggtcctcatcggggccccccattactacgagcagacccgagggggccaggtgtctgtgtgtcccttgcccagggggtggagaaggtggtggtgtgatgctgttctctacggggagcagggccacccctggggtcgctttggggcggctctgacagtgctgggggatgtgaatggggacaagctgacagacgtggtcatcggggccccaggagaggaggagaaccggggtgctgtctacctgtttcacggagtcttgggacccagcatcagcccctcccacagccagagtctcgctctgtcacccagactggagcacagtggtgcaatctccgctcactgcaacctctgcctcccgggttcaagtgattctcctgcctcagcctcctgagcagcttggattgcagcggatcgcgggctcccagctctcctccaggctgcagtattttgggcaggcactgagcgggggtcaagacctcacccaggatggactggtggacctggctgtgggggcccggggccaggtgctcctgctcaggaccagacctgtgctctgggtgggggtgagcatgcagttcatacctgccgagatccccaggtctgcgtttgagtgtcgggagcaggtggtctctgagcagaccctggtacagtccaacatctgcctttacattgacaaacgttctaagaacctgcttgggagccgtgacctccaaagctctgtgaccttggacctggccctcgaccctggccgcctgagtccccgtgccaccttccaggaaacaaagaaccggagtctgagccgagtccgagtcctcgggctgaaggcacactgtgaaaacttcaacctgctgctcccgctaccctttgagaagaactgtggagccgaccatatctgccaggacaatctcggcatctccttcagcttcccaggaaacaagggcagctgcgttccctgcacctgacatgtgacagcgccccagttgggagccagggcacctggagcaccagctgcagaatcaaccacctcatcttccgtggcggcgcccagatcaccttcttggctacctttgacgtctcccccaaggctgtcctgggagaccggctgcttctgacagccaatgtgagcagtgagaacaacactcccaggaccagcaagaccaccttccagctggagctcccggtgaagtatgctgtctacactgtggttagcagccacgaacaattcaccaaatacctcaacttctcagagtctgaggagaaggaaagccatgtggccatgcacagataccaggtcaataacctgggacagagggacctgcctgtcagcatcaacttctgggtgcctgtggagctgaaccaggaggctgtgtggatggatgtggaggtctcccacccccagaacccatcccttcggtgctcctcagagaaaatcgcacccccagcatctgacttcctggcgcacattcagaagaatcccgtgctggactgctccattgctggctgcctgcggttccgctgtgacgtcccctccttcagcgtccaggaggagctggatttcaccctgaagggcaacctcagctttggctgggtccgccagatattgcagaagaaggtgtcggtcgtgagtgtggctgaaattacgttcgacacatccgtgtactcccagcttccaggacaggaggcatttatgagagctcagacgacaacggtgctggagaagtacaaggtccacaaccccacccccctcatcgtaggcagctccattgggggtctgttgctgctggcactcatcacagcggtactgtacaaagttggcttcttcaagcgtcagtacaaggaaatgatggaggaggcaaatggacaaattgccccagaaaacgggacacagacccccagcccgcccagtgagaaatgatcccctctttgccttggacttcttctcccccgcgagttttccccacttacttaccctcacctgtcaggcctgacggggaggaaccactgcaccaccgagagaggctgggatgggcctgcttcctgtctttgggagaaaacgtcttgcttgggaaggggcctttgtcttgtcaaggttccaactggaaacccttaggacagggtccctgctgtgttccccaaaggacttgacttgcaatttctacctagaaatacatggacaatacccccaggcctcagtctcccttctcccatgaggcacgaatgatctttcttttctttcttttttttttttttcttttctttttttttttttttgggacggagtctcgctctgtcacccaggctggagtgcaatggcgtgatctcggctcactgcaacctccgcctcccgggttcaagtaattctgctgtctcagcctcctgagtagctgggactacaggcacacgccacctcgcccggcccgatctttctaaaatacagttctgaatatgctgctcatccccacctgtcttcaacagctccccattaccctcaggacaatgtctgaactctccagcttcgcgtgagaagtccccttccatcccagagggtgggcttcagggcgcacagcatgagaggctctgtgcccccatcaccctcgtttccagtgaattagtgtcatgtcagcatcagctcagggcttcatcgtggggctctcagttccgatttcccaggctgaattgggagtgagatgcctgcatgctgggttctgcacagctggcctcccgcgttgggcaacattgctggctggaagggaggagcgccctctagggagggacatggccccggtgcggctgcagctcacccagccccaggggcagaagagacccaaccacttctattttttgaggctatgaatatagtacctggaaaaatgccaagacatgattatttttttaaaaagcgtactttaaatgtttgtgttaataaattaaaacatgcacaaaaagatgaaaaaaaagctcttgggaaatatgtaaaaggtctaaaaataaaaaagccttctgtgaaaaaaaaaaaaaaaaa

SEQ ID NO: 5039 - DNA, 2280 bp, Homo sapiens
tctaacaacccacacacaggactctctaccattcagactgctatctataaaatagggtgcttctggtcggggggctgccaccccaggtcctccaagcaacccttttccccatagtgggaggtcagcatccctcagaagcatctcaggaaaaaatgataaagcatttagagaattgggaagaaaatagagggatactatcaaagagtaaaggacagtcctgggggatgaagggggattttcttttttcttttttttttttttggagacagagtcttgcactgtcgcccaggctggagtgcaatggcacaatctcggctcactgcaacctccgcctgaagggagattttcaaagcaacattgcctctatcataggtagtcttcaatgtaatactggcaccaacaagagaaccgagctaaattaaaactaccctcaaaatgtcatcacagctgatgtgcacagcaggaaggacgatgtcacaaaatgcacagatctgttcctattgcacattccacctttcccacgtactgctggcagcccagaataaccaaaatctttttagatgtctgtcttaaagagagctataatatgcaaacatacacacacacacacacacacacacacacacccacacacacacacaacctcaaacctggtttataaaagagctttgtggatcagagtacaccctcacttggtccaagaatctaattgtcaacattaggcaaatagacccaatgaatgtaaccaggaagagaattaactggttggctggaatattgtatttgatatgatatgcttatttgcaaactaatctccaactgtttgtccagtactaattcaactgactcatcttctaaatgtataggacaaagcctttaaaaagttaagctcttcagcaacgaaaagttaacaccatctaaaataaatagattttaaaatatatgtaatgaaattacaggtcactggaaattcaattctacaatgaatataaattaacattaaaatctattaagtactattcctgggaagattttggttcagaggttttatttttttaagggcttaatatttgggaataaatgggcatagcttagaaacccttacaaagttgtaagtagactagaggtaagattatttggtgacaagatacaaagatctgtttctatgtccaaaataatggcttacctcattttagttaatagaagtattcccaaaaagttgtgcaaataggctttttataactggacgcttattttaagtatactagaggccatggttgtaaagaaaacctgtagtcactcctctaataaactgaagaactctaagtgattagcccctgtcctacatctgcacagtggacggcatactccaggcactcataagtgtttgttgaatgcatgaattcgctctgacagttttttttttcccctacaggactttcttaaagtgaggcacatgctaactgaaatggttctgcccgctgttactgcagaaagatggaatccagctcacagtttaactgatgccattacaaaatatcagataatttcagagtgttttcaatcaaaataaaatttccataagtatgagtgtatgtatttttgaggaatgttgatctatgattggcagaagcttttattgttaactcactcactgaaaacaactgcttgagctgaattctatttcaattaacaaccaaggcaagtaaagcactttacctaacttcagaaataccaccagaaaccattccacttctgtaacagcttcttcccctcactccagcacaaatatttaaatgctgtccttaccttagtccacaaaagcaaaacatgaattacaaagctaagattaaattagaaagctgccgacttaaatatgacaaagtttttttagccttaaaataagaactaagttaaatacattcaacaaaagtaactcttaaagggaaatttttttcttatttggtgttttcttcccttcccatttaaattttagactcaatttttaataatttttttatgttcatttttctaaataatatatcctctttaaaacaatacagaatggctaggggtgcgacctatgtgtccacataaatatgggacctggcacataaataaaataggggggtttttcggtctttttttccggcatttgtcactgccaaaccggcgggccccccagcgagggatattttggggggggtggggggggggggggggggggggggggggttcactgtgtggggtccgtctttatgggtgtcctaaaaagtagtg

SEQ ID NO: 5040 - DNA, 7299 bp, Homo sapiens
  misc_feature (684)..(702): n is a, c, g, or t
  misc_feature (2325)..(2366): n is a, c, g, or t
  misc_feature (4535)..(4541): n is a, c, g, or t
  misc_feature (5386)..(5400): n is a, c, g, or t
  misc_feature (6366)..(6381): n is a, c, g, or t
aatatttctacggaaggcgctgcacagactagcaaaggctgtttcttttacctgactgaggtcactgcatcagctgaaggcagacgatgtgcttaagcctgagtggagcagagatgggcaccagttgcgtcttgaagtgccatcagctgtaaccaaagttccacatcccaagacgacagccaggcgttcctgccctcaagaactgaagacaatggagctctctgatagtgaccgacccgtcagcttcggttccacatcatcctcggcctcttcccgcgacagccatggttccttcggcagcagaatgaccttagtttcaaatagccacatgggcttgtttaaccaggataaggaggtaggggccataaaactggagctgattcctgccaggccgttttccagcagcgagctgcagagggacaaccccgccacggggcaacagaacgcggatgagggcagcgaaaggccacccagagcgcagtggagagtggactcaaacggggcacccaagacgatcgcagactcggccacgagccccaagctcctctatgtggatagagttgttcaggaaattctggaaaccgaaaggacttatgtacaagatttaaaaagcatcgtagaggattaccttgactgcatcagggaccaaacaaaacttcccctggggaccgaagaaagatcagnnnnnnnnnnnnnnnnnnnggatatctaccacttcaatagtgaacttctgcaagatttggaaaactgtgaaaatgatcctgtggccatagcagagtgttttgtgtccaagagtgaagagttccacatttatacccagtattgcactaactatccaaggtccgtggctgtgctaacagagtgtatgaggaacaagatactggccaaattcttcagggaacgtcaggaaactctgaaacactcgctgcctctggggtcctatctcttgaaaccagttcagcggattctcaagtatcatctccttctgcatgaaatagaaaaccaccttgataaggacacagaaggctatgatgtggtgcttgatgctatagacacaatgcagcgagtcgcctggcatatcaatgacatgaagcggaaacacgagcacgcggtccggttacaggagatacagagtttgctcactaactggaaggggccagacctgaccagctacggggaactggtgcttgagggaaccttccgcatccagcgagccaagaatgagcggacgctcttcctcttcgacaagctgctgctcatcacgaagaagagagatgacacgtttacatacaaagctcacatcctgtgtggcaacctcatgcttgtggaggtgattccaaaagagccgctcagcttcagcgtcttccactacaagaatcccaagctgcagcacacagtccaggccaaatcccagcaagacaaacgcctctgggttctgcacctaaagagactgattctggagaaccatgcagccaagattccagctaaggccaagcaagcaatccttgaaatggatgccattcatcatccaggcttctgttacagtcctgagggagggacgaaagcactgttcggctctaaagaaggttctgctccatatcggctgagaagaaaatctgaaccttcctcacggtcacataaagttttgaagaccagtgaaacagcacaagacatccaaaaggtttctagagaggaaggatctccccagctgtcttcagcaaggccgtctcctgcccagagaaatagtcagcctagcagttctaccatgatcagcgtgcttcgagcgggtggagctctcagaaacatctggaccgatcaccagatcaggcaagccttgtttcccagccgacggtccccgcaggagaatgaggatgatgaagatgattatcagatgttcgtgccgtcattttcctcctcagatctgaactctaccagactatgtgaagatagcacttctagtcgcccttgcagctggcatatgggacagatggagtccacagagacctccagctctggtcacaggattgtcaggcgggccagcagtgctggggagagcaacacatgccctcctgaaataggaactagtgacagaactagggaactgcagaacagccccaaaacagaagggcaggaggagatgactccctttgggtcatccatagagttgactattgatgacatagaccatgtctatgataacatcagttatgaggacttaaaactaatggttgctaagcgggaagaagctgaatccactccctctaaatcagccagggactccgttcgccccaagagcaccccagagttagccttcacaaagaggcnnnnnnnnnnnnnnnnnnnnnnnnnnnnnnnnnnnnnnnnnngcaccctctcaggtggagaggcatccagccaaagcacgcatgaactccaagcggttgaggagaacatctatgacaccatagggctcccagatcctccgtcgctgggttttaagtgcagcagcctaaagcgtgcaaagcggagcacctttttgggtctggaggccgacttcgtgtgctgtgacagcctgaggccatttgtttcccaagacagcctccagctcagtgaggacgaagccccttaccatcaggccactcccgatcatggttatctgagtttgctgtatgactctcccagtggtaacttgtctatgcctcataagcctgtatctgataaactgtccgaagaagtagatgaaatctggaatgacctggaaaattacatcaagaaaaatgaagacaaggccagagaccgtctcctggcagcgtttcctgtgagcaaggatgatgtgccagacaggctgcacgcagagagcacccctgagctgagccgggacgtggggcgctctgtgtccacgctgtccctgcctgagagccaggctctcctcacgcccgtgaagagcagggctggcagagccagccgcgccaactgcccctttgaggaagacctgatttctaaagaaggctcctttatgagccttaaccggctttctctggctagtgaaatgcccctcatggacaatccctacgacctggccaacagtggcctgtctcaaacagacccagaaaaccctgacctggggatggaggccacagataagacaaaaagcagggtgtttatgatggctcggcagtacagtcagaagattaagaaggcgaatcaacttttaaaagtgaaaagtctggagctggagcagccgccggccagtcagcatcagaaatccatgcacaaagacctggctgccatcttggaagagaagaagcaaggagggcccgccattggtgccaggattgctgagtattcccagttgtatgaccagattgtattcagagagtctcccttgaaaattcagaaggatggctgggccagccctcaagaatcctccctcctgaggtctgtgtcaccttcccaggtccaccatggtagtggagactggcttctgcattcaacctatagtaatggagagttagcagatttctgtctcccaccagagcaagacttgaggtcaagatatcccacgtttgagatcaatacaaaaagtactcccaggcaattgtccgcagcttgctctgtgccttctcttcaaacctctgaccctctgccaggctctgtgcagagatgcagcgtggtagtaagtcagcccaacaaagagaactggtgtcaggaccatctttacaactccttgggtcggaaagggatcagcgctaaatctcagccttatcacaggtcccagtcatcttcctccgtcttgatcaacaaatcaatggattccatcaactaccctagtgatgtgggaaagcagcagctgctgtctttacacagaagttcaaggtgtgagagtcaccaggacttgctgccagatattgctgactcgcatcaacagggcactgaaaaactctcagatctcacactccaagactcacagaaagttgtggtggtcaatagaaatttacccttaaatgcccaaattgcaacacagaattatttttccaatttcaaagagactgatggagatgaagatgactatgtggaaatcaagtcagaagaagatgagtcggagttggagctatctcacaatcgtagaaggaaatctgactcaaagtttgtggatgctgacttttctgataatgtctgcagcggcaacacattgcattctttgaatagtccgcgcactccaaaaaagccggttaacagcaaacttggcctttcaccatatctgacaccatataatgattctgacaaactgaatgactatctttggagggggccatctcccaatcaacaaaatattgtccagtctctaagggaaaaatttcagtgtctcagttcaagcagctttgcttaaggttcttcataataactgcttgaatcaacttcttattttgctcataaaacgttacagatactgatgaggtgttttatgtataccagattaaaacaattttgtaagaaccagaggtgtaaaatatactttcttttacagcacaacttttggaaatggctgacgatgnnnnnnngattgtactgtagcacatgttggcatcaacagtatattttctcatgctgagtgtcttcatgtttcatgtaagtcaatcttacttgaaagtttttagacttttaacacgatggccataacctgacaatagtgcccacaccttaagaaatgcaataatcctttcctgttatccagaaggcccaggtagttttatcctgtgactcaaaggcagcaaggagactttttcacattttaaaaggcaacgaaagctgttgaaagaattatgcttatatctcacattttggttatatttgtggtaacaccttaggataacgtaagccagagatctgtaaattggactgcagtctgaggtgcccattttagggtttttgtgctagtattcttttatgtcattttgatgcagaaattgtgtgactgttgaaaattaaaatgtagcgggacccattttctgtacgcagaaccctttacctgtattcctggacaaggcctagagaacgagctgctcatcatgtttctaatataatttctggggtgaaatgaatgatttccttactggcttagagaaaaccaaggtcaataaaatgcagattgacttaactattagaaaagatgggatgacttctgggaaccacttaactcttcaaatgactgttgaaagagaaaaagcaaaactgaaatcccaccagaccattttgtgtgcctgtttctaatcgatacaaagttaagcatgagctaaaatcagacaaagcactttaaatttatcctttccagagcgctttgcacatgcaccctcctgagtttgggattctgccaaatgaccaacttgatcctggccctgaggagtcnnnnnnnnnnnnnnnagggcaagaatctatttcctaaactacacataacatgggagcctttttttcgttgttttcaggtatattaaagaatgaaatctttggttactaggtgctgactaataaataacaccttttatattctgaccatttgtcacatttcattgtgatactgtatactgatctaactccttatgaaaggcaacaaacaaaaataagacattgaataaaaagcaaaatcaaagaagctaaagagaaaaatgaaggcagatatattgcaactttataacatattctattttattgaagactgcaattaatgcagcaagaatgctttctcaagcggtggcctttgtattctcattttaatcaggtgtacattctatggcctctcccccatgctgttagtttctattttaaaagatacaataatatatgtagggaaaggggcctgggctcttcatttaaaggtaagcagtaatattgagtaagtgacataattctttttctctttgttaagtcctatgcctctttttcttaactgtaaaacatagaatatgagcgtttttatcttacaaataggtacctaaggcatgtgattttatttttaaataacaaaaaataacccaagtttcttgcttctccaaagtattcttctcatagcttataaaagaaagtccacattgaatagcatggtctgggaacattccttctttattgtgtttatttgaacatgatatgagtttccaagatgaaatgatcaaaaaagataagtaccacaagaaagtttttttgtttggttggtttttttgtttgtttgtttttttcttgagactgagtctctccctgttgcccaagttggagtgcaatcttggctcactgcagcctccacctccccggttccagcgattctcctgcctcagcctcttgaatagctgggattacaggcgcccgccaccacacctggctaatttttgtgttgtnnnnnnnnnnnnnnnngcacgaggttggccaggctggtctcgaactcctgatctcatgatccgtctgcctcggcctcccagagtgctgggattacaggcatgagccactgcgcccggccaagaaagtatgtttttagaggtgtgtgtaagtgcatttgtattacctatgaacaaaattacctgactcttgtcccaggaaagctgtttcgcattttcgctttttgattggtattatccagttctatgtagttcatattattgttctgtctgactctcagaaattacttcttcacgccagtgtcttgttgcatgactttgatgtcacctataggaatacacctcactgcacgtaagtgggtatcttactgtataaaaggtctacatggctttaggttttaggacaaatgtgtagatttatagaccatttctgttggccaggacacagattttgagagctgtgtgtatatatatataatcatgtttgtatttttttcctgaaagttatcaattgcttttgtttaaaacagtttgttttagaggtggggtggggatgtatataacgaggaaaagttatatgtactttaaagtatgtcaagttcttactagtttcctgtactgaaggttcaattttttttatataagtttacttttcacctgctctattctttgtggggaaaaaatgcatctagaaaaacatagtttaaatactgtatataagataatgaaagttagtaacgtccattatttaataaagtttgtaaagtacaaggtaaaaaaaaaaaaaaaaacaaatctgtgggccccgcccgagaaactcttaaacccgcgtggcgcggcgccacggtagaccgcacaggtgcagaacacgcgacaacggcgatccataaaccgggccgcgtgaacacggccgccaggtaaggcagagaatcccgca

SEQ ID NO: 5041 - DNA, 2213 bp, Homo sapiens
cttaacatacttgcagctaaaactaaatttgctgcttggggacctccttctagccttaaatttcagctcatcaccttcacctgccttggtcatggctctgctattctccttgatccttgccatttgcaccagacctggattcctagcgtctccatctggagtgcggctggtggggggcctccaccgctgtgaagggcgggtggaggtggaacagaaaggccagtggggcaccgtgtgtgatgacggctgggacattaaggacgtggctgtgttgtgccgggagctgggctgtggagctgccagcggaacccctagtggtattttgtatgagccaccagcagaaaaagagcaaaaggtcctcatccaatcagtcagttgcacaggaacagaagatacattggctcagtgtgagcaagaagaagtttatgattgttcacatgatgaagatgctggggcatcgtgtgagaacccagagagctctttctccccagtcccagagggtgtcaggctggctgacggccctgggcattgcaagggacgcgtggaagtgaagcaccagaaccagtggtataccgtgtgccagacaggctggagcctccgggccgcaaaggtggtgtgccggcagctgggatgtgggagggctgtactgactcaaaaacgctgcaacaagcatgcctatggccgaaaacccatctggctgagccagatgtcatgctcaggacgagaagcaacccttcaggattgcccttctgggccttgggggaagaacacctgcaaccatgatgaagacacgtgggtcgaatgtgaagatccctttgacttgagactagtaggaggagacaacctctgctctgggcgactggaggtgctgcacaagggcgtatggggctctgtctgtgatgacaactggggagaaaaggaggaccaggtggtatgcaagcaactgggctgtgggaagtccctctctccctccttcagagaccggaaatgctatggccctggggttggccgcatctggctggataatgttcgttgctcaggggaggagcagtccctggagcagtgccagcacagattttgggggtttcacgactgcacccaccaggaagatgtggctgtcatctgctcaggatagtatcctggtgttgcttgacctggcccccctggccccgcctgccctctgcttgttctcctgagccctgattatcctcatactcattctggggctcaggcttgagccactactccctcatcccctcaggagtctgaacactgggcttatgccttactctcagggacaagcagccccctttgctgcctgtagatgtgagctgttgagttccctcttgctggggaagatgagcttccatgtatcctgtgctcaaccctgaccctttgacactggttctggcctttcctgccttttctcaagctgcctggaatcctcaaacctgtcactttggtcagatgtgcagaccattactaaggtctatgtctgcaaacattactaatctaggtcctattactaatctatgtctgcaaacattaaaggaatgaaacaatgaaaggaacatttgaaagaaaatgtgggtagacaatttcttgcaacttgggggaaagtttagaattcttttgattggactactttttttttttttcctcaagcttcaggtgaccacaatagcaacacctccctattctgttatttcttagtgtaggtagacaattctttcaggagcagagcagcgtcctataatcctagaccttttcatgacgtgtaaaaaatgatgtttcatcctctgattgccccaataaaaatctttgttgtccatccctatacaacctgaaaaaatggttgacatttaatgagaggaatgtcaaaaatacattttactttattcaaagaaaaatatattggttactgggaaaaggtcaagaaagaggcagaaagagatcagggagggctaaagttgtgtcttatgccaagcggaagtggaaaatatcacttttcactttatcaactgagactttggggcctgtaagcttgaggcaagacagaaataagagaatcaagacttgattgtaaaaattgacaactttagattctgaggctaggctgagtacttattatacggctacatttacacatttacacttatctaataaatcagatttcacagtctcaaaaaaaaaaaaagaaaaaaaaaaaaaaa

SEQ ID NO: 5042 - DNA, 1838 bp, Homo sapiens
ttttaattatatatttttactctatgtttctctacatgtttttttctttccgttgctggcggaagaggcacgtgcgctgctgaatggagctggtcgctggttgctacgagcaggtcctctttgggttcgctgtacacccggagcccgaggcttgcggcgaccacgagcaatggactcttgtggctgacttcactcaccatgctcacactgcctccttgtcagcagtagctgtaaatagtcgttttgtggtcactgggagcaaagatgaaacaattcacatttatgacatgaaaaagaagattgagcatggggctctagtgcatcacagtggtacaataacttgcctgaaattctatggcaacaggcatttaatcagtggagcggaagatggactcatctgtatctgggatgcaaagaaatgggaatgcctgaagtcaattaaagctcacaaaggacaggtgaccttcctttctattcacccatctggcaagttggccctgtcggttggtacagataaaactttaagaacgtggaatcttgtagaaggaagatcagcattcataaaaaatataaaacaaaatgctcacatagtagaatggtccccaagaggagagcagtatgtagttatcatacagaataaaatagacatctatcagcttgacactgcatccattagtggcaccatcacaaatgaaaagagaatttcctctgttaaatttctttcagagtctgtccttgcagtggctggagatgaagaagttataaggttttttgactgtgattcactagtgtgcctctgcgaatttaaagctcatgaaaacagggtaaaggacatgttcagttttgaaattctagagcatcatgttattggtctcagcatccgagtgatggtttcatcaaaatgtggaagcttaagcaggataagaaagttcccccatctttactctgtgaaataaacactaatgccaggctgacgtgtcttggagtgtggctagacaaagtggcagacatgaaagaaagccttcctccagctgcagagccttctcctgtaagtaaagaacagtccaaaattggcaaaaaggagcctggtgacacagtgcacaaagaagaaaagcggtcaaaacctaacacaaagaaacgcggtttaacaggtgacagtaagaaagcaacaaaagaaagtggcctgatatcaaccaagaagaggaaaatggtagaaatgttggaaaagaagaggaaaaagaagaaaataaaaacaatgcagtgaatcacagatgtctcctgaaagaactcttttagatgaaatcattctactcaaatgtaccttaatttttttttttccctgagtaaaagcaagaaatttcttcctttggaaaaaatatatatattaaaaaaccacttttagatggttttttttaaaaaaaaaaaaaaaactggtaaaattacttttggcagacagtgttttatgaattatgtatcatgttgatatataatatgttaatgtgtcatgtaatttttactttgtacaaagcaaataaagatctttctcaaaaaaaaaaaaaaaaaattaacgagcgaaccaccaaccccccaccgccaaaaaaaaaaaatacaatggggcgccgcgctataaaatacccttgggagggccccaaatatcacacattccccatgtttctctggttttgggggcccgcccccataaaagggaaatctccccaaagagggcttagcttattggtggccgccccccctttctcattatttattctccacaaaacgggcggggaaaatactatttaaaatacctccttgccccccattttttttttgggctcgac

SEQ ID NO: 5043 - DNA, 3734 bp, Homo sapiens
gcattcgccgcattcgctgcaggcgcgaggttgggtgcaggcagctgtttgagcctcgaggcatcgacggacggacagacggacggactgactgacgatgccgcgctctcacaggcctccgcctaccgcgcagcgggttgccactgccgcagcagccgagcccaagtctgagggcgttgtggctatgactttcaagatttttctcctttttgcagggcttatggttaaagttcctgtggggttatatttttcctgcaaattacttcttttccaaagtctgatgttgatgtcccctgaagacagcggcttttatgcgaccattgttgcagtggtcgggcttcatgtggtgctggcaattttcgtcttcatagtgtggaaggagggcttgccccagtggcgggaaaacaaaaacgaatagagcagcttcttcagagctgcagacgtggggggtggggaaatacctaaagggtttttgtcttgtttcttgttcgtattgaacgtgcttttttttttttttttttttttttaaaggggaagggtgggtggggagggaattaaatatttactgcagctaagacttcagtaaaattgggggtggggggagggttgacattttccgactgcctgttacgtgccaagtgctttttgttaaggacataatgtttttgactggggatcatgtttggctgatgtaaatattaatgccaaaataggagctaggatgaaagtaacactgtaattagtagtagaatttatttcatattaaaatgtgtcatgacgtaatttttatggcttggctcaagcaacaattttcagagtgcaccctcattgatgctactcacagagacgtggatgtgctgttactgctttctaactctgcctactacgtggcctataatgatgatgaagttgataaagtaaaccagtatcaacgactaagtctagaaaacctggaaaaaattgaaataggccctgaacccactctttttggtaagccaaagttctcctgcatgcgactgcactacagatacaaagaagcgagtggctatttccacacattgcgagctgtaatgcgtaatcctgaagaggatggaaaagatacccttcagtgcattgcagagatgctgcagatcaccaagcaagccatgggatcggatttacccataattgagaagaaacttgagaggaagagcagtaaacctcacgaagacatcattggtatcaggtctcaaaaccaaggttctttggcccagggaaagaattttttaatgagcaaattttcatctctaaatcaaaaagtgaagcagaccaaatccaatgtaaatattggcaacctccgaaagctaggaaactttaccaaacctgaaatgaaagttaactttctaaaaccaaacttaaaagtaaatctttggaaatcagatagtagtcttgaaactatggaaaacacaggagtgatggataaggttcaggcagagtctgatggggacatgtcttcagataatgactcataccactctgatgaattccttacaaattctaagtctgatgaagacaggcagctagctaactcattagagagtgtagggccaatagattacgttcttcctagttgtggtattattgcctcagcgcctcgattgggcagtcggtcccagtctcttagcagcacagatagtagcgttcatgctccttcagagattactgttgctcatgggagtgggcttggaaaaggccaggagtctcctttgaagaaaagtccttctgctggcgacgtacacatattgactggctttgccaagcctatggatatttactgccacagatttgtgcaagatgcacagaacaaagtgacccacctatcagagaccagatctgtgtctcagcaggctagtcaggaaagaaatcaaatgaccaatcaagtttcaaatgaaacccaatcagaatcaacagaacagacaccttctcggccatcgcaattagatgtctctctttctgcaacaggcccacagtttttgtcagttgagccagcgcattcagttgcatctcaaaaaacccccacctccgcttccagcatgcttgaacttgagacagggcttcatgtaactccttctccttcagagagcagtagcagcagagcagtctctccctttgccaagattcgaagttccatggtccaggttgctagtattacccaagctggattaacccatgggataaactttgcagtgtcaaaagttcagaagagtcctccagaacctgaaatcattaatcaagtccagcaaaatgaacttaaaaagatgtttatacaatgccagacacggataattcagatttagcttttagccataagaatccttccatggcttttatttaaaaatatgaaattttcacctcttggggtattttaattgtactgtctgaacccagggatcacaaattctgttcattggaaagggttttaaacggagtcggaacctgagtagatttccaaattttacagccaggactacagaagtgcatcattctagaatgtgtagacctgagtagcttatacactacagagcactttgcttatttgaaagtaattcagcaacaggtcactttgggatataacctgaacctttttttggagtggggtgggtagactacagtagacacaagggctggacatgcagatgcttaggggattagcgtttttcataatttgttctgtttgtcagttcattcctgtgtgttcttacctctacaaagtaaattacacatttagtttttagtgactttaacatgttactgaagcatttgaatataaagctattttagttttgatggcttaactgttccctgaggagttgagggttattgacactagagaaatgaattctcatttgatcctaattttccccgtattctacttgaacacattaaaaatactctgctgcctatacaatgtaaacctaggagcattaagacttgtcacacagtaaacctgatacatcagaggtgaataccagcacctattaggtttcattttgctgttttcaggaatgtaagaacacccatattggctactggaaattctagcagtcagtcaggttttaatttattccaggaggggcatcctcgacatcttatgtagatgatccacaacttcaaaatttagtctgggcctagtgcagtggctcacacctataatcccaacactttgggaggccaggagttttgagaccagcctgggaaaacatctgcctctacaaaaaaatacaaaaattagctgggcatagtggtgcatgcctgtgtttctagctacgcaggaggattgcttgagcccatgagattgaggctgcagtgagctgtgatcgtgccactgacctccagcctgggggacagagcaagaccgtgtctcaaaaacaatttagtctgaaacacaattgtgctgaatctgtctgactataactctgaccacacagaaccagggctgcccctgtaatccccacagtaagaaagttgtatggcatattccaacaagtattggttcgtctggtgtctttagagctttactctgttgaagtgactgattctcaactgaacattatgtcgttactttgataagcattccacttttgttatttattagtgctatcttttttttttacgtgttaaatcttgtgattattaaaataaagtaccattgtaatttaaagtgaaaaaaaaaaaaaaaaaaaaaaaactcgtgc

SEQ ID NO: 5044 - DNA, 2333 bp, Homo sapiens
gggccaggccgcgcccccgcgtgcgtgcgcggcccggcagagccgtgcgggcgcccgcgtactcactagctgaggtggcagtggttccaccaacatggagctctcgcagatgtcggagctcatggggctgtcggtgttgcttgggctgctggccctgatggcgacggcggcggtagcgcgggggtggctgcgcgcgggggaggagaggagcggccggcccgcctgccaaaaagcaaatggatttccacctgacaaatcttcgggatccaagaagcagaaacaatatcagcggattcggaaggagaagcctcaacaacacaacttcacccaccgcctcctggctgcagctctgaagagccacagcgggaacatatcttgcatggactttagcagcaatggcaaatacctggctacctgtgcagatgatcgcaccatccgcatctggagcaccaaggacttcctgcagcgagagcaccgcagcatgagagccaacgtggagctggaccacgccaccctggtgcgcttcagccctgactgcagagccttcatcgtctggctggccaacggggacaccctccgtgtcttcaagatgaccaagcgggaggatgggggctacaccttcacagccaccccagaggacttccctaaaaagcacaaggcgcctgtcatcgacattggcattgctaacacagggaagtttatcatgactgcctccagtgacaccactgtcctcatctggagcctgaagggtcaagtgctgtctaccatcaacaccaaccagatgaacaacacacacgctgctgtatctccctgtggcagatttgtagcctcgtgtggcttcaccccagatgtgaaggtttgggaagtctgctttggaaagaagggggagttccaggaggtggtgcgagccttcgaactaaagggccactccgcggctgtgcactcgtttgctttctccaacgactcacggaggatggcttctgtctccaaggatggtacatggaaactgtgggacacagatgtggaatacaagaagaagcaggacccctacttgctgaagacaggccgctttgaagaggcggcgggtgccgcgccgtgccgcctggccctctcccccaacgcccaggtcttggccttggccagtggcagtagtattcatctctacaatacccggcggggcgagaaggaggagtgctttgagcgggtccatggcgagtgtatcgccaacttgtcctttgacatcactggccgctttctggcctcctgtggggaccgggcggtgcggctgtttcacaacactcctggccaccgagccatggtggaggagatgcagggccacctgaagcgggcctccaacgagagcacccgccagaggctgcagcagcagctgacccaggcccaagagaccctgaagagcctgggtgccctgaagaagtgactctgggagggcccggcgcagaggattgaggaggagggatctggcctcctcatggcactgctgccatctttcctcccaggtggaagcctttcagaaggagtctcctggttttcttactggtggccctgcttcttcccattgaaactactcttgtctacttaggtctctctcttcttgctggctgtgactcctccctgactagtggccaaggtgcttttcttcctcccaggcccagtgggtggaatctgtccccacctggcactgaggagaatggtagagaggagaggagagagagagagaatgtgatttttggccttgtggcagcacatcctcacacccaaagaagtttgtaaatgttccagaacaacctagagaacacctgagtactaagcagcagttttgcaaggatgggagactgggatagcttcccatcacagaactgtgttccatcaaaaagacactaagggatttccttctgggcctcagttctatttgtaagatggagaataatcctctctgtgaactccttgcaaagatgatatgaggctaagagaatatcaagtccccaggtctggaagaaaagtagaaaagagtagtactattgtccaatgtcatgaaagtggtaaaagtgggaaccagtgtgctttgaaaccaaattagaaacacattccttgggaaggcaaagttttctgggacttgatcatacattttatatggttgggacttctctcttcgggagatgatatcttgtttaaggagacctcttttcagttcatcaagttcatcagatatttgagtgcccactctgtgcccaaataaatatgagctggggattaaaaaaaaaaaaaaaaaaaaaaaaaaaaaaaaaaaaaaaaaaaaaaaaaaaaaaaaaaaa

SEQ ID NO: 5045 - DNA, 959 bp, Homo sapiens
tgaccatcatgttttagccatttccatcgagaccactctgtggagaacagactgtcagggaacgtgggtggaggcactctggccggagagcaacgcggaggaaacgggagtgaacggagagcgtagtgaccatcatgagcctcctcaacaagcccaagagtgagatgaccccagaggagctgcagaagcgagaggaggaggaatttaacaccggtccactctctgtgctcacacagtcagtcaagaacaatacccaagtgctcatcaactgccgcaacaataagaaactcctgggccgcgtgaaggccttcgataggcactgcaacatggtgctggagaacgtgaaggagatgtggactgaggtacccaagagtggcaagggcaagaagaagtccaagccagtcaacaaagaccgctacatctccaagatgttcctgcgcggggactcagtcatcgtggtcctgcggaacccgctcatcgccggcaagtaggggccgcctgtctgttgacagaactcactcctctgtcctatgaagaccgctgccattggtgttgagaataataaagctctgtgtttttttctaaaaaaaaaaaaaaaaaaaaaaaaaaaaaaaaagccggggctttataaaaggtttttaaaacattttttgaaggggcctggggcagggttccggaacccatttttctggtgccccaggggggaaatcggcgggggacccccaaatggggagcggaataaaattccagaaaacgccgggtaaccgggcgttatgatccgcggaaaacccccgggagtgatccacgcctagcgacacggactcccgggaccaagagcacccgcgaaaccctaggcgcgcaagacccgctggcgaccaggaacacgccaacacaggtcgcacaaccaacgccaaactacaccgagaccggccgaaccgacacaggccacgccgaaagcg

SEQ ID NO: 5046 - DNA, 10119 bp, Homo sapiens
  misc_feature (4098)..(4114): n is a, c, g, or t
  misc_feature (9056)..(9072): n is a, c, g, or t
  misc_feature (9502)..(9519): n is a, c, g, or t
ttcctccctctcagggctgcgcgcccaggtctgcaccgcgctccgcctccagccgcgcgcagacttgcgcacgcgtcgtgagagcgaccgcctccgtctctcgctgggctcgctagggctgcgcgttgggccagcgggggcgccgcagctgaagccgccccggagccggtgaaccgaattacctcgagggaggggcgtggggaaggcggcgggaggaggagcgcacgggccggctgccgtgcccaccacggctgaggaacatggttttcgagtcggtggtcgtggacgtgttgaaccggttcttgggggactatgtggtggacttggacacgtcccagctctctctgggcatctggaaaggagctgtggccctcaagaatcttcaaattaaagaaaatgccctgagtcaactggatgtaccatttaaagttaaagttggtcacataggtaatcttaaacttataattccatggaaaaacctttatactcaacctgttgaagccgtattggaagaaatttatttacttatagtgccttcttctagaataaaatatgatcctttaaaagaagagaaacaactcatggaagcaaagcaacaggaactgaaaagaatagaagaagcaaaacaaaaagtagttgatcaagaacaacatctgccggaaaaacaggacacttttgcagaaaaattagttacacagatcataaaaaatcttcaggtgaaaatttccagtatccatattcgttatgaagatgatatcacaaatcgggacaaaccgctgtcatttggtatttcccttcaaaatctgagcatgcagacaactgatcaatactgggttccatgtttacatgatgaaactgagaaactggttcgtaagttaatccgattggataacctgtttgcctattggaatgtgaagtctcagatgttttatcttagtgattatgataactccttggacgacttgaagaatggcattgtcaatgaaaatattgttccagaaggttatgattttgtatttcgtcccatatctgctaatgccaaacttgtgatgaatcgccgatctgattttgacttttctgcccccaaaataaacttggaaattgagttacataacatagcaattgaatttaataaaccacagtatttcagtattatggagcttcttgaatcagttgatatgatggcacaaaatctgccatataggaagttcaaacctgatgtgcctcttcaccaccatgccagagaatggtgggcttatgctatacatggcgttcttgaagtaaatgtttgccccaggttatggatgtggtcatggaagcatattagaaaacataggcaaaaagtgaagcaatataaagaactgtataaaaaaaagttaacaagtaagaagccacctggtgaacttctcgtgtctttggaggagttggaaaaaaccttggatgtctttaatataactatagctagacagacggcagaagttgaggtaaagaaagctggatacaaaatttacaaagaaggagtaaaagatccagaggataataaagggtggtttagctggctatggtcttggtcagaacaaaatactaatgaacagcaaccagatgttcaacctgaaactcttgaagaaatgttgacacctgaagaaaaagctttactctatgaagcaattggctatagtgaaacagcagttgatccaactttactaaaaacatttgaagccttgaagttttttgtccacttgaaaagtatgtctattgttctaagagaaaatcatcaaaaacctgagctggtagatattgtaatagaagaatttagcaccttaattgtgcaaagaccaggagcacaagcaataaaatttgaaactaaaatagattcatttcatattactggcttaccagataattcagaaaaaccccgcctcctgtcttcattggatgatgcaatgtcacttttccaaattacatttgagataaatccattagatgaaactgtttctcagaggtgtatcatagaagctgaacctttagaaatcatatatgatgcaaggacagtgaatagtatagtggaattcttcagacctccaaaagaggtacatctagcacagctcactgcagcaactttgacaaaactggaagaatttcgcagtaagacagcaacaggtctactgtatattattgaaacacagaaagttcttgatctcaaaattaatttgaaggcttcatatattattgtcccacaagatggaatttttagtcctacatcaaatctgcttcttttggaccttggtcatctaaaggtgacgagtaaaagtcgttctgaattaccagatgtgaaacaaggtgaggccaatcttaaagagataatggatagagcttatgattcatttgatattcaacttacaagtgtacagctgctttacagtagagttggtgataattggagagaagcacgaaaactcagtgtatctacccagcatattttggtacccatgcacttcaatttggaactgtctaaggccatggttttcatggatgtaaggatgcccaaattcaagatttatggaaagttacctcttatttctttacgaatctcagataaaaaactacaagggattatggaattgattgaaagcattccaaaacctgaaccagtaactgaagtatctgcccctgtcaaatcattccagattcaaacatctacttctttgggaacatcacagatttcacagaaaataattcctctcttggaacttccatctgtttctgaagatgattcagaggaggaattttttgatgcaccatgtagtcccttggaagaacctcttcagtttccaactggagttaaaagtattcgaaccagaaagttacaaaagcaggattgttcagtaaatatgactacatttaaaataagatttgaagtaccaaaggttttgatcgagttttatcaccttgttggagattgtgaactatctgtggtagaaattcttgttttaggattgggtgcagaaattgagattagaacatacgatttgaaagcaaatgcctttttgaaagagttctgcttaaaatgcccagaatacttggatgaaaacaagaaaccagtttatttggttacaaccctggataacacaatggaagacctgttaacgctggaatatgtaaaggctgaaaagaatgtacccgacttgaaaagtacctataacaatgttttacaattgattaaggtaaatttttcctctttggatattcatttacacactgaagcacttctgaatacaataaattatcttcataatatccttccgcaatcagaggaaaaatcagccccagtgtccactacagagactgaagacaaaggagatgtcattaaaaaattagctttaaaactatccacaaatgaagatatcattactttgcagattttagcagaattatcgtgtttacagatctttattcaagatcagaaatgtaacatttctgaaattaagattgaagggcttgattctgagatgattatgaggccttcagaaactgaaataaacgcaaagctaaggaatataattgttttagattctgatataacagctatatacaaaaaggctgtttatatcactggaaaagaagttttcagcttcaaaatggtttcttacatggatgcaactgctggttctgcatacacagatatgaatgtggttgacattcaggttaatttaatagttggttgcattgaagtagtttttgtcacgaaatttctatattctatattggcttttatagataattttcaggcagctaaacaagccttggctgaggcaactgttcaggcagctggaatggctgctactggtgtaaaagaactcgcacaaaggagttccagaatggcactggatattaacatcaaagccccagttgtggtcatcccgcagtctccagtttctgaaaatgtttttgttgctgattttggactaattacaatgacaaatacctttcatatgataacagagagccagagctctcccccacctgttattgatttgataacaataaagctgagtgaaatgcgactatacagatctcgatttattaatgatgcatacnnnnnnnnnnnnnnnnnactcctgccattaaatcttgaggttgtggttgaacgaaatttatgctgggagtggtaccaggaagttccttgttttaatgtaaatgctcagctgaaaccaatggagttcattcttagtcaagaagatataacaactatttttaaaacattgcatggcaatatatggtatgaaaaagatggtagtgcctcacctgctgtaacaaaagaccaatacagtgccactagtggagttactactaatgcttcacaccattcaggaggagcaactgtggtgacagctgctgtggtagaagtacattcacgtgccttactagttaagacaacactaaacataagcttcaaaactgatgatctcaccatggtgctgtatagtccaggtcctaaacaggcttcctttacagatgttcgtgatccttctctgaaacttgctgaatttaaattggagaatattataagtactttaaaaatgtatacagatggctcaacattttcttccttctcattaaaaaactgtattttagatgataaaagacctcatgtcaagaaagcaactcctcgaatgataggactgacagttggttttgacaaaaaagacatgatggatataaagtacaggaaagtcagagatggttgtgtgactgatgcggtctttcaagaaatgtatatttgtgcaagcgtagaatttctgcagactgttgcaaatgtctttcttgaggcctacaccacaggcactgctgtagaaaccagtgtgcaaacatggactgctaaggaagaagtacctacacaggaatcagtgaagtgggaaattaatgttattattaaaaatcctgaaattgtgtttgtagctgacatgacaaaaaatgatgctcctgctttagtcattacaacacaatgtgaaatttgctataaaggtaaccttgaaaatagtacaatgactgctgccattaaagatctccaagtgagagcctgcccgtttcttccagtcaagagaaaaggcaaaatcactactgttttgcagccctgtgacttgttttatcaaactactcagaaaggtacagatccacaagtgatcgatatgtcagtaaaatccctgacactaaaggtttcaccagttattataaatactatgattaccataacttcagcactgtatacaactaaggaaaccatcccagaagaaacggcttcttctactgcacatttatgggaaaagaaggatacaaagactttaaaaatgtggtttcttgaagaatcaaatgaaactgaaaaaatagctcccacaactgaattggtacccaaaggcgagatgataaaaatgaacattgattctatttttatagttcttgaggctggaattggtcatagaacagtacctatgcttctggcaaagtcacgtttttcaggggaaggcaaaaactggagttccctaataaatctgcactgtcagcttgagctagaagtgcattattataatgaaatgtttggtgtatgggagcctttgcttgaacccttagaaattgatcagactgaggattttagaccatggaatcttggtatcaagatgaaaaagaaagcaaaaatggccattgttgagtcagatcctgaagaagaaaactacaaagtgccagaatataaaactgtcatcagtttccattcaaaagaccaattaaacattacattatccaaatgtggtcttgtaatgttaaacaatttagtcaaggcatttacagaagctgccactggatcttcagctgacttcgtaaaggatctagcaccatttatgattttaaattcccttggacttactatttctgtttcgccaagtgattcttttagtgtactcaacattcctatggcaaaatcatatgtattgaaaaatggagaaagtttaagtatggattatatccgaaccaaggacaatgatcatttcaatgcaatgaccagcctaagcagcaaactcttcttcattcttcttacacctgttaaccattctactgctgataagattcctttaacaaaagtgggacgacgtctgtacactgtaagacacagagagtctggcgttgaaagatctattgtttgtcaaattgatacagtagaaggaagtaagaaggtcacaattcgctccccagtgcagataagaaatcatttttcagtcccactgtctgtttacgaaggggataccttattgggaactgcctcacctgaaaatgaattcaacataccattaggatcttaccgatcattcatttttctgaagccagaagatgagaactatcaaatgtgtgaaggaattgactttgaagagattataaaaaatgatggtgctcttctaaagaagaaatgtagatctaaaaacccttctaaggaatcatttctcattaatattgttccagaaaaagataatttaacatctctatcagtgtattcagaagatggttgggatttaccatacataatgcatttgtggccacctatcctgctccgaaatcttcttccttacaaaattgcttattatatagagggaattgaaaattcggtttttactctaagtgaaggacattcagcccagatttgtactgcacagttgggtaaagccaggctacatttaaaattacttgactatctcaatcacgattggaaaagtgaatatcacataaagcctaatcagcaagacattagttttgtcagttttacttgtgttacagaaatggaaaagactgatttagatattgctgtccatatgacttacaatactggtcagacagttgtggcatttcatagtccttattggatggtcaataaaactggccgcatgttacagtacaaagcagacggaattcatcgaaagcatccacctaattataaaaagccagttctcttttcttttcagccaaatcacttttttaataacaataaggttcaacttatggtaactgatagtgagttgtccaatcagttttcaattgatactgttggtagtcatggagctgttaaatgtaaaggcctgaaaatggactatcaagttggtgtcactatagacctgagcagttttaacattactagaattgtgacatttacccctttttatatgattaaaaacaaaagcaaataccatatatcagtggctgaagaaggaaatgataaatggctctctcttgatttggagcagtgtatccccttttggcctgagtatgcttctagtaaacttcttattcaagtcgaaaggagtgaagatcctcccaaaaggatatattttaacaagcaggaaaattgtattctattgcgtctagataacgagcttggaggtattatagcagaagtgaatttggccgagcattctacagttattacatttttagattatcatgatggagcagctacattcctcttaataaatcacacaaagaatgaacttgttcaatacaatcaaagttctctcagtgaaatagaagattccctccctcctggtaaagccgtgttttatacatgggctgatccggtgggctctagaaggctgaagtggagatgtagaaaaagccatggtgaagtaacacagaaggatgatatgatgatgcctatagatttgggggaaaagacaatatatttagtttcattctttgaaggtttacaacgcattattttattcactgaagatccaagggtatttaaagtaacatatgaaagtgagaaagcagagttagcagagcaagaaattgcagtggcattacaagatgttggaatttctcttgtcaacaattacacgaagcaagaagtagcctatataggcattacaagttctgatgtggtttgggaaacaaagcccaagaagaaggcaagatggaagccaatgagtgtaaagcacactgagaagttagagagagaatttaaggaatatactgaatcttctccttcagaagataaggttattcagttggacactaatgttccggttcgcctaacccctactggtcataacatgaaaattctgcagccgcatgtaatagctctacgaagaaattatcttccagcattaaaagtggaatataacacatctgcacatcaatcatcatttagaattcagatttacagaatacagatccaaaatcagatacatggtgctgtatttccctttgtgttttatcctgttaaacctccaaagtcggtcaccatggattcagcaccaaagccctttacagatgtcagtattgtcatgagatctgcaggacattcccagatatcacgtattaagtatttcaaagtattgattcaagaaatggatctcaggttagatcttgggtttatctatgctttaacagaccttatgacagaagctgaggtgactgaaaatacagaggttgagctttttcataaagatatagaagctttcaaagaagaatataaaacagcctcattagtagatcaatcacaagtcagcctctatgaatattttcatatatctcctatcaagttacatttaagtgtttcactgagttccggcagagaagaagctaaagattcaaaacaaaatggaggactgattccagttcattctttaaatcttttgctgaagagtattggtgccacactgacagatgtacaagatgtagtttttaagcttgcattttttgaactcaactatcagttccatacaacatccgatctacagtctgaagtcataagacactattcaaaacaggccattaagcagatgtatgtactcattcttggacttgatgttttgggaaatccatttggcttaattagagaattttctgaaggtgtagaagcatttttttatgaaccttaccagggagccatccagggtcctgaagagtttgtggaaggaatggcactaggacttaaggcactagttggtggagctgttggtggattggctggtgctgcctccaaaatcaccggtgctatggctaagggggtnnnnnnnnnnnnnnnnnatgaagactaccaacagaagagaagagaagccatgaataagcaaccagctggttttagagaaggcatcactcgtggaggaaaaggcttagtttctggatttgttagtggcataacaggaattgttacaaaaccaatcaaaggagctcaaaaaggaggagcagctggtttctttaaaggtgttgggaaaggtttagtaggagcggtagcaaggccaactggaggcatcatagacatggctagcagtacatttcaggggataaaaagagctacagagacttctgaagtggagagtctgcgacctcctcggtcttcaatgaagatggagttatcagaccgtacaggttgagggatgggactggaaatcaaatgttacagaaaattcaattctacagggagtggattatgactcacagtagcagtagtgatgtnnnnnnnnnnnnnnnnnngtgatgatgagtcagattaaaccattaaaattcatatgttctttattttacttggaatgtttcattaacatgttttgtatgacttataccataatgcccatatgtccatttatagggaggtaaaacacattttcttttaaaatgttttcctacacattttcataaagcaaaataattgtattatttaagcacagaaaaaaatgtatcttacatccaaagtagggagggcatccaacatattatagatttgcttttatatattttatagctttgtattgcatagtttgtctttaagagttcaagttagacttaaatataattttgatgttcactggttttattttaaattgccttcttatttgttagcaaaatgcctttttttaatggtctctgtaaattttctgggctttaatgtaatgccactgtgtaaaaaaaaaggaagaaaatagtaatagccatttaatgttttatatttatcattttaaagatatttttgtcaaatttcttttaataataataaacatatgtaatctaaaggagtatgaatttgttgttctactccccaaactcatatagacttgaactgctattataaaaaac

SEQ ID NO: 5047 - DNA, 2685 bp, Homo sapiens
ccgacgccgcagctcagactcggctcgagggccatggccgggccgcgcgcgtgcgcgccgctcctgctcctgctcctcctcggggagcttctggcggccgccggggcgcagagagtgggactccccggcccccccggccccccagggccgcccgggaagcccggccaggacggcattgacggagaagctggtcctccaggtctgcctgggcccccgggaccaaagggggccccaggaaagccggggaaaccaggagaggctgggctgccgggactgccgggtgtggatggtctgactggacgagatggaccccctggacccaagggtgcccctggggaacggggaagtctgggacccccggggccgcccgggctggggggcaaaggcctccctggaccccccggagaggcaggagtgagcggccccccaggtgggatcggcctccgcggccccccgggaccttctggactccccggcctccctggtcccccaggacctcccggaccccctggacacccaggagtcctccctgaaggcgctactgaccttcagtgcccaagtatctgcccgccaggtcccccagggccccctggaatgccagggttcaagggacccactggctacaaaggcgagcagggggaagtcggcaaggacggcgagaagggtgaccctggcccccctgggcccgccggcctcccgggcagcgtggggctgcagggcccccggggattacgaggactgccagggccactcgggccccctggggaccggggtcccattgggttccgagggccgcctgggatcccaggagcgcctgggaaagcgggtgaccgaggcgagaggggcccagaagggttccgcggccccaagggtgacctcggcagacctggtcccaagggaacccccggagtggccgggccaagcggagagccgggcatgccgggcaaggacggccagaatggcgtgccaggactcgatggccagaagggagaggctggtcgcaacggtgctccgggagagaagggccccaacgggctgccgggcctccctggacgagcggggtccaaaggcgagaagggagaacggggcagagctggggagctgggtgaggccggcccctctggagagccaggcgtccctggagatgctggcatgcctggggagcgcggtgaggctggccaccggggctcagcgggggccctcggcccacaaggccctcccggagcccctggtgtccgaggcttccagggccagaagggcagcatgggagaccccggccttccaggcccccagggcctccgaggtgacgtgggcgaccggggtccgggaggtgccgcaggccctaagggagaccagggtattgcaggttccgacggtcttcctggggataaaggagaactgggtcccagcggcctggtcggacccaaaggagagtctggcagtcgaggggagctgggccccaaaggcacccagggtcccaacggcaccagcggtgttcagggtgtccccgggccccccggtcctctgggcctgcagggcgtcccgggtgttcctggcatcacggggaagccgggagttccggggaaggaggccagcgagcagcgcatcagggagctgtgtggggggatgatcagcgaacaaattgcacagttagccgcgcacctaaggaagcctttggcacccgggtccattggtcggcccggtccagctggcccccctgggcccccaggacccccaggctccattggtcaccctggcgctcgaggaccccccggataccgcggtcccactggggagctgggagaccccgggcccagaggaaaccagggtgacagaggagacaaaggcgcggcaggagcagggctggacgggcctgaaggagaccaggggccccaaggaccccaaggcgtgcccggcaccagcaaggacggccaggacggtgctcccggcgagcctgggcctcccggagatcctgggcttccaggtgccattggggcccaggggacaccggggatctgcgacacctcagcctgccaaggagccgtgttaggaggggtcggggagaaatcaggctctcgaagctcataaaattcaacgtgaggaagcaagtgacaaggacgcccgaagcacagtggacggtcatgaaggagcgggggtgtggcaggcgggtgacgtccaggagagggagcgcccctggctgcccctcggccgccgactggacgcgcgggccttgccagcgagcaccctcatcgggctgtcgcctgacagcatacctcaaaaggccctagctaataaacctgtaagcccagcatttgagagaaggtagggtgtgtatatataaaaggttgtgtacaactccacgaggtgaaaaatattcagtaacttgtttacatagcatttgtgtaaagactatgatctcatcccaataaaatgatatattaaaccttcagattaatgactggctacagagtaacaaaaaataaagaatttaatgtacagtaaattctctcccataaaaaaaaaaaaaaaaaaaaaaggggcggcccgctctaagagtatcccctccgagggggccccaagctttaccccgtaaccccagctttcctttggaacaaaagtgggtccccctaataagggaaggtccctaattaataacgcctaaggcaactcgggcccgtccctcta

SEQ ID NO: 5048 - DNA, 548 bp, Homo sapiens
tccctgaagtggctgctatccaggatgactgtgttgctgcagtctttgagtggttggagcgctgtaatgtctatgttaatagctgggaaatcgcagtagcagcaaccagaccactccaatggaacaatccaagttggggtaagtttgattgagcaaaaaagtcatgctgactgtgtgatgaagaggcagaactggtaacagtgacaggccctgcagtcagcagctgtggattttatgtgcagggcagactgatctggaaaatgggaagagctgactgccaataacaccttggggggaggtttgttcagtgcatctccctactccttgtatacctctgatgacatgcagaagcttaggaaataaaacacacttgtaacatcacagggtgcaagtaagtacatgtggatgccagtgtagagagaagcgaaagctagttttcattgcaagaatccaaacagagtaacagggctttgtccactgtctccagtccatggttccctggtgttcctagagtcctattaaaaaaaaaaaaaaaaaaaaaaacgcgg

SEQ ID NO: 5049 - DNA, 2820 bp, Homo sapiens
  misc_feature (640)..(640): n is a, c, g, or t
acgtgatctatttttcagaacagcaagtggatgggaaagaaccttgacaacacaaaactcatttactaatggactggttttgggtttctcttctctgagtccgcaaatctctctgcctgagccccaggcctattcagacctcgcggggagcggcgtcccccaggagcaggtgggctgctgctccggcgccacgccggccatcggagccggagttcccaagggtcgagggcacccggagtttccgactaagcagaggaaaaagaattttggcacttcagccggatttggggagtctccgcactgccccagagcgatgacacgaatttattgaagaaacacctctctatgccctccctttccaaatatttgtaggtagagtagaatcctcaccgtcgttctggatggtgaaagaattccaagaaagcggcccgggagcccctaactatcttgctacaagccagaagggaaacaagtgggtcccagctaggggtgtttgcatcaaggcctgtcaacccagccgagaaaccctagcaacagctaatgctgtcccactgaatgctttttcatcgactaaagcgcacgcggccgttacctgcacagaggaggcactggagagccgaaacctggcatcgggcgctcnttgccagcggtgttccctcccgagccgcgctgcagcgagggcagcagccggctggctagagttgctcatttcctttaaatctccaacgcatctctgcttttcgtgcgatttgcattgacagcaaaggttttatgttacgagaacaactcaaacctttctgtgtgcgatttaaaatggatcatttagtttaggtggtttgtaaattcatgtcattttacctctttcagcggttttcagtgaaaggttccattttgggaaacctcatatatccgagccaataattaacatttataacaattggttcccctaaccgagggatcgaaatagcaggtagactccttggtataaagcgcatagcactttccctttccagttacgcgatctattggattaagcgggaggaaaaatgttggccggcccagtcacagcctccgaggaagagcacctcttttctgcccgggttcccgcaatcacaccttctacacgtcgtcttcccagatgacggcaatgtagtacgtcctggttccttttgaagacagataaaaagaaatgggcagggagaacaccgaaaacaataactcctcctccaacaagcagaaccaactctctcctctggaagggggcaagccgctcatgtccagctcagaagaggaattctcacctccccaaagtccagaccagaactcggtccttctgctgcagggcaatatgggccacgccaggagctcaaactattctctcccgggcttaacagcctcgcagcccagtcacggcctgcagacccaccagcatcagctccaagactctctgctcggccccctcacctccagtctggtggacttggggtcctaagtggggagggactggggcctcgaagggattcctggagcagcaaccactgcagcgactagggacacttgtaaatagaaatcaggaacatttttgcagcttgtttctggagttgtttgcgcataaaggaatggtggactttcacaaatatctttttaaaaatcaaaaccaacagcgatctcaagcttaatctcctcttctctccaactctttccacttttgcattttccttcccaatgcagagatcagggaaaaaaaaaaaaaaaacccaaacaaacaaaagcacccaggcacccagtctgagttctgggcaactgatacgcctgtttcagcaggctttcttttttttcaatgaatgggaattgcaaatcaactggattttcattatttccttttaatttatatatggagaaatgtgaagagggaaaggaaatggaaagagaaagagaaagggagataaaaatagtgaaaataagagcctccaggctcagaagaactgattacattcttaaggtgaacaggaaaaatacaatctataactttctttgatgaggaaaaattaagtttacatttttcatatttagtgttaaacaatttaatgtagattaaataaaagaccagtattaggaggaaaaaacaagtgcctaaatgtcttaatgctctctatgtgagacagaaatagacgtgaccattagtaatgcaactatttttgtcaaatttagtgggattttttggttgttgtttgttttcttgggtttttttttttaaatgacaaactctaaaaatgtaccaatgtgaaaaaacactttcctgaatgccattactcatgccctcaaagctttcatatctgtagcctactcctgtaaagggtttctcctgtttctagtttctagtttgcaaaggtatgccaacgaatctggcaacctggtatttgttactaaaacagcatgtgttttcaggtttcttttctattgtacctaaagcagtctaaattaaaacttagtagaacaccaggagtatgattctgtttctgaaaggtgagtgggtatgctgtcatgggccctattttttttttttaaatatatttcctttcttactaaagggggcgggaatggccgggtacttggagggcatcattctgaaccaagagtcgttaccagattcatcttttgccgacacgagggacttagccttggggcattatcaccttccattattcagattcgcctcttggttccccctatctcttcacaggctcctttgtacctaagccccgcgtgtgacccgtttcgccagcttgcacgtcaactacttctcgtgtgaaccacggg

SEQ ID NO: 5050 - DNA, 1029 bp, Homo sapiens
  misc_feature (170)..(196): n is a, c, g, or t
ttttttttttttttttttagaatcagaatgtatgatttattccgcttgttttacagatgagaaatctgagggccagagaggtcaagaccattcaacaagctagggtaggagccagagcttccacccaggcctctgggctcccaggtgctatgtgctccttccacaacacnnnnnnnnnnnnnnnnnnnnnnnnnnnatatgtttagtgctactcaagttctgaccacttagagtggactcgagatagaaagataagctcttatttattcagggcagcagacatgccccagttatcatcacctgaccgtaacacagttctcaaaaacaccggatctggaatgggagggaaggaacaaacttgtgtttattaaacatctattatatgtcaggcccaatgctaagctttttctatcaatgtggtctttcatttaatcctcataaccatctgttatggaaagctgaggttccaagagttcaaccgaaagtcccagggtcacacgtctgatgtgtgtgaccataatcccacagggtcagtgtgactccagatttgtaggagtaagtctaggggggatgaagtaccttgcctgattctgatcttacagatcagaaaaaggatgtcacagagttgtgagtgtgttgagctactgtgtctagcatggctagtgcaaggcttggtaaatagtagagattcgtaaacgtttcttaaaatttgaacctcttatatagaccatcagttgaagacacacagtttaaggctttttgacctgaatctttctcctagaagtctggagccatggggatggggaaatctctaaatattccttccttgccccactgagagcagacccattgcctagtggagacagagccatgtcccaagtttagaactcataatctactctgtcttgtttgtgccaatttaaccaacaagtctttactaagcttttctgagtagagtcacacatatcttctctggtgtcttatgtgcactgaggacactgcatgatgagatgctgaaggaacctttct

SEQ ID NO: 5051 - DNA, 2971 bp, Homo sapiens
gttttctgggggggaaaattttgaggaaatttttttataaaaacaaaaagaaaacctccttccaaaaaagggtgtgtgggggggtatttaaataacaacacaaacaatttggagagttgggggggcccaaaaaaaaaaccctcggggcggggggttttttaaaaacccccccacaaaatggaggcccccggcccccgggggtaaaatttttttaaaaaaaaaatcccgcgagaggaaaaattttttcaacgcccaaagaaaatgcggggtttttttaccccctttcccccctaaaaaatttttttttttcctttagaggctaaaaattttggggggggggttcccaaatatgtccccccccaaaaaaaaggtttctttccaaaagtccccaagtggcggtttttcccccccccggggtttaaaaagggggcccgcgccctgttttaaaaaggccccccttaaggggccccttttttaaaaaaaaaggggggcgggaaaaattggcccccccgggggaatttttaaaggggccccccccctttttttttttttttttttttttttttttttttttttttttttttttttttttttttttttttttttttttttttttttttttttttttttttttttttttttacttttttttggtttgtttttaaagaaactgcatacatcatcagagacaaacaataatttaaataccatgcagtttctgtatgtacaaaacctaggccacagagatccagtttaatttgtattctctatttacatcgttttcctcatacagccatcatctgttaaattagaacctgggagattaggggattgacggtcaccacactcactcctatacaaagacaaactatgtacagacacccaggaagcaactggaaaatgcaaccggtctggggattaacagacagatagggagaaaaagtcatttaaggtgacctttgcccaccggctgtgcacagggagagcctgaaattccattcatcaaagcaacacaccacgattttcattcggcaaataaaaatacatgttcataagcgggagaaaaataaacccagagcttttcatcacatgtaccgtcacgttgtttggtttctctaatctgacataaaggctaaagttttaaaagttttacagtgctttgagggcctttagagatgaatatatcagccatttaaaaaaagctagttggctgatggcggtctcttctgtcactgattgattgggggcgggggcagggttgggcaatgtctaatctttagaaggaagcatttgatttgagacatttcacattttttcctctcacgctaatccaaatgaaaaaatgctcaactgggaatttacacacataaaataaactttgacttgccagctacagctttttcaaaaaagagatgcattttaagtcatctagctcacctttttattttttcccttaattaatgtcaaattgtcatcttggaaagtaacacaaattgctgcagttgtcatgacattgtagtgaaaaaaaaaaaaaagaaaattgaataggtctctagaaagaccttaaggttttaagaaaggaaagagacagcagaaggcccatcctgcaggccacagaggttgctgagcctgtgtaagagccacttaaaacgggcttgaaatagcccatcctgaaggcgcaggacctgtcaatggcaggggaggtgcacccctcagtctgagcaagtgactgctggaaaggaggccctgcaggaagagcagtggaaattgtgttcaatatcttccatgcacaaagtggactgcaacatgagggcactttgggcggaaaccctgggctgtctgctggctggctgcagggagatccgcttgggccttatatccccagggaatctgaagggccaagaactaaggccagcagagaagccatgggcctatcatgggaggagtccggtcaatggaatgaatttccttaggactcgctcctggccagggaggaccatcatgccagggcaccgcatgtgccaggagcccagctgcagttagaggaagttcagactcaaagcctggccggcaggcaagtccacctggaacacgtgtccgcccgcccgccgtagagaagttcaacgaaagagccctacatctttcgtcataccatttgcacattcaaacgtcagtaagcctttcgggaagactgtgtttacagccacactaaaatcccgatcacattttccctgaacaatacctctccccacggcaggaactattcagattcaagagttaaaaaaaaaaaaaaataggatctagtgatggcatcctccttgggtcgggcagaggcgtgctggctccaggtggcaaggcaaagctgcagctggaggcaccgcccaaagagctgccctgaactctccccagcagttgtttggctcctgggttagtgcctagatgggagccgttcatgcctgcaaaaaaatgcaatggcctcgttgacgggtgtgcatcctaagagtaacctgctcccacagggtttgtggtggggagacgactggttaactttttggaaaggccaagctggcgtctttctaaatggcatgtgtggtggagtgttccaccacctagaaagactggagtaacgatggagtcactccagaaggtgagagctctgcaactgagggcctgcgagctctgttacgaaggaaatcgaaagctgcaatgggcctcgttaggatgctgttagggtttaggagggtcctggcctcattgcacaccctatcctgggtgtcccagtcagagacacacccacaatcacgctccctggcatcatgagggtagagggaggagctctctggatcaactggagcaggaaggggcactgtggacaggtgtggctggtgttggcctgattctggcacattcccaactctggggctccttcacagaaactcttcagtgcaaaaaaaaaaaaaaaaaaaaaaaa

SEQ ID NO: 5052 - DNA, 2589 bp, Homo sapiens
  misc_feature (818)..(844): n is a, c, g, or t
tttagggcagttacctgaagtgaaatataccaacaatttcttgtgttctttaaattcctagttaggtgaatatttttgaaggtcctcttttgaataaagaggggaatggacaccacatttcaggtcttctcgaagtgtggaagggcaagagagcatcagtgagctgatggtggattgcttacatcggattccattggtatgaatttcccaaactggaaatcaaagcgccagggtggggttggggctgactgctggtgagggggctggccgctggctcccgtgacgtgcgtcataggcacgcaggcgccattttgaatctatcgtcggcacgtgggtgccattttgaatccttagttgggcctttctaaatggagaatggctttggagggagacacgttttctgtggggagggtttgggggggagggaggagggaacaagctacatgctattttgtttgtagtattgtggaacagtcttgttatggagtgccagcttagaggttgttgcaaacttgtctagaagtgagagcatggttttttttagccctttgagagtctacatctaatgaacattcttgctcacccataaataacgtcaagcctcaatgtcaccgtcacgttgggatactctttctcatctggcatcctagacaggacaaggttggttacctttccttccatgaaccatgaacctgtgacggcatcattcatcctgacttcaccaagctccgcctgtgggtgaggccagagctcccactggcaatttttagaagagccagaggctccctgcttcctctagaaataacagttcagggtgnnnnnnnnnnnnnnnnnnnnnnnnnnnaatggaaccatttagagacaacacagttggacatttccactttttccttgattcctggaagtccagtgggttctgcagctgaaaaagccctgggtcccagcagcagagagacaggacagaggggatgcttgggcggggagggacggtaacctgcagaacagattccatttttatagaacgagtacacgtttgctaaaacagtcctgctttcccagactggattcccaccacagggacagtcggaactcaggactagctccagcgacatctttcctccgaattcaagccttctatcacaatgtcaaaacagctatttataaagccattttcattgtacttgataacagcacgagtcccaaaacttttagaaataaaataggacattggcttgattgaaaagagggactttttaaaaattgttctttcgtcagaagccttttggatgacttacaatagctctgatgaagataccaccccagcgtcagtccaataggtcagtgagtttcaacaggcatccatccctcccatgaagggattctggtgatgggaagtttctgtaatgacaggaaagcattgaccctcattgattgtcaactttggtattagccatgaaagacaggatgctcattgggtgttctgtagagtgaggaatgctgcctattccctcccagaacgtctgacccaggggtgtgtgttgaggagccctgggggaaatggaccaagttttcccacagagcagtattaggctgaagagcaggtgactggtaggccccagctcccatcattccctcccaaagccattttgttcagttgctcatccacgctggattccagagagttttccaatttgggaagccatgagaaaggtttttaaatcttgggaagatggagagagggacataggatagttgactccaacatgacaggaagaggctggagattgggaattggccatcaaccaagcctgtagtagtaaagccatggtcccgcattggaattacttggggaacttatacagttctgatacccaggctctcctagaccagttcaaccaattctaggtgggggactcaggcatcagtgtgtttcgtagctccccgggtgttttccctgtgcagccgagcttgggaaactgccatgctttttggatgtcaaggcgctgttggaggctgggtgtgacagcacagagccaggttgtcttgtggaaaccacagccacgggtttgccactggctcagcatggcctcactgccagtcccagcctggctgagggacaagatggtttctcttgggagttcctgagtggagcacccttccaggctttttgaaagccagctgatctgtggagccttgttaagggactcaatacggtgtttggatattgatgtttttccttgagactgtcttgtccatcaataaagatggaggatgtctcctctttgaaccccgcttccccaccagtactctctctcccttagagtttatgagttattcaaggaggagacttcttaaagacagcaacgcaattcttgtaacttgtgtaaatagccccatctttcagagtgataccatttctacatttgataatgcctgtattcctgtaggatgtatatagtttaggggattttttttttgtttggttttgttttttagaagtcaatatgtctggttttatttattgcttgaaaaagatcatttgaaaaaaataaatacattttcaaccacaaaaaaaaaaaaaaaaaaaaa

SEQ ID NO: 5053 - DNA, 1020 bp, Homo sapiens
  misc_feature (719)..(720): n is a, c, g, or t
ttttttttttttttttttggggcccaatggcgatgttaataaatacataaaattttaaagatctggatttccaaggcacaagagtttaacacaggccaggctggttctcacaggaatgactccacgtgtgccccagcatcccagggaggggagggcaacagggggagggcggggagccccccaggacctccactctccaaaggggttgcaggccaggggcccactactcatgttcctccaggctggctcagaacagcccctttgccttggggaaggaagaagtgagaagcacctctatcacctggcaggagtttaggagacatcctccaagaccccggaggtgtcctgggaccccctgccacttcctgagagccagaggatctaagactgttacctgtcccttggaggtagcatggccggcagctgagcacagctcaggcccttacagcaccgtgggtgagtgtgtcttccccactccagcaccaggccaggggctggcaccctgccctggggcacttggcctgggtggcccttgtcatctccagggccaggctatgagtggactctggtcctcagtcctggggtccaaccacccctgggagaaccacacactctggcccagcttgagccaggtagaagatgaagatgtccgactccagcaggagcgatcttcggagaagggcaatgattgaagggacagcctgagaaatcgtgttccnntctgtgtcccacacgagtccccttccaggctgagagtgataattgaaagttgccatcctggtggagtcagggagtgagcgccagtttggaaatccctggatgctgaggacttggggtccagggtgtcctgagcccccttctctggtgggctggggtgagattggggggccagtctgtaatctggagtcactagaagtaacactagtgacatctgcaaggccagagtatggccatgagcaccatcttctggccagcaaagacaaactgcctctgctgcctggcctcagctggtggaactgc

SEQ ID NO: 5054 - DNA, 1483 bp, Homo sapiens
ggatccgcgtgctaaagaaaaatcgccgttaaagcagttttctttttcactgtctttttcttttcgcggggaacccagctgttcctgcgagggccacctcctcaggaagaccccgcagctctcccgcggcgcttctgcaggaggcagcgacagtttcgagaacccgggccttcccctcccagtgcctccgggggttcgcgtttcaggcgctcgtgttttccgggaagggcaggcgcgctgggccttggggagctgcgctcggcgggcggacgcgggggatcatggaagctgataaagatgacacacaacaaattcttaaggagcattcgccagatgaatttataaaagatgaacaaaataagggactaattgatgaaattacaaagaaaaatattcagctaaagaaggagatccaaaagcttgaaacggagttacaagaggctaccaaagaattccagattaaagaggatattcctgaaacaaagatgaaattcttatcagttgaaactcctgagaatgacagccagttgtcaaatatctcctgttcgtttcaagtgagctcgaaagttccttatgagatacaaaaaggacaagcacttatcacctttgaaaaagaagaagttgctcaaaatgtggtaagcatgagtaaacatcatgtacagataaaagatgtaaatctggaggttacggccaagccagttccattaaattcaggagtcagattccaggtttatgtagaagtttctaaaatgaaaatcaatgttactgaaattcctgacacactgcgtgaagatcaaatgagagacaaactagagctgagcttttcaaagtcccgaaatggaggcggagaggtggaccgcgtggactatgacagacagtccgggagtgcagtcatcacgtttgtggagattggagtggctgacaagattttgaaaaagaaagaataccctctttatataaatcaaacctgccatagagttactgtttctccatacacagaaatacacttgaaaaagtatcagatattttcaggaacatctaagaggacagtgcttctgacaggaatggaaggcattcaaatggatgaagaaattgtggaggatttaattaacattcactttcaacgggcaaagaatggaggtggagaagtagatgtggtcaagtgttctctaggtcaacctcacatagcatactttgaagaatagacttaacagaatcatgaaaactatagctttttaacccggattactgtaaatgtttgacaaaaatgaatatgcttttccttaaaaaatgaaaactttaatttttaccatccatttatgtttagatacaaaacttatttccatgtttctgaatcttctttgtttcaaatggtgctgcatgttttcaactacaataagtgcactgtaataaaaagttttgtttataaaaaaaaaaaaaaaaaaaaaaaaaaaaaaaaaaaaaaaaaaaaaaaaaaaaaaaa

SEQ ID NO: 5055 - DNA, 1870 bp, Homo sapiens
gctgggtcaatagtacttgccgcagtactcttaaaactagcgatggaggcttcgacatgggctttagggagtcataagtggagtccggaaagaggtatctgtactataaaagctattgtgtaagctagtcatattaagttgttggctcaggagtttgaagtccttgagagaggattatgatgcgacgtgagtgcgttcgtaatttgagtctgcttggcagatagtaatgaggatgtaagcccgtgggcgattatgagaatgactgcgccggtgaagcttcagggggtttggatgagaatggctgttactacgagggctatgtggctgattgaagagtatgcaatgagcgattttaggtctgtttgtcgtaggcagatggagcttgttataattatgcctcatagggatagtacaaggaaggggtaggctatgtgttttgtcagggagttgagaaactgtggcacaaggcgagagctggtttcctctgccctgttagagctgggggactcttcagagtcaaaggccagagagcatggagctgagtggagccaccatggcccgggggctcgctgtcctgctagtcttgttcctgcatatcaagaacctgcctgcccaggctgcggacacatgtccagaggtgaaggtggtgggcctggagggctctgacaagctcaccattctccgaggctgcccggggctgcccggggccccagggccaaagggagaggcaggtgtcattggagagagaggagaacgcggtctccctggagcccctggaaaggcaggaccagtggggcccaaaggagaccgaggagagaaggggatgcgtggagagaaaggagacgctgggcagtctcagtcgtgtgcgacaggcccacgcaactgcaaggacctgctagaccgggggtatttcctgagcggctggcacaccatctacctgcccgactgccggcccctgactgtgctctgtgacatggacacggacggagggggctggaccgttttccagcggaggatggatggctctgtggacttctatcgggactgggccgcatacaagcagggcttcggcagtcagctgggggagttctggctggggaacgacaacatccacgccctgactgcccagggaagcagcgagctccgtgtagacctggtggactttgagggcaaccaccagtttgctaagtacaaatcattcaaggtggctgacgaggcagagaagtacaagctggtactgggagcctttgtcgggggcagtgcgggtaattctctaacgggccacaacaacaacttcttctccaccaaagaccaagacaatgatgtgagttcttcgaattgtgctgagaagttccagggagcctggtggtacgccgactgtcatgcttcaaacctcaatggtctctacctcatgggaccccatgagagctatgccaatggtatcaactggagtgcggcgaaggggtacaaatatagctacaaggtgtcagagatgaaggtgcggcccgcctagacgggccaggacccctccacatgcacctgctagtggggaggccacacccacaagcgctgcgtcgtggaagtcaccccatttccccagccagacacactcccatgacgcccacagctgcccctttgcccccagctcagtcaagccgccacatgcccacaacctcaccagagggagaattatgtttctaaatatgtttactttgggacagaaaaaaaaaaaaaaaaaaaaaaaaaaaaaaaaaaattgctacggcatattgcgcaacagggaatcctgcgctaggaactacaaaaggggggggcccctcttaaaaaaatccccccgagggggccacaacttttcggctaccccattttt

SEQ ID NO: 5056 - DNA, 1083 bp, Homo sapiens
  misc_feature (8)..(8): n is a, c, g, or t
  misc_feature (281)..(281): n is a, c, g, or t
  misc_feature (343)..(343): n is a, c, g, or t
  misc_feature (401)..(401): n is a, c, g, or t
  misc_feature (1075)..(1075): n is a, c, g, or t
  misc_feature (1082)..(1082): n is a, c, g, or t
tcagactnttagcaggactttgtgtacagttaaaggagagatggccaagccagggacaaattgtctattagaaaacggtcctaagagattctttggtgtttggcactttaaggtcatcgttgggcagaagtttagcattaatagttgttctgaaacgtgttttatcaggtttagagcccatgttgagtcttcttttcatgggttttcataatattttaagactatttgtttagcgatggttttgttcgtttaagtaaaggttaatcttgatgatatacatnataatctttctaaaattgtatgctgaccatacttgctgtcagaataatgctaggcatatgcnttttgctaaatatgtatgtacagagtatttggaagttaagaattgattagactagtgnatttaggagtatttgttttgggtgggggggagagggaaatgacaactgcaaatgtagactatactgtaaaaattcagtttgttgctttaaagaaacaaactgatacctgaattttgctgtgtttccattttttagagatttttatcatttttttctctctcggcattcttttttctcatactcttcaaaaagcagttctgcagctggttaattcatgtaactgtgagagcaaatgaataattcctgctattctgaaattgcctacatgtttcaataccagttatatggagtgcttgaatttaataagcagtttttacggagtttacagtacagaaataggctttaattttcaagtgaattttttgccaaacttagtaactctgttaaatatttggaggatttaaagaacatcccagtttgaattcatttcaaactttttaaatttttttgtactatgtttggttttattttccttctgttaatcttttgtattcacttatgctctcgtacattgagtacttttattccaaaactagtgggttttctctactggaaattttcaataaacctgtcattattgcttactttgattaaaaaaaaaaaaaaaaaaaaaaaaaaaaaaaaaaaaaaaaaaaaaaaaaaaaaaaaaaaaaaaaaaaaaaaaaaaaaaattnaccaaanc

SEQ ID NO: 5057 - DNA, 3668 bp, Homo sapiens
  misc_feature (719)..(739): n is a, c, g, or t
  misc_feature (3426)..(3431): n is a, c, g, or t
  misc_feature (3434)..(3440): n is a, c, g, or t
  misc_feature (3442)..(3442): n is a, c, g, or t
  misc_feature (3444)..(3444): n is a, c, g, or t
  misc_feature (3448)..(3448): n is a, c, g, or t
  misc_feature (3455)..(3455): n is a, c, g, or t
  misc_feature (3462)..(3462): n is a, c, g, or t
  misc_feature (3473)..(3473): n is a, c, g, or t
gcgcgccggcctgagagccctgtggacaacctcgtcattgtcaggcacagagcggtagaccctgcttctctaagtgggcagcggacagcggcacgcacatttcacctgtcccgcagacaacagcaccatctgcttgggagaaccctctcccttctctgagaaagaaagatgtcgaatgggtattccacagacgagaatttccgctatctcatctcgtgcttcagggccagggtgaaaatgtacatccaggtggagcctgtgctggactacctgacctttctgcctgcagaggtgaaggagcagattcagaggacagtcgccacctccgggaacatgcaggcagttgaactgctgctgagcaccttggagaagggagtctggcaccttggttggactcgggaattcgtggaggccctccggagaaccggcagccctctggccgcccgctacatgaaccctgagctcacggacttgccctctccatcgtttgagaacgctcatgatgaatatctccaactgctgaacctccttcagcccactctggtggacaagcttctagttagagacgtcttggataagtgcatggaggaggaactgttgacaattgaagacagaaaccggattgctgctgcagaaaacaatggaaatgaatcaggtgtaagagagctactaaaaaggattgtgcagaaagaaaactggttctctgcatttctgaatgnnnnnnnnnnnnnnnnnnnnnatgaacttgtccaagagttaacaggctctgattgctcagaaagcaatgcagagattgagaatttatcacaagttgatggtcctcaagtggaagagcaacttctttcaaccacagttcagccaaatctggagaaggaggtctggggcatggagaataactcatcagaatcatcttttgcagattcttctgtagtttcagaatcagacacaagtttggcagaaggaagtgtcagctgcttagatgaaagtcttggacataacagcaacatgggcagtgattcaggcaccatgggaagtgattcagatgaagagaatgtggcagcaagagcatccccggagccagaactccagctcaggccttaccaaatggaagttgcccagccagccttggaagggaagaatatcatcatctgcctccctacagggagtggaaaaaccagagtggctgtttacattgccaaggatcacttagacaagaagaaaaaagcatctgagcctggaaaagttatagttcttgtcaataaggtactgctagttgaacagctcttccgcaaggagttccaaccatttttgaagaaatggtatcgtgttattggattaagtggtgatacccaactgaaaatatcatttccagaagttgtcaagtcctgtgatattattatcagtacagctcaaatccttgaaaactccctcttaaacttggaaaatggagaagatgctggtgttcaattgtcagacttttccctcattatcattgatgaatgtcatcacaccaacaaagaagcagtgtataataacatcatgaggcattatttgatgcagaagttgaaaaacaatagactcaagaaagaaaacaaaccagtgattccccttcctcagatactgggactaacagcttcacctggtgttggaggggccacgaagcaagccaaagctgaagaacacattttaaaactatgtgccaatcttgatgcatttactattaaaactgttaaagaaaaccttgatcaactgaaaaaccaaatacaggagccatgcaagaagtttgccattgcagatgcaaccagagaagatccatttaaagagaaacttctagaaataatgacaaggattcaaacttattgtcaaatgagtccaatgtcagattttggaactcaaccctatgaacaatgggccattcaaatggaaaaaaaagctgcaaaagaaggaaatcgcaaagaacgtgtttgtgcagaacatttgaggaagtacaatgaggccctacaaattaatgacacaattcgaatgatagatgcgtatactcatcttgaaactttctataatgaagagaaagataagaagtttgcagtcatagaagatgatagtgatgagggtggtgatgatgagtattgtgatggtgatgaagatgaggatgatttaaagaaacctttgaaactggatgaaacagatagatttctcatgactttattttttgaaaacaataaaatgttgaaaaggctggctgaaaacccagaatatgaaaatgaaaagctgaccaaattaagaaataccataatggagcaatatactaggactgaggaatcagcacgaggaataatctttacaaaaacacgacagagtgcatatgcgctttcccagtggattactgaaaatgaaaaatttgctgaagtaggagtcaaagcccaccatctgattggagctggacacagcagtgagttcaaacccatgacacagaatgaacaaaaagaagtcattagtaaatttcgcactggaaaaataaatctgcttatcgctaccacagtggcagaagaaggtctggatattaaagaatgtaacattgttatccgttatggtctcgtcaccaatgaaatagccatggtccaggcccgtggtcgagccagagctgatgagagcacctacgtcctggttgctcacagtggttcaggagttatcgaacgtgagacagttaatgatttccgagagaagatgatgtataaagctatacattgtgttcaaaatatgaaaccagaggagtatgctcataagattttggaattacagatgcaaagtataatggaaaagaaaatgaaaaccaagagaaatattgccaagcattacaagaataacccatcactaataactttcctttgcaaaaactgcagtgtgctagcctgttctggggaagatatccatgtaattgagaaaatgcatcacgtcaatatgaccccagaattcaaggaactttacattgtaagagaaaacaaagcactgcaaaagaagtgtgccgactatcaaataaatggtgaaatcatctgcaaatgtggccaggcttggggaacaatgatggtgcacaaaggcttagatttgccttgtctcaaaataaggaattttgtagtggttttcaaaaataattcaacaaagaaacaatacaaaaagtgggtagaattacctatcacatttcccaatcttgactattcagaatgctgtttatttagtgatgaggattagcacttgattgaagattcttttaaaatactatcagttaaacatttaatatgattatgattaatgtattcattatgctacagaactgacataagaatcaataaaatgattgttttactctgaaaaaaaaaaaaaaaaaaaaaaaaaaaaaaaaaaaaaaaaaaaacaaaaaaaaaaccaagnnnnnnccnnnnnnncncncccnccccccnccccccnccccccccccncgggggggccccgctcaaaaaatcccctggggggcccccatttatcccgcccccccttttttttataaaaggggggcccccatggggggccttttttaaccttgggcctggcccccctttttaaaccgcccgggttgggaaaacctcctcctgggggtcttttgggagggacccctattttctggggggaggaaa

SEQ ID NO: 5058 - DNA, 5451 bp, Homo sapiens
  misc_feature (1500)..(1523): n is a, c, g, or t
  misc_feature (2266)..(2282): n is a, c, g, or t
gaagagggatagggccagcaaggcagggatcgaacgagtgtctggcagccgggagcccagcgaagagagcgagcaagcttaggaaaacgagcgaagtaaagggagtaggggagactgagactgaccggtagccaggcaggcggacggacgcacgcccggacagactgagcaggcgccggagaaccactcacaggttccccccgcctttccctttgaaagctaggattttgcctttcccgtggcgcccgagagagaatgctggactctgccgacttcagcgcaagctaagatttctcagctagggacaaacgatcagcccaatcctgagaaggggggaaccaagcaccccgtccccatccccctcccctcccccgactaaactcgggcgccaaacccagcccttctctaaccaccctacttcctcctctcctttctagcatggtggctgtatggacagtctgacagaacagagactgacatctcccaatctgccggccccccacctggaacactacagtgttctgcattgcaccatgaccctggatgtgcaaactgtagtcgtttttgccgtgattgtagtcctcctgcttgtcaatgtcatactcatgtttttcctgggaacgcgctgaatggagtccagccacctgagctgtcgcgaactctcgctttgatttcatcccgagagccaccgagaaaaaaaaaaaatcacagacagagacagggaaagagagagaaagaacaagctttcttactcaggggggaaaacgttttgagcttcaacatggcctcgctgtgatatgtatgacgttgctgatcactggagattccatcgttagtgctgaggcagtatgggatcacgtcaccatggccaaccgggagttggcatttaaagctggcgacgtcatcaaagtcttggatgcttccaacaaggattggtggtggggccagatcgacgatgaggagggatggtttcctgccagctttgtgaggctctgggtgaaccaggaggatgaggtggaggaggggcccagcgatgtgcagaacggacacctggaccccaattcagactgcctctgtctggggcggccactacagaaccgggaccagatgcgggccaatgtcatcaatgagataatgagcactgagcgtcactacatcaagcacctcaaggatatttgtgagggctatctgaagcagtgccggaagagaagggacatgttcagtgacgagcaactgaaggtaatctttgggaacattgaagatatctacagatttcagatgggctttgtgagagacctggagaaacagtataacaatgatgacccccacctcagcgagataggaccctgcttcctagagcaccaagatggattctggatatactctgagtattgtaacaaccacctggatgcttgcatggagctctccaaactgatgaaggacagccgctaccagcacttctttgaggcctgtcgcctcttgcagcagatgattgacatnnnnnnnnnnnnnnnnnnnnnnnntccagtgcagaagatctgcaagtatcccttacagttggctgagctcctaaagtatactgcccaagaccacagtgactacaggtatgtggcagctgctttggctgtcatgagaaatgtgactcagcagatcaacgaacgcaagcgacgtttagagaatattgacaagattgctcagtggcaggcttctgtcctagactgggagggcgaggacatcctagacaggagctcggagctgatctacactggggagatggcctggatctaccagccctacggccgcaaccagcagcgggtcttcttcctgtttgaccaccagatggtcctctgcaagaaggacctaatccggagagacatcctgtactacaaaggccgcattgacatggataaatatgaggtagttgacattgaggatggcagagatgatgacttcaatgtcagcatgaagaatgcctttaagcttcacaacaaggagactgaggagatacatctgttctttgccaagaagctggaggaaaaaatacgctggctcagggctttcagagaagagaggaaaatggtacaggaagatgaaaaaattggctttgaaatttctgaaaaccagaagaggcaggctgcaatgactgtgagaaaagtccctaagcaaaaaggtgtcaactctgcccgctcagttcctccttcctacccaccaccgcaggacccgttaaaccacggccagtacctggtccccgacggcatcgctcagnnnnnnnnnnnnnnnnncaccgaacccaagcgcagccagtcaccattctggcaaaacttcagcaggttaacccccttcaaaaaatgatacctacagggaggcagataattttaaaataaagtaaataaaattatatttatagatggaccttttttcggagaagcactgttgaaatttatacacacacacacacacagagacccttgagtacacatacacacacacacacacagacacacacacacacacacacacacacacacacacagagagataaggaacaaaagtgttttctgttgttttggggaagtgaaatatgtggttggtaggaagaggtaccaatgacttccaaacatgtgattccgtcttaaaagttttccatttttaccctgtcccccttccctttgctttcagaagttgacatttctattcattgcttttcttgttaagataatctctttactcccctgtgagtgattcactgccttgtcattattacgatagatgtgtttgtattgttttttttctgatgatactgatgttgatgaatttttaattttatttgatgtggtagagttgggaggtttcagggttttttcccctcttttactttccattgaggaagggaatgagctcctttctcctctccttcagccaatcattatcaaatgttccttcagccctgcagttgccccaaataaccttttttcagcatcctctgtcctcagtcatgccagtctggatcatgctcctgttgtcgccctggtgaccaaaacagttgtctccagattattaccccttaattttggcttttacacgtgctgtatatacggtactgtgaagggatcaaaaaacccaacagaagcaagggagtatcagactatgatgatgctggagtggacttctgttcagggaacattttgcattcaggctgtttcttctatcactggggtttcccatgttgcagcacttctgggtcgttgcaattttgcatctaggagttagtttgatcgagttattctcttttttcaagtcacttttgttataggtctccccctaggcctgtctctcccttagcccaaaagatctgaactggaagcagaggttgagattctgcctcccaggagagggatttacctgccccctagtaccagataggtttagggcagtgatctctacagcaatcagttcagtgtcctggttgtccctgctcccatttacagatgtttgggcagcattgatagaagtatggaggggttcaagacagagcccacctgatcaagatcatcagctaccttcaaattattgacctggacagggtccaagtctgatagtaaccttttacaagaaagaacagggatgggaatggaaagagatagccttgatccacagtattgtacctgcattttctaccaccctaaaattgtgtgagacttctcccattgttaacagattgcatggacaatcttccctggcttctttctttccctctctctttcttctttctcctgccatcctagcacaggaggatttttggtattgatatagttaaagctgttctggcactcaaagaaggccgtgtttccaacatcctctcatcccaggacatttggggcaagtgagttaggggcccaggggcaattttccctctgaataacgtgtctgaggcagggatgctaccctcaggctcgcttttggccagctttttgcttgggaaaatctaacttctttcacaaggaggcaggcttcctatggatgttggagtacctgtttttcctccacacatagcccttttcatggatagaccttgaacaacaaaaagggtataagggaataaggatgaactctgctgtgaagagcaagccactgtagtgaggaatgtggagactgggagtctgtcctaaaccccatgggagaagacttcatcatgacaggacttcagcttaccaagcagcagccatagctgtgtggaggcttcagcatagctagcatgtttactgctctatgcctcctgatccagaccaggcattgcccagcctgggaatcttttctttgtgggaatcaaattacaagctatttaagtttatattccatcacaaccaagtcagacttgtattataagtcaaggatgagcctgatctggggagagggccggggctcgggactggccaccactgttcagcacatgacctaactacgtaagcctctttggcaagggtcctggtgcccagcacccaggctaaaatatcctgtctggcagagtgttttggtagctatgcaggcctcccttcagtgtacctctttttccaacttctcactcctccttactaggcttggccttgacatgcttcttcgagggttggcagcacaccgggaggggatgcttggacaagtttctgggcctacatttcttgactaggccctctcatttcctccctccttggggcttctgcccagggctccaggatcagggatattacttctcaacccgcacttctcctctactgaacccactggcatcacctgatgccactaatttgtgaacaacaagaaatcatttccccattggttggagtattccctcagcctatagcatcaaagcagaccagtggccaacagccccaaggggagcccaattaaatacctgggttcagtatcctaacctgttatgtcctgacagcaatggtaaccccagtaattctgtaatgttgtaatttccgcatggccctgagctcccttttcctcaactcagtgaggccaggatttgctctccaaaaggctttgctagtgtgttcaatgggacctgctgtggggagtcctaagacagacatctaattattctctctttttccccccctctctatgtgtatatttctaatggatctataagaacagcaacaagagagttctaacaattctagtgtgaagccaaatagtgatcttttagtgctttggggatggggtgggctggggtggatggatgggcaacagtgactttgattacccttgctgctctgcatttgccagtttattcttttgtttcttttatctgactgactctgtcaaacaagtgtcaaagttgtgtgttaaaaaatgtttaacaaaaaaaaatgttgtaatgacacaaagccttatgaaaatatttatggagttcaataaaagaagtaaaaagacaaaaaaaaaaaa

SEQ ID NO: 5059 - DNA, 1066 bp, Homo sapiens
  misc_feature (4)..(4): n is a, c, g, or t
ttanaattgacctgttcagatgcagtgccaataagaaataattatgccttcttgtggaatcagaatacttctatttcagtgaaagatagatattgttgaagtataacactaagttatgtcatatctaatactgtttaattgcatgttttgttatagggacaagcagatcttttgaaatatgctaagaatgagacattggagaacctgaaacaaatccattttgctgctgtttcatgtggactgaataaaccaggcaccgaaaatgctgatgtccagaagccacgccggagcttggaagtcatacccgaaaaagcaaacgatgaaactggagaatgaggaaacttacaataaatcattatggagtttataactctaggaccaattgtagtcagatgggacatttgctttgcactcactaatgagaataatattcgggattttaaagcacaactggaatagctaattacagtctattaaaactgtgaatgtatgtagcaatcctgcgtgtgaaggcaaataaactctttaacaggcaattatattgctggccaaaatatgctatatttgtatacaaagacattctaactcagttccagtatgaagaaagattattcactctagctccactgagaaacattttcctaagtgaaaacaatttcttaagatggaaatggattggattgtcaaattattatttattggagaaaaaaacctgatctacacatttttacttatatggggttgccagagtctctgggttctagatgattttggtggcatgcttgctgagccataattactaaagagaatgtaagtggacgggttccctgaatccccggggtccttggagagccatcgaggagaatgtgcaattggactgaagctccctggctgaagatacatgccgagtcagcacatgggtagagatgatgtaaaagcagccaatctggaaacaatacattgtaaatagtttttcattgtatgaagtagtgttcacattaaaaagatgttttatgatatttaaaaaaaaaaaaaaaaaaaaaaaaaagggaagaaaagattatta

SEQ ID NO: 5060 - DNA, 4003 bp, Homo sapiens
  misc_feature (1322)..(1370): n is a, c, g, or t
  misc_feature (1482)..(1497): n is a, c, g, or t
agcgggttttcctccgcggatccgcggctggacttggacccaggctctcccgacagcgccctggaacccaaattcaagcaccatccaattcggacgctcatcgcatctcgcctgagcacaaccacggattgcgaactcagcgcagcgcgtggccgctggccgcccgcggcgatctcgatcccgctgacccgaatcctggagtcagaggtttcctatccccctcaagcccccacaggagtcaccaacccagggccggcttatgggtgagggggcaccccctggggcctgagctgccccgcacaggatgccccgtgccccccacttcatgcccttgctgctactgctgctgctgctctcacttccccatactcaggccgcctttccccaggaccccctccctctgttgatctctgaccttcaaggtacttccccattatcctggtttcggggcctggaggatgatgctgtggctgcagaacttgggctggactttcagagattcctgaccttgaaccggaccttgctagtggctgcccgggatcacgttttctccttcgatcttcaagccgaagaagaaggggaggggctggtgcccaacaagtatctaacatggagaagccaagatgtggagaactgtgctgtacggggaaagctgacggatgagtgctacaactatattcgtgttcttgttccctgggactcccagacgctccttgcctgtggaacgaactcattcagccctgtgtgccgcagctatgggataacttcgctgcagcaggagggtgaggaactgagtgggcaggctcgatgcccctttgatgccacccagtccaacgtggccatctttgcagagggcagcctgtactcagccacagctgcggatttccaggccagtgatgctgtagtttacagaagccttgggccccagcccccactccgctccgccaagtatgactccaagtggctccgagagccacactttgtccaggccttggagcatggagaccatgtctacttcttcttccgcgaggtctctgtggaggatgctcggctggggagggtgcagttctcccgcgtagcccgagtatgtaaacgtgacatgggcggctcgcctcgggccttggaccgccactggacatccttcctgaagcttcggctcaactgctctgtccctggggactctactttctattttgatgttttacaggccttgactgggcctgtgaacctgcatggccgctctgctctctttggggtcttcaccacccagaccaatagcatccctggctctgccgtctgcgccttctacctggatgagattnnnnnnnnnnnnnnnnnnnnnnnnnnnnnnnnnnnnnnnnnnnnnnnnngcctggactcctgtgtctgaggacagagttccctcacccaggccaggatcctgtgcaggagtagggggagctgccttgttctcctcttcccgagacctccctgatgatgtcnnnnnnnnnnnnnnnngctcacccgctgctggaccccgctgtaccacctgtcacccatcagcctctactcactctcactagcagggccctactgacccaagtagctgtggatggcatggctggtccccacagtaacatcacagtcatgttccttggctccaatgatgggacagtgctgaaggtgctgcccccaggtgggcgatccgggggacctgagcccatcctcctggaagagattgatgcctacagccctgcccggtgcagtgggaagcggacagcccaaacagcacgacggatcatagggctggagctggacactgagggtcacaggctttttgtggctttttctggctgtattgtctacctccccctcagccggtgtgcccggcatggggcctgtcagaggagctgtttggcttctcaggacccatactgtggatggcatagctccaggggctgtgtggatatcaggggatctggtgggactgatgtggatcaggctgggaaccaggaatccatggagcatggtgactgccaagatggagctactgggagtcagtctggccctggggattctgcttatgtgcttccgggtcctggcccttcccctgggacccccagtcctcccagtgatgcccacccccggccccagtcttccactcttggagttcacactcggggcgtgcgccgggacctgcccccagcctcggcctcccgctccgtccccatcccactcctcctggccagtgtggccgcagcttttgccctgggcgcctcagtctctggcctcctggtctcctgtgcttgtcgccgcgcccaccgacgtcggggcaaggacatcgagactcccgggctcccgcgccctctctccctccgcagtttggcccggctccacggtgggggcccagagcccccgccgccctccaaggacggggacgcggtgcagacgccgcagctctacaccaccttcctgccgcctccggagggcgtgcccccgccggagctggcctgcctgcccacccccgagtccacgccggagctgccggtcaagcacctccgcgccgccggggacccctgggagtggaaccagaacaggaacaacgccaaggagggtccgggccgctcacggggcgggcacgcggcgggcgggcccgcgccccgcgtgctggtgaggccaccgccgcccggctgtcccgggcaggccgtggaagtcaccaccctggaggaactgctgcgctacctgcacggcccgcagccgcccagaaagggggccgagccccccgcccctttaacctcgcgggcgctcccgccggagcccgcccccgccctcttgggcggccccagccccaggccccacgagtgcgcctcgccgctgaggctggacgtgccccccgagggcaggtgcgcctctgcccccgcccggcccgcgctctccgcccccgctccccggctgggcgtcggcggaggccggaggttgcctttctccggccaccgggccccccctgccctgctcactcgagtcccctcgggaggtccctccaggtactccgggggtcccgggaagcacctcctgtacctgggccggcccgagggctaccggggccgcgccctgaaaagggtggacgtcgagaagccccagttgtccctgaagcctcccctcgtcgggccctcctcccgccaggccgtcccgaacggcggccgtttcaacttttaaagggagcggtccacggcctccagcgtggggagcgcccgagtcctctcggccacgagctggacgctcttcaggacgtttcaccgccccctcgccccgcacctccagccttcccgactcgcagagtctcccgaggccccttttcgcctcgggtttatttattgactgtctttccccctgtcctcgacagaagagtgggaggtgagaagcccgtctcctcagtgagccagcatttcagggggagctggcggactcccactccccgctcccttccagccaagctgccttaactcgcccctcggggctcccccagagactgtgccccgggcgggccgcgcgcgctgtgtccagagtcctcgggcctcctgggtctgggacgtgcctctcctactgtgtaggagcctccgcttcccaatacagccgtgtctgcagccactgcctgacttcactcgggcgggggagggcggcagtcggtcggctcgctctgggcgccctcgctctctgccttcatctgggccctgggctctcccgggtaatgggatggctgcggtcccgccggggggcagtctggaaaggtttcctaaaggagacgagcgaattaacggtgtcgaggtgagccagggccagggggaccccggtaaagtttagttgaggctggggaaggccctcggagctcgtttccagatcgaggtaagagggactttcttaaaggcctagtctatgggatggggcggcggagggaattttttgagaaataaaatgaagctgcagtgtacgttacttgaagttccacatcagaaaaaaaaaaaaa

SEQ ID NO: 5061 - DNA, 4882 bp, Homo sapiens
  misc_feature (1622)..(1636): n is a, c, g, or t
  misc_feature (2814)..(2836): n is a, c, g, or t
ggactttggggctagcgtttagaaaagtctcgacctcctccggcccggtcccatcccaagaaccgactaaggctgtgagtgtccgggaaccagacccgcttggaggccacagccccgacgtcccgcgcccacgcggcagatcgggcgctgcggcctgggagcctcggggagatgcggagcaggagcaattccggggtccgcttggacgggtacgcgcggctggtgcagcaaaccatcctgtgttaccagaatcccgtcacggggctgctgtcagccagccatgagcagaaggatgcctgggtgcgggataacatctacagtatcctggccgtgtggggcctgggcatggcctaccgtaagaatgcagaccgcgatgaggacaaggccaaggcctacgagctggagcagaacgtggtgaagctgatgcgaggtcttctccagtgcatgatgagacaggtggccaaagtggagaagttcaaacacactcagagcaccaaggacagcctgcacgccaagtacaacaccgccacctgtggcacggtggtgggcgacgaccagtggggccacctccaggtggatgccacctctctcttcctcctgttcctggcccagatgaccgcctcaggcttacgtatcattttcactctcgatgaggtggccttcatacagaatcttgtcttttacatagaagctgcatataaagtcgctgattatggaatgtgggagcgtggagataagactaatcagggcatcccggaattgaatgcaagctccgtaggaatggccaaggcagctcttgaggcaattgatgaactggacctttttggagcccatggaggacgcaagtcagtgattcatgttctgccagatgaggtcgagcactgccagtctattctgttctccatgctgccaagagcgtcgacatctaaagaaattgatgctggacttctttccattatttccttcccggcctttgcagtggaagatgtaaaccttgtaaatgtgaccaaaaatgaaattatttctaagctccaggggcgttatggatgctgtcgcttccttcgagatggttataaaactccaagagaggaccctaatcgactgcattatgaccctgctgaactcaagctcttcgaaaacattgaatgtgagtggcctgtgttttggacatattttataatagatggagtcttcagtggtgatgctgttcaggtccaagaataccgagaggccctggagggaatactcatcagaggcaagaatgggatccgcctggtgcctgaactctacgctgtcccgcctaacaaggtagatgaagagtacaagaatcctcacacagtagaccgagttcctatggggaaggtgcctcatctgtggggccaatccttgtacatcctcagctcgctgttggcagagggattccttgccgctggtgaaatcgatcccttaaatagaagattttccacttcagtcaaacctgatgttgtagtacaagttactgttttggcagaaaacaatcacattaaggacttattgaggaaacacggggtgaacgtccagagtatcgcggacattcatccaattcaagtccagccgggccggattcttagtcacatatatgnnnnnnnnnnnnnnnataagaatatgaatttgagtgggcgaccgtatcgacatattggtgtccttggaacctctaaactatatgtgattaggaaccaaatctttacttttacaccccagttcaccgaccagcatcacttctacctggccctcgacaatgagatgatcgtggagatgctaaggatcgagctggcctacctgtgcacctgctggaggatgacgggcagacccacactcaccttccccatcagtcgcaccatgctcacaaatgatggctcagacattcattctgctgtgctctccacaattagaaaactagaggatggatattttggaggagccagagtaaaattagggaacctttcggaatttctcaccacatcgttctacacatatctgacttttctggatccagactgtgatgagaagttgtttgacaatgccagcgaagggactttcagtcctgatagtgattcagatttggtaggatatctggaagacacctgtaatcaagaaagccaagacgaacttgaccattatatcaaccaccttctgcaaagcacatcgttgaggtcctatctgcctcctctttgtaagaacacagaagaccgccatgtcttcagtgctatccactccacgcgggacatactttctgtgatggcaaaagcaaagggtttggaagttccatttgttcccatgactttgccgactaaagttctaagtgcccaccgtaaatcactgaatcttgttgattctcctcagccactcctagaaaaggttcctgaaagtgactttcagtggcccagagatgaccatggtgacgtggactgtgagaagctggttgagcagctaaaagattgttcgaacctacaggaccaagcagacattctgtacattctttatgtcataaagggtcccagctgggacacaaatctctctggacagcacggggtcaccgttcaaaaccttcttggtgagctctatgggaaagccggcttgaaccaggagtggggtctgattcgctacatctcaggccttctcaggaagaaagtggaggtcctggctgaggcctgcacagacctgctttcgcaccagaagcagctcaccgtgggcctgccgcccgagccccgggagaagatcatctctgcgccccttcccccagaggagctcacaaaactcatctacgaggccagnnnnnnnnnnnnnnnnnnnnnnntcctcacgcaggagattgtggtttacctggccatgtatgtcagggcgcagcccagcctctttgtggagatgctgagactccggattggactgatcattcaggtgatggccacggagctggcacggagcctgaactgctcaggagaagaggcttctgaaagtttgatgaacctcagccctttcgatatgaaaaatctcctgcaccatattctaagtgggaaagagtttggcgttgaaagaagtgtgcgccctatccactcctccacatccagccctaccatctccatccacgaggtgggccataccggagtcaccaaaactgagaggagtggcattaacagactgaggagtgaaatgaaacagatgactaggcggtttagtgctgatgaacagttcttttctgtgggccaggccgcgtccagcagtgcgcattcctccaagtctgcgaggtccagcaccccatcctcgcccactggcacgtcatcctcagactcgggaggacatcacatcggctggggtgagcggcagggccagtggctgcgcaggagaaggctggatggggccatcaacagggtccccgtgggattctaccagagggtgtggaagatcctccagaagtgccacggtctctccatcgatggttatgtcctcccatcctcgacgacccgagagatgaccccgcatgagatcaagtttgctgtccatgtcgaatcggtgctgaaccgcgtgccgcagcccgagtaccggcagctgctggtggaagccatcatggtgctgacgctgctctcggacacggagatgaccagcatcgggggcatcatccacgtggaccagatcgtgcagatggccagtcagctgttcttgcaggaccaggtgtcaattggtgccatggacaccctggagaaagaccaagccacaggaatctgccacttcttttatgacagcgctccgagtggggcttatgggacgatgacctacctaacaagagcagtggcttcttatttgcaggaattgttgcccaattcgggctgccagatgcaatagggtctcacctggaaacatgatcacactctcaatctgtcacgtgccccctagccttactgggaaccttctgtcccccaagatcccctgtgctatcaggaaagcatgtcccatcagaaacactctcggggggcaatggtagcactcaccctgaaactgatgtatgttaaagccacagagatagagctgaggagtcctgtgttcccccgcaaggagcaccccgggatcattttctaggttcatttctctggaacatttgctgtagcatctggtctcacggactctgaggaggaattggaaattggtctcttttgagtgcagagggaactgagacgccagcttaaattggctcttgcagagagttacagaaatagtttcgatgagctagtgacacatcctaaagatgcaaagatcctcctggcggcagtagccttgacaagggccacctcttcacaggatgcagtctgtctgtgcaccaaactcttcaccaaatagaacacttgtgtctctctgtggaatgggggttttcttgtgccttgcttgctttcatagccttccattttattggcatggctgccttgatgtaacataattctctgtccccaagatttagaaaattcctcttcgttcaccttggctcatggtcttccagggtttttatcctggctgtctatgaactagggttttctcctgccttaggaaaaatactgcatcttctggaatctagaaaaaaagaagaaaaaaaaaaaaaaaaaatggggggcgatcacggggcctcgaagagaggttccagaaacaatcgcgtgtggaacagagggacacgtgcggaagtggcaacacggggcaaaagcgtgtgcccccaggaaacccgggaacagagaaagagtggggggaatctccgcgatgaagaaaccgagaggacaacgagcgtctgaaacaaaccccgaaagacccggggggcaccaggggacacgaacaaggcgcgccaagaggcggaaaccaatac

SEQ ID NO: 5062 - DNA, 1214 bp, Homo sapiens
aattcggcaccgagcagcttggctaaaagtaagggtgtcgtgctgatggccctgtgcgcactgacccgcgctctgcgctctctgaacctggcgcccccgaccgtcgccgcccctgccccgagtctgttccccgccgcccagatgatgaacaatggcctcctccaacagccctctgccttgatgttgctcccctgccgcccagttcttacttctgtggcccttaatgccaactttgtgtcctggaagagtcgtaccaagtacaccattacaccagtgaagatgaggaagtctgggggccgagaccacacaggccgaatccgggtgcatggtattggcgggggccacaagcaacgttatcgaatgattgactttctgcgtttccggcctgaggagaccaagtcaggaccctttgaggagaaggttatccaagtccgctatgatccctgtaggtcagcagacatagctctggttgctgggggcagccggaaacgctggatcatcgccacagaaaacatgcaggctggagatacaatcttgaactctaaccacataggccgaatggcagttgctgctcgggaaggggatgcgcatcctcttggggctctgcctgtggggaccctcatcaacaacgtggaaagtgagccaggccggggtgcccaatatatccgagctgcagggacgtgtggtgtgctactgcggaaggtgaatggcacagccattatccagctgccctctaagaggcagatgcaggtgctggaaacgtgcgtagcaacagtaggccgagtatccaacgttgatcataacaaacgggtcattggcaaggcaggtcgcaaccgctggctgggcaagaggcctaacagtgggcggtggcaccgcaaggggggctgggctggccgaaagattcggccactaccccccatgaagagttacgtgaagctgccttctgcttctgcccaaagctgatatccctgtactctaataaaatgccccccccccccgttttaatctgtaaaaaaaaaaaaaaaaaaggtgttttttgttttttttgttgttgttttttttttgcgggggaggggatggtacagactaaacgtggggaaaagaagtaaaaagtgtggaagagaaagtacaggacactgggtctgtccccaccccaattcccttacaagtaatggagccggggatggaaataaatgacgtccaaggtcaaaaaa

SEQ ID NO: 5063 - DNA, 6403 bp, Homo sapiens
  misc_feature (1122)..(1167): n is a, c, g, or t
  misc_feature (1308)..(1372): n is a, c, g, or t
  misc_feature (4152)..(4183): n is a, c, g, or t
  misc_feature (4793)..(4820): n is a, c, g, or t
  misc_feature (5359)..(5398): n is a, c, g, or t
gagcggaggcttgccttcgccgccgttggggctggaagttcccgccaggtccgtgccgggcgagagagatgctgcccggcccgcctcggctttgaggcgagagaagtgtcccagacccatttcgccttgctgacggcgtcgagccctggccagacatgtccacagggttctccttcgggtccgggactctgggctccaccaccgtggccgccggcgggaccagcacaggcggcgttttctccttcggaacgggagcgtctagcaacccttctgtggggctcaattttggaaatcttggaagtacttcaactccagcaactacatctgctccttcaagtggttttggaaccgggctctttggatctaaacctgccactgggttcactctaggaggaacaaatacaggaatagcaacaactataactacaggattaactctgggaacgccagccactacatctgcagctacaacaggcttcagtttaggattcaataaacctgcagcatctgccacaccatttgctctacctattacctctacctcagctagcggtctgactctttcgtctgctctgacatcaactccagcagcatccacaggatttactctaaataatttgggtgggacaacagccacaactacaactgcatcaacaggcctctctttagggggagccttagctggtttgggaggttcacttttccagagtacaaacacaggaacatcaggacttggacagaatgctttagggttgactttgggaactacagcagctacttcaactgcaggcaatgaaggccttggtggtatagatttcagtagctcctcagataaaaagagtgataaaacgggaacaagaccagaggatagtaaagctctgaaggatgaaaatctacctcctgtcatctgccaggatgttgaaaatctccagaaatttgtgaaggagcagaaacaagttcaagaagaaattagtagaatgtcttcaaaagcaatgcttaaggtacaagaagatattaaagctctgaagcagctcctgtcgttggctgccaatggaatacagagaaacactctcaacattgacaaattgaaaatagaaactgctcaggagttgaagaatgctnnnnnnnnnnnnnnnnnnnnnnnnnnnnnnnnnnnnnnnnnnnnnnaatatgcagctcctgctgactacttcagaatcttggttcagcaatttgaggtacagcttcagcagtacaggcagcagattgaagaactagaaaaccatcttgccactcaagcaaataattcacatataacccctcaagatnnnnnnnnnnnnnnnnnnnnnnnnnnnnnnnnnnnnnnnnnnnnnnnnnnnnnnnnnnnnnnnnntcatgaaaatgtaaaggttctgaaagaacagtaccttggctacaggaaaatgttcttgggagatgctgttgatgtgtttgaaacaaggcgagcagaagccaagaagtggcagaacacacccagagttactactggacccactcctttcagcaccatgccaaacgcagcagccgttgccatggctgcaacacttacacagcagcaacagcctgctacaggtctgaacgcattcaagttatagcttcttactgttccaatgcagaacatttatgtgcgtttttataagtcttccatttgtgtgagcactgaagaaatttctatgagtagctgttccaatacaatctaaaattgtgatggacacgattataaacatacctgataaaaaaggcagggtagtcttagcaataattatacatcaattagatattgaatattgtgaatctacttaatgttatttgctgtaatgctataaatgccctttagaacatggtgtttcactagtgaattacatttaagaataacattagattctgaaatcatgactgtaccatttattgttttaaagtcagagatcatccatccattctttgaatttttcatatatgatactgataggtggtgcattctcattttcctcatacatagtgattacaaagtacccacattcaggatgaagtatgcttttattgactgaaggtatgttgaagatcaataggcttgtttgtatgtatgttgactgtaaacagaatacaagccctctaaaccaaattttgaagatgatacatgctagaattgtacctttccaaggtgaacagaacagcaagagcaggaaaaagatgttttgagatgtggattgcacattaaggagcaactgggaagttgaacagatgaaaataattggtgacatggaaagcagattgttttatttcttggtttagttacacttctaattagagaaacattttttgtggtcattctacagtgttttatttggtcctgtgtctttcggaggttaatagttatcttaatcctgccatcccttttgtcaggtttgaagcttgacatggaaaaatagtcttaatcgatattgatttttttattttaatcattcataaatttcttagtaatgcttactattcaatagcatgtgtctttctgagagttccatatagtccagtagtacattataatacacacaaattaatacatatttagattgcattcaagctacctatactagggaagcattctctggttttcactattggcagtttaaaaaattgttcttcacatttggagatgacagaattgacttgccataagtaaagggttgatgatagatttatgccaaatcctccatatcccgtggctggacccatgtgaatagtggctcgcacgagcactgtctggtagctctctagctggctggagtgtaggattgcgttgttaagttatggagggaaaaagtcattatgggattgattcctttgaggattgatatttcttcttaaaaggattcaatcccataattatgaccatcagctctcatgattacctaaccagttaatcaaaccaaccatagtactagtttactttttagagccagtattaatcctaaagtagataagtgtagatttggttaagtgttctttaaacatagtgaatttccattctattaaatagaacttgagaaatgtcagttatataaaaagttatgttgtaagtgaatatattctatgataaatacctaaacttgaagcaaaatctcctgtcaagggtttgtgtgtgtgtgtgtgtttaactttcttatctatagattattattttgagaaattcataggttttcacttatacattttgagcttgtggacatatggagatgtgtgttcattctctaaatgagtgcctactatgtgctgggctcgaggaatacaaaggtagacaatatagattttgtctttgccctctgtggtggttgacaatgttagcttaatctggagtattcttgaggagccttttgctcataggctttaattttgtctgtgacttttgccaggctttggggaaattgactgccttcactcttccctgaaactttgaagtccacataagggctttctcatcagatggcagaaattataatttattaacctaaacaaccttacagtgttttcgctttgaattgtatgaattcttagaactgagaagctaaacaacagtgataacaattttacattatcttttctttctccttttgtttctctaaaggtctcccaggccttcccagtcaaaattttcgttatttttagtcatgtcaccatgatgtgagatttctgagctctgttagatacatttagaaatgtccctatttatcaaatggtgttttgtaccccataagttatcccttatgccctgtgacttctgtgaaatctttgtttttaagtgccagtaacaaattttagaccatctagatgagggtagagagagcttatgcattgtttttatacatcactgttgatctatacaagatttgagttatcagaagggttttgcttttatttgcatatgaaatttttattaacatgaatatgggcacagagcaaatagcttcttagactgctgccttctgaaggtggcttctgtatctttctcagaggaggaggaatagacttaaacgacttctttgtcctccttcaattttttttttaatgaaaaagtatactagggcttaggcatgtgtgatttacagttatttgttctgaaggctgcagagaattgannnnnnnnnnnnnnnnnnnnnnnnnnnnnnnncatgagcatcgataacgtggataacgtagttccatgttggcagaacttgacacttgtctataagtgcttcccaagcctcctgaaaaactgaagacatttacattaggcttttcagtataattttaatttaggataggttttttagcaatgtatctgggattgagttttgctattgtgttttgacactttaagagttcttgatgtttacataataagactttcttatgtgacttagctgctgttttaaggagagccaagacgttttgttaggaattcctaatttttagcttagtgtaggtttggacatttaaggtgtagtgttaaataggaaacattaagtatttcatcttagtttcttgtggttttgtgattttgttgtatttaataaccaaaggaacattccccattaaatcagtaagagtaaaatttttcaaactggggaaaacgcattttaggttttttaaagaaaaattattttaaaatgtgacttagaaataaccatactaattacattaggcatttggggtgatcatggaaaattataaaatatttttagcactttagtcctttttctgttaatgcagttttacttttaagaaagtaaaatttnnnnnnnnnnnnnnnnnnnnnnnnnnnnaacctggttttgttgtgtgtgaatatattatatggtaacttttgtaaaatgttactctacatgaagatttcactttggccagtcattggtatatatcactacaaacttaattttatttatggaaataagaacctctcattggatgactattcaaatttcaaagcagacttcttgaattgtttacgtaacttttgcctgaaggatttagactgctttctaatagtgaaactaatatatatggtggccagagtgtaatatatgctaatactttggcatgggagatatttatcatgagtttttactattaaaaaatgttatacatttgcctacgagttttataaatgatgttgccttcagaatttgtgtgaaggtacaaaactaaaaatatcatgtatctgatgtgcaatggaaagtcttgtcatcattagatatgagttcttgattatattctgaatattgatgattagaaaaatcttatgttctgtcgctcttaacaacagacccacacacaacaaaaagcatgctatttgagtaactcnnnnnnnnnnnnnnnnnnnnnnnnnnnnnnnnnnnnnnnnctttagggtcttccaccagcagtgcctcctattaacctgtgacaaacaagtctctcaatgttaaagaactggacatgtgttttttatgttttttgttaggaatcagaaagtataataatatgcttggtttctttttcctatagtaacattttacaaaagagctgctaggcaggtattttattctcaaagtgatctcaaactggatgtaaaattttaaattatttttttaatagtagtataagaattctggctgctattagttattgtttgttttctgggttagaagctattcgaaaagtccagtttctgtcccagtgtagcaaaatgtagttcctcggttgtttttctttaaatgctttataattttacactacctttttaatatacaaacctcattcttcattggataacttgaaggctttgatttctttaaaaatttaaattttagtgtgtatattactttgacagttccctcatctttgagatgcactgatcactgtgcttgaaaaagacaatactgaagattgtactatgaagtttattgaataattttcataaattatttatccaaatgagagatttttagatttttgtattctgcttagttttaaaaaaaaaaaatagtagtttaaaagagaggctagtaagtttgatgctattcttgccaaacaaactcagccaaaatctttaaagtaacaagagggaaaaggatgactaatcgttctgcttctgagtacattttccaaaacgttggaaagaaacttctgaattgaaatcttgaatgtattgaatctgtcaaggtacacagcggtgcctttgtaaatgttcattactttatttaatcaggtgataagtggtgtaatgtagcagagcttaagaatagaactcaattatcactttttgtgaacaagttggaattgtcatgttactgtgtaattgatttgctttacaatgaacaataaatttaataaaataaaaaaaaaaaaaaaaaaaaatcgctcatcg

SEQ ID NO: 5064 - DNA, 2548 bp, Homo sapiens
ctggtttaaccgggttaaaacagtgtacggtcgatatccgagctccttcccttactctaccttgctcctacttttctctaagtcaacatgagtcgacagtttagttccaggtctgggtaccgaagtggagggggcttcagctctggctctgctgggatcatcaactaccagcgcaggaccaccagcagctccacacgccgcagtggaggaggtggtgggagattttcaagctgtggtggtggtggtggtagctttggtgctggtggtggatttggaagtcggagtcttgttaaccttggtggcagtaaaagcatctccataagtgtggctagaggaggtggacgtggtagtggctttggtggtggttatggtggtggtggctttggtggtggtggctttggtggtggtggctttggtggaggtggcattgggggtggtggctttggtggttttggcagtggtggtggtggttttggtggaggtggctttgggggtggtggatatgggggtggttatggtcctgtctgccctcctggtggcatacaagaagtcactatcaaccagagccttcttcagcccctcaatgtggagattgaccctgagatccaaaaggtgaagtctcgagaaagggagcaaatcaagtcactcaacaaccaatttgcctccttcattgacaaggtgaggttcctggagcagcagaaccaggtactgcaaacaaaatgggagctgctgcagcaggtagatacctccactagaacccataatttagagccctactttgagtcattcatcaacaatctccgaaggagagtggaccaactgaagagtgatcaatctcggttggattcggaactgaagaacatgcaggacatggtggaggattaccggaacaagtatgaggatgaaatcaacaagcggacaaatgcagagaatgaatttgtgaccatcaagaaggatgtggatggtgcttatatgaccaaggtggaccttcaggccaaacttgacaacttgcagcaggaaattgatttccttacagcactctaccaagcagagttgtctcagatgcagactcaaatcagtgaaactaatgtcatcctctctatggacaacaaccgcagtctcgacctggacagcatcattgctgaggtcaaggcccagtacgaggatatagcccagaagagcaaagctgaggccgagtccttgtaccagagcaagtatgaagagctgcagatcactgctggcagacatggggatagtgtgagaaattcaaagatagaaatttctgagctgaatcgtgtgatccagagacttagatctgaaatcgacaatgtcaagaagcagatctccaacttgcagcagtccatcagtgatgcagagcagcgtggcgagaatgccctcaaggatgccaagaacaagctgaatgacctggaggatgccctgcagcaggccaaggaagacctggcccgcctgctgcgcgactaccaggagctgatgaacaccaagctggccctggatctggagattgccacctacaggaccctcctggagggagaagaaagcaggatgtctggagaatgtgccccgaacgtgagtgtgtctgtgagcacaagccacaccaccatcagtggaggtggcagccgaggaggtggcggcggtggctacggctctggaggtagcagctatggctccggaggtggtagctatggttctggaggtggcggcggcggcggccgtggcagctatggctccggaggtagcagctacggctccggaggtggcagctatggctctggaggtggcggcggcggccatggcagctacggctccggaagcagcagtgggggctacagaggtggctctggaggcggcggcggcggcagctctggcggccggggctctggcggcgggagctctggaggctccataggaggccggggatccagctctgggggtgtcaagtcctctggtggcagttccagcgtgaggtttgtttctaccacttattccggagtaaccagataaagagatgccctctgtttcattagctctagttctcccccagcatcactaacaaatatgcttggcaagaccgaggtcgatttgtcccagccttaccggagaaaaagagctatggttagttacactagctcatcctattcccccagctctttcttttctgctgtttcccaatgaagttttcagatcagtggcaatctcagtcccctggctatgaccctgctttgttctttccctgagaaacagttcagcagtgaccaccacccacatgacatttcaaagcacctccttaagccagccagagtaggaccagttagacccagggtgtggacagctccttagcatcttatctctgtgctgttttggttttgtacataaggtgtaagcaagttgtttttcttttgtggagaggtcttaaactccccatttccttgttttgctgcaataaactgcatttgaaattctccatgtctcgatcgcccttgtttacggctctgtctaacctggatgggtgttttgtgaggtaaaagaa

SEQ ID NO: 5065 - DNA, 11994 bp, Homo sapiens
  misc_feature (4560)..(4574): n is a, c, g, or t
  misc_feature (5203)..(5230): n is a, c, g, or t
  misc_feature (7898)..(7912): n is a, c, g, or t
agcgaaccatcggggcggccgggagccatgttggagcggcgggaggcggcagcagcgtcggggatgctgtggtgggggcggaaaaagccagggccgcacgccggaggggctccggccgcggagtagatggtgcccagagggcggcgggggtgcggagagacaggcggaggggcgggggcccggggcggcggcaggggcccgggagggggcccgagcggcggggccagcccaaggcccggaccggggcggggggcggtggaggccgtgcagggaggcgggagatgatggcgaggcggccgccgtggcggggcctcggggaacggtcgacccccatactcctgctccttctcctctctttgttccccctcagccaggaggagctggggggcggtgggcaccagggctgggacccaggcttagctgccactacggggccaagggcgcatatcggtggcggagccttagctctttgtccggagtcttccggggtccgggaggatggggggcctggcctgggggtcagggagcctatcttcgtggggctccgagggagaaggcaaagcgcccggaatagtcgagggccccctgagcagccgaatgaggagctggggattgaacacggcgtccagccattgggcagccgcgaacgagagacaggacagggaccagggtctgtgttatactggcgcccagaggtctcctcttgcgggcggacaggacctttgcaaagaggtagtctgtcaccaggggctctgtcctcaggggtcccgggctcggggaacagctcgcccctcccttcagactttttgattcggcaccacggtcccaagccggtgtcctcccagcggaacgctgggacaggctcccgcaaaagagtgggcaccgcgcgctgctgtggggaattatgggcaacagggagcaagggtcagggcgagagagccacgacatccggagcagaaaggacagccccccggcggaactgtcttccaggggcctcgggatctggccccgagctggattcagcaccacgcacggcgaggacagctcctgcatcaggttcagcaccccgcgagtctcggacagctcccgagccggcgcccaagcgcatgcgctcccggggtctcttccgctgccgcttcctcccgcagcgccccgggccgcgtcccccgggactcccggcccgtcctgaagccaggaaagtaacctcggcgaaccgggcacgctttcgtcgcgccgcaaaccgccacccgcagtttccgcagtacaactaccagacgctggtgccggagaatgaggcagcaggcaccgcggtgctacgcgtggttgctcaggacccggacgccggcgaggccgggcgcctagtctactcgctggcggcactcatgaacagccgctcgctggagctgttcagcatcgacccgcagagcggccttatccgtacggcggcagctctggaccgcgagagcatggagcgtcactacctgcgtgtgaccgcgcaggaccacgggtcgccgcgcctctcggccaccacgatggtggccgtgacagtagccgaccgcaacgaccactcgccggtttttgagcaagcgcagtaccgggagacccttcgcgagaatgtggaggagggctaccctatcctgcagctgcgtgccactgacggcgacgcgccccccaacgccaacctgcgctaccgcttcgtggggccgccagctgcgcgcgctgcagctgccgccgccttcgagattgatccacgctccggcctcatcagcaccagcggccgagtggaccgcgagcacatggaaagctatgagctggtggtggaagccagcgaccagggccaggaacccgggccgcgctcggccactgtgcgcgtacacataactgtgctagacgagaacgacaatgctcctcagttcagcgagaagcgctacgtggcgcaggtgcgcgaggatgtgcgcccccacacagtcgtgctgcgcgtcacggccactgaccgggacaaggacgccaacggattggtgcactacaacatcatcagtggcaatagccgtggacactttgccatcgacagcctcactggcgagatccaggtggtggcacctctggacttcgaggcagagagagagtatgccttgcgcatcagggcgcaggatgctggccggccaccgctgtccaacaacacgggcctggccagcatccaggtggtggacatcaatgaccacattcctatttttgtcagcacgcccttccaagtttctgtcttggaaaatgctcccttgggtcactcagtcatccacattcaggcagtcgatgcagaccatggggagaatgccagattggagtactccctaactggtgtggcacctgatactccttttgtgataaacagcgccactggctgggtctctgtgagtggtcccctggaccgtgagtctgtggagcattacttctttggtgtggaggctcgagaccatggctcacccccactctctgcctcagccagtgtcaccgtgactgtgctggacgttaatgacaatcggcctgagttcacaatgaaggagtaccacctacgactgaatgaggatgcagctgtgggcaccagtgtggtcagcgtgaccgcagtagaccgtgatgccaacagtgccatcagctaccagatcacaggcggcaacacccggaatcgctttgccatcagcacccaggggggtgtgggtctggtgactctggctctgccactggactacaagcaggaacgctacttcaagctggtactaactgcatctgaccgtgcccttcatgatcactgctatgtgcacatcaacatcacagatgccaacactcatcggccggtctttcaaagtgcccactactcagtgagtgtgaatgaagatcggccaatgggtagcaccatagtggtcatcagtgcctctgatgatgacgtgggtgagaatgctcgtatcacctatctcctggaggacaacctgccccagttccgcattgatgcagactcaggagccattacattacaggccccattagactatgaggaccaggtgacctacaccctggctatcacagctcgggacaatggcatcccacagaaggcagacactacttatgtggaggtgatggtcaatgacgtgaatgacaatgctccacaatttgtggcctcccactatacagggctggtctctgaggatgccccacctttcaccagtgtcctgcagatctcagccactgaccgggatgctcatgccaatggccgggtccagtacactttccagaatggtgaagatggggatggagattttaccattgagcccacctctggaattgtccgtacagtaaggcggctagaccgggaggcagtatcagtgtatgagttgactgcctacgcagtggacagaggtgtgcccccactccggactccagtcagtatccaggtgatggtgcaggatgtgaacgacaatgcacctgtcttcccagctgaggagtttgaggtgcgggtgaaagagaatagcattgtgggctcagtggtggcccagatcactgcagtggaccctgacgaaggccccaatgcccatataatgtaccagatcgtggaggggaacatccctgagctgttccaaatggacatcttctctggagaactgacggcactcattgacctagactatgaggctcgccaagaatatgtgattgtggtgcaggccacatctgctcctttggtcagccgggccactgtgcacgtccgcctggttgaccagaatgacaacagccctgtgctcaacaacttccagatcctcttcaacaactatgtatccaaccgttcagacaccttcccgtcgggcattattgggcgcatcccagcttatgaccccgatgtctccgaccacctcttctactcctttgagcgtggcaatgagctgcagctgctggtagtcaaccagaccagtggggagctgcgactcagccgaaagctagacaataaccgcccactggtggcctccatgttggtgactgtcacagatggcctgcacagcgtgacggcgcagtgtgtgctgcgcgtggtcatcatcacggaggagttgctggccaacagcctgaccgtgcgccttgagaacatgtggcaggagcgcttcctgtcaccgctgctgggccgcttcctcgagggcgtggctgcggtgctcgctacgcccgctgaggacgtcttcatcttcaacatccagaacgacacagacgtagggggcaccgtgctcaatgtgagtttctcggcgctagctccacgtggggccggggcgggcgctgcagggccctggttcagctccgaggagctgcaggagcagttgtacgtgcgccgggcggcgctggcggctcgctccctgctcgacgtactgcccttcgacgacaacgtgtgcctgcgagagccctgtgagaactacatgaaatgcgtgtccgtgctccgctttgactcgtccgcgcccttcctggcctcggcctccacgctgttccgacccatccagcccatcgctggcctgcgctgccgctgcccgcccggannnnnnnnnnnnnnntgcgagaccgagctcgacctctgctactccaacccatgtcgcaacggcggagcctgcgcgcggcgcgagggaggctacacgtgcgtctgccgcccgcgcttcaccggagaggactgcgagctggacaccgaggccggccgctgcgtgccgggcgtctgccgcaacgggggcacctgcaccgacgcgcccaacggcggctttcgctgccagtgcccggcaggcggcgccttcgagggcccgcgctgcgaggtggctgcgcgctccttcccgcccagttcgttcgtcatgtttcgcggcctgcggcagcgattccaccttacgctgtccctctcgttcgcgacagtgcagcagagcgggctgctcttctacaacgggcgcctgaacgagaagcacgacttcctggccctggaactcgtggctggccaagtgcggctcacatattccacgggtgaatccaacaccgtggtcagccccacagttccagggggcttgagtgacgggcaatggcatacagtgcatctgagatactacaacaagccccggacagatgccctagggggtgcacagggcccctccaaggacaaggtggctgtgctaagcgtggatgattgtgatgtggccgtggctcnnnnnnnnnnnnnnnnnnnnnnnnnnnnctcatgcgcggctgctggtgtgcaaacaagctccaagaagtccctggacctgacgggccctcttcttctgggaggtgtccccaacctccccgagaacttccccgtatcccataaggacttcatcggctgtatgcgggacctgcacattgatggccgccgagtggacatggcggcttttgtcgcaaataatggcaccatggcaggctgccaagccaagctacacttttgtgactcaggcccctgcaagaacagtggcttctgctcggagcgctggggcagcttcagctgcgactgccctgtgggcttcggcggcaaagactgtcagcttactatggcccatccccaccatttccgtggcaacggcacactgagctggaactttggaagtgacatggctgtgtctgtgccatggtacctggggctggcatttcggacacgggcaacgcagggggtcctgatgcaagtgcaggctgggccacacagcacgctcctttgccagctagatcgggggttactgtctgtgacagtgaccaggggctcgggccgtgcttcccatctccttctggaccaggtgactgtcagtgatggccggtggcacgatctgcggctggagttgcaggaggaaccaggtggccggcggggccaccatgtccttatggtctcactggactttagcctcttccaggacaccatggcggtggggagtgagctgcagggcctgaaggtaaagcagctccacgtgggaggcctgccccccggcagtgcagaggaggctcctcagggtctggttggctgcatccagggggtgtggctcggctccacaccctctggctccccggccctgctaccccccagccaccgagtgaatgcggagcctggctgtgttgtgaccaacgcctgtgcctctgggccctgcccacctcacgcagactgccgggacctctggcagaccttttcttgcacctgccagccaggttactacggcccaggctgtgtggatgcctgcctcctgaacccctgtcagaaccagggatcatgccggcacctgccaggagccccccatggctatacctgtgactgtgtgggtggctatttcgggcaccactgtgagcacaggatggaccagcagtgcccacggggctggtgggggagcccaacctgtggcccctgcaactgtgatgttcacaaaggttttgatcccaactgcaacaagacaaatgggcagtgtcactgcaaggagttccactaccgaccgcggggcagtgactcttgcctcccatgtgactgctaccctgtgggctccacctcgcgctcatgtgcaccccacagcgggcagtgcccctgtcgcccaggagcccttggccgccagtgcaacagctgtgacagtcccttcgcagaggtgacagccagcggctgccgggtgctctatgatgcctgccctaagtccctgagatctggtgtgtggtggccccagacaaagtttggcgtcctggccacagtgccctgtccccggggggccctgggtgctgctgtgcggctgtgtgatgaggcccagggttggctggagcccgacctcttcaactgtacctcccctgcctttcgagagctcagtctgctgctggatggcctagagctgaacaagacggcactggataccatggaggccaagaagctggctcagcggctacgggaggtgactggccacactgaccactattttagccaagatgttcgagtcactgcccgcctgctggcccacctgctggccttcgagagccatcagcagggcttcgggctgacagccacacaggatgcccacttcaatgagaatctgctgtgggccggctctgcactgcttgccccagagacaggggacttgtgggcggcgctggggcagcgggcccctgggggctccccaggcagcgcgggactggtgaggcacctggaggagtatgcagccacactcgcaaggaatatggaactcacatacctgaatcccatggggctggtgacgcctaatatcatgctcagcattgaccgcatggagcaccccagttctccccggggggcccgtcgctaccctcgctaccatagcaacctctttcgaggccaggatgcctgggatcctcacacccatgtgctgctgccttcccagtccccacggccatccccatctgaagttctgcccacaagcagcagcatagaaaactccaccacctcaagtgtggtccccccaccagccccgccagagccagagcctgggatctccattatcattctcctcgtttaccgcaccttagggggactgctccctgcccagttccaggcagaacgccgaggtgccaggcttcctcagaaccccgtcatgaactccccggtggtcagcgtggctgtgttccacggacgcaacttcctaaggggaatcctggagtcccccatcagcctagagtttcgcctgctacagacagcgaatcggagcaaggcgatctgtgtgcagtgggacccacctggcctggcggagcagcatggtgtgtggacagcacgggactgcgagctggtgcacaggaatgggtcccacgcacggtgtcgctgcagccggacagggacctttggggtcctcatggatgcctctccccgtgagaggctggagggcgacctggagctgctnnnnnnnnnnnnnnncgtggtcgtggctgtgtctgtggctgcgctggtgctgactgcagccatcctgctgagcctgcgcagcctcaagtccaatgtgcgtgggatccatgccaatgtggcagccgccctgggggtggcagagctcctcttcctgctggggattcacaggacccacaatcagctggtgtgcactgcagtcgccatcctcctgcactacttcttcctcagcaccttcgcgtggctcttcgtgcaggggctgcacctctaccgcatgcaggttgagccacgcaacgtggaccgcggcgccatgcgcttctaccatgccctgggctggggcgtccctgctgtgctgctgggccttgctgtgggcctggaccctgagggctatgggaaccctgacttctgctggatctcagtccacgagcccctcatctggagctttgctggccctgttgtcctggtcatagtgatgaacgggaccatgtttctcctcgctgcccgcacatcctgctccacagggcagagggaggccaagaagacctctgcactgacccttcgcagctccttcctgctgcttctgctggtcagtgcctcctggctctttgggctcctggcagtcaaccacagcatcctagccttccactacctccatgctggactctgcggcctccagggcctggcggtgctgctgctcttctgtgtcctaaatgcagatgctcgggctgcctggatgccagcctgtctgggcaggaaggcagcgcctgaggaggcaaggccagcacctgggctgggacctggggcctacaacaacacggctctctttgaggagagtggcctcatccgcatcactctgggcgcctccaccgtctcctctgtgagcagtgcccgctccggccggacccaggaccaggacagccagcggggccgcagctacctcagggacaatgtcctggttcgacatggctcagccgctgaccacactgaccacagcctccaggctcatgctggccccactgacctggacgtggccatgttccatcgagatgctggcgcagactccgactctgacagtgacctgtccttggaggaggagaggagtctctccattccatcttcagaaagcgaggacaatggccggacgcgggggcgcttccaacggccactctgccgagcagcccagagtgagaggctcctcacccaccccaaagatgtggatggcaatgacctcctgtcctactggccagccctgggggagtgcgaggcagccccctgtgctctgcagacttggggccccgtgttaatcgcacgaggtggacacagcatgtgatcagctaacaacaaccagccagacccggccctgaccagtggggatgagacttctctgggccgggcccagcgccagaggaaaggcatcctgaagaaccggttgcaatacccactggtgccacagacccgaggtgcccctgagctgtcctggtgccgtgcagccaccttgggccaccgtgcagtgccagctgcctcttacggtcgcatctatgctggcgggggcacgggcagcctttcacagccagccagccgctactcttctagagaacagctggacctgctcctccggcggcaactgagccgtgagcgactagaggaagcccctgcccctgttctacgtcccctgagccggccagggtcccaggaatgcatggatgctgcaccaggccgactggagcccaaagatcggggcagcaccctgccacggaggcagccacctcgggactaccctggcgccatggctggccgcttcgggtcacgggatgcgctcgacttaggggcacctcgagagtggttgagcacgctgcctccgccccgccgcacccgggaccttgacccacagcccccacctctgcccctgtctccccagcggcaactctcaagggaccccctcttgccatcccggccgctggactctctgtctaggagctcgaactctcgggagcagctggaccaggtgcctagccggcacccctcacgagaagcccttgggccactcccgcagctgctcagagctagggaggactcggtcagtggccccagccatggcccctccacagaacagttggacattctttcctccatccttgcctctttcaactcctcggccctctcctctgtgcaatcttcaagcacacccttgggccctcacaccactgccacaccttctgccacagcctctgtgcttgggccctccacgccacgttctgccacgtctcacagcatctcggagctgtcgccagactcagaagttcccagaagtgagggtcactcctgaggggatgacggcgtggacgaggaacagctgagggcgacagaggatctaggctaacaggagagactccaggagtgggggcagatcccaaggcagcctcctgctccccagtggtgggtgccccagctctacctggtgtggcagggctgaggctccatgtgcatctgtgagcatgcgtgtgacaggtgcagagacgggggactggagggagacttttatacgttttgtacctttgtaaccagagagatgcttatgttatttttcagcttttctgtctcctggggggtttgaggctgggctgggagggggagggagatagagggagagatgcagtttgaccccatttgggtcctgagcaaaccctatgctcatctctctctccttcctggggtggactcagatgggtgggacacatgccttcctccccctattccacccccaagttgatctgagtatcgtcaggggcccaaagtacagaattgttctttgctttttattgaatgctccaaaggccaaacttctggggctgggggttggtcttggaaacaggggtcctctgacttcctcatgggggcttgctcataccgcccctcctggtggatgtgtgtgtttattatgtggagtccctgccacttactgccttatgacctaggactgatgctgtggggtgctggtggagcagctgatgtcgtgtttacagagcaaggcttccctgtctcccacggggaggggctcgggcctctagtcagacattcctgcagagggtcggtggaggggtcattcacctgcccctgcagcaagcaaaagttgtctgtggtgccatttgattccctgacactgccccctgcttgaattgattccgaagggtagggtgggaaggtgagcaaagggagcagaaacaagggaattcaagacccagaatgtaggtgccactgcctcctatgtttacaggatcctccgtggccctaggcacctgggctgcaggaagtgactccgttccactcctcctttattcccttaaaaagggaaaaatgactgttacgaccctgttcacaaaactcttacttttgctattttgtctgctgtccagaactgaagactttaaaattttgttactgtttacaagtccagattcaaaaaatgtttttactttgtttacaactcaaaactttgagttttacactttgtttacagtagataattttttttcctttgtttccaagtgaaaggtagggaaagtgggagagggacttggaggacccacctgtgaggaccctgacctggccatcttgaggggttttctaacccccaggtctcccaggccgaaggtcagccttgagtcccgtttaacagcagatccagaagaccttgagagtaggcgtcctctaaccacgggggagagtggctgtgcagggctggggggtggtctgtgcagacacctcctcacccaccaccccatgcatactcttgggaagcagcttcctgggagattagaaattctacttccctgactggagctaaatcccaccagccaggacccaaactctccttaccgagaaggaccccagctcttgaagggctgagtggcctgctgggggtgggagggtgtctttactatgtcctaggtttcgtagatgcccctctctggggttcccctcctccagcccagcggccctctttcctgtctgtgtaaattgttccgtgaagccgcgctctgttttgggaataaacttctatagaaaacaaaaaaaaaaaaaaaaaaaaaaaaaaaaagtgg

SEQ ID NO: 5066 - DNA, 2636 bp, Homo sapiens
gcggccgcgaccgccggggacgagcttggaggaaaaggaaccgggagccgcccacccgggggcgctctccggacccccagggtcctagcgcgcggcccttaccgagcctgggcgcccggatttcggcagcggatcgcctttccgggttggcggcccgcctgattgggaacagccggccggttgccgggggaacgcgggagtcgggcccgacctgagccacgcgggcttggtgcccacctgtgcgcgccgcctgcgaagaaggaacggtctagggagaaggcgccgccggccgcccccgtccccaccgcggccgtcgctggagagttcgagccgcctagcgcccctggagctccccaaccatgaagcccaacttctccctgcgactgcggatcttcaacctcaactgctggggcattccgtacttgagcaagcaccgggccgaccgcatgaggcgcctgggagactttctgaaccaggagagcttcgacctggctttgctggaggaggtgtggagtgagcaggacttccagtacctgagacagaagctgtcacctacctacccagctgcacaccacttccggagcggaatcattggcagtggcctctgtgtcttctccaaacatccaatccaggagcttacccagcacatctacactctcaatggctacccctacatgatccatcatggtgactggttcagtgggaaggctgtggggctgctggtgctccatctaagtggcatggtgctcaacgcctatgtgacccatctccatgccgaatacaatcgacagaaggacatctacctagcacatcgtgtggcccaagcttgggaattggcccagttcatccaccacacatccaagaaggcagacgtggttctgttgtgtggagacctcaacatgcacccagaagacctgggctgctgcctgctgaaggagtggacagggcttcatgatgcctatcttgaaactcgggacttcaagggctctgaggaaggcaacacaatggtacccaagaactgctacgtcagccagcaggagctgaagccatttccctttggtgtccgcattgactacgtgctttacaaggcagtttctgggttttacatctcctgtaagagttttgaaaccactacaggctttgaccctcacagtggcacccccctctctgatcatgaagccctgatggctactctgtttgtgaggcacagccccccacagcagaaccccagctctacccacggaccagcagagaggtcgccgttgatgtgtgtgctaaaggaggcctggacggagctgggtctgggcatggctcaggctcgctggtgggccaccttcgctagctatgtgattggcctggggctgcttctcctggcactgctgtgtgtcctggcggctggaggaggggccggggaagctgccatactgctctggacccccagtgtagggctggtgctgtgggcaggtgcattctacctcttccacgtacaggaggtcaatggcttatatagggcccaggctgagctccagcatgtgctaggaagggcaagggaggcccaggatctgggcccagagcctcagccagccctactcctggggcagcaggagggggacagaactaaagaacaataaagcttggccctttaaaaaaaaaaaaaaaaaaaaaaaaaacaatctaaacattgttgtttgcgcgggcccttggcgccctcgaagaaagctttctataacacacttcgtgttgtgggcggcgcgcgggggccccctttgtggttatgtggcacacgtgggcccacagagcggtgttccccataaggaacctcggggaccatgacacccaacgggcggtgggggtttcttacccatattaaaaagagcccgggggggcacacccgaggggctttttgtgaccaattctccaagatgggggtctcagaggcaggccaatagcgggggcctcctatccaaccgagggggggcctccacagaggagaacgcgtcgcatatctacaaatatacgccccccccctggggtggggaatgatgagtacgaaggaggcacacagacaagaaagaacaaagagagaacaaagagaacaagaacaagacacaacgcaacaataagcaatgaagaggagacaaagaagatggttagagcgcgtcagagaacgtgataagagggaagatttaagcagtgcaaggaagacagagagcagagaaggaggagaccagggagaataaggcagagaggggatgaaagcggtaagagagcacagaatatataagtagttgagacaggatgcacaagaagcaggagcatatagagagtgatcgcgaacacgaatgaggggaggaagcgaagagcacgagtggcgagcgctgaagcgaatgcaatggtgctagacagcttgagtaatgttatactcgctgaaacctacacaagagacgcaagggaacgagtgcgaagcgtccattaccaagcgaagcagaacggagacggaacgagacggggcgcctgacagagcgagacagcggccacagggcggacgacatacaatgcgcaagcaaactaacaggctgcgcgtaacacgcctggagcgcgtcatgctgtgagtgggcagacggagtgccgtccgc

SEQ ID NO: 5067 - DNA, 2672 bp, Homo sapiens
  misc_feature (978)..(996): n is a, c, g, or t
gcgtttttttttttttttttttttttttttttttggtagttcaataatattttattgtcaatagcataggagaaattcaatattgaatctcagaacaagaagaacctatttacaatgcatgtcaaggaagagatgggagaaggaatgtcacaaaattttttggtaaatacatattttttatagagaagtaatccatgaacctgcaacatggatagcttatccaaccaactttacaaattactattaatataagttacatgcttgccatctaaagtaactaaacccatagactgaaaaactatgtgtcaaggtaacgtgagcactttaatcactttacttatattttctaaaggcagtagtttcctctccttttcccgctatcatattagatgaagagacaagttccttcaacacaaattctgatatcggctattgtgagaatccctgtgcgagtcagctagaagcccctgccaccagtctagtgccaaccaaatgaccagatgggacagctatcaaaaatgaaagtgaatttatattaagatctgaacttcctcttggggtcttgcatttcagctactagaggtctataattccttatccaacattccacaatctgaaaagctctgcgaacgaagtgtttttgtaagttggtggcatacgcatttggcagcaaattttgaccccttatgggctacttagtctttatgtatccattttgtctgaatattctacattttgttgcagcatattaaggtgttgatttataggttgctgccccagatctgatccatgaagttctataacatacagtgtatgtaaaatattatcttttgaaaatccccaaaattcagaattttaataaacacctgcctgccagggcttaacataaggacttctggacctatagtagcctgagcatgtgcccaagtttcactggagccagggcagtttcgtgggtcccatgcactacactttctnnnnnnnnnnnnnnnnnnngcgagaatgtctggaacattctctatcccaaagaaggaaagcatagtgctgggaagaagagcttccaaatcttccttataggaattttctttgtggaagactgtatttctgccaactaccccggacaatttgacaaataatgaataaatatttttcctctaacgtgattccttttcattaaaagcgtatgtcattgtcttatgggaaaaaaggaaacaaaagatagaattggaaaaaaaaaaaggtctatctgtgtgaaggctacatatgacaagtactggcggcttcctgatccagcaacattagcaatttattgtatctagaaaatgaatctctggatgcagagtttacagaaatcggcatccacagaaaagtcagggaggacttaacatgggctatgccacttaaggagaacagaatttgccaaagaaaatgatgtttcgagttttgttgtgcctgatgatgtaaataaagggatggtcagcattcaattcatccttgtgctgcaggatccgtgctcctggcacctctatggaatccccaccatcttcagttatttctaagcacactttgtggataacatttgatagggccactcccttggtctctgacattccagagaaatcagatgtgtcttcactgaagatatgtttcagccctagattttccagacaagccttgggatcaatcatcttttccaccttaaattttggaatggagagtttgaccttggcattggccatggtgctgggattagtccactgtgacagtgactctgagttgagttgtttttcaatcttctccaagcctgtggactcatcctccacatccttgggtagtaggatgaacatgctgagatgcttattttgaaaaggaagctctatgatcttacaattgatactgtcaatgtttcccatacagaacgtggcctccatgttcatcatctgcactggtttggtgtctgtcttgttgagtctgaaaggacattcttttgtttctgattcaggaaatttcttcatccacttgccaacaaagtaggcagcattaaccacaaggattttggtctggtcgttcacactgttgtcagctaaaatgttctcaaagtggccatctgtgagatccttaattgagttgttgatctgacctttcgtttcttccaatttatctttgaagtcaacagtttccaattcctttgcatagggtctcttcgtagagctgatgaactctgtagaaagattcagagatttgtctacgtagagccgcttgattagtttcagtgagtaaaaggaactaagtttgtttacatccgatgttactgtttgaaatccaaagggtatatctttgacattttcaaaatgaagaacctgtccaatttcatttgcagtgtcacctttagcacccacttgagcaagtgacagagaggtggagagacagattggagagaagaggacattgcccagtggctccttttcacatagttgtttgaacagatcaacggcaaaagccgaatttgctagttgcagggcatccattgcgggcctggagtcacagttatcctggaaaatgcgtggaaaaggaacaggcaagcgaggagcacaactcgtgcctgtggaggcgaccgtgtctgggcagaagcagcggtggctcacctgggcagcaccgccacgcccactccc

SEQ ID NO: 5068 - DNA, 700 bp, Homo sapiens
gcgtgagccaccgtgcctgcccagggatctaaaaactttctaagtttcctccatcgttggcatcctcacagctatctccaatgtcactcaagagacatcaacagacatttaactgctgcagacttcattgctctgtcacctcaccttgaatctaacaaatcaaagtatttctgcaggtccaatggtctaaaaatcaaatgcttgttaaatgactttttacaacaccccttactttcctaatccatttcaatcttattttttttattgtggtaaaaaacacatcacgtaaaatgtaccatcttaaccatttttaagcatatggtacagcagtgttaactccatgcatgttgtgaaacagacccccggaactttctcatcttgtaattctgaagttctatacccaccgaacaactcctcttttccccttccccctgcctgccccagctcttggcaccattattctgctttctgtttttgagagtctgactacttaagatacctcatacaagcgggatctggcttacatttcttgagcattgtattctggaaaagtgtttccttcctctgaaaaatgggtagagttctgaaggagaactactggtcttattgtacacttgctgtacctatttttatttaacaaatattcatctatggtataataaagatgtcatgattgaaaaaaaaaaaaaaaaaaaaaaaa

SEQ ID NO: 5069 - DNA, 1740 bp, Homo sapiens
gcgagcttggattgcccggtgccccaggaatcgatggagagaagggccccaaaggacagaaaggagacccaggagagcctgggccagcaggactcaaaggggaagcaggcgagatgggcttgtccggcctcccgggcgctgacggcctcaagggggagaagggggagtcggcatctgacagcctacaggagagcctggctcagctcatagtggagccagggccccctggcccccctggccccccaggcccgatgggcctccagggaatccagggtcccaagggcttggatggagcaaagggagagaagggtgcgtcgggtgagagaggccccagcggcctgcctgggccagttggcccaccgggccttattgggctgccaggaaccaaaggagagaagggcagacccggggagccaggactagatggtttccctggaccccgaggagagaaaggtgatcggagcgagcgtggagagaagggagaacgaggggtccccggccggaaaggagtgaagggccagaagggcgagccgggaccaccaggcctggaccagccgtgtcccgtgggccccgacgggctgcctgtgcctggctgctggcataagtgacccacaggcccagctcacacctgtacagatccgtgtggacatttttaatttttgtaaaaacaaaacagtaatatattgatcttttttcatggaatgcgctacctgtggccttttaacattcaagagtatgcccacccagccccaaagccaccggcatgtgaagctgccggaaagtggacaggccagaccagggagatgtgtacctgaggggcacccttgggcctgggctttcccaggaaggagatgaaggtagaagcacctggctcgggcaaggctagaaagatgctacgttgggccttcagtcacctgatcagcagagagactctcagctgtggtactgccctgtaagaacctgctcccgcaaaactctggagtccctgggacacaccctatccaagaagacccaggggtggaacagcggctgctgttgctcctggcctcatcagcctccaaactcaaccacaaccagctgcctctgcagttggacaagacttggcccccggacaagactcgcccagcacttgcggctgggcccggggagcagtgagtggaaatcccccacgagggtctagctctaccacattcaggaggcctcaggaggccagcctgccatgagagcacatgtcctctggccaggagtagtggctgagctctgtgatcgctgtgatgtggacccagctccagggagcagagtgtcggggatggaggggcccagcctggactgactgctacttcctgtctctgtttccattatcacccagagagggacaagataggacatggcctggaccagggaggcaggcctcccactcagagtctgggtctcactggccccaagtctcccacccagaactctggccaaaaatggctctctaggtgggctgtgcaggcaaagcaaagctcagggctggttcccagctggcctgagcagggggcctgccaccagacccacccacgctctgacgagaggcttttccacctccagcaagtgttcccagcaaccagctccatcctggctgcttgccttccatttccgtgtagatggagatcactgtgtgtaataaaccacaagtgcgtgaaaaaaaaaaaaaaaaaaaaaaaaaaaaaaaaaaaaaaaaaaaaaaaaaaaaag

SEQ ID NO: 5070 - DNA, 1316 bp, Homo sapiens
agcgggagttacttcgctcggagggggcgaggggacgcgtgggcggagccggggctggccagcctcggcccccgtggcccgggaggcgccgaggccaggtaggtgcgatgggcgtgcagccccccaacttctcctgggtgcttccgggccggctggcgggactggcgctgccgcggctccccgcccactaccagttcctgttggacctgggcgtgcggcacctggtgtccctgacggagcgcgggccccctcacagcgacagctgccccggcctcaccctgcaccgcctgcgcatccccgacttctgcccgccggcccccgaccagatcgaccgcttcgtgcagatcgtggacgaggccaacgcacggggagaggctgtgggagtgcactgtgctctgggctttggccgcactggcaccatgctggcctgttacctggtgaaggagcggggcttggctgcaggagatgccattgctgaaatccgacgactacgacccggctccatcgagacctatgagcaggagaaagcagtcttccagttctaccagcgaacgaaataaggggccttagtacccttctaccaggccctcactccccttccccatgttgtcgatggggccagagatgaagggaagtggactaaagtattaaaccctctagctcccattggctgaagacactgaagtagcccacccctgcaggcaggtcctgattgaaggggaggcttgtactgctttgttgaataaatgagttttacgaaccaggaaaaaaaaaaaaaaaaaaaaagaaaaaaaaaaaaaaaaaaaaaaaaaaaaagaacgggggccggaaaaaaaaaggtaattgaaatgggcccttgggtcattagcttgttttcctggacccggcttttctttgtaccaaaggggggtagaatctgccccgggtctcccctaataggggagtccggtattatatttttccaataaggcccagggttaacccgtggcattaaatggaaatcgggcgtggcagttacccgggggaaattttacccccgccctaaatgggcgcgggccttttttttttgggggatcccacaggggatcctttcttggggaaatccctttttttttcccgccgagaataatctggcggtggttggcaaaaaaaagaaaaagcccccccgcctaccccagcgggggggtgtttggtttgcccccgtattcaagaggcgtcccacactcccttgttttccagaagggagaaagggggttttccgcccaaaagcgccaggataaccaaataccatgggtgccttcgctagggggaggccc

SEQ ID NO: 5071 - DNA, 766 bp, Homo sapiens
tttttttttgttatttataaaatatttttttttttttaaatgttaagacattttaataatatttcactgatagaaaaaaaaaatcctgcaggagaaaggaactggcaacaccttgctttctttggggatccacacaaaaggactgtcacacactcacaatgactcttttgcaagttgagcgtatcagtagaatctcaggataaagaaagatgacctctgtccccgtccttgaaaattcctgaaaataccaacccatataacagcaaaaacaatcctagcaaaatgggccacagttctttcattccagtgtcctgcttgagcggggatagccctgccctcaattagggcagaaggttgggcaccctccctgggaagtgagtgtcagtacctcaaggggacaagcagccgtgagggtcaccaaagtgggtgtgaaggaaggaggcacaggtgccagacacagagctgggcaggagggtgggccctggaggcttggtgaggctccagagctgccgtgggggcaaagccaagtgcccaccaggctaccggcagcctggcaaagcctggggcctcactggggagaaaccccacctaattgtgggctaagctgggctcccacaacccgtccccagcccaggggctcccggggccagctgtgcataagacccacccaaaagcttgttagaaatgccaattctaggccgggtgcagtggctcacacttgttatctcagcacttcgggaggccaaggcgggtggatcaactgaga

SEQ ID NO: 5072 - DNA, 606 bp, Homo sapiens
cggccgcaagtgtttgtttttttgttttttggagaaatattaagaggtgggaaattctgaatattcgaagggactgatgggtctcaaaatagatgtgaattatacgagtggcacaaaaatacttccagtcaaaatggaagtactgagtgttggaaaggaaagtctccacagggtctttgaagattaagtattgtgtgatgaagaaatcaagggtcaaaataaccctactacctgcctgacattttaagtctagagggcatgacgctttcaaagatcaatcaggcagccctgagctgcttgagacctttctgtctgtagctctgacaaaacctgttttcttggatgctgcttccacctgctctccatcccttcctgctctaacagaagggatcttttccctgactagtcttgctcctccttcaaaccccagctgtcctggtctctggctggaagccttctgtgaacaccagcctgagtgggagcccctttctctgcctcatagcagcagaggacggcggggtctgcctagcacatggcagggtgcagcgcctgtctgaatgtgtgaagagttcttagtgatgggtaaagggtgttcctgtgtgtttt

SEQ ID NO: 5073 - DNA, 5117 bp, Homo sapiens
ttctaatgatcccatcaccaaagtagcaaacgtagtacccaggatttttttttcctagttagtcttcatgttaagtacaatcttacctcaaaattgttaatgtctgtggtttaaaaaaaaacatgaatcagaaatggtgtgggtagtttagaaaatgagttaggttcaggtggccggttagctcagttggtcagaaaatgagttaggttcatctgggaagacttcctgggagaaaagaccctgggttctgaggtaaagtggagtagggataagatgtgcaaggcaggaagggagttgattccttaggtaagtgaattattggaggtgaggggtatgtctggctcctgggtcagccacgatgtgcctccttgtcttcccccttgtccccaggagtccagattacatcctaccctgcagtcctggatggcgcctccgacttgcagcttccttcctgctttccgtcttcccgctgctagaccttcttccagttgctttgccaccaggggcaggcccaggacccatagggctagaggtgttggcagggtgcgtggcagctgtggcctggatcagccacagcctggccctgtgggtgttggcacattcccctcatggccactcccggggtcccttggccttggccctggtagccttgctgccagctccagccctagtgctgaccgtgttgtggcattgccagcgaggcacacttctgcccccacttctcccagggcccatggcccgcctatgcttgctcatcctgcagctggctgcactcttggcctatgcactgggatgggcagctcctgggggaccacgagaaccctgggctcaggagcccctcctgcccgaggagcaagaacctgaggtggctgaagatggggagagtctgtcacgcttttcctatgcctggctggcacccttgctggcccgtggggcctgtggagagctccggcagcctcaggacatttgccgcctcccccacagactgcagccaacctacctggctcgtgtcttccaggcacactggcaggagggggcacggctgtggagggccttgtatggggcctttggacggtgctatctggcacttggactgctgaagctggtggggaccatgttgggattctcagggcccctgttgctctccctactggtgggcttcctggaagaggggcaggagccactaagccacggcctgctctatgctctggggctagccggtggggctgtgctgggtgctgtgctgcagaatcagtatgggtatgaggtatataaggtaacacttcaggcacggggggctgtgctgaacatcctgtactgcaaggctttacagctggggcccagccgccctcctactggggaggccctgaacctactaggcactgactctgaacggctgcttaactttgctgggagcttccatgaagcctggggcctgcccctgcaactggccatcaccctctacctgctgtaccagcaggtaggcgtggccttcgtgggtggtctcatcttggcactgctgctggtacccgtcaacaaagtgattgccacccgcatcatggccagcaaccaggaaatgctacagcacaaggatgcgcgggttaagcttgtgacagagctgctgagtggcattcgggtcatcaagttctgcgggtgggagcaggcactgggagcccgagtagaggcctgccgggctcgagagctggggcgactccgggtcatcaaatacctggatgcggcctgtgtatacctgtgggctgccctaccggttgtcatctccatcgttatcttcatcacctatgtcctcatggggcaccagctcactgccaccaaggtgttcacggccctggcactggtgcgaatgctcattcttcctctcaacaacttcccttgggtgatcaatggtctcctggaggccaaagtgtccttggaccggatccagcttttcctcgaccttccaaaccacaacccccaggcctactacagcccagattgtggtagattaggagcccaaatcaagtggcttctctgttcagatccccctgcagagccatctacagtattggagctgcatggagccttgttctcctgggacccagttggaaccagcctggagaccttcatcagtcatctcgaagtgaaaaagggtatgctggtgggcaccgtggggaaggtcggctgtgggaagagctccctgctggctgccatcgctggagagctccacaggctgcgtgggcatgtggcagtgcgggggctgtccaagggctttggcctggccacccaggaaccctggatccagtttgccaccatccgagacaacatcctctttgggaagacatttgatgcacagctgtacaaggaggtgctagaagcctgcgccctcaatgatgacctcagtatcctgcctgctggagaccagacagaggtgggggagaagggtgtcacccttagcggaggacagcgtgcccggattgcccttgctcgtgctgtctaccaggaaaaggagctctatctcctcgatgaccctctggccgctgtggatgcagatgtggccaaccacccgctgcacaggtgcatcctgggcatgctgagctacaccacacggctgctctgcacccaccgcactgagtacctggagagggctgacgcggtgctgctgatggaggccgggcgcctcatccgggctggacctccccctgagattctgccactggtacaagctgtccccaaagcctgggctgagaatggacaagagtctgactcagccacagcccagtcagtacagaacccagagaaaacaaaggaggggctggaggaggagcagagcacatctggtcgcctgctgcaggaagaaagcaagaaggagggcgccgtggccttgcacgtgtaccaagcttactggaaggccgtgggccagggcttggccttagccaccctcttctctctgcttctcatgcaagccacgcggaacgctgctgactggtggctctcccactggatctctcagctgaaggctgagaatagctcccaggaggcgcaaccctccaccagcccagcttctatggggctcttctctccgcagctgctcctcttttcccctggaaacctctacatcccagtgttcccactgcccaaagctgcccccaatggctcgtcagacatccgtttctacctcaccgtgtatgcgaccattgctggtgtaaattccctctgcacccttctccgggcagtgctctttgcagcaggcacccttcaagcagctgccactctgcatcgccgcctgctgcatcgagtccttatggcaccagtgactttcttcaatgccacacccacgggccggatcctaaaccgcttctcctttgatgtggcctgtgcggatgacagcctgcccttcatcctcaacatcctcctggccaacgcggcaggcctgctggggctcctggccgtgctgggctctggcctgccctggctgctgctcctgctgccgcctttgagcatcatgtactatcacgtgcagcgccactacagggcctcctcacgggagctgcggcgcctgggcagcctcaccctgtctccactgtatagccatctggccgataccttggctggcctctctgtgctccgggccacaggggccacctacaggtttgaggaggagaacctgcgactccttgagctaaaccagaggtgccagtttgccaccagtgccacaatgcagtggctggacattcggctacagctcatgggggcggctgtggtcagcgctatcgcaggcatcgctctggtgcagcaccagcagggcctcgctaacccagggctggtgggcttgtcgctgtcttatgccctgtccctgacgggcctgctctcgggcctggtgagcagcttcacacagacagaggccatgctggtgagcgtcgagcggctggaagagtacacctgtgacctgccccaggaaccccagggccagccactgcagctgggcaccggctggctgacccaggggggcgtggagttccaggacgtggtgttggcgtaccggccagggctgccgaatgccctggatggagtgaccttctgcgtgcagcctggagagaagttgggcatcgtgggccgcacaggctccggcaagtcttccctgttgttggtgctcttccggctgctagagcccagttcagggcgagtgctgctggacggcgtggacaccagccagctggagctggcccagctcagatcccagttggctatcatcccccaggagccctttttgttcagtgggactgttcgggaaaacctggacccccagggcctacataaggacagggccttgtggcaggccctgaagcagtgccacctgagtgaggtgattacatccatgggtggtctggatggtgagctgggtgaggggggccggagcttatctcttgggcagaggcagctgttgtgtttggccagggctctcctcacagatgccaagatcctgtgtatcgatgaggccacagcaagtgtggaccagaagacagaccagctgctccagcagaccatctgcaaacgctttgccaacaagacagtgctgaccattgcccataggctcaacacgatcctgaactcagaccgggtgctggtgctacaagcggggagagtggtagagctggactccccggccaccctgcgcaaccagccccactccctgttccagcagctgctgcagagcagccagcagggagtccctgcctcactcggaggtccctgagcccaatcccacaccctgcagagttctcccctctctctgatccaggccgggcctatacagaggtgctggctgcttgtttacattctcctctggggctctacctctccacacttccccagaagggaaaagggcaccctggattactctttggaaatcactccttggtgggcagcatcctgaggcttccccagaaccaggcctctgctctggccctcttgcatctggaacgccaggtgggtttttctggcataggagcccacttgcattttcatagttttatttgataaaattccatcttacattctgtgtattaaaaaaataatatttctggtgtaaaaaaaaaaaaaaaaaaaaaaaaaaaaaaaaa

SEQ ID NO: 5074 - DNA, 4208 bp, Homo sapiens
  misc_feature (825)..(845): n is a, c, g, or t
  misc_feature (1344)..(1359): n is a, c, g, or t
  misc_feature (1779)..(1794): n is a, c, g, or t
  misc_feature (3035)..(3054): n is a, c, g, or t
  misc_feature (3206)..(3259): n is a, c, g, or t
  misc_feature (4200)..(4200): n is a, c, g, or t
aaaagctagcctctagcgcagagtttgccgggagggagaaggggcagaggtggaaagcttaaccctccggtcgcctaggtgtttggggccgccaagacccctcgaactccgcagagcccctgaatctttggatcttaggggccaaaacttcccattctctttcaaggtagaaggaagccaacgaaagctgaggtccaggctacgctgcttctcccgggcgaggcgtttcggtttcttgaccggctcttccggaaatgatttttaacacccatgctggcctggatcctacgctgggaagaactgcaaacagcctcgactatctaaactcagctttgacttcttaaaacccggagtctctgattcgggcgcagaggataaaggttccagggggatatatatatggtggctgtatatgctcacactagaagagctcctgtttttaaagggaggagaaggacaggaaagtggcaacggatgtgtgcaaacccagagcagaaaaattcatattttattaaacatccgagctgctggttgcatgaaaaggctttgagcaaccaatagaaaccgaggatcgcgaatattccgcttgaacctgttgatctctgtgggttaagcgtttagggtcgagtctgcgtttccacgagggagggcgaagagagaacagaaagagcggttgctttcgcccgccaccggaggctggttttccgcctcctgccttctggcccggcttgggcggcgagccctttgggcggccaacatggcgtgggcgcctgtgctcgtgcgaccccggtcgggcaggcgggacggagattacctggctgtccnnnnnnnnnnnnnnnnnnnnnggcccgagcccaggggcagcgaggggcgtctgcggatgcggctccctgtgcggcacaacaccggggtctgttgctctcgctgatacctttcggcccaattgttcctaaattagaccagcaagtttgcggtaggcagagagccagcggtggtgagagctggcctgagaacgagccagccttctgggaatggccggtgtgagaggccagtgggtggccttgccgcgcccttatgtccagactttgctctgtgagaggcctggcgctgcgcctttgatttctgtgagtgctgcggagcaagtgagtgcgaaagtgagtggaaagcatttggtgtttgctggggaaggccggtgactggggggtgaatagtgaggcggtgagtcgaggtacgtttgtgaaggaggtggtggatgactgcccaccttgccccaggcggccgctcagacttgacctttgcgcttctccggtatattcttcctccgggtgggttgagaagccgccnnnnnnnnnnnnnnnnggaaggattctctattcttttttgcgacaaatctggtaacaggatttgctgtgctgttttcgtccgtgtgtgtgtgcgtgtgtgtgtgtgttcgtgtggatgcacgtgtggccccgctggggtgccccctccagtgtccccggagctgaaagatcgcaaagaggatgcgaaagggatggaggacgaaggccagaccaaaatcaagcagaggcgaagtcggaccaatttcaccctggaacaactcaatgagctggagaggctttttgacgagacccactatcccgacgccttcatgcgagaggaactgagccagcgactgggcctgtcggaggcccgagtgcaggtttggtttcaaaatcgaagagctaaatgtagaaaacaagaaaatcaactccataaaggtgttctcataggggccgnnnnnnnnnnnnnnnncttgtagagtcgcaccttatgtcaacgtaggtgctttaaggatgccatttcagcaggttcaggcgcagctgcagctggacagcgctgtggcgcacgcgcaccaccacctgcatccgcacctggccgcgcacgcgccctacatgatgttcccagcaccgcccttcggactgccgctcgccacgctggccgcggattcggcttccgccgcctcggtagtggcggccgcagcagccgccaagaccaccagcaagaactccagcatcgccgatctcagactgaaagccaaaaagcacgccgcagccctgggtctgtgacgccaacgccagcaccaatgtcgcgcctgtcccgcggcactcagcctgcacgccctccgcgccccgctgcttctccgttacccctttgagacctcgggagccggccctcttcccgcctcactgaccatccctcgtcccctatcgcatcttggactcggaaagccagactccacgcaggaccagggatctcacgaggcacgcaggctccgtggctcctgcccgttttcctactcgagggcctagaattgggttttgtaggagcgggtttgggggagtctggagagagactggacaggggagtgctggaaccgcggagtttggctcaccgcaaagctacaacgatggactcttgcatagaaaaaaaaatcttgttaacaatgaaaaaatgagcaaacaaaaaaatcgaaagacaaacgggagagaaaaagaggaaggaaacttatttcttaactgctatttggcagaagctgaaattggagaaccaaggagcaaaaacaaattttaaaattaaagtattttatacatttaaaaatatggaaaaacaacccagacgattctcgagagactggggggagttaccaacttaaatgtgtgtttttaaaaatgcgctaagaaggcaaagcagaaagaagaggtatacttatttaaaaaactaagatgaaaaaagtgcgcaggtgggaagttcacaggttttgaaactgacctttttctgcgaagttcacgttaatacgagaaatttgatgagagaggcgggcctccttttacgttgaatcagatgctttgagtttaaaacccaccatgtatggaagagcaagaaaagagaaaatattaaaacgaggagagagaaaaataatgttaaaactgtatggaatgctgacagtaaattccggtttgctttgagaaattattatggaaaaaaaaaaaaannnnnnnnnnnnnnnnnnnngtttgcatgttacttgtattccattgatggtgtgtcttcctcccacccccttatctcccatgcactcactccattttcatcttcactatgaaaaacaataccaaaagtatctggaaattgatatatatatatccacatatatatatcatatnnnnnnnnnnnnnnnnnnnnnnnnnnnnnnnnnnnnnnnnnnnnnnnnnnnnnntatttgccctgtctttgatcctggggaacaaaagaaaaaagtcagaaagggaaaaaattacactcattgccctaagaagacagaggtgggcagaatatgtggggaaaggaaaaagaaaacaagaccaccaaatgaaataatgaaggtacagcgcctcgctgtgccagacacagtaggcgctcaatcagtattagttcccaccattccccttttcttgtgttccttcttgttggtttcctgaagtcctatttgaagacagtggtttatttccccctctctatcccgtcaaattcaccttaaataacacccagctagatacaggcactaggtttgtgtaagatatgttgatacacacgaacaaagtttattttgactataatgtgtggactgactttcaacatttgcattttatctcacaaaggtgtatctattcaagtaacctttttttttttgtttgtttgtttcttttttgtttttttttttcttttggttgtttgtttcaattcatgtagctatttaaactgggataccttggactaagccagtctgtatcccaattcgctagcaagcctaagtttgtggggttttgtttttgtttttgttttaccttctaatttacaagaaagaggaaaagctcttctaactgaactttggtatgcggttgagctttgtaactatttgttctccatgaaaacaaaattatttatatttgacatatttttttctagtgtattaagttattttaaacaaaagatgttatctcatgacgtgttgtcagtacaaaatgtgtcgcctccaattctgttaaaccttttaaataagtgccaagttattaattgaagacactttgcgatcaattgaatgaaaatatcgtttcatttgaaaaagttcgagtcatctttgttcctgttactattaaaatatccgggatagtctttccnaaaaaaaa

SEQ ID NO: 5075 - DNA, 1820 bp, Homo sapiens
gactgcaacgcggaggagcaggatggagatccctgtgcctgtgcagccgtcttggctgcgccgcgcctcggccccgttgcccggactttcggcgcccggacgcctctttgaccagcgcttcggcgaggggctgctggaggccgagctggctgcgctctgccccaccacgctcgccccctactacctgcgcgcacccagcgtggcgctgcccgtcgcccaggtgccgacggaccccggccacttttcggtgctgctagacgtgaagcacttctcgccggaggaaattgctgtcaaggtggtgggcgaacacgtggaggtgcacgcgcgccacgaggagcgcccggatgagcacggattcgtcgcgcgcgagttccaccgtcgctaccgcctgccgcctggcgtggatccggctgccgtgacgtccgcgctgtcccccgagggcgtcctgtccatccaggccgcaccagcgtcggcccaggccccaccgccagccgcagccaagtaggagggggctgggccgcgcccgcaccccgggagcctcctcaggctccctctattaaagccgatctgactccgcccagccagatgtcccgagtgcgccaaggactgtcctctcacccactcctggattctgccctgacctccatcctggacactgccttgataacatagacccttccactgacaccctcgctctcacaccccctccagctttccgaccccacaccgacaactccccggcttccagaccctaccagcactaccctaaccctcagccgacagtctcagccccaccgacccactttcttggcatatagccccacttaagacccctcctctacttccttctgagtcctctacaaagacatccgggtactacatttccatcccttccctattttgacaccaaattatggtgtagacagccctcccccaaccccaggccagtcaggcacaatccccccaccccccaaacgtcctggactgcacagacctcccactccagaccatccaggcctggttcccaagacccgatccttcccctgcaaccagacagtctacaactgccccctccagcccattttctgccgtgaaaccccagccagccacaccagactctggaaccctttttcgactgccccaactcttggacaccaggccaactagaacacccaacaccaaactgtacagactctcccaccccaacctccccagactctgcacggatgtcctaggccccctccccaactctaaccagaccccatccccctaagtccctttgtcttgacccccaagtcttcaaccagatatcctcggcaacccacctcccaccctcctcctcttctccttcaagacccaactgagcacccgctctgattccccacagcctttctccctgccaccactcccttagtctttcccaggcttactctcccaataaatgtgctagagctctgccaaaaaaaaaaaaaaaaaaaaaaaaaaaaaaaaaaaaaaaaaaactccccccccccaccctcccaccacaccccctctgccccccgcgccccaccactccacccacccacccacacccctgtcctcctccgaacacccccgcccatcccactccgggcgcctacaaccaaacaacaccgcagcacgcacccagccagctcctacacatcccaccctgccccgagcgcaccaccggcccccaccaccgcacccacgaaacacaccacaaccacccgcccgccaccccccccccccccccccaccccccccaccccccaccaccccccgccacccccaacccaaccccctcccccccctccccc

SEQ ID NO: 5076 - DNA, 1427 bp, Homo sapiens
ggccagttctggtgggcagcagagacctgctctgccaagttgtccagcagcagagtggccctggcctgggcatcacaagccagtgatgctcctgggaagaccaggtggcaggtcgcagttgggtaccttccattcccaccacacagactctgggcctccccgcaaaatggctccagaattagagtaattatgagatggtgggaaccagagcaactcaggtgcatgatgcaaggagaggttgtcatctgggtagggcagagaggagggcttgctcatctgaacaggggtgtatttcattccaggccctcagtctttggcaatggccaccctggtgttggcatattggccccactgtaacttttgggggcttcccggtctagccacaccctcggatggaaagacttgactgcataaagatgtcagttctccctgagttgattgataggcttaatggtcaccctaaaaacacccacatatgcttttcgatggaaccagataagttgacgctaaagttcttatggaaaaatacacacgcaatagctaggaaaacacagggaaagaagagttctgagcagggcctagtcttagccaatattaaaacatactatgaagcctctgatacttaaacagcatggcgctggtacgtaaatagaccaatgcagttaggtggctctttccaagactctggggaaaaaagtagtaaaaagctaaatgcaatcaatcagcaattgaaagctaagtgagagagccagagggcctccttggtggtaaaagagggttgcatttcttgcagccagaaggcagagaaagtgaagaccaagtccagaactgaatcctaagaaatgcaggactgcaaagaaatttggtgtgtgtgtgtgtgtgtgtgtgtgtgtgtgtgtttaatttttaaaaagtttttattgagatacaagtcaataccataaagctctcacccttctaaagtgtacaattcagtggtgtgagtatattcataagatttatacttggtgtctattcataagacttatatccagcatattcataactagagccatatcacagatgcattcatcataataattccagacattttcatcaccctaaaaggaaaccctgaaacccattagcagtcattccccattcctccaacccattctctccctaatccctagaaaccaccaatctgctgtgtatttcatctattgccaacatttcatataaatggcatcatacaataaaaaaaacaaacaacaaaaaaggggcggccaaaatacaaccgggggcagcacggacccgttgaggacacagggccccatgagggggaaacgcaggacggcgcggtaacagggcgcgggaaggcacggctggaagaccatcggggcagggacccaggaagcggaaaaaggatggaaacagcggagagagaa

SEQ ID NO: 5077 - DNA, 2233 bp, Homo sapiens; identical to SEQ ID NO: 383

SEQ ID NO: 5078 - DNA, 685 bp, Homo sapiens
gatttctacaagactattgtttccctttcaatacctccatctgtggccactccttctcaatctcctctacctccacgctccaagtgttggtggagcggggacaatcacttttattattttatttttattttctcatttttacatcgtgcctgtgttacctcatccatacccattgcttgagctataagcaatatgataaaatctccctaagctatagccaagacctgtcttccagctcaacccattttatacctgcttgtctgccaggattaagtaagtgcaaaactgaactcattttctttctaaccaagcctgttctgcacttcccatcttggtgaatggtaccatgagccacctagccacccaccccagaactccacgttatcttacataggtccctcattcctctgttccattacacaatcatgtatacagggctgatgagtctgtcttcttaatagttctcaaatctgctcttgcctctcaaattccactaccgtggtcttaaaggtcctcatcacttcttgctgtccgccctctacaatgaactaaggtttttttccaaaacacaaataatcctatttctctcttgcactcgtcacttaagagagaggttggattcctcagcacagcacagaggacagcaagaagtgattgttccccgctggggatcctctagagtcgc

SEQ ID NO: 5079 - DNA, 823 bp, Homo sapiens
tttttttttttttgagatcatgctgggcaacacagtgagaccaagtgtctacaaaaaacaaaaaaattagctgatcacggtgagtgtgagccaatagtcctagctacttagacactgatgctgcagtgagctatgatcatgccactaaactccatcctggtcaacagagagaccctgcctctaaaaaatatataataaataattaaggaagtacatagtgggtacgggtgatgtgaataattatggggacagttagggccacaaaacagtcctaatttagagggtttatataagacaatgcagaaggaaaccttaaatgggttgaagcaggtttctagaaaagtccccaaatatcaaaaagtagtgagaagactctagaaattattaaacacagcatgatgaaaatgttttaagaagactaattttgaccaagttaagaggcaaactaggagtctttcgcactaactgtgaagtgtaaagtgatggtggtatggactgtgatgaggtgacgaggaatggaaagcaaggggcaaactcaataacctgggaaagagcaaaaagtcaggagccaaaaatgtgtgtatgcttcctggctctatgctctcaaaagacctagaagcaacagcaccctaagagccatgagcacacctgaacactcagcttttcatttataagagaaatggccagttctaaaactggaacagagaaggtacaagatgagtctggaagattttgtgccagaaaataaggaaatgttccaaaaaaaggaagaaagaggtcaggcgtggtggctcatgcctgtaatcccagcacttcgtggcag

SEQ ID NO: 5080 - DNA, 1030 bp, Homo sapiens
cgcgggaacgctaacctggtccggagcgagtctgggtctcagccccgcgaacagcctttcacgagtcttcaagctttcaggctatcttctagtcaagatgagtgataagccagacttgtcggaagtggagaagtttgacaggtcaaaactgaagaaaactaatactgaagaaaaaaatactcttccctcaaaggaaactatccagcaagagaaagagtgtgttcaaacatcataaaatggggatcgcctcccaacagcagatttcgacattacctgagagtcttgattttaggcttgttttttgtaaacccatgtgtttgtagagattttaggcgtcttcggatatcttctcacctatgttccctggctaagaagtcagaggtagccaatgtttccttaaattcatttttaaacttaccattggtgcatatgttccagatggcagatgctgtcaataatctcaccattgatgacctttgtgtatgtagttcttgcatcctatactggataagcctgttttaacctgctatgatgggtgcttccattgcttcataatcttcatgaagttgcatgcttttgcagcttttcacagtttatttgcatttctaatgtagtaataaagtaaccaatataatcattaaaaaaaaaaaaaaaaaaaaaaaagaaaaaaaaagggaagaaaaaaagaaaacaagggagaaaaaaaaaaaagaacagaaccagagaaaagaggcaccaacgaaggaaaagagggacaacggccagaaaggcagagaacggagagaagaagcagaaagcaacgagacaggggaaaaaggaaagagagaaaaacaggagagacgcagcggaaccccaccacgagaaagaaacacaggaaacaaaagaagcaacagggaaggacgaacagaaggagacccaccacaaacaacaaggacgaaacaccaaggaacaacagaaaataccaagcaacggagagggcggagcacgaccgggaactacaagagaagagagaagagaaaagcgtaacgag

SEQ ID NO: 5081 - DNA, 1010 bp, Homo sapiens
aagccacaggctccctggctggcgtcagctaaagtggctgttgggtgtccgcaggcttctgcctggccgccgccgcctataagctaccaggaggagctttacgacttcccgtcctgcgggaagtggcgggcacgatcgcaaggtagcgcagaagcttctcaatggccagcgccagctgcagccccggcggcgcactcgcctcacctgagcctgggaggaaaattcttccaaggatgatctcccactcagagctgaggaagcttttctactcagcagatgctgtgtgttttgatgttgacagcacggtcatcagtgaagaaggaatcggatgctttcattggatttggaggaaatgtgatcaggcaacaagtcaaggataacgccaaatggtatatcactgattttgtagagctgctgggagaaccggaagaataacatccattgtcatacagctccaaacaacttcagatgaatttttacaagttacacagattgatactgtttgcttacaattgcctattacaacttgctatagaaagttggtacagatgatctgcactgtcaagtaaactacagttaggaatcctcaaagattggtttgtttgtttttaactgtagttccagtattatatgatcactatcgatttcctggagagttttgtaatctgaattctttatgtatattcctagctatatttcatacaaagtgttttaagagtggagagtcaattaaacacctttactcttaggaatatagattcggcagccttcagtgaatattggtttttttccctttggtatgtcaataaaagtttatccatgtgtcagaaaaaaaaaaaacaacacgaacaaaaagggggggcgcacaagaatcccgggggccacatacggcccccttttacacaggccaatggggtaaaccacaagggcccgaaccgagggaagcccgcattgagcgactgtggacatacacaccaatggaataggtgacgcacggggtaaaagcagac

SEQ ID NO: 5082 - DNA, 1598 bp, Homo sapiens
ggtgggacggtggaaggaagtgagtgccctgtccttcctccctgccatgagattccaggaccggacctgttaagtgccctatcccagccagtgttcctggggctcttccaggcagggctatgttccccaggccaggggcattgtcctggacagtcaggaggcatacccctcgccaggtggaaccaccctgtgtatgcatgaccctgacaagcaggcgccaggacagtcaggaggccaggcccgagtgccaggcatggacggggacgctgctgctgggcacgtgccttctgtactgcgcccgctccagcatgcccatctgcaccgtctccatgagccaggacttcggctggaacaagaaggaggccggcatcgtgctcagcagcttcttctggggctactgcctgacacaggttgtgggcggccacctcggggatcggattgggggtgagaaagtcatcctgctgtcagcctctgcctggggctccattacgggcgtcaccccactgctcgcccacctgagcagtgcccacctggccttcatgaccttctcacgcatcctcatgggcttgctccaaggggtttacttccctgccctgaccagcctgctgtcgcagcaaggtgcgggagagtgagcgagccttcacctacagcatcgtgggcgccggctcccagtttgggacgctgctgaccggggcggtgggctccctgctcctggcaatggtacggctggccagagcatcttctatttctccggcggcctcaccttgcttcgcgcgctgtggtacgctgtacacgatctcatcctggcccttggcgtgtcctggcccaacagccggccggtgtccaggcaccgccagcagtcccctggagaccggctcttccggaagcctgctgtctggcgcagccgccgtctcccagctctctgcaccctgctccttcttcatccgtcctctcctggcttgcccaccttcttcgcggcccaccttccccgacgcccagggctggcatcctccacacgtgcgacaccatagcgagcgtgagcagaaccccaggcaaaactatcaaagccgcggctcaccactctcatcatctcatccaagcccacggcaacaccaagcccaccacacgcgccgcaacctcatgccaccgaacaaggggcccctggagccaccccaaaaaccacacagccggcactgagccctgacgcaacacagcaccacgcacaccagggaagacagacaaccacagacacaccacgcccaacgagccccacgacccgtcacacccacacgccaccaccagacaacccacacgaaacacgctcggcacgccccgcacacccaggacggaacacaacaaccccgaaccgtacagcgcaggcagaccaaccaccggccaacagcagacccacgagacaccgacaccgacgccgcgcccaacccacacggcgccccccacaccgagcgaccccgacccacccgtccagcggcggccacaccccccacgccggccccgccaccacgaaccccccccaccgggacacaccaaacgccacaccggacggcaccacccgacacccccccccccccacacccaca

SEQ ID NO: 5083 - DNA, 3799 bp, Homo sapiens
  misc_feature (416)..(416): n is a, c, g, or t
tataaaaagggtttgtgggttattccccccggcggccgaggtttatgattcgcgtttcacttataattgggaaaagcggtgtttgtgtaataaaaagaatcgtcaccacaaaatttgtggggtaaagcacccccccgcggcaagggggaaaaagccagtcgcgcggccaagggaatttagtcggagaaaaggaaagttgcccgggaataaaaggggctctcattgatgggggctaccggctatatagacgaatagccccccatcttaggaaaaaggaggcgcccaacgggattttaaaagggtgaaaagtggtgagacccgatctgcgagccggcccgatgtatttggcagccggcgcaagtattgagtgcaaggtgtttttttaaaagggagtgtcttccacccagggggggaanggggcataatattttggggtgggaaggcgggattcgtgtattttgtagcaggcgcaaaaagggggggttggggaaacattcggtgctttggaaaaaagaaataagattagggcaccgggtatattcctgaagagttttacatggcgcgcgccaaaagaaacaaaggaaattgttgatagggggatcgtaaggggggcgccgcagaaaagaggtgacctcgcgcgaaggtagcgggattattttaaagaatggcccaaaaacgaatgtgggggatgccttcggtcccccctgttatgtagagagttttgccctagaaaggagcgcggggggaggagcagaatttctcgagtcggaaagaacgagtgggcggttttttagcccattgtgaaccctgagaagggtgtgattggggcctggaagggcgaagagtcgtgagggtatgttgtcaaatttatcccccacccgggagaaagggcccctccccagaaggaccaaaagtccagtttttccagtccagggtgtttaagggtgcggccaagcgttgttttttaaacgggcccccttttggggccccttgtgaaaaaaaaaatgggttgcgttaaaggggggcccccgggggggttttttaaggaggcccccctttttttttgtttgtggtgttttgtgttcattttgtttttttttttttgtttttgttgtttgttttttttttttcgtgtttttttgttttttttttttttttttgagaatacacagggagctttattatacaaaatggcggggtggggggcggcaagcagcgggggacgcagcatcaagcatcctgcatggccgttatcagcccttgacctgcagtttccccttggatctgggggggtgacccaccctctctgcacaggctgtgcctcaacctcctaacttcctagaaggcacttggcctctccaggggtaagtccctttggccaatgatcaggagtttctttcctcccccaagtaacaagaagcggagctgggtggggagggcgggggcggtggtcagagagtggaagggcagagaggctaaagggtccaggagcaaaaggaggtggcagcggatggcatcaaagaggcgagggtaggtcatgctggcaacaggaagcaacttcttagccagggccggggggcgggtgtctggctggaatctcccctgggtacatggagggtgccagccggctggacctgcagacccaggaagcgagatgggacgcctagggagccgggcccccttccacaagcaccttctcatacttcccatgcccggtggccacaaacttatacctcttcccagatggggtgctcttaattgttgatgaggtcttggagcctcccttctgctcccagaggcttttcttgctcatgtctccagccacaatatccttgcaggacggagtcttggccgcagactgagcctgtacctcacccgtctcccaccgactcttggtactggccacagccatgctgggcagctctatggaggcctggcgggctagcttgggggtccggccagcggtctcgatggcctgggtgtattgttccagccactgatcaatcttggagatgggcaagtctggctgggatttcttcacactgttactcttctctatggagcggtttagggactcggtcctgtcgatgagtttggtggtagggctcaggggaggcgagctctgttcgatggtcccctccaagaccaaggggctgggtgtcctgggctgctgacatttctggtgctcctcctgttcctcctcagcccctgcggcccccaggttgtcctggacagtgtcctctgggcctggcccctccttgctcagactcaactcctccaggtggacttcatcactgtcctccttttcgtaggcatgcaggccgggcctgtcctcttgctccccctcaggactcctgcactgggggggctctccgctgtccaaggtgccctgcgccccctcgtgctgctgccgctgctctggcctctgggaccagtcgccaaagccctcgtcctcatccagttcaggggcctccgagggcttcaggctgaggagcatctcctgcttcggccgctcggggacatggccgcctccctcctcgtcctgggcctgaagctgcctgtctctctcatgctggcattgctcgtggacggcctcctcctcgtcctccacgctccactgagcagtgggcctcttttgatgtgctctgtggtcagccctgtgccggcagcacccttgtcccgctctgtagctgtttcacatctctgcccccatctgcggcgaccagcctgggtcggaggttagggccccgccctgctcgtgggtggccctgcctgctgcatcccggcggcgtggctgcggctctgcctgccccgtgcctgctctttcttcccccctcctcctgttctgcgtgctgtgcatatggctttctgtcttcctccgtgtcactaaccacaacgctgccgagcccgtgccacgagcgaggcgacctgcgggacctttctggggccctcgcctgcactccgcgatcagcgtcctccgccgcagctctcaccctcgcatgcgtctacatgcagccccactcggtgcctgcttcccgcaggaggggaccaaggagccctgatacctacaggtccaccgacagcccggctgcgcctcccgcctttgctcgacggccctcgggagcgctgcggcgcctgggccagctgggactgccctggcagagctcttgccgtgctcacgaggcaggcttttggcacgttctgggacacgcaaccagtccctggcaacggctcgaggctctgccatcctctttccttcccagctagccatgcccagatgtacctcacatccctgaagtctctgcccacagatgctgcccgaagcgctcccatcctccacgcaaccagaggcttcatacattattcagacgtggtgcccacctgggcgggagccacagccggcacccagagagaaggaccaagccagcctggcattcaaccacctgctccactcccacagcaccgggatcttcctaccgtagcacccagcagccaggccctcttcctgacacccccacaccatgtctgcctgtggagctctggggtgcccagcctggccaccggcccctccccgaagctttcatggctgaccagcccctcccagactcatcatccctgggggtgcagggaagacatggcagagcagaaaagagtctgcccctgggccggcacttctttcccaggagactccccggtgtatgtccccgggtgctgcgggcaccccctgccaagccccaggatgggagtaagctttggtgcctccctgagcctcagctttcctgtttgcaaaatggggtat

SEQ ID NO: 5084 - DNA, 2103 bp, Homo sapiens
ggcacgaggcacgaggcagacgcaggcttcttctcctcgggtcttggtcctgcatcctctctctcccagagcctccgttagggggtgggaaaggactttgccataggtcgctgaggccaccatctgctctcttactggccaagggcgtaaaaagatagtcctcccattagctagagagcaaaccccagaaagcctattggctgcgccgtccgcgggccttggtccgctttgaaggcgggctgcggctgcgagaggagggcgggcgggaggctagctgttgtcgtggttgctcggaggcacgtgtgcagtcccggaagcggcgaggggaaactgctccgcgcgcgccgcgggaggaggaaccgcccggtcctttagggtccgggcccggccgggccatggattcaatgcctgagcccgcgtcccgctgtcttctgcttcttcgaacaggcttgcgccgggacgctgcggtggacgagggatctgctcccggcatttcagatcccccagaccagatgggttcgcctgcccagcaaatgcgaagggacttgcggttaatcgaagtcactgagaccatttgcaagaggctcctggattatagcctgcacaaggagaggaccggcagcaatcgatttgccaagggcatgtcagagacctttgagacattacacaacctggtacacaaaggggtcaaggtggtgatggacatcccctatgagctgtggaacgagacttctgcagaggtggctgacctcaagaagcagtgtgatgtgctggtggaagagtttgaggaggtgatcgaggactggtacaggaaccaccaggaggaagacctgactgaattcctctgcgccaaccacgtgctgaagggaaaagacaccagttgcctggcagagcagtggtccggcaagaagggagacacagctgccctgggagggaagaagtccaagaagaagagcagcagggccaaggcagcaggcggcaggagtagcagcagcaaacaaaggaaggagctgggtggccttgagggagaccccagccccgaggaggatgagggcatccagaaggcatcccctctcacacacagcccccctgatgagctctgagcccacccagcatcctctgtcctgagacccctgattttgaagctgaggagtcaggggcatggctctggcaggccgggatggccccgcagccttcagcccctccttgccttggctgtgccctcttctgccaaggaaagacacaagccccaggaagaactcagagccgtcatgggtagcccacgccgtcctttcccctccccaagtgtttctctcctgacccagggttcaggcaggccttgtggtttcaggactgcaaggactccagtgtgaactcaggaggggcaggtgtcagaactgggcaccaggactggagccccctccggagaccaaactcaccatccctcagtcctccccaacagggtactaggactgcagccccctgtagctcctctctgcttacccctcctgtggacaccttgcactctgcctggcccttcccagagcccaaagagtaaaaatgttctggttctgaaaaaaaaaaaaaaaaaaaaaaaaaaaaaaaaaaacaaaaaacaacaaaaaccaacaccgaacaaagaacaacacaacacaaacaacacgacaagaaccagagcaaggacacagcaacacacacaagcggggggcgaggccacacggccagttgaccccaccctgccctgccaagcagaccagcagcgggcgccgagcgacacagccgcacgtgcgatcgagctgaagtggcagcgcaacccgacgaatccagaccgagacgcgaggcagagagagcaacagagcgagggcagggaggacgaagacacaaaggccagaacgagagcagggacggcggcgccagcgccaccacacctgggcgctgcagagcaaaacgaagcggggagaggggaaggaaggatacagccggcgggagatgcatggcggaacacaaacgcaggccgcaagacaccacgagagcggagccagccagagagccgccccgcgggtggggacacacccaccgcccagctcacggcccgcaacgcat

SEQ ID NO: 5085 - DNA, 2290 bp, Homo sapiens
gggtccagtgcggtggcggcggcggcggtggcggcggcgactgctgcggtgaaggaggaggaggagccgagcgggcgctggcaccgaggcctgaccatggacgaggaatacgatgtgatcgtgctggggaccggtctcaccgaatgcatcctgtcgggcatcatgtctgtgaacgggaagaaggtgctgcacatggaccggaacccctactacgggggcgagagctcctccatcacacccctggaggagctgtataagcgttttcagttgctggaggggccccctgagtcgatgggccgaggccgagactggaatgttgacctgattcccaaattcctcatggctaacgggcagctggtaaagatgctactgtatacagaggtgactcgctacctggacttcaaggtggtggagggcagctttgtctacaaggggggcaagatctacaaagtgccgtccactgagactgaggccttggcttccaatctgatgggcatgtttgagaaacggcgcttccgcaagttcctggtgtttgtggcaaacttcgatgagaatgaccccaagacctttgagggcgttgacccccagactaccagcatgcgtgacgtctaccggaagtttgatctgggcctgcactggtacctgggtggggataaatcaggggtgctctaccgcactgatgactacctggaccagccctgccttgagaccgtcaaccgcatcaagttgtacagtgagtccctggcccggtatggcaagagcccatatttatacccgctctacggcttgggcgagctgccccagggttttgcaagattgagtgccatctatggggggacatatatgctgaacaaacctgtggatgacatcatcatggagaacggcaaggtggtgggcgtgaagtctgagggagaggtggcccgctgcaagcagctgatctgtgaccccagctacatcccggaccgtgtgcggaaggctggccaggttatccgcatcatctgtatccttagccaccccatcaagaacaccaacgacgccaactcctgccaaataatcatcccccagaaccaggtcaacaggaagtcagacatctacgtgtgcatgatctcctatgcacacaacgtggcggcccagggcaagtacatagctattgccagcactactgtggagaccacggaccctgaaaaggaggtggagccggctctggagctgttggagcccattgaccagaagtttgtggctatcagtgacttgtatgagcccattgatgatggttgtgagagccaggtgttctgttcctgctcctacgatgccaccacacactttgagacaacctgcaacgacatcaaagacatctacaaacgcatggctggcacggcctttgactttgagaacatgaagcgcaaacagaacgacgtctttggagaagctgagcagtgattgtggccgcccccagcccctgctgccccagcctgtgtctgttctcctcgagggctccagcatcctctgcttcccccaccacgttcccatcacccacctcattgatccactgaccaaatccttaaccctagcgatggcttgggagatggggggttggatagcatcctctttcttggcccttccttatcctaggaaaagagggttcctctccttgtgtgtgtctcttccccccacccctaattcttctgctctgtttgggaagacgtggaggaaaaggtgacttctgcccccaccgctcttacccccactgtagtggcctttggagatgcccccacctcccccccaccaactctcgcgtgttggagagaaggggccctcccagcacaaagttgcattcctcccccctaatttattctaatttattaactttgacccaccctttctgagcctgcagccttcccgtgtggcctgagggctgtcgagtgagctgccccagcccctcccagcccttgcccagcctgggggagtggggaaggcttgggcatggccccgttggaggttgatttgctgttttgtttcttgtctttgtgttctgtggtacttgctgagagaaaagaaaagtgagccaagcagaaggaggtgggaaaacggacccaaaccccagtgtgccctgccccatgcctttcctttagtggtgggaaacccttatcttgcaaagtgaatgtgtccccttccccaccctctagtgtatttcacagaaaacaaaacctcccaataaaacggttgaaacctgaaaaaaaaaaaaaaaaaaaaaaaaaaaaaaaaaaaaaaaaaaaaaaaaaaaaaaaaa

SEQ ID NO: 5086 - DNA, 10692 bp, Homo sapiens
  misc_feature (2176)..(2190): n is a, c, g, or t
  misc_feature (2481)..(2509): n is a, c, g, or t
  misc_feature (3346)..(3364): n is a, c, g, or t
  misc_feature (4008)..(4041): n is a, c, g, or t
  misc_feature (5128)..(5227): n is a, c, g, or t
  misc_feature (9114)..(9131): n is a, c, g, or t
  misc_feature (10580)..(10580): n is a, c, g, or t
  misc_feature (10617)..(10617): n is a, c, g, or t
  misc_feature (10640)..(10640): n is a, c, g, or t
  misc_feature (10665)..(10665): n is a, c, g, or t
acgcgggggagtgcagctggcaccatgggtgtgctccagagcaacttctgcttgctctgagccccctgccctgcctcccctttcaccatgtttcctctgacaagattttaagtacagcaattcaagaagatttctcctcctaaacgacatttatctgaagtctattgcctcttgattgctggaaaagaatcttaaaatcatttcaaaagtaacttataaacaaacttattaaaagtgatgaaaggagcattgaaattaattagcactaatttttcactgtgccaaagtgtgcagtgtccttcagaggaaacaataacagatctggtgagtgtgccatgccagtggggagaattgaatgtccctcatctccctctttccctagggacattagtcatgagtgccgagtgtgcggggtcacagaagtgggtctttctgcatatgcaaagcacatttctggccagttgcacaaagataacgttgatgcccaggaaagagaagatgatggaaaaggagaggaagaggaagaagattattttgacaaggaactcattcagttaataaaacaaaggaaagaacaaagtcgacaagatgaaccttccaatagcaaccaagaaataaactctgatgacagacgaccccaatggagacgagaagaccgaattccttaccaagacagagagagttacagtcagcctgcatggcatcatcgtggacctccacagcgggattggaaatgggaaaaagatggctttaataatactaggaaaaacagctttccacattctttgaggaatggtggtggaccaagaggacgttccgggtggcataagggtgttgcaggaggctcctcgacttggtttcacaaccatagtaattctggaggtggttggctttcaaatagtggagcagtagattggaatcataatggtacaggaaggaattccagttggctttctgaaggaacaggtggcttttccagttggcatatgaacaacagtaacggaaactggaaatccagtgtacgtagtacaaataattggaattacagtggccctggagacaaatttcaaccaggcagaaacagaaattctaactgtcaaatggaagacatgactatgctatggaacaagaaatctaataagtcaaacaaatacagtcacgacagatataattggcagcggcaagaaaatgacaaacttggtacagttgccacatatagaggtccttctgaaggatttacaagtgataaatttccttcagaaggcttactcgacttcaattttgagcagctggaaagccaaaccactaaacaagcagacactgctacttccaaagttagtggaaagaatggcagtgcggcaagggaaaagcctcgtcgctggacgccttacccttctcagaagactctggatttacagtcgggattgaaagacatcactggtaacaagtcagaaatgatagagaaacctctctttgattttagcttgataactacaggaatacaggagccccaaactgatgaaacacgtaattccccaacacagaaaacacaaaaagaaatacatactggatctcttaatcacaaggcctcttctgattccgctgcttccttcgaggtggtgagacagtgccccactgcagaaaaacctgaacaagagcatacaccaaataaaatgccatcattgaaatccccactccttccatgtccagccactaaatcattgtctcaaaagcaagatccaaagaatatctcaaaaaacaccaaaacaaattttttttcccctggagaacactcaaatccctcgaacaagcccactgtggaagataaccatggtccttacatatccaaactgcgtagttcatgtcctcatgttttaaaagggaataaaagtacatttggctctcaaaagcaatctggtgataatttaaatgatactttacgaaaggccaaagaggtgctacagtgtcatgagtcattgcaaaatccacttcttagcacttctaaaagtaccaggaactatgcaaaagcaagtagaaatgtagaagaatctgaaaaagggtctttgaaaattgagtttcaagtgcacgcactagaagatgaaagtgatggagagacatctgacacggaaaagcatggaacaaaaattggaaccctaggttctgcaactacagaatnnnnnnnnnnnnnnnctcgaactgctgatgagaaagaggaggatgaccgcatcctgaagacttctagagagctatccacttccccatgtaatcccatagttcgccagaaagaatctgaattacaaatgacatctgcagccagtccacaccctggcttattgctagacttgaaaacctctctagaagatgcacaggttgatgactctattaaatctcatgtatcttatgaaacagaaggctttgagagtgctagcttggatgcagagcttcaaaaaagtgacatcagtcagccctcgggccctctcnnnnnnnnnnnnnnnnnnnnnnnnnnnnntgcctcacttcagagggatctaacccggcacattagtttgaagagcaaaactggagtacaccttcctgagccaaacctcaatagtgcccgccgcattcgcaatattagcggtcaccgaaagagtgagacagagaaggagtctgggctcaagccaaccctacggcagattctaaatgcatctcggagaaatgtcaactgggaacaggtcattcagcaagtaaccaagaaaaagcaagagctgggcaaaggcttacccaggtttggcatagaaatggtaccccttgttcaaaatgaacaagaagccttagatttggatggggaacctgatctgtccagtctagaaggattccagtgggaaggtgtttccatttcctcgtcccctggcttggcaagaaagcgaagcctttctgagagcagcgtgatcatggacagagctccttctgtgtatagcttcttcagtgaggaaggtacaggcaaagaaaatgagccccagcagatggtttcacctagtaactcattgagggctggacagagccagaaagcaaccatgcacctcaaacaagaagtgacacctcgggctgcctccctccgaacaggtgaaagggctgaaaatgttgctacccaaaggcgacatagtgcacaattatcctctgaccatataatacctttgatgcatttggcaaaagacttgaacagccaggagaggtctataccaccgtcagagaatcagaattcccaggagagtaatggagagggaaactgtctgtcatcaagcgcatcctcagcccttgcgatctccagtttagcggatgcagccacagatagtagctgtacctnnnnnnnnnnnnnnnnnnntggccaaagtattagaaagaaacgaagagccactggagatggatcttctcctgaactcccaagtcttgagagaaaaaataaaagaaggaaaattaaaggaaaaaaagaacgttctcaggttgaccagctgctgaatatttctttaagggaggaagaacttagtaagtcattgcagtgcatggataacaatcttctgcaagcccgtgcagcccttcagacagcttatgtggaagttcagaggctacttatgctcaagcagcagataactatggagatgagtgcactgaggacccatagaatacagattctacagggattacaagaaacatatgaaccttctgagcacccagaccaggttccctgtagcctcacacgagaacgaaggaacagtagatctcaaacatccattgatgccgcactgctgcccactccctttttcccactttttctggagcctccatcttcccatgtgtctccatcacccaccggagcctctcttcaaataaccacgtctcctactttccaaacccatggcagtgtccctgctccagactcatcagttcagattaaacaagagcccatgtctcctgaacaagatgagaatgtgaatgctgtgccaccaagctctgcctgcaatgtgtccnnnnnnnnnnnnnnnnnnnnnnnnnnnnnnnnnntgacagttgtccagtttatccagtcatcactgctagattgtccttaccagagtcaacagaaagtttccatgagcctagccaagaactgaagttttctgtggagcaaagaaataccagaaacagagaaaactctccctcttcccaatcagctggtctttctagcataaataaagaaggggaagagccaaccaaaggcaatagtgggtctgaagcctgtaccagttcttttctaagattgtcttttgcttcagaaacccctttggagaaggaaccccactctccagctgaccagcctgaacaacaggcagaatccactttgacatcagctgagactaggggaagcaagaaaaagaagaaactccggaagaagaaaagtctacgggctgcccatgttcctgagaatagtgacactgaacaggatgttttgactgttaaacctgtaaggaaagtaaaagctggaaagttaattaaaggggggaaagtaacaacctccacttgggaagacagcaggactggtcgggagcaggagagtgtcagagatgagccagatagtgactcgtctctggaagtcctagaaattcctaatcctcagttagaagtagtagccattgattcttcagaatcaggagaagagaaaccagacagcccatctaaaaaggatatttggaactctacagagcaaaacccactagaaacgtctcgttctgggtgtgatgaagttagctctaccagtgaaattggcactcgctataaagatggcatccctgtaagtgtggcagaaactcagactgtgatctcctccataaaaggatcaaagaattcttcagaaatatcttcagagccaggagatgatgatgaacccacagaaggaagctttgagggacaccaagctgccgtaaatgcaattcagatatttgggaacttgctatatacctgttcagcagataaaactgttcgggtttataatctggtgagtcggaaatgtattggtgtctttgagggtcatacctccaaagttaactgcctcctggttactcagacctccgggaagaatgctgccctttacaccgggtccagtgaccatacnnnnnnnnnnnnnnnnnnnnnnnnnnnnnnnnnnnnnnnnnnnnnnnnnnnnnnnnnnnnnnnnnnnnnnnnnnnnnnnnnnnnnnnnnnnnnnnnnnnncgaatcctctatgcgggactggcaaatggcactgtggtcaccttcaacataaagaacaacaaacgacttgagatctttgaatgccatggccctcgggcagtcagctgtcttgctacagctcaggaaggtgcccgaaaactgctggtcgtggggtcttatgactgcacaattagtgtacgcgatgcccggaatggactgctcctcagaactctggagggccatagcaaaaccattctttgcatgaaggtggtgaatgatctcgtgttcagtggctccagtgatcagtcagtccatgctcacaacattcacactggtgagctcgtgcggatctataaaggtcacaatcatgcagtgactgtggtgaatatcctaggaaaagtgatggtgactgcttgcctggataaatttgttcgtgtctatgaattacagtctcatgatcgattacaagtttatggaggacacaaagacatgattatgtgtatgaccatccataaaagcatgatttacactggctgatcatgatggccagctattcagggcaccgtagaacgcttaacatcgtgatgcagcaaattacacgcatgtttgctctctgatatttggcgttgtagatcatttaaaacaacacttgctgaccgaccacactaatcccaacttccagactctgaaatgtcgctggaagaactgcgatgcttttttcactgctaggaaaggatccaaacaggatgctgcaggacatattgaacgacatgctgaagatgacagcaaaattgattcatgaagttttttgcctcccacgttgggaagtcattagttgaactattttcacattggccccccacacaggccactctcttccctttcttggtgaagtaaggaaggagaaagtggttactagccaggcatacccctagcataagtctgggcagctctatgggatgataaattacacttttaagttcttgctggaggttttaaatagatttagacaaatgttaaggaaccatacttctctgggacagcatggcatatagtgatatatgctatttgcgttctccagatgtttattgaagatacagatcctaattggttacccagtttgaccctaatcatatgtatattttattgatttcagtttgcaatttttaatttatgttcttatgatggtttaaacctatagtcaggcttttaagtacaagtttgtttaagtgccagactttgaggatcagttttaatttctccatttgtaatagctgggtatttaaactggaagcaaatagttttctttcttaacaattatgtgcagtgtgtgtcactgttttcttgctttatagatagagctggctttaagtgctaaaggacacagtagatttttgacaaacagtggctgctctgctgactatcttttaggaattcaggaagcaaatcacatagtgacaagtccttacagacaccacttctagtaaatctctgtaaatgtggatagaaagctcagtgtgaggcagtgcgtagacctaacgtctacctttacatctgctgttgaacctgggcactacctgttacagatcctgtcaggctgttgaactggaggtgtacctttatcttcctttctagtgtctgaccctgcaagcctaatgttggtttgaacccttttggtttgttcagttgccagcctccatctctcccactgtatggccgtgcctagaccgatggcagccatcgaatattcctctgggctcacggggtgttttccacccccctgcagcaactaagatggtgggggagagggggttagaataaagcatctgaatacagttttcaggacctcaagcagacttcctagagacttgtttctgagacagttctttgccttcacttccctgctagctgggaaagaagagtggagcagagactctgcctggccactgagaacagccaaattcacaaaccctcagtggggctttgtttttggattttctccggactcatcagtaaacctgtagaagtgtcgctttccagccttttgtttctggatcctcaaaactcagaacgtggccgggcgtggtggctcacgcctgtaatcccagcactttgggaggctgaggcaggcagatcacctgaggctaggagttgcagaccagcctggccaacatggcaaaaccccgtctctactaaaaatacaaaaagccgggcgtggtgggcgcctgtaatcccagctgctcaggaggctgaggcaggagaatcgcttgaacccgggaggcagagattgcagtaagctgagatcgtgccactgcactccagcctggtgacagagtgagactccgtctcaaaaaaaaaaaaaaaaactcagcttcttcagagagataaaattgggggaggagcccagggccacataccaagctttgggacatggtgcctcatgctctctgggattgcagaccatccaggtctgtcttcgcccctgttagtgcacatatatccactcacatgtcttccctcaggctatcgggcagggggacttcaccagggggtttatggataggcttcaagagggtctgtgagcccccagaaattgtgtgtgagactgagtatgtgttcttttttccaggaaaggctccagtggttcttacttgatccaaaaaatgtcaagaattaatctaggaggccgggcctggtggctcacacctgtaatcccagctctttgggaggccgaggcgggtggatcactcaaggtcaggcatttgagaccagcctggccaacatagtgaaaccccgtctctattaaaaatacaaaaattagctgggtgtggtggtatgtgcctgtagtctcagctactcaggaggctgagacaggagaatcacttgaaccctggaggtagaagttgcagtgagccaagatcatactactgcactccagcctgggcgacaagagtgaaactccacctcaaaaaaaaaaaaaaaagagttaatctaggagataatgaatggcctagtactagataatatatggccccacaagctcttgacttctgtccttggggaaagccattttgttaaccacactagtgagatttacatgatgcttaatggagaacagagaagatcttgttgcaaaaggtgtattaaatatttgtgctgtttctgtatgagattgagaagcttttcccacctctcacccctatttcctataaggatatccagagaagccaaactgttctgtgggtttgggaatggtcatttcccgggaaaatgcatctggatcgatgactaaacctggcccttttctctgggctgtagtgaagccgcattttcacgctggctggcagtgtgctgagagcctcgaatgctctgcggcgtagtgcccttctgccctgcctgacgatgtatcgaaaagatgagagtgaaggagactttgtgcagcaggaaacgggtaggtgaggtgttgggcagttgtgggaacttctgagagtattacagagtggtagaatcggtaagaactctgatttggacttcgctttggtggaactgtgtgcctatacctgcctgtgtgtgtgcaagtgtgcaggttcctttgtatgtatgtgtacgtgtgggaacctgtgtttgtcatatttttcttcatttcacaaaggctttttttgaagcagtggcagtatgcctttgtttcaagaacacatgaaattcttttaacaccagattagtgtgttaccccaaatgaacggttctagccctctattaagaaataaagggaccataagcattttggctgcttatggctgtgtgttactacttacaagagtcttgaaaattatacagaactttgccttctttttttaatgtcttccacaatgttgtgactgattataaccctgtttcccctcagagannnnnnnnnnnnnnnnnnggatctgtgttgactctggcatttagtggctttgtgaaggaaagaaaccattaaatgacctgacaaaaactgactcatgtctttaaagtagttgaagccacttttagaatgttactctcggttgcttttgtctaattctaatggcttaaagccaagaaaaccatagtataaatctttttgtgtacctatgctagtgtttaaatggcagttcgttgtgataaagtatcagtcacttcaagttttctgtgaaagtttttaattaggttaaaaataattttggcatacgtctctactcagtttataaagcagttccacaccatgcaaacaaaactctaacagcaaaggttatcttgacctgatgttacttgaatctgagagaaagtcattacttactactgcactcctgcttttgtgggaaaaattttcttcttccccagaagagttaacagttgagtgttcagctcctgacttacctttaatttagaggcaatattattactgtttaagtgattatttgcttaacacaggttttattttgtctttttgctggtagattatacaagggacaactttagtgatgaggcatgtggatgatttggtgggagtaggtatatacttagtggaatggtttattttatggaagagaattcattggaggtgagattgaagtatattgtgaagtgggatttgaacagcacatatgctctggtttgctcaaataactgcagtttatgcttacatctaaattttgtttctgttacctaaacgggagcttctagaattacgaaggccatacctgccacatttataaaataatggttttatccctgcccccaaatcatcaggttcctcgggtttaagagaagtggtctaatagacaggaatagaagttgtggtggaggtgatttgggatagactaggtttccttatgcaagtggatatgagctcctcatagaaaccagacctactgtattagacagtaacctctaacctcacctccaagcccaagtatatggccctgctgggttacctggtgactacatttcccagattcactctaaattcaaggtagtgacccaaataaattgggaaaggagggggtcaaggaggaaaagctgttgaaaatctttctcctatttaagagaaatatatgccctagagctgctccagcacccttggtttctgatttttttaatattgaatatggattagaagaatgaaatcagatgacacctgactgcaaaaatgtttataagcaaatagccttcttacattttggtataaagctgtgaacttcgtaactttgtaaagcaagatataaagcaaatacaagaggaaaataaagtacttttactaattgaaaaaaaaaaaaaaaaaaaatgtctggcatattcacggccagccctttccacgttgggcttagccgaggggaggaggggaactggggtngggaaaaccacaggggtggccctttaggttagggccncccccatggggttccccggaggnagtttttgggccaaccaaccggttncgttttccggggtttttttcccccggt

SEQ ID NO: 5087 - DNA, 3503 bp, Homo sapiens
  misc_feature (174)..(174): n is a, c, g, or t
gcaaggtcagtcccagctttgtgagcaagcaggtgggtagggaggggcttctctggctcttccgggccagcctgtctccataggcacatgttcaaaccacctcggcctctgaagggctttgggtccaacacatctaggttcgaatcccagctctgccacttacgcaactgcgangccccgccctttccaagaggcttcgcttccccgtccgtaacatgggaagagcccctccaccctcccagctgtgtggggatcaaacggggccgtgctggacaagcttgcaagccaaggaagcccaatgcccaagaaggcattctaagaactcagggctagaataattgtcttccggaattctcttttacctctgactgaaatcccacctaaggcgctcgcaggcatcacctctgacacagagatggagcagacagttgctgggaacacaaccttctagacctttaaggagaaagctgccaactttgtcctcttggggctgctgaatgttctgagagtcagagggagtgcaggcacagaatccaggtccccatgggggctggcaggggacagctgcacattttacaccccctggcagggctcaacctttccttagagatgggctgtgaaggttgtctgccttgagggaaggagctcctgacgtcacagagcggtggtgcttccacctaggcacgaggcaaggagcctgcacactgatggaggaggtacagccgtggaggagaaccagagtctggaggggaggcacagtcctcaggagcccccaggctgacaggggaaacaaaacacacaataaaccccaaacttgcaaggttctggggcaggcaccgaggtccgagtggcaaggagacaggatccagccctgtgcagtggtgaggaggcccctggggctgctgtgatcggcctggaatgtcaggctgtgagctcagccctctcggcctgcgtgtcgggctgtcagcagggccggtgcacgggagaagatttccagccccctctgggccatggacaggcctaaatttagctagtagacaaggggctggccccaagcccagggacagtcggccttataaagcggccgcagtcggagcctggcacgctcgcccagaggcctgcgcccacaccctctcctgtccagccttcgcccgcctgggcagggcccggcgccgtccgtggatgagccacagaacctcttccaccttccgagcggagagaagtttccattcctcttcttcttcctcctcctcttccacctcctcctcggcctcccgtgccctcccggcccaggacccgcccatggagaaggccctgagcatgttttccgatgactttggcagcttcatgcggccccactcggagcccctggccttcccagcccgccccggtggggcaggcaacatcaagaccctaggagacgcctatgagtttgcggtggacgtgagagacttctcacctgaagacatcattgtcaccacctccaacaaccacatcgaggtgcgggctgagaagctggcggctgacggcaccgtcatgaacaccttcgctcacaagtgccagctgccggaggacgtggacccgacgtcggtgacctcggctctgcgggaggacggcagcctcactatccgggcacggcgtcacccgcatacagaacacgtccagcagaccttccggacggagatcaaaatctgagtgcctctcccttccctttccctgtccccccgccccacgcctgccagcaaagcctcgctaaccccattacaacagctccaggacatctcagcccaggttctagcccccacgcaccccagaccccaggtggaccatcctcccaaactagggccctccactctatccagggcaggccagggactccctggcctgacacatgatgcccagatttcagatttggcctccgtcacttaatccagagtacaggggctggggtcagggaaggaagatctaaagaacccactgtgggtcaggggaatgggaccagcaggacatatgggcaagctctgcaggacagacaggcagacaaaccctctgatctatgaagtctctgcagggcaaggggaccagggacctggaaccctcttggccaaggggagtgggagagacagagggaaggtcacaggcaagggtgcctatctaagtggaactaattgcccgagggctcagcaaggccaagaggagacagccgtgacggtaaacttcccctctaccagcctccaagccccacgccagcgagcaggctgcctgcccaccccgtgcccccagccagctggctgtgccagggcagagccatgccacatctgtatatagatggggtttttccaatacagctggttcgtgataaactgcatgaaactcctgccgtcctgcgcctgctggggcctccaggcaaggccacgtggggttgggggtggggctggtccttctccctcccacaggcctgtgttcttggggctgctcccatgcagacaggatcacctaacagagatggaagccagggcatggatggggctttgggtcctcgaggttggaccccagcttcttgccaccttcccctccgggcagtcagctctccatccatccccctctttaatctatgaatctataggctcggtgtgtgtaacacacacacccctatcgttgtccttcaaatactcagcattaccattggttgaggccaaattcagagctttctcaaatcagatttacaatctccattttcattaacggggaaacatccccgagccactgagtgctgtgctttgtcactgaaggttagatctgaacccagggtgtcaacagctgctctcaactccccacctctgggcactgaggagtatttcccctcattctacctctctaaggctatgcacccctccccacgtcttccagctgggggatggggggagtcataggaaaagcccccatctcccatctgggatagggaccttccatcagccttaaccctgggaaatgcctgctgcccccagtgactcttggtttcgtctcccacatacagaagcagggtggaggggaagggtgggtctcagttagcaggggtccccagggcaagtcagcctcctccctccatgcctctctggtcagtgtgccttagggtggcctctcactcccaccactctgggccccttgggggaggactggggagggggccgtgggagagccctgacgctggaacctgtatacacaataaaggacagtctcacagaaaaaaaaaaaaaaaaaaaaaaaaaaaaaaaaaacaacaaaaaacaacaagaaaaaaaaaacaaaaacaaaagaaacaaaaaagacaaccgaaccggcggcggactatatcaggcgggggggagcgcaaaggaacgaatagcgacaaagcagcgcagggggcaaacgggggcagcggacaccacattattgacaaaagggggaggaacaaggcgggcccccagagggggggccgtaataggcgacccgggaacctcgaa

SEQ ID NO: 5088 - DNA, 1351 bp, Homo sapiens
  misc_feature (16)..(16): n is a, c, g, or t
  misc_feature (24)..(24): n is a, c, g, or t
  misc_feature (167)..(167): n is a, c, g, or t
tggagggatgagatgntgcggtanaatcgctcgggggctggttctgcagtaagtcggtcacgcacgggtgaagatgggttgcgctgcgggtgagcttcgatgttggggcggtcgtcgaaatctgtccggcgcacatcctggtcctgttcttactggggacgcgtccnttaagcacgcttttcatattgatttttagcgcggcggtgggtgtgtcgaactgtaaattgggtgagggttcggggcatcttctgttcgcctgacaatcgagtggaaaacatcccaggtgtagggcgtgggaacgtggttgcccagggtgtggaacactatattccaacagataggccattgtctcatgctggtgtgtaggggtacacctagcacgggggaaccatattattttttgtggggtgccccctagggaggaagaggaacctttgggtgtgggataaaaggggtctccggttcgaggtttccatgtccatgccgcaaaaagaccgttttatttggcattttttgaagggcgcagggggagccttttttccaggggatggaacaccaaggtttcaatgcccatgggaccttggaaaaaaggggaaaaaatgatttccttgcaaggcaggtttctggagggggcccttatggcccatcccattaaagggaatttccgtgggggaattttggtttgtggggggtgggtcaaggggccgcctctggtgccttttatgggaccccaagacccagagcacttggatgaactcggggtactagggtcagggcttatagcaggatgtctggctgcacctggcatgactgtttgtttctccaagcctgctttgtgcttctcacctttgggtgggatgccttgccagtgtgtcttacttggttgctgaacatcttgccacctccgagtgctttgtctccactcagtaccttggatcagagctgctgagttcaggatgcctgcgtgtggtttaggtgttagccttcttacatggatgtcaggagagctgctgccctcttggcgtgagttgcgtattcaggctgcttttgctgcctttggccagagagctggttgaagatgtttgtaatcgttttcagtctcctgcaggtttctgtgcccctgtggtggaagagggcacgacagtgccagcgcagcgttctgggctcctcagtcgcaggggtgggatgtgagtcatgcggattatccactcgccacagttatcagctgccattgctccctgtctgtttccccactctcttatttgtgcattcggtttggtttctgtagttttaatttttaataaagttgaataaaatataaaaaaaaaaaaaaaaaaactcgaggcatcta

SEQ ID NO: 5089 - DNA, 4683 bp, Homo sapiens
  misc_feature (3707)..(3724): n is a, c, g, or t
aagactgaattccttgtgagcagggattcttcagtaaatttcatttgtatgtccagtagccagtagctagtagccctcagccaagcacttagaactgagtaaatgatgggaaggtggaccatcagtgcataaaaggaaggaaccatgcctctagaagatttactggcattctatggctatgaacctacaattccagcagttgcaaattccagtgcaaatagttccccaagtgaactggcagatgaactaccagacatgacactagacaaagaggaaatagcaaaagacctgttgtcaggtgatgacgaggaaactcagtcttctgcggatgatctgacgccatctgtgacttcccatgaaacttctgatttcttccctaggcctttacgatcaaatactgcatgtgatggtgataaggaatcagaggttgaagatgttgaaacagacagtggtaattcacctgaagatttgaggaaggaaataatgattggtttacaatatcaggcagagattcccccttatcttggagagtacgatggtaatgagaaagtatatgaaaacgaagaccagttactttggtgtcctgatgtggttttggagagcaaagttaaggaataccttgttgagacttcattaaggactggcagtgaaaaaataatggataggatttctgcaggaacacacacaagggacaatgaacaggcattatatgaacttctcaagtgtaaccacaatataaaggaagcaatcgaaagatactgctgcaatggaaaggcctctcaagaaggaatgactgcatggacggaagaagaatgccgaagctttgaacatgcactcatgctttttggaaaagattttcatcttatacagaagaataaggtgagaactaggacagttgctgagtgtgtagcattctactatatgtggaagaaatctgaacgttatgattactttgctcaacagacaagatttgggaaaaaaagatataaccatcaccctggagttacggactatatggatcgtttagtagatgaaacagaagctttgggtgggacggtaaatgcttcagccttaacttctaaccggcctgagcctattcctgatcaacagctaaacattctcaactccttcactgccagtgacttgacagctttgaccaacagtgtagcaaccgtctgcgaccccacagatgtgaattgtttggatgatagctttcctccactgggcaacacaccccgtggacaagttaatcatgtgcctgttgtaacagaagagttactcaccctgcccagcaatggggaaagtgattgttttaatttatttgagactggattttatcactcggagctaaccctatgaacatgtgcagtgaagagtcagagagaccagcaaaaagattgaaaatgggcattgccgtccctgaatcctttatgaatgaagtttctgtaaataacctgggtgtggactttgaaaatcacacacatcacatcaccagtgccaaaatggctgtttctgtggctgactttggcagtctctctgccaacgagaccaatggtttcatcagtgcccatgctctgcatcagcacgcggccctacactctgagtgacctgagtgaggatcccggaactgcgtgtgcagcaccagtaaacttgaggagagctatcaggtttgcatagtctttcactggaagtttgaacctttctcactatgacatcagtgatgtcagtatgtatagaactatatcttgatttatcaagagtattttcatttttcaatccataaatgtggaaatgaactatgatcagcagagttgggaactaagattgaactctgtggtgcagctttaagctctgcttctctcttcctcatctcccaatacctcttccccactcccttctttttctattcttttgtgttccccactgccctcactcccaattttaaaacctgtagacagaggccaccagctcaaaaccagcacagatgttctgaactgaatggtgtggcctctttttgtgtaaattccttttgccgtaatggatgcagtggaataacaatgtttacaggtaccgatcccgatccctgctcaatgtagcatttttttggttttattttcttaataaaagcaggggtaggtttctttaaactgcacaaacatgcaaggattttttaaaaatggaaacttctctcatgttattcaactagagcacttcagtttacaaaacagcaagtccatctttatggaagccagcacaaggaactgtgtgcaaataatgaagacgcttgcttggatcctgtttcaaaattctagaccagggctaccttacacagaattggtcatgttactgccaggagatttctgtgtaacttcatttattggctacagttttggcatttgaagatgtggtactcagatggggttttgtccaccattgtcaagattgtaatcttaaaaatcataccagtcattgataatttagtttatcctgaggcagtcgacttgcagaggcacagtctacaaagcctaggatgttgccactcaatggtttacattctgggacatcttttaagttgtttgtagcactgcagttcaaagtgttaatatttagagggacttctagattttatacctaatgcagtagaaccttgaagtatatttaagcttttttgttaagcttgaacagttggcaagaataatgtgagttcctatctgaaatagaatggtacattaccacttttaagttttaaaaattgatagatgttcagatgtatctcaaactcagttttatttttattccaaatattgtgaatgagaagccattgtcctaaactttggccatttttgtgctataaacatgcatttttaagttataaggtgaatcaaacaatatgtaatacagtattaggatgtaatctttgcttttgtagtactgttaaaatagagaattatgttgtttgcaccgtcttaattaaaattcttgatttttactagttgctttgcaaaaaacaaatgtttggctgcattgctaatatttgtaagtataagttgcttcaaggttgtgctgatgagtagataggatgtagtgatcttagtagtgattgaaagggagggtatttattatacaaactgtgaactgcaatgacatccttagttttggatgatgtgtattcttgtttttctttgcagcattttaatgaagattgctttgaagtgtttacgcagtagcacattagtataaaatttagtttagcacagtggacaaaaagtagttaaattaataacttaaaatcagtctctaatttatacatctgaagtatagcattcctgtatgcacacagtaaataatgggtagcctgggctctgtgttactttcttgtatttttatccaagttgtcagcttcttattgctgtgttgttgtgctaaactttgaaccttatttcttttattaaaaatcagtacactttctataatttagtaagatactggccataatcttccattgttataaccttaattttcactctgggtttacagtggctggtctgtataaataatttacacaaagatgactgaatgctaataccagttgcacttaaatgaacatgcccattctcagtagctgatgcagtaatatattcagtttatctatgcattgctggggtcttgatataagatggaaacagtgtttcttatctaaagttttnnnnnnnnnnnnnnnnnntggacactttagttatttaaataaagatttttgaccaaaatccagaaaatggtatgagagaaaaataaattccagctagtttaatagatttttaaatgtcaatctgattttagcctcttagagagtgctaactagctggtaatgtttacttttaattccttgttaaaatgaggcaataatttgcaagatttttgtatataagtgtaaattcttcatatctttttagatctaattcaatattttctgactacttctgccatgtataataccatttttgtgcatgcttgatgtgacattcataaattgtaccactatgactttatccatgtaaaatagctatttattgaattttcttttaaaagctggatttactgggttttttttttctctcagtttaaacatcttaacagagaatttgttactgtttattaaaagaattgcatttggaagcaagaaaacaaccggatttgcaatcatgtgaagaaacaataatgcctttattatcaagtgttaagcacaattcttataacaaactgtgataaattcttttgttttttttccttgggccccattattttcttatgaacaaaccaaaaattcatggtgagcagttgcagtgttggctgatatatctttatgtacccggaatttgacaccgaccgtgctccatttccaagtgtactggtgctggtgatatagcataccttcgttagttgtcctcaccctttttcatgctagccttttaactgttagcttccctctgtaagaccggcgaattactgagggggtgccaccgttacacaaccacttggcattcgatcaatgggcacatccttatgttaaattgggccacattgaaccactatacacctgcttatacagctcggattactgattacaacccacggtgctccgtagcgaaattgctctcgaatgatcgcccgcaacacacatatcat

SEQ ID NO: 5090 - DNA, 1714 bp, Homo sapiens
tggcacgaggcacggtccgtctgcagtcggcagcctcgccggcagctcgctcggcccccgcttggcccggcccgcaggtaggagccgccgagggacgcggcgcccggttcccggccccgcctgcgccgcgcgctccccgctcccgccgcccgcttcgagggttctctccccttgccaccatgagcgagtcatttgactgtgcaaaatgcaacgagtccctgtatggacgcaagtacatccagacagacagcggcccctactgtgtgccctgctatgacaatacctttgccaacacctgtgctgagtgccagcagcttatcgggcatgactcgagggagctgttctatgaagaccgccatttccacgagggctgcttccgctgctgccgctgccagcgctcactagccgatgaacccttcacctgccaggacagtgagctgctctgcaatgactgctactgcagtgcgttttcctcgcagtgctccgcttgtggggagactgtcatgcctgggtcccggaagctggaatatggaggccagacatggcatgagcactgcttcctgtgcagtggctgtgaacagccactgggctcccgttcttttgtgcccgacaagggtgctcactactgcgtgccctgctatgagaacaagtttgctcctcgctgcgcccgctgcagcaagacgctgacacagggtggagtgacataccgtgatcagccgtggcatcgagaatgtctggtctgtaccggatgccagacgcccctggcagggcagcagttcacctcccgggatgaagatccctactgtgtggcctgttttggagaactctttgcacctaagtgcagcagctgcaagcgccccatcgtaggactcggtggaggcaagtatgtgtcctttgaagaccgacactggcaccacaactgcttctcctgcgcccgctgctctacctccctggtgggccagggcttcgtaccggatggagaccaagtgctctgccagggctgtagccaggcagggccctaagccagggctcctggacccaggctttcccataccacgggcccaggactgtggctccttttctaaaccacctctgggactcagctccccccgccaaaaaaaatgggtctccttctgggctccaggattgtctccccactccagcatccccaaactggtactccctgacccaggcccccaatcctgggctcttacagagcctccatgagtcaagccccctccccacacctggactccagaattcaccctctcccctgcagtctgggttcccagactgagtcctctccccaaatcagggctctagacccgagccctccaaacctggactctgggacttaggcccccttaaatctagacttctctttataggtttcaggtctcctatgggtgcctgggaagtccttgaaagtggactgttctcaggcttgacctgccccaccccatccccgcggttgaggctgtgggggcagcagatcaggagcccactgataaggggccctagggtacagggtgctgcccagcaggtcgccaccgagtgtcttctcattttatttcagctccattttgcccatagatgggcagaggggtgagattggctcatcccccttccacgattctggcaataaaggcgtgtgaggaaaaaaaaaaaaaaaaaaaaaaaaaaaaaaaaaaaaaggaaaaaaaaaaaaaaaaaa

SEQ ID NO: 5091 - DNA, 2005 bp, Homo sapiens
agtacagtataaaacttcacagtggcaataccatgaagaggagctcagacagctcttaccacatgatacaagagccggctggtggaagagtggggaccagaaagagaatttgctgaagaggagaaggaaaaaaaaaacaccaaaaaaaaaaataaaaaaatccacacacacaaaaaacctgcgcgtgaggggggaggaaaagcagggccttttaaaaaggcaatcacaacaacttttgctgccaggatgcccttgctttggctgagaggatttctgttggcaagttgctggattatagtgaggagttcccccaccccaggatccgaggggcacagcgcggcccccgactgtccgtcctgtgcgctggccgccctcccaaaggatgtacccaactctcagccagagatggtggaggccgtcaagaagcacattttaaacatgctgcacttgaagaagagacccgatgtcacccagccggtacccaaggcggcgcttctgaacgcgatcagaaagcttcatgtgggcaaagtcggggagaacgggtatgtggagatagaggatgacattggaaggagggcagaaatgaatgaacttatggagcagacctcggagatcatcacgtttgccgagtcaggaacagccaggaagacgctgcacttcgagatttccaaggaaggcagtgacctgtcagtggtggagcgtgcagaagtctggctcttcctaaaagtccccaaggccaacaggaccaggaccaaagtcaccatccgcctcttccagcagcagaagcacccgcagggcagcttggacacaggggaagaggccgaggaagtgggcttaaagggggagaggagtgaactgttgctctctgaaaaagtagtagacgctcggaagagcacctggcatgtcttccctgtctccagcagcatccagcggttgctggaccagggcaagagctccctggacgttcggattgcctgtgagcagtgccaggagagtggcgccagcttggttctcctgggcaagaagaagaagaaagaagaggagggggaagggaaaaagaagggcggaggtgaaggtggggcaggagcagatgaggaaaaggagcagtcgcacagacctttcctcatgctgcaggcccggcagtctgaagaccaccctcatcgccggcgtcggcgggggctttggagtgtgatggcaaggttcaacatctgctgtaagaaacagttcttttgtcagtttcaaggacatcggctggaatgactggatcattgctccctctggctatcatgccaactactgcgagggtgagtgcccgagccatatagcaggcacgtccgggtcctcactgtccttccactcaacagtcatcaaccactaccgcatgcggggccatagcccctttgccaacctcaaatcgtgctgtgtgcccaccaagctgagacccatgtccatgttgtactatgatgatggtcaaaacatcatcaaaaaggacattcagaacatgatcgtggaggagtgtgggtgctcatagagttgcccagcccagggggaaagggagcaagagttgtccagagaagacagtggcaaaatgaagaaatttttaaggtttctgagttaaccagaaaaatagaaattaaaaacaaaacaaaaaaaaaaaaaaaacaaaaaaaaacaaaagtaaattaaaaacaaacctgatgaaacagatgaaacagatgaaggaagatgtggaaatcttagcctgccttagccagggctcagagatgaagcagtgaagagacagattgggagggaaagggagaatggtgtaccctttatttcttctgaaatcacactgatgacatcagttgtttaaacggggtattgtcctttccccccttgaggttcccttgtgagcttgaatcaaccaatctgatctgcagtagtgtggactagaacaacccaaatagcatctagaaagccatgagtttgaaagggcccatcacaggcactttcctagcctaat

SEQ ID NO: 5092 - DNA, 1354 bp, Homo sapiens
  misc_feature (8)..(8): n is a, c, g, or t
  misc_feature (10)..(10): n is a, c, g, or t
  misc_feature (14)..(14): n is a, c, g, or t
cctcgcgntntgtntttttttttttaaataaaataaaactttatttttaataataaaattaatgtttctagtaaggaaaagacagtatgtcattcctttagcagtacaaacaatcttttatccaaaagaatacattgggttttattgtgtcatttgtctgaatacagacacagtggaatatctaaatgataccctgctctgaactccaagttgaaagtaagtttttattatacttgagggaaacaatgggttcagctgcttattgcaaggagcaattgccaagggagagttaaactcaattactgtaaccatactgaataaaaaatactgccaagaacaaaaatacgcctgggtaaagacagccactgaataaaaaaaaatcgacataaagcgtatcaaatatttatttatctgggcaacaaaggactatgatacattgacaggcatggaaactactgccagcacaactcaatacaatgcaactagaactgcttccaatatggccagtgaaaatacagaataccaggtggtcccaaatgtttgaagttctttgaacagaaagagagaggagagagagagagagaggaaaattccctaacccttggtttaaagacaatattcatttattgctcaaatgatgcttttaagggaggacagtggaataaaataaacttttttttttctccctacaatacatagaagggttatcaaaccactcaagtttcaaaatctttccagggtccaatatcactttttttctttcggttcaatgaaaagctaaatgtaataatactaattatagataaaattttattttactttttaaaaatttgtccagctgtttgtcacctttaacatgctacaacagggctaaattcatgaatcccagagaaaaaaatcccccaaacactggatttctaaatcagtaccatgaaccacatgaagaactaatagggaagattcaaaacccactaaacaagaggtaaacaagatcagataaataaaaaaaaaaaggcttaaaacagactcaccatatttacaattcccattaaattacacataaataaatatatacagagacgtgaacactgattcccttatataactgcgaatcgtgttgccagagaaagttcaagttggtcgctttaccttaaagaggaaaaacttctacaactgaagacatgacatggaacttcgtgtatttgtgttcaagtttattcacaatactgataaaaatgttgtcatcatcttttgggtttttttttttttttaagtatggctacaatctgaactgaagtatgtaagggaaggtggtgactcagtcccatgaagcgcatataattttttttttttt

SEQ ID NO: 5093 - DNA, 2244 bp, Homo sapiens
ctaggccccccagggttttaacccttccgcacccgccccaaaccatctcggaacttggagcggatcacactttccccggggaaaccggacttgtcccgaactttagccgccttctcaaactcgctcatggatcccgaattgctctctgcccccccgggaacccttacacatcccccgggtcctccaaacccaaaagagttcacaggcccctttgcaggcaaaacatgggggccttgccccatcactgcagggaatggaccaatgaggtggtatcaatgaatatagttccatagaacattttccagaagttcttctgttgtagaaagcagtacagtatcttaagtgtcaaccagttatatacctaatctggttttttataacttctgtaagagcataatcaaacaggagttttattttatcagatggataatacaacagagaaaacagagttgcccaaatatttaaatgaatcttaaggagtgtggtaaatatgtgctccgcttttgttgcatcactatgtgaagtactgtgttgcagaagtggcaaaagcgcttatttttaaaaatgcaaaatatttgtacaatgtaactttatgcttccaaataataatgtatgttagacagcaagaaatgaatactttaaaaagtgatgtatgttggagttataaagaaatacactaaggagaggtagtaaatgtgaaccttgttgcagtgtataaggtggaagcctaaagaaatctcaccgaaacttactgctgaatgattacattctcccttaagcagaaaactttggatgtgccatgcaatggtgtctgtgtaattattttgctctttgattaaaaaaaagacccccagcaataaaaagtgggtcactctatgccctctgtgcacattagtctcttgtattcaactttgctgattctctggaattttcctactctttagcataattttgatgattgaaaaatattttggaaaggatgggtcaggtgctttgcctccatagtcttttgaagtgcctgcatatgaacaacaacaacaacaacaacaaaaaattctgtaaaaaaggaagcccattccacttttcaagtatgctttgttttaagccataaagacacacatgtagttttgtcacattctactagccaaaattttcaagaagggttaaaacaaagactggctagaaagataattattttgaataaatctcatattcatctttcatttatataattgttacttattcctcccatgcagtctcttcgttgtctttaagtgtgtgcctccaggcatgcttatttatttttattgtctcaaggtaacatttaagatgtatattaaagtaaagctacatttttttacttcattattgcatttacagggatttaattgtactttgtaatttatttttcttattagccaaaagtttaatgcattttttttctgatgaattaggcacccacatgaacaccacaaatcaggacattgtttatcattgttgctatgaatcctatgaatgatcttttttttattttaaagacctacacttaacctacaaaacatttgctgtataatttggtcaacagtttctatctatctgtatactgtcatgatgtcttaaactgcaggagttacatactgagtttatatttttatttgctttgagcaaggtagataaacattttggccattataatgtgaaaccacttcttctttctttacagtatttgaccaaacttgtgtgtctatgatatttgtaaatacatgcgaatatctgtatttcttatcataagcctatttagttttattctcagtagggttttttggattgtacagtgtttatatgatctgaactccttatacataagaaggtgtgtatattaatccaattatggacttaaaatattttaaaagtataaatacccttatttgctgcaaagaccagtgtgtaggcatttgctttttagcaatatttttaagtgctccattttaatgccgaggaataagtcttttggcaacacaaactggtcaataataggtaatgcaggtatgttcaggttaagccaacaatgttttgcatttttatgcttattttctgtcaacactaatgaagtcaacattgcctgaatgtctgaataatgaaacacatccctgtttaaaagtatgtaactgaaaaagaaataaaaaaaaataaaagtagtttttttaaaaaaaaaaaaaaaaaaaaaaaaaaaaaaaaaggggg

SEQ ID NO: 5094 - DNA, 1321 bp, Homo sapiens
cccacgctgccttgctccacacctggtcaggggagagaggggaggaaagccaagggaagggacctaactgaaaacaaacaagctgggagaagcaggaatctgcgctcgggttccgcagatgcagaggttgaggtggctgcgggactggaagtcatcgggcagaggtctcacagcagccaaggaacctggggcccgctcctcccccctccaggccatgaggattctgcagttaatcctgcttgctctggcaacagggcttgtagggggagagaccaggatcatcaaggggttcgagtgcaagcctcactcccagccctggcaggcagccctgttcgagaagacgcggctactctgtggggcgacgctcatcgcccccagatggctcctgacagcagcccactgcctcaagccccgctacatagttcacctggggcagcacaacctccagaaggaggagggctgtgagcagacccggacagccactgagtccttcccccaccccggcttcaacaacagcctccccaacaaagaccaccgcaatgacatcatgctggtgaagatggcatcgccagtctccatcacctgggctgtgcgacccctcaccctctcctcacgctgtgtcactgctggcaccagctgcctcatttccggctggggcagcacgtccagcccccagttacgcctgcctcacaccttgcgatgcgccaacatcaccatcattgagcaccagaagtgtgagaacgcctaccccggcaacatcacagacaccatggtgtgtgccagcgtgcaggaagggggcaaggactcctgccagggtgactccgggggccctctggtctgtaaccagtctcttcaaggcattatctcctggggccaggatccgtgtgcgatcacccgaaagcctggtgtctacacgaaagtctgcaaatatgtggactggatcccgggagaccatggaggaacaattagactggacccacccaccacagcccatcaccctccatttccacttggtgtttggttcctgttcactctgttaataagaaaccctaagccaagaccctctacgaacattctttgggcctcctggactacaggagatgctgtcacttaataatcaacctggggttcgaaatcagtgagacctggattcaaattctgccttgaaatattgtgactctgggaatgacaacacctggtttgttctctgttgtatccccagccccaaagacagctcctggccatatatcaaggtttcaataaatatttgctaaatgagtgaaaaaaaaaaaaaaaaaaaaaaaaaaaagccctcgtgccg

SEQ ID NO: 5095 - DNA, 3120 bp, Homo sapiens
  misc_feature (270)..(294): n is a, c, g, or t
tgctaccgaaggccggcggccgcggagccctgcgagtaggcagcgttgggcccatgcaggacgcggagaacgtggcggtgcccgaggcggccgaggagcgcgccgagcccggccagcagcagccggccgccgagccgccgccagccgaggggctgctgcggcccgcggggcccggcgctccggaggccgcggggaccgaggcctccagtgaggaggtggggatcgcggaggccgggccggagcccgaggtgaggaccgagccggcggccnnnnnnnnnnnnnnnnnnnnnnnnncgtccgagtcgccctcgccgccggccgccgaggagctgcccgggtcgcatgctgagccccctgtcccggcacagggcgaggccccaggagagcaggctcgggacgcaggctccgacagccgggcccaggcggtgtccgaggacgcgggaggaaacgagggcagagcggccgaggccgaaccccgggcgctggagaacggcgacgcggacgagccctccttcagcgaccccgaggacttcgtggacgacgtgagcgaggaagaattactgggagatgtactcaaagatcggccccaggaagcagatggaatcgattcggtgattgtagtggacaatgtccctcaggtgggacccgaccgacttgagaaactcaaaaatgtcatccacaagatcttttccaagtttgggaaaatcacaaatgatttttatcctgaagaggatgggaagacaaaagggtatattttcctggagtacgcgtcccctgcccacgctgtggatgctgtgaagaacgccgacggctacaagcttgacaagcagcacacattccgggtcaacctctttacggattttgacaagtatatgacgatcagtgacgagtgggatattccagagaaacagcctttcaaagacctggggaacttacgttactggcttgaagaggcagaatgcagagatcagtacagtgtgatttttgagagtggagaccgcacttccatattctggaatgacgtaaaagaccctgtctcaattgaagaaagagcgagatggacagagacgtatgtgcgttggtctcctaagggcacctacctggctacctttcatcaaagaggcattgctctatgggggggagagaaattcaagcaaattcagagattcagccaccaaggggttcagcttattgacttctcaccttgtgaaaggtacctggtgacctttagccccctgatggacacgcaggatgaccctcaggccataatcatctgggacatccttacggggcacaagaagaggggttttcactgtgagagctcagcccattggcctatttttaagtggagccatgatggcaaattctttgccagaatgaccctggatacgcttagcatctatgaaactccttctatgggtcttttggacaagaagagtttgaagatctctgggataaaagacttttcttggtctcctggtggtaacataatcgccttctgggtgcctgaagacaaagatattccagccagggtaaccctgatgcagctccctaccaggcaagagatccgagtgaggaacctgttcaatgtggtggactgcaagctccattggcagaagaacggagactacttgtgtgtgaaagtagataggactccgaaaggcacccagggtgttgtcacaaattttgaaattttccgaatgagggagaaacaggtacctgtggatgtggtcgagatgaaagaaaccatcatagcctttgcctgggaaccaaatggaagtaagtttgctgtgctgcacggagaggctccgcggatatctgtgtctttctaccacgtcaaaaacaacgggaagattgaactcatcaagatgttcgacaagcagcaggcgaacaccatcttctggagcccccaaggacagttcgtggtgttggcgggcctgaggagtatgaacggtgccttagcgtttgtggacacttcggactgcacggtcatgaacatcgcagagcactacatggcttccgacgtcgaatgggatcctactgggcgctacgtcgtcacctctgtgtcctggtggagccataaggtggacaacgcgtactggctgtggactttccagggacgcctcctgcagaagaacaacaaggaccgcttctgccagctgctgtggcggccccggcctcccacactcctgagccaggaacagatcaagcaaattaaaaaggatctgaagaaatactctaagatctttgaacagaaggatcgtttgagtcagtccaaagcctcaaaggaattggtggagagaaggcgcaccatgatggaagatttccggaagtaccggaaaatggcccaggagctctatatggagcagaaaaacgagcgcctggagttgcgaggaggggtggacactgacgagctggacagcaacgtggacgactgggaagaggagaccattgagttcttcgtcactgaagaaatcattcccctcgggaatcaggagtgacctggagcactgtgcgcagccgtgtgtgctgtggagccgaggccgtcctgcaggaagccgcgtgactcccgcctcctccctgtgctctctggctctggactgtgactgcgcctggattctgccattgcgacacatttttgtgcctttcagcccctggtgtctgcagtgggggatttaaggcacccgcttccacttctttcttgtttggagttttctgttggaaccgccggcgttggctccgaagacttagcgacgccactggcggcaccttctcctgcgcccagtgatgtttccacggtgcctgtacacagccgagcagcatttccgttgaaggacttgcatccccattgcgggcagtgctggacgtgtcccggagacccaccgggagggcgccgccatgccttgtacccccaccgtgcaggttgtggccggttttctccgcaggttgaacatggaaataaaagcaaacttgtatgaaaaaaaaaaaaaaaaaaactcgaggccaagctcgcgtccactttgtacaaggcctagggggaaacagcacgccggtaagcggggatgccggttggagacccttggggaggccccagacggaaaagaggacgcgatgtacccc

SEQ ID NO: 5096 - DNA, 5161 bp, Homo sapiens
  misc_feature (4986)..(5005): n is a, c, g, or t
gcatccccttgattaaatgtttttcctcctatgcaatcaccattagctgtttggctcccattctgtattcttctgaagcagccctgcattgcaaatcaatatctttctgaaaagacagtgtgttgtgaattgccttgacagcatatgcacggttactttggctgcaatgctgctgcagagcccggttactctgccttcgtgggaactccacagatatgtgtcacaaagatgtctacacggaactgccagggaatggactcagtgatcaaacccctggacacaattcctgaggataaaaaagtcagagttcagaggacacagagcacttttgacccatttgagaaaccagctaatcaagtaaagagggtgcattctgagaacaatgcttgcattaactttaagacctcctccactggcaaagagtcacctaaagttaggcggcactccagccccagctcgccaacaagtcccaaatttggaaaagctgactcatatgaaaagctggaaaaactaggggaaggatcttatgctacagtatacaaagggaaaagcaaggtaaatgggaagttggtagctctgaaggtgatcaggctgcaggaagaagaagggacacctttcacagctatcagggaagcttctcttttaaaaggactaaaacatgctaacatagtgctacttcatgacatcatccataccaaggagacgctgacacttgtgtttgaatatgtgcacactgatttatgtcagtacatggacaagcaccctggggggctgcatccagataatgtgaagttgtttttatttcagttgctgcgaggtctgtcttacatccaccagcgttatattttgcacagagacctgaaaccacagaaccttctgatcagtgacacgggggagttaaagctggcagatttcggtcttgcaagagcaaaatccgtccctagccacacatactccaacgaagtggttaccttgtggtacagacctccagatgtccttctaggctcaacagaatattccacctgccttgacatgtggggagtaggttgcatctttgttgaaatgatccaaggagttgctgcttttccaggaatgaaagacattcaggatcaacttgaacgaatatttctggttcttggaacaccaaatgaggacacatggcctggagttcattctttaccacattttaagccagaacgctttaccctgtacagctctaaaaaccttagacaagcatggaataagctcagctatgtgaaccatgcagaggacctggcctccaagctcctacaatgttccccaaagaacagactgtcggcacaggctgccttgagccacgagtattttagtgacctgccgccacggctatgggaactcaccgacatgtcttctatttttactgtcccaaatgtgagattgcaaccagaagctggagaaagcatgcgggcctttgggaaaaacaatagttatggcaaaagtctatcaaacagcaagcactgacaagcagcacattctcaagagcacacaggattaagttgtcatcattctgggaagaaaaaaaaaacattaatgaagaggccaataatatgaagggaatcatggatcagttttctttcgctccctgtggtggatttcacttacaagaaaattgaagctggcaagaccctgttttctctgcaatttatttaaaaccttgcacgcatttggataccttgtgatttccaagaactacgtgaagattaagctttgcttactgatacatggcatgtattcttttcagtcttttgtgtttgattttgtttgatttccctctgcagcacagcgtctctgtaaaggtttttatgctttcaccagccatgtcttaaatacattaagacaacacatttggtgttcacacttcttcagtaatgtctgaacttgaaagccacagagtggcataaaacaatgtgtgttttctttgagagcagtgcacattttgcaaccactaggaaggaaattttctgctaaagcaaacccctgttctctgacttgacaacttggccccggactgtggggccccacctgttgcttaccttttgaggtaattttgcaaatgtggtttttttacttggaaataactgcacatttatatataggatattggactctgcttagcattttcaagccacatagcatgactgttttttgaataggttggaattgaaaaaacaattatcaaacgttaagaacaaagacagggataaattgcttacatttcaacctctagagattgaggtaactttttgtgtctgggtcttgtcaacatctaatttttttccatccattctgttacactttgtattttctaactggagaaaagagtgaggaacagaatgttttaaatctggtgcaaaagaactatatctgctggatgagccttgaaagcagtcttggcctgttagggcttacaaagtaaattacaaagtgatccagttcaaagtttgcttagttacaacaaagcacctttaaaaaaaatacattttaaaaaaacattccaagccaattggaagacatcattgggttcttactttaagacatctcctggaataactgttcaaatgcaggttttagaaacaatgcaggaatcttgctttaaagatgaaaaagggaatgggccagcttcccttactcaaggagttgagggaccttggaggatgaaggcgagtatgtgacactggagaaaagtggaccaggcatgtcttttgctttgatctggagggagggctgcctgatgcaggccggctcccagtggggcaggcctcgctgcagaatgcccagtagtactgcggccaaggggacagttaggagacttcatctaaagcatgaaacctagctcctctacacacaaattcctatggaaatacctttgtgtacagtgtcttacattttcctattagtcagaaagaaggagagaatgagtgagtgcttgaaatgtgtcatactgttttaggatcaagactaggaattaggagccaggttgacaaggactttttctgagagttgggtgagggtaaagcttttctataatcaagctcaatacaccaaggaaactggatccagaattcctaaactttaaaatggtactgtctgcggagtggagtatggatggttatgtcaaagtcatagttcatcctatccagatgtagcattcatggtaaacttttaagtgctaagcaaggaattatttactgattggttttaaagagagcagaaaacacccaagtgtagaatgtctactgtttgctacctagaaatcttttccattcctctttcatacattccaacccactggaagtctttagaggtattttgatttaaagtatacttaaattaggatttcttaaagaaaacatagggagaaaactttacatgcaattaaaaatggactttcctgtgatttgtttttaatcattcatttggagaagaggcatgacctttgtatttcactaagtttaaagcaagagcaactgatgattaaatgttgctttttaataaggtttttaacttgaaaatttgaaaatatttaatgttgaaagacttcaattagggctattagagttatatctccctgtcgtaggcagcttcttcggagaagtgaaatataacattactcagtggacggagaagtctgttttgttacagagacatgcctctcagaaggtcaggaggttttgagtacctatccttgccacccatacaggaaatccaaagtttggtgtctctctctctctctgtctctttctttctctttctccccccaaacccctctcactccctccctccctctctccttcccctatttgcaatcatattctccctctgcttcttttctcttctgccctccttgtgggcagtcatgaaaatcaattcagactgtgttcattagcagatttattattctattgagaaagcactggaatgttttgtgagattatttttatatgaaggaatagcctgaactcaaacagatggtaagaatagtacaaacaccttagcacatcactgcacacacagtattctgaaaggagatttgacacttaattcccattttcttaaaataacagttttgttgacttaaaaatatgagatacataggatgtgaaaaaaaatgtttgcagtactcagcaaaaaatagggtacataaagcagggtggctgtccatccactgattctggggtgagaagcgatttctacctcgcaagagtgactagaaagtttctaggagcacctccaggcttgcaaagaaagtgaggcctcttggtatcctttcctcagtgtgtatatgacagccagtataatcaataccctaggttatgcgtctatatgatactcatctgtgaatattattggttttgtaatctttgttatataagaggatgtttaggctgtatatactggggtagattattgcctgccccttatacataggaatatgctgcataattgcgcataacttccatctcccttactggcttgtaggcagaggaaactgtatatgttactgccttgtacttttctcatacaccaaaaacacaccaaaaaaatcaataaaataagcaatcttctattctcattccttttcccacagcagcatattttagaggcacatacaaaacctacattctctagttgggagtggatttttaaagttttccttttatcttttatttttttttttgtatgatgcactgagatgtgtactttctaacaggggattggtacctaagaaacgtggtagcattattcagaaaactattatactttcaaatgacacatagtaaggagaatggaataatacatgttgcatatttgttaccagttgtaatttgtctgtattatgaaagatgtaatggtttgtcagctgtcactgttgttttcttgtaacatgatatggaataaagtatagcagaatctccgtaaaaaaaaaaaaaaaaaaaaaaaaaaaannnnnnnnnnnnnnnnnnnncccagtaccagtgacggaccaagaaacttcgggaggtcaaaactgggggagctgccaaggtgggatccttgatgcgggacttcagcctagtggccattacggagcgtcaacagaggttactacggtatacaacaagtaccatcatgtgaacacagg

SEQ ID NO: 5097 - DNA, 1546 bp, Homo sapiens
  misc_feature (19)..(19): n is a, c, g, or t
  misc_feature (1326)..(1545): n is a, c, g, or t
aaaaagcccaggaaggggnaaccttgaaaaccgtttacccctcaagttaggggggaaattctgggcccaatattcaagtcatttggggactccccacatgcaaaatgctaaattacaatgcagacattaagaaaaagtattgactggaggggttgaattccttgagaatttattttatagtctaaatcacaaatactttactcaatttagtttttaaaatagtaaactgaatatttttgttgtaagcctatcagagtcaatccttcgtttggaattgttttcctgtttttccttactataaatcatttaaaaactgaattcattttcttagatggcataagtctgtctcttgagaaataagtaaaatactcctattttcagtatctgtagcacctgaaataggtctttgtatagccagaaacaagttatgttgaagttagcttttctttgtcaacagttttggacaataaaaatctgaaagtattaacacttgattttctactggggcccttcaaacttggttggaagaaattcaaccagaatatctacattagagtataatcatgtgtggtaggaagatggactagttaatcaagatttgttgtcacttaaattttttgtgatttttttccaagccagtttttttaaattctaaatgtgttttgaggtatgggtacattaattgtaatgtaaactattatacaactgtttttgcgactttataggcaggtaaattttgctattactattgaatacaaatgacaattcatttatgaccactcaaacagcgttagtaaccatttagtgacaaaggattaaaacatccatctggatgttaattttgaagatgtaaattatatgttgtttaaatttttccaggcatctgaaaaccttatctgctagacaatgtaagattcacacagagttatctgggattctgattttttaaatagtacatatcattaaaccattttctctaaatgtaagaagagcagaaaaaatcttataagattatcagatttttctaatgacacagaaatgtaagaaaaaaatccctttatattgaaaaaagatgcagtcaaagtcttttcagacatgcccaaactttgagaatttcttcaaccatctaatgctataaagatttttgttcttcctgttcacaaccagttgtataacagaaatactagctactgttttccttcctgtgtgtgaagtaatgaatcattgattatgtgacttgttatgtattcaattaaacactaaagaataaaacattcactcctttaaaaaaaaaaaaaaaaaaaaaaaaaaaaaaaaaaaaaaaannnnnnnnnnnnnnnnnnnnnnnnnnnnnnnnnnnnnnnnnnnnnnnnnnnnnnnnnnnnnnnnnnnnnnnnnnnnnnnnnnnnnnnnnnnnnnnnnnnnnnnnnnnnnnnnnnnnnnnnnnnnnnnnnnnnnnnnnnnnnnnnnnnnnnnnnnnnnnnnnnnnnnnnnnnnnnnnnnnnnnnnnnnnnnnnnnnnnnnnnnnnnnnnnnnnnnnnnnnna

SEQ ID NO: 5098 - DNA, 3448 bp, Homo sapiens
  misc_feature (598)..(657): n is a, c, g, or t
  misc_feature (1530)..(1547): n is a, c, g, or t
caccctatcctacactactaggaacttgcacagtccgcctcgggcagcccaaagctcctctgcccaccctggctcccaaaaccctccaaaacaaaagaccagaaaagcactctccacccagcagccaaacgcctccttcttgacgccagcccccaccctctgtctgctcgagcccaggaaaggcctgaaggaacaggccggggaaggagccctccctctctcccttgtccctccatccacccagcgccggcatctggagaccctatggcccgggctcactggggctgctgcccctggctggtcctcctctgtgcttgtgcctggggccacacaaagccactggaccttggagggcaggatgtgagaaattgttccaccaaccccccttaccttccagttactgtggtcaataccacaatgtcactcacagccctccgccagcagatgcagacccagaatctctcagcctacatcatcccaggcacagatgctcacatgaacgagtacatcggccaacatgacgagaggcgtgcgtggattacaggctttacagggtctgcaggaactgcagtggtgactatgaagaaagcagctgtcnnnnnnnnnnnnnnnnnnnnnnnnnnnnnnnnnnnnnnnnnnnnnnnnnnnnnnnnnnnncataaggaagttggcaccactcctattgtcacctggctcctcaccgagattcccgctggagggcgtgtgggttttgaccccttcctcttgtccattgacacctgggagagttatgatctggccctccaaggctctaacagacagctggtgtccatcacaaccaatcttgtggacctggtatggggatcagagaggccaccggttccaaatcaacccatttatgccctgcaggaggcattcacagggagcacttggcaggagaaagtatctggcgtccgaagccagatgcagaagcatcaaaaggtcccgactgccgtccttctgtcggcgcttgaggagacggcctggctcttcaaccttcgagccagtgacatcccctataaccccttcttctattcctacacgctgctcacagactcttctattaggttgtttgcaaacaagagtcgctttagctccgaaaccttgagctatctgaactccagttgcacaggccccatgtgtgtgcaaatcgcggattacagccaagttcgtgacagcatccaggcctactcattgggagatgtgaggatctggattgggaccagctataccatgtatgggatctatgaaatgataccaagggagaaactcgtgacagacacctactccccagtgatgatgaccaaggcagtgaagaacagcaaggagcaggccctcctcaaggccagccacgtgcgggacgctgtggctgtgatccggtacttggtctggctggagaagaacgtgcccaaaggcacagtggatgagttttcgggggcagagatcgtggacaagttccgaggagaagaacagttctcctccggacccagttttgaaaccatctctgctagnnnnnnnnnnnnnnnnnnggcccactacagcccgaccaaggagctgaaccgcaagctgtcctcagatgagatgtacctgctggactctggggggcagtactgggacgggaccacagacatcaccagaacagtccactggggcaccccctctgcctttcagaaggaggcatatacccgtgtgctgataggaaatattgacctgtccaggctcatctttcccgctgctacatcagggcgaatggtggaggcctttgcccgcagagccttgtgggatgctggtctcaattatggtcatgggacaggccacggcattggcaacttcctgtgtgtgcatgagtggccagtgggattccagtccaacaacatcgctatggccaagggcatgttcacttccattgaacctggttactataaggatggagaatttgggatccgtctcgaagatgtggctctcgtggtagaagcaaagaccaagtacccagggagctacctgacctttgaagtggtatcatttgtgccctatgaccggaacctcatcgatgtcagcctgctgtctcccgagcatctccagtacctgaatcgctactaccagaccatccgggagaaggtgggtccagagctgcagaggcgccagctactagaggagttcgagtggcttcaacagcacacagagcccctggccgccagggccccagacaccgcctcctgggcctctgtgttagtggtctccacccttgccatccttggctggagtgtctagaggctccagactctcctgttaaccctccatctagatggggggctcccttgcttagctcccctcaccctgcactgaacataccccaagagcccctgctggcccattgcctagaaacctttgcattcatcctccttctccaagacctatggagaaggtcccaggccccaggaaacacagggcttcttggccccagatggcacctccctgcaccccggggttgtataccacaccctgggcccctaatcccaggccccgaaataggaaagccagctagtctcttctcttctgtgatctcagtaggcctaacctataacctaacacagactgctacagctgctcccctcccgccaaacaaagccccaagaaaacaatgcccctaccacccaagggtgccatggtcccgggaaaacccaacctgtcaccgcgtgttgggcgtaaccagaactgttcccccccaccagggcttaaaaatcgcccccactttttaaccatcgtccattaaccacctggtgggcatagccagagctgttcgaacccagccagggatgaaaaatcaacccccgacatggaacccatgattcctaaacccggggtaggttccatgccaagtaacagcagagggagttaagccataggaatttggctgtggagtaagagggaatgcggtgaggcagtgtggaatatgaccctaccagaggttggagaacaaacttgggcagccggaacccgtcactattttagattcctggcattcgaggagccctttgaactttccaaagtgcagccacagctacaatgctgttaaatcctcccacatttcttggatgccccttcaccttgtgtggacagtgtctggtttccccattttacagacaggaaaactgagcttcagacagggggtgggctttgcctaaggacacacaaatttggttgggagttgatggggccagatgagccagcattccagctctttcacccttcagcaacatgcagagtccctgagcccacctcccagccctctcctcattctctgaacccactgtggtgagaagaatttgctccggccaaattggccgttagccacctgggtccacatcctgctaagacgtttaaaacagcctaacaaagacacttgcctgtggaaaaaaaaaaaaaaaaa

SEQ ID NO: 5099 - DNA, 9603 bp, Homo sapiens
  misc_feature (1296)..(1314): n is a, c, g, or t
  misc_feature (1739)..(1768): n is a, c, g, or t
gcgctccgcacctgggcactcccagcgatgcgcagcggggcagcgccggccccgccgatggagctgctgttgctgccgccgccgccgcccggagcgccccgctccgcccgcgccccgtgcgcctgagcaccgagctcgcccctcctccgcgctaactccgccgcccgctccccaggccgcccgcgctccccgcgcgcctcctcgggctccacgcgtcttgccccgcagaggcagcctcctccaggagcggggccctgcacaccatggcccccgggtgggcaggggtcggcgccgccgtgcgcgcccgcctggcgctggccttggcgctggcgagcgtcctgagtgggcctccagccgtcgcctgccccaccaagtgtacctgctccgctgccagcgtggactgccacgggctgggcctccgcgcggttcctcggggcatcccccgcaacgctgagcgccttgacctggacagaaataatatcaccaggatcaccaagatggacttcgctgggctcaagaacctccgagtcttgcatctggaagacaaccaggtcagcgtcatcgagagaggcgccttccaggacctgaagcagctagagcgactgcgcctgaacaagaataagctgcaagtccttccagaattgcttttccagagcacgccgaagctcaccagactagatttgagtgaaaaccagatccaggggatcccgaggaaggcgttccgcggcatcaccgatgtgaagaacctgcaactggacaacaaccacatcagctgcattgaagatggagccttccgagcgctgcgcgatttggagatccttaccctcaacaacaacaacatcagtcgcatcctggtcaccagcttcaaccacatgccgaagatccgaactctgcgcctccactccaaccacctgtactgcgactgccacctggcctggctctcggattggctgcgacagcgacggacagttggccagttcacactctgcatggctcctgtgcatttgaggggcttcaacgtggcggatgtgcagaagaaggagtacgtgtgcccagccccccactcggagcccccatcctgcaatgccaactccatctcctgcccttcgccctgcacgtgcagcaataacatcgtggactgtcgaggaaagggcttgatggagattcctgccaacttgccggagggcatcgtcgaaatacgcctagaacagaactccatcaaagccatccctgcaggagccttcacccagtacaagaaactgaagcgaatagacatcagcaagaatcagatatcgnnnnnnnnnnnnnnnnnnncttccagggcctgaaatcactcacatcgctggtcctgtatgggaacaagatcaccgagattgccaagggactgtttgatgggctggtgtccctacagctgctcctcctcaatgccaacaagatcaactgcctgcgggtgaacacgtttcaggacctgcagaacctcaacttgctctccctgtatgacaacaagctgcagaccatcagcaaggggctcttcgcccctctgcagtccatccagacactccacttagcccaaaacccatttgtgtgcgactgccacttgaagtggctggccgactacctccaggacaaccccatcgagacaagcggggcccgctgcagcagcccgcgccgactcgccaacaagcgcatcagccagatcaagagcaagaagttccgctgctcaggctccgaggattacnnnnnnnnnnnnnnnnnnnnnnnnnnnnnntggacctcgtgtgccccgagaagtgtcgctgtgagggcacgattgtggactgctccaaccagaagctggtccgcatcccaagccacctccctgaatatgtcaccgacctgcgactgaatgacaatgaggtatctgttctggaggccactggcatcttcaagaagttgcccaacctgcggaaaataaatctgagtaacaataagatcaaggaggtgcgagagggagctttcgatggagcagccagcgtgcaggagctgatgctgacagggaaccagctggagaccgtgcacgggcgcgtgttccgtggcctcagtggcctcaaaaccttgatgctgaggagtaacttgatcggctgtgtgagtaatgacacctttgccggcctgagttcggtgagactgctgtccctctatgacaatcggatcaccaccatcacccctggggccttcaccacgcttgtctccctgtccaccataaacctcctgtccaaccccttcaactgcaactgccacctggcctggctcggcaagtggttgaggaagaggcggatcgtcagtgggaaccctaggtgccagaagccatttttcctcaaggagattcccatccaggatgtggccatccaggacttcacctgtgatggcaacgaggagagtagctgccagctgagcccgcgctgcccggagcagtgcacctgtatggagacagtggtgcgatgcagcaacaaggggctccgcgccctccccagaggcatgcccaaggatgtgaccgagctgtacctggaaggaaaccacctaacagccgtgcccagagagctgtccgccctccgacacctgacgcttattgacctgagcaacaacagcatcagcatgctgaccaattacaccttcagtaacatgtctcacctctccactctgatcctgagctacaaccggctgaggtgcatccccgtccacgccttcaacgggctgcggtccctgcgagtgctaaccctccatggcaatgacatttccagcgttcctgaaggctccttcaacgacctcacatctctttcccatctggcgctgggaaccaacccactccactgtgactgcagtcttcggtggctgtcggagtgggtgaaggcggggtacaaggagcctggcatcgcccgctgcagtagccctgagcccatggctgacaggctcctgctcaccaccccaacccaccgcttccagtgcaaagggccagtggacatcaacattgtggccaaatgcaatgcctgcctctccagcccgtgcaagaataacgggacatgcacccaggaccctgtggagctgtaccgctgtgcctgcccctacagctacaagggcaaggactgcactgtgcccatcaacacctgcatccagaacccctgtcagcatggaggcacctgccacctgagtgacagccacaaggatgggttcagctgctcctgccctctgggctttgaggggcagcggtgtgagatcaacccagatgactgtgaggacaacgactgcgaaaacaatgccacctgcgtggacgggatcaacaactacgtgtgtatctgtccgcctaactacacaggtgagctatgcgacgaggtgattgaccactgtgtgcctgagctgaacctctgtcagcatgaggccaagtgcatccccctggacaaaggattcagctgcgagtgtgtccctggctacagcgggaagctctgtgagacagacaatgatgactgtgtggcccacaagtgccgccacggggcccagtgcgtggacacaatcaatggctacacatgcacctgcccccagggcttcagtggacccttctgtgaacaccccccacccatggtcctactgcagaccagcccatgcgaccagtacgagtgccagaacggggcccagtgcatcgtggtgcagcaggagcccacctgccgctgcccaccaggcttcgccggccccagatgcgagaagctcatcactgtcaacttcgtgggcaaagactcctacgtggaactggcctccgccaaggtccgaccccaggccaacatctccctgcaggtggccactgacaaggacaacggcatccttctctacaaaggagacaatgaccccctggcactggagctgtaccagggccacgtgcggctggtctatgacagcctgagttcccctccaaccacagtgtacagtgtggagacagtgaatgatgggcagtttcacagtgtggagctggtgacgctaaaccagaccctgaacctagtagtggacaaaggaactccaaagagcctggggaagctccagaagcagccagcagtgggcatcaacagccccctctaccttggaggcatccccacctccaccggcctctccgccttgcgccagggcacggaccggcctctaggcggcttccacggatgcatccatgaggtgcgcatcaacaacgagctgcaggacttcaaggccctcccaccacagtccctgggggtgtcaccaggctgcaagtcctgcaccgtgtgcaagcacggcctgtgccgctccgtggagaaggacagcgtggtgtgcgagtgccgcccaggctggaccggcccactctgcgatcaggaggcccgggacccctgcctcggccacagatgccaccatggaaaatgtgtggcaactgggacctcatacatgtgcaagtgtgccgagggctatggaggggacttgtgtgacaacaagaatgactctgccaatgcctgctcagccttcaagtgtcaccatgggcagtgccacatctcagaccaaggggagccctactgcctgtgccagcccggctttagcggcgagcactgccaacaagagaatccgtgcctgggacaagtagtccgagaggtgatccgccgccagaaaggttatgcatcatgtgccacagcctccaaggtgcccatcatggaatgtcgtgggggctgtgggccccagtgctgccagcccacccgcagcaagcggcggaaatacgtcttccagtgcacggacggctcctcgtttgtagaagaggtggagagacacttagagtgcggctgcctcgcgtgttcctaagcccctgcccgcctgcctgccacctctcggactccagcttgatggagttgggacagccatgtgggaccccctggtgattcagcatgaaggaaatgaagctggagaggaaggtaaagaagaagagaatattaagtatattgtaaaataaacaaaaaatagaacttatttttattatggaaagtgactattttcatcttttattatataaatatattacaccatctgcgtatatgtaccatatagtgagttatttttaccaagttttgtgttgtgtatttgttgtgtttttaaaaatagctgtttaaaaatttaagaaaaaaatagactaataaaaatgctttaaaacaaaaggataagaataaagaatgatagcctgtctgaggaaggaggaagatgttttcatgtttatgaaacggtattatgtcggcagtagaccaagagctgctcattgagatcagaaaaaggaataagaggaagagagagaaggaaaagacctttgtttcttgttttttaactcccttttatttttcctcccctaaaattacccagcttttcggagtcctggatgtcagtgcccaaaatgcccagttcttccaggaaaagctgctgagccctggccttctcagtctcactgccactcaaaaatattgctgtccctgtctgtcccagaccccccttcagggtatctgaacccactgggggacccctcttctccttcctgggtggccctggcttccgtatctgaacccactgggggacccctcttctccttcctggctggccctggcttccaatcgaggactgactattgaagtctgctacaggtgtcatttggaactgtcttaccaaattttaaaacagctgctatttttcctgctcctccccaggagaggggtcttcctagaggaggcgagggaagagaatatcatggtgtctcctcaggacccatgcactggccctctctcctccttccaggtaatttttcattggaatgtatcccagtagagaaggtagtcagcccttcttggaagcggaaggctgggagccaagtcaagtctgcccacagcgctagatgtccaactctggaaggttcttggaggctcttgttgtaagacaggcctctgccacctgatcctccaggtcaccagcatgacgatagagactccttgcccatctgtgacactttccaatgcatatccaaactttaccttattttatctatgcaacccctgcctccctgggaaggataagggagtagagctgggttcactaagaaggaagtttaggccctcacaggctctggaacttgccttaagccacacaccagataagtggaggagccagaccagaagtccagacccaaagcttgagattcttcctctagaatgggtgagcacaggtgattcaggcggcttaaatccatcagagcagccctgccggaaaaggaaataatatgatgttttttcctgctcttgttctgccttgctcactccttctccctccgcagtatctggaaagattctggagaccagggcttatgcatctagggaaagtgaccaagggcagcctatccagcctctgcctccattcctgaaggggacttccctgcccctgtttctttccatgtctctccctccctcactcccatttgcccccttccaccccatcaggttagccacatatcttccagggctcagctgttcacaccaactccctggctcttatcatccatccctccttcccccaggagcttccactgtaggagtttcagggagaagagtttggaattcattggacctttcagccctcaggttccctagaggagcctagttgatctgtgagtaccaatggtgggccaaagacgcagggaataatgaagggagaaagaaaagaaaggaagatggaggaaaacgaagcaactggaagaagaaggaagggatggaggggatgaagagaagggagagagggatatagctgaggaatttatctaaaaatgtgcatgtaaatctccattatgttccaggtactgtgccttatgatggctttgttttttgttgtcattagagacaaggtcttgctttgtcacccaggctggagtagagtggttcgatcatagctcaccacagcctcaacctcctaggctcaagccatcttcctgcctcagtctcccaaaatgctgggattacaggtgtgagccactatgctcagcctgtttcaaacattattataatagcagatttatttagtactttattatacatcagataccactctaattgtgaaatagatatatattcatttaattattgaaacaaccatgtagttaaaacactattaactcattttacagttgagtagactgagacacagagaagttaaagaacttgcccaagagtaaatgtctaataaaccgtagagccaggatctgggcccaggctgtctgactccagaacttgctcactcaaccactaaaccatcctgcttctcatgggaaagaaacacatcctgcctttgaggatcctacagcctgtgacaaaaacagtcataaaaatggacaattgccttattacacaaggagctcttaagtggcaatacaagcaatggaagtggctgtccagaggagggaacttctagtcctaggtctttaaggatgaataggagtttgccagagtgagaaagggaattgaactttcctgggagtggccttttaaaaagcaatgagatatggccaggcctggcttgtttggggaagagtcaaaatctagggtggcaagagtatgggaagcacactgaggagcagagagaaatggggtaggtaggaaggtagggttttgaccacaaagagctgtgcatgctaaactgggccacaggtgccagcagggttgtttgaggaagggaagagcaagacaagctctggtttaggaagagagctgtggcagcataaaggcctgaaagaggagacagagctgtcacccaaaatggacttgagagctccctgtggtttactctgtggctagaaaacactgccggccagatggatcacaaatgtctatggtagcttagaagctctgctcttgaagaggatcctgggatctgcccaacacccttcccaacctccatttccccatccccacctccattgccccatcccccctctccccctaggcaggtggatctgagccttatcccaccaccaatgcccctgctagcctctccccacccagcccagagcctactcagcctgccatctcaagagccccaccgagggtcactggcttcctgggaggagtcaccaggctgccagctttccctctgcctccccaaggaacctgagacctccctctgctcatcaccctgggcccaatcctgaatccagcccccatcaaccaagacagcaaaagggccaggtctgtcccttataattttgagccttctccctcaagtttggaagccctggactccacagcaaatgcccaaatgcaaggaccattaagaaaattctccccgaaatgaggctcctctaacaaatgatgattaaaacgctctctccttgagcagtcacattctagaaacaggacattccatgaggcaggaagagttcagttaatttgctcctgaaaaagtgtggttcagtgtttgtgtggcaatgtacgtgggcagaagaggccgctcaagctgtgtcccccctgagcaggattcaggaaagggaaaagaagttctcttcaactcagccaaggggccgtacgatggccgatgagattatgtatttaaaagttctttgtaaagtgtaaactaaaaaccttaaatgtaagatgctgttgttattattactgttgttgttgctgttatggacatgccaaaaggcccttgttagaagacagttttgccttttcaatctcatagcaaggaactcaagtctgatgcttcaaaaagatgagaagaagggcaagaagagggataactcccaagctcagagggaaaaaaaaggcgggggaaaagagccccagggtgaccttcaggaaaggccaggaccaggatgatctaacctttcccttcaccagaaacaaagctattgccagactgaaccctaaagtcaagcagtcacccactgcctttgctgggagcagaagcccatagcaacaagtgacctgcccctcagactcaagatcccagataccagagctggaggagtcatagggcattactggtaggcaggaaaactgagggtcgaacaaatggaagaatgcggtgatcatagaccaaagacacacagataattaaccccatgtgtccacccaggccaaagttcttcctgctaccccacagtggatgtccaggcagatggtccccacatgatggggaagcagagggcatagtgtggttttgtgggacttgttcatgttttgtagtgtgggctcaacagtgccaaaggaaacactagggaaaagttggtgaaacatgccagctagcaggaccagtaaaggcataatcaggcatttggcaaagcttgcttttctaattcaatgataggttctaataggaaatttttgaagattttttaaaacaatgttatagtggcacttccccagtatggaataaataacatgcattcttttttcaatatactgtcatattcagatgtcattaaaataaatggatgagtcacagaggagctatcagatgctctcatgactaccataactcaaaaaaaaaaaaaaaaaaaaaaaaaaaaaaaaaaaaaaaaaaaaaaaaaaaaaaaaaggt

SEQ ID NO: 5100 - DNA, 2706 bp, Homo sapiens
  misc_feature (8)..(8): n is a, c, g, or t
  misc_feature (10)..(10): n is a, c, g, or t
  misc_feature (12)..(12): n is a, c, g, or t
  misc_feature (1669)..(1729): n is a, c, g, or t
  misc_feature (1788)..(1801): n is a, c, g, or t
  misc_feature (1813)..(1849): n is a, c, g, or t
ccaaattngncntgccgggggtgtgtgtgtgtgtgcctctgctctttgtcctgagcccacgattccagagctggctggacccaaggaggtgaagagtcacttttcagccccaggaagggcaaagaagagaaaaaatcagcctgtctgctctctccttgctcaacaaggcctctaacagtcttctgtcctctattctgcacacggcatatttgggaacgagaaacccaaagttttcccaaatgaagagaactcacttgtttattgtggggatttattttctgtcctcttgcagggcagaagaggggcttaatttccccacatatgatgggaaggaccgagtggtaagtctttccgagaagaacttcaagcaggttttaaagaaatatgacttgctttgcctctactaccatgagccggtgtcttcagataaggtcacgccaaaacagttccaactgaaagaaatcgtgcttgagcttgtggcccaggtccttgaacataaagctataggctttgtgatggtggatgccaagaaagaagccaagcttgccaagaaactgggttttgatgaagaaggaagcctgtatattcttaagggtgatcgcacaatagagtttgatggcgagtttgcagctgatgtcttggtggagttcctcttggatctaattgaagacccagtggagatcatcagcagcaaactggaagtccaagccttcgaacgcattgaagactacatcaaactcattggctttttcaagagtgaggactcagaatactacaaggcttttgaagaagcagctgaacacttccagccttacatcaaattctttgccacctttgacaaaggggttgcaaagaaattatctttgaagatgaatgaggttgacttctatgagccatttatggatgagcccattgccatccccaacaaaccttacacagaagaggagctggtggagtttgtgaaggaacaccaaagacccactctacgtcgcctgcgcccagaagaaatgtttgaaacatgggaagatgatttgaatgggatccacattgtggcctttgcagagaagagtgatccagatggctacgaattcctggagatcctgaaacaggttgcccgggacaatactgacaaccccgatctgagcatcctgtggatcgacccggacgactttcctctgctcgttgcctactgggagaagactttcaagattgacctattcaggccacagattggggtggtgaatgtcacagatgctgacagtgtctggatggagattccagatgatgacgatcttccaactgctgaggagctggaggactggattgaggatgtgctttctggaaagataaacactgaagatgatgatgaagatgatgatgatgatgataattctgatgaagaggataatgatgacagtgatgacgatgatgatgaatagcccaactccaaacaattctgatgaaaacaaaatcacagcacccactaccatacagacagcacaaggtggcagcaagcaattctgccccacacccagccagctcctttcccttttccatcatctcttttcccactccctttgcgtcaggagcagcatcattcagcaaatgccttttcaaatgcagcaatcccacttagcagggacaggagaaaaattattcccatgttgannnnnnnnnnnnnnnnnnnnnnnnnnnnnnnnnnnnnnnnnnnnnnnnnnnnnnnnnnnnnagcttaacatggcagtctagggtgaacaatcccctaacacaagtttacttgtctttgannnnnnnnnnnnnnaaattgacagcnnnnnnnnnnnnnnnnnnnnnnnnnnnnnnnnnnnnncagagcccagggaagacacatgattaatgatttagctccctccatacctcgaacatcagttgggatccctcctccagccaagatgatccttcttagagaaggctcagccttggaagcaaacttataaatcatattctcatggctttgttaaacttatttcaagtgatggtcattcatatcactatgaacttggatattcaagcctttggatggctatggagagggcttgaaatgtgtacaggtgtcaccatcatttctagtatattaggaaactgggatgggaggttgatttgctctctaaacttccctctagttggcaagtctcacatattcatcagcaggagtggagggtgggggaaaactagaaagatgaaaacttttacatttttctgatgggttcatgtctctgattgggtcagctggcttcctagcctaagctgggatctgaataccccttctctgtagctgctagtgagccttcccatttagattaaagattgctttatccagcagtcaattaactctccagttatcagtactcccacaattggccagggcaacaataattggagttcatactgatgccctgaggcactgaaaaaaaaaaaaatcccaaagtgccttctgagctgtctaaaagttacattgtgcttggtagatttagtgttaagtgtgcagtataattttctaatttattttctcaatcttttagcacatgtgtaagacactgtgcaaattttttgaaaatagagcaatactttttgtggaatactagctaactaattctgtcattaaactcatattttggaaatattcagacaatgttataaaaaaaaaaaaaaaaaaaaaaaaaaaaa

SEQ ID NO: 5101 - DNA, 2810 bp, Homo sapiens
actcagtcatccaaactagtttatttttttctccagtgattatcttttaatttttaatttcgctaacaggtggttttttcgtgtttggttttttgtaaaccaaaactatactaagtatagtaattatatatatatatattttttcccctccccctcttctttcctaactaattctgagcagggtaatcagtgaacaaagtgttgaaaattgttcccagaaggtaattttcatagatgtttgcattagctccatagcaaaatggaatggtacgtgacatttagggtagctgatatttttcatttcgtctaaataatttccaagaactagagtatggtgtatattataaatttctttgataagatgtattttgaatgtcttttaatcttcctcctcctctccaaaaaaatcagaaacctctttaagaaaacatgtaggttatatatgctagaattgcatttaatcactgtgaaaagactggtcagcctgcattagtatgacagtaggggggctgttagaattgctgctatactggtggtatggattatcatggcattggaattttcatagtaaaagcagatccaatttctttgtggtacctgcagtttacaaaataatttgacttcagtgagcatattggtatctggatgttccaatttagaactaaaccatatttattacaaaaagatattaatccctctactcccaggttccctttatatgttaagatataatggctttgaggggggaaaaaataaacctaggggagaggggagtttcctgtagtgctgtttcattagaggatttcagtaaattaaattccacagctaattcaataaataatggtacatttaagtgttctgattttaataatatatttcacatttatccacacagtaacaatgtaatatgttaatgtaaataaaattggttttgatactcagaaataacaagaatttaattttttaaatttgtttacagtcctgggaaaagtaagaattatttgccaaaataagaggaaagaaaaccttagtattattaatgagtttaccatagaattgttggaaatactgaagacaggtgcaatttactaaacttttgtttttaaactattgtagaggctgcattagaagaaaatgtttataatgacagagcaactatgactatataaaaaagctgaaattagaactgtgtttagaaatagatcagtaacccagtgccaaggatgccaagctgccaccatggtcttggctctcccacaacccagtgtttctggggtaagtttcacagtttctaggccctggaatagcaggcagtgtaagcctttgataactttagttcgatgtttttcttgtttttgtttgttggtttggtgcatatgatagtgggtgttatgctattttgctcttcccatcaaaataaagaaacttccagaggtttactgttaaaaatactgatatttccataaacgggtttaccaagggtgtagtatttcataccgcctgaaatgatcagcattggcacaaatcaaaattcagccgcctttgaaatgcaaaaatacctttgactagtaagtacatcctaggagtttgaaaacttaactaaggtttaaaatttaccttgtttaaagaacttctgacttttgaggaaaatctagctttccaagtaactaaaatgtacatgagataaacctctcaccactatgtgtcccttgagaaatgcaacacttttttagtcttcatacttgtaatctataaaagaaattctgaagtttagaccaagttgcccatttctgcgtaattgacataagttctgttaaaaatattataagtaattcgtttcggtttgtagatgtttcccctgacttgttaaagaggaaaccaggaactcagtcatgtttttgtcctggataatctacctgttatgccagtactcccatccgaggggcatgcccttagttgcccagatggagatgcagttcagtagatttggggcaaagtggctacagctctgtcttccattcactcaacacctgttcatgactgagccaggtgcccaggacacatcctaaacagtcagcttctatcctgtgtcctagtcggggagacagagtgccagccagcaaccctcccaggtttgtaggttttaggggttttcagttttgtttgggttttttgttttttgtttttgtttctacatccttccccgactcccaggcataatgaggcatgtcttactcaatgttatgcaatggatttaggcaaaaattcattcttagtgtcagccacacaattttttttaatgcagtatattcacctgtaaatagtttgtgtaaaatttgacaaaaaaagtatatttactatactgtaaatatatgtgatgatatattgtattattttgcttttttgtaaagcagttagttgctgcacatggataacaacaaaaatttgattattctcgtgttagtattgttaacttctttttgcgactgcgttacatcatttaaagaaaatgctgtgtattgtaaacttaaattgtatatgataacttactgtcctttccatccgggcctaaactttggcagttcctttgtctacaaccttgttaatactgtaaacagttgtacgccagcaggaaaaatactgcccaacagacaaaatcgatcattgtaggggaaaatcatagaaatccatttcagatctttattgttcctcaccccattttcctccttgtgtatgtacttcccccacccccctttttttaagtaaaatgtaaattcaatctgctctaaaaaaaaaaaaaaaaaaaaaaa

SEQ ID NO: 5102 - DNA, 3004 bp, Homo sapiens
  misc_feature (7)..(40): n is a, c, g, or t
  misc_feature (2277)..(2285): n is a, c, g, or t
agcgggnnnnnnnnnnnnnnnnnnnnnnnnnnnnnnnnnnagggaatgtcaccttctctaggactgcagacatttgtcgcttgtctgatcatgacagccaggacaggatcactctgctgctgcttctaccctgagttctgaatggacttggggctgccaggcatgacaagctccagaagtattccaggtgtacatggacggaggccccggatactcgtaccctgtcgactggtggtccctgggcatcacagcctatgagctgctgcggggctggaggccgtacgaaatccactcggtcacgcccatcgatgaaatcctcaacatgttcaaggtggagcgtgtccactactcctccacgtggtgcaaggggatggtggccctgctgaggaagctcctgaccaaggatcctgagagccgcgtgtccagccttcatgacatacagagcgtgccctacttggccgacatgaactgggacgcggtgttcaagaaggcactgatgcccggctttgtgcccaataaagggaggttgaactgcgatcccacatttgagcttgaagagatgattctagaatccaagccacttcacaaaaagaagaagcgattggcaaagaacagatccagggatggcacaaaggacagctgcccgctgaatggacacctgcagcactgtttggagactgtccgggaggaattcatcatattcaacagagagaagctcaggaggcagcagggacagggcagccagctcttggacaccgacagccgagggggaggccaggcccaaagcaagctccaggacgggtgcaacaacaacctcctcacccacacctgcacccgtggctgcagcagctgagcccacacttgttgctgctcaacaggactgcactcgtctctgccctgcccacccagagcccctctttgtgccctgatggtccctgtctcacccctgaaaacatcagatgcagaaaaagccctggacttggagctgggaagcctgggttctggtcccatctccatgactgattcacgtgtgacctcagacaagtcacgccctctctgtgcctccgttttctgcatctgccaaaggggttaaacacttctgccccacttcaaattacaagattatggggagaacccaattaggtaggaaacatgaaaaacctttgatatttataaaatcatttttacgtgcaaaatataaccttaatatttgaagtgacccccattccccaaagcaatcaaaccgtcatgactttgcaatttggcacatcctagcttgttagagggcacttccgaaaaacacagccctgacagcaaaataaaggtctgatatgttggccccttctatggaaacaacgctgccaaatcctggagcaaaacctgaagtgtcttcatgtgcattctctggcaggccacagtccttctgagcttgtaagatggtgcagcatgcagaccagacttgtccccaaggtctcagcgctgcggtctcactcctcccctcatttaagaagactatccttaccttttagtttcagcagtcctcaccaccaccatatccccagtgctgggatggcacacaggtgtccattcagatgagagttgggtcgctgagcattggttactcctgcagagtgtaatcagcaccccatccaactggcccgaaagcccagacctgcagcagaactctccaactctctatcagctttcagggttttctctcctgggaagggtgtaaaatcagcttgtcagattcttcttacagagagtatccaatcggtattggtggagcggctccctatttatacaataggaagcatgggtgcttagaaagtttatttcaggaggaaaatgggttcacacaaaaagcaaactacattctgatctgctcagggagaagcttgcctttgaactggaagatgttgggatgagcagggaaagcttagactttggagtcaggtttgtgttcagaatccagccctgctggctactaactaactgggagaccttaggcaaagcatgcaatcgctctgaatggcagtttcctcatttttaaacagggataataaaactaatattgcaggggagttacagggttaaataagatcctgtgtgtaaccccaagcattggatgactcatagaatggccttttttgtcagcataatcgtcatcattatttagatactttcttccttcactcacccagcaggtcagttttctgtgcaaacaaacctgtttaggattcttccaaatgttcttcctggggtctttgatatttnnnnnnnnncatcctgctgaagttcgactgtgtttttattttttcatccaacttccatttttcactttttacatgattactcaatccttggggctgtccatgtcatctcttagatttcttaaaagacattttaatgtatggttaggttttatatttttattttttaaaaaagaaatagtcagtgttttcctcctttcaaccgagactatttctggattgtgtgctcctcgtcagttgacttgttttgcacacttttctttacttcatgtccccatcaacaaccgtcctgctccccacctcccccaggaaataaggggcctgctcctctccctactgtgaccctggaggctcttaagatgatgatggttttttttattgggctgagttcacgaattaggggcaggagctggaagtcgccctaggaacaccagatttcctggttctgttcaagttggcatttcttgtttggaataaactatttcttggaaaaaaaaaaaaaaaaaaaaaaaaaaaaaaaaaaaaaaaaaaaaagaaaaaaaaaaaaaaaaaccaaacacaaccacacacacccaccacccaccaccctcccaacaccatcacaacaccaaccgcgcgcaccctacaaaatatttctccgagcgacccccacttaactaccacccccttttttcaaacacgcacccccataggatactttataaccgaccccccccttttaacacttctcc

SEQ ID NO: 5103 - DNA, 6194 bp, Homo sapiens
  misc_feature (332)..(348): n is a, c, g, or t
  misc_feature (1321)..(1359): n is a, c, g, or t
  misc_feature (2516)..(2555): n is a, c, g, or t
cttgactcaatcctgcaagcaagtgtgtgtgtgtccccatcccccgccccgttaacttcatagcaaataacaaatacccataaagtcccagtcgcgcagcccctccccgcgggcagcgcactatgctgctcgggtgggcgtccctgctgctgtgcgcgttccgcctgcccctggccgcggtcggccccgccgcgacacctgcccaggataaagccgggcagcctccgactgctgcagcagccgcccagccccgccggcggcagggggaggaggtgcaggagcgagccgagcctcccggccacccgcaccccctggcgcagcggcgcaggagnnnnnnnnnnnnnnnnnaacatcgaccaactctactccggcggcggcaaggtgggctacctcgtctacgcgggcggccggaggttcctcttggacctggagcgagatggttcggtgggcattgctggcttcgtgcccgcaggaggcgggacgagtgcgccctggcgccaccggagccactgcttctatcggggcacagtggacgctagtccccgctctctggctgtctttgacctctgtgggggtctcgacggcttcttcgcggtcaagcacgcgcgctacaccctaaagccactgctgcgcggaccctgggcggaggaagaaaaggggcgcgtgtacggggatgggtccgcacggatcctgcacgtctacacccgcgagggcttcagcttcgaggccctgccgccgcgcgccagctgcgaaacccccgcgtccacaccggaggcccacgagcatgctccggcgcacagcaacccgagcggacgcgcagcactggcctcgcagctcttggaccagtccgctctctcgcccgctgggggctcaggaccgcagacgtggtggcggcggcggcgccgctccatctcccgggcccgccaggtggagctgcttctggtggctgacgcgtccatggcgcggttgtatggccggggcctgcagcattacctgctgaccctggcctccatcgccaataggctgtacagccatgctagcatcgagaaccacatccgcctggccgtggtgaaggtggtggtgctaggcgacaaggacaagagcctggaagtgagcaagaacgctgccaccacactcaagaacttttgcaagtggcagcaccaacacaaccagctgggagatgaccatgaggagcactacgatgcagctatcctgtttactcgggaggatttatgtgggcatcattcatgtgacaccctgggaatggcagacgttgggaccatatgttctccagagcgcagctgtgctgtgattgaagacnnnnnnnnnnnnnnnnnnnnnnnnnnnnnnnnnnnnnnnggacatttacttggcctctcccatgacgattccaaattctgtgaagagacctttggttccacagaagataagcgcttaatgtcttccatccttaccagcattgatgcatctaagccctggtccaaatgcacttcagccaccatcacagaattcctggatgatggccatggtaactgtttgctggacctaccacgaaagcagatcctgggccccgaagaactcccaggacagacctacgatgccacccagcagtgcaacctgacattcgggcctgagtactccgtgtgtcccggcatggatgtctgtgctcgcctgtggtgtgctgtggtacgccagggccagatggtctgtctgaccaagaagctgcctgcggtggaagggacgccttgtggaaaggggagaatctgcctgcagggcaaatgtgtggacaaaaccaagaaaaaatattattcaacgtcaagccatggcaactggggatcttggggatcctggggccagtgttctcgctcatgtggaggaggagtgcagtttgcctatcgtcactgtaataaccctgctcccagaaacaacggacgctactgcacagggaagagggccatctaccgctcctgcagtctcatgccctgcccacccaatggtaaatcatttcgtcatgaacagtgtgaggccaaaaatggctatcagtctgatgcaaaaggagtcaaaacttttgtggaatgggttcccaaatatgcaggtgtcctgccagcggatgtgtgcaagctgacctgcagagccaagggcactggctactatgtggtattttctccaaaggtgaccgatggcactgaatgtaggccgtacagtaattccgtctgcgtccgggggaagtgtgtgagaactggctgtgacggcatcattggctcaaagctgcagtatgacaagtgcggagtatgtggaggagacaactccagctgtacaaagattgttggaacctttaataagaaaagtaagggttacactgacgtggtgaggattcctgaaggggcaacccacataaaagttcgacagttcaaagccaaagaccagactagattcactgcctatttagccctgaaaaagaaaaacggtgagtaccttatcaatggaaagtacatgatctccacttcagagactannnnnnnnnnnnnnnnnnnnnnnnnnnnnnnnnnnnnnnngagccacagggatgacttcctgcatggcatgggctactctgccacgaaggaaattctaatagtgcagattcttgcaacagaccccactaaaccattagatgtccgttatagcttttttgttcccaagaagtccactccaaaagtaaactctgtcactagtcatggcagcaataaagtgggatcacacacttcgcagccgcagtgggtcacgggcccatggctcgcctgctctaggacctgtgacacaggttggcacaccagaacggtgcagtgccaggatggaaaccggaagttagcaaaaggatgtcctctctcccaaaggccttctgcgtttaagcaatgcttgttgaagaaatgttagcctgtggttatgatcttatgcacaaagataactggaggattcagcaccgatgcagtcgtggtgaacaggaggtctacctaacgcacagaaagtcatgcttcagtgacattgtcaacaggagtccaattatgggcagaatctgctctctgtgaccaaaagaggatgtgcactgcttcacgtgacagtggtgaccttgcaatatagaaaaacttgggagttattgaacatcccctgggattacaagaaacactgatgaatgtaaaatcaggggacatttgaagatggcagaactgtctcccccttgtcacctacctctgatagaatgtctttaatggtatcataatcattttcacccataatacacagtagcttcttcttactgtttgtaaatacattctcccttggtatgtcactttatatcccctggttctattaaaatatccatatatatttctataaaaaaagtgtttgaccaaagtaggtctgcagctatttcaacttccttccgtttccagaaagagctgtggatattttactggaaattaagaacttgctgctgttttaataagatgtagtatattttctgactacaggagataaaatttcagtcaaaaaaccattttgacagcaagtatcttctgagaaattttgaaaagtaaatagatctcagtgtatctagtcacttaaatacatacacgggttcatttacttaaaacctttgactgcctgtatttttttcaggtagctagccaaattaatgcataatttcagatgtagaagtagggtttgcgtgtgtgtgtgtgatcatactcaagagtctaaaaactagtttccttgtgttggaaatttaaaaggaaaaaaatcgtatttcactgtgttttcaatttatattttcacaactactttctctctccagagctttcatctgatatctcacaatgtatgatatacgtacaaaacacacagcaagttttctatcatgtccaacacattcaacactggtatacctcctaccagcaagcctttaaaatgcgtttgtgtttgcttatttgttttgttcaagggttcagtaagacctacaatgttttgtatttcttgacttattttattagaaacattaaagatcacttggtagttagccacattgagaagtggttatcattgttaatgtggttaatgccaaaaagtggttaatattaataagactgtttccacaccataggcaataatttcttaatttaaaaaatctaagtatattcctattgtactaaatatttttcccaactggaaagcacttgattgtacccgtaagtgtttgagtgatgacatgtgatgattttcagaaagttgttgtttttgtttccatagcctgtttaagtaggttgtaagtttgaatagttagacatggaaattattttataagcacacacctaaagatatctttttagatgataaaatgtacacccccccatcaccaacctcacaacttagaaaatctaagttgtttgatttcattgggatttcttttgttgtgaaacactgcaaagccaatttttctttataaaaattcatagtaatcctgccaaatgtgcctattgttaaagatttgcatgtgaagatcttagggaaccactgtttgagttctacaagctcatgagagtttatttttattataagatgtttttaatataaaagaattatgtaactgatcactatattacatcatttcagtgggccaggaaaatagatgtcttgctgttttcagtattttcttaagaaattgcttttaaaacaaataattgttttacaaaaccaataattatcctttgaattttcatagactgactttgctttcgacgtagaaatttttttttcttaataaattatcactttgagaaatgaggcctgtacaaggctgataacctatatgtgatggagatcacccaatgccaagggcagaaagcaaacctagttaaataggtgagaaaaaaaataataatcccagtgccatttgtctgtgcaaagagaattaggagagaggttaatgttacttttttccattttggaaataattttaatcaagtaactcaaatgtgacaaaatttatttttattttttgtggttatattcccaacaacattaaaaaatactcgaggcataaatgtagttgtctcctactctgcttctcttactatactcatacatttttaatatggtttatcaatgattcatgtttccctcaaatagtgatggtttacacctgtcatggaaacaatcctagagagctcagagcaattaaaccactattccatgcttttaagtagttttctccacctttttcttatgagtctcactagattgactgaggaatgtatgtctaaattcctggagaagatgatatggattggaaactgaaattcagagaaatggagtgttcaatagataccacgaattgtgaacaaagggaaaattctatacaactcaatctaagtcagtccactttgacttcgtactgtctttcacctttccattgttgcatcttgaattttttaaaatgtctagaattcaggatgctaggggctacttctccaaaaaaaaaaaaaaaaaaaaaaaaaaaatgaaaatgctcaggtttgtaagaatctaatctcacttacataactaagcactccataattaagtttattgacagtacaaagggagccagaaaaaatgacatttatttcttctagatcagaaaaatttaaattaagccctgccttgctggtttagaaatatgtggggcattgttataatttattcaataacatttatgttcctttgccttcctggtgggaaacagttttatcccactaaagctagggaattagggggataaatcacaaacaaaaaaaaacggttggcagcactggaaaaaacagtaactttattggtttttggcaacctggcgtattgtgaatttggtggtggataaaaacttactttatcccttatttaccaaacatttttgtccaaatttttcctattattttaaaattggtttgcggctggtggctccatatttttaaaattatattggctacagggtcggcggtattaacaggtacaccttttttaccccctttgggagagcgtttaccattaattattacaggccactggggtaggcattagggtaatatctttttaccagagaaaggctatatctggtggaagaacgcaggggtggtatactggtaataatattccccccatggtaatcctaaatcctggataca

SEQ ID NO: 5104 - DNA, 2884 bp, Homo sapiens
aatcgctgccctcggggcctccagcgccggctctgggccgaggcagccagagcgcggaagaggcctggaaatccacgcggattcccggagacggcgcctctgctctgcgggttcgtggcgaggaagtccacccactgctcccgggcgcaggtctgcaggtccgcgcccactgcccgcggcgccactgaccatgtcggggtcatcctctcgaaggtgttcgatgaagtcattgaagtgaatctaatcgatagtgccgactacatccacctggcctttctgaagagacctgagctcgggctcaccctcaccaagcttcactgttggactctcactcactacagcaagtgtgtcttcctggatgcagacactctggtgctgtccaatgtcgatgagctgtttgacaggggagagttttctgcggccccggaccccggatggccggattgcttcaatagcggggtgtttgtcttccagccttctctccacacgcataaactcctgctacagcacgccatggaacacggcagctttgacggggcagaccaaggcttactgaatagtttcttcaggaactggtcgaccacagacatccacaagcacctgccgttcatctataacttgagtagtaacacgatgtacacttacagccctgccttcaagcaattcggttccagtgcaaaggtcgtccactttttggggtccatgaaaccttggaactacaagtacaatccacagagtggctcggtgttggagcaaggctcagtgtccagcagccagcaccaggcggcattccttcatctctggtggacggtctaccagaacaacgtgctgcccctttataaaagcgtccaagcgggggaagcacgcgcgtctcctggtcacacactttgccgcagtgatgtgggggggccgtgtgcggattcagcctctggtgttggagagccgtgtgaaaattcaacacccagtgcgggcgtgccgtgtgcaaattcaccactgggttctaaccagcctgctcagggccttccggagccgacccagatagtggatgagaccctgtccctacctgaaggacgccgttcagaagatgtcgacctggccgtctctgtttcccagatctccatcgaagagaaggtgaaggaattgagccccgaggaagagaggaggaagtgggaggaaggccgtatcgactacatggggaaggacgcgtttgctcgcatccaggagaagctggaccggttcctgcagtaatccggcagctggtgggcgttgtgtgtagttagacaatgtcctgttgggtggtcctgttgcgtggagatctcctctggtcctttcaaagggaaacgctgttgaaccttgtgcctctatttatgcttaatccatttgagtgcctcacacaaaaaacgtagagtatagaaatccaccttaaagcccctcgccccaacttctccaccaacgccttctgggctttcttcagaggtcacttctacccttgaagctgtcggcaaaagcgagcagtaataacattctagtagactctcgatggtggtctccgctcttgcccgaaggacctctgaagtacgctggagctgtgttgtacaggtgctgtgagacctaccctattcagaattaaacctcactgcaaatttcctcccatcacgaagctaacaacactaatatacgtatttagcacctctgaggctttgccatggagaccatttctgtagggctaaggaaacatttagacgtggtgactgactttcatttggacttggcgaagtgtatctgagaaacacctcggctgtggtctctctgctttaaatcctaacaggacttcctagagcgttgacagaaattctactcgtggacgttgggaagaaagattgtaggtggcttggggaatgtgggtggcttagaggatctaaaccgattcacttcctggttgagaagcaacgagggcttgctctaaatcgtttagaggataacaggatctagagatgctctctgcttgacaacaaaagtcagggtgcagtcggtccacccttgactgctcttggcttggtctctaccctcactacctcagttctcaataacttagtgaatcactgccctcctcaaagccatttccactcagctctttccagagaattctcagttttatgagacgggaaactttatttcacgagaaagcctcattgtcagaagtatcttcattcaatgggcacaatatgctgtgtatctcaccaggtagctgtcaggggccaccgagagtgtcgttaaaaatgggcatcgttgtaataaaggaggaaagtgcgacttttgaaatgtttggaaggtttatttctcatgcacattccagggaaaagcagagagtaaattagagacgggataggaaggccgtgggagaactcgatcctagcctgtgtcagctggatgtgtttacgtggagaggcgtggccactttttaggtcacctgaagcagtttagcctttggatagaggaacctgcctgaatttatggcattagtggtggcatttttttgtgtacaagatgtgggtgatggaggggctgtttctttttccgtgtgggtggttaataatcgtcagtctcggagggcgatgctcgtaggatatttcaggtgagtcagggttggatggtcatcggctttcagagggagaccacgggaatgttcagggaaacaatgtcagcttctctgaggaccagaattcatgttcacgggcagtgatgagttggcttatggagtgagtccagtctggaattccgccgtgcattctagcctgtatcatctcatttggacaaatgctggcacgttgaaattaaaatgttaaaaaacaaaaaaaaaaaaaaaaaaaaaaaaaaaaaaaaa

SEQ ID NO: 5105 - DNA, 1917 bp, Homo sapiens
gaacactcatcagtgcgcaggcgcccatcttagttggtcttctagtccggtaaacagagggcctgcccccgacagcttctgcttccgggtcacgccttgacagcggctttcaacccccacctcagcccagcaattcggcagtttggagcatgtgaacaccttgagccttgatgagttccagtatgtggtatattatgcagagcattcagagcaaatactctctctccgagcgcttaatccgaacaattgctgccatccgttccttcccacatgataatgtagaggacctcatcagagggggagcagatgtgaactgcactcatggcacactgaagcccttgcactgtgcctgtatggtgtcagatgctgactgtgtggagttacttctggaaaaaggagccgaggtgaatgccctggatgggtataaccgaacagccctccactatgcagcagagaaagatgaggcttgtgtggaggtcctattggagtatggtgcaaaccccaatgctttggatggcaacagagataccccacttcactgggcagcctttaagaacaatgctgagtgtgtgcgggctctcctagagagcggggcctctgtcaatgccctggattacaacaatgatacaccgctcagctgggctgccatgaagggaaatcttgagagtgtcagcatccttctggattatggcgcagaggtcagagtcatcaacctaataggccagacacccatctcccgcctggtggctctgctagtcaggggacttggaacagagaaagaggactcttgctttgagctcctccacagagctgttggacactttgaattgaggaaaaatggcaccatgccacgagaggtggccagagacccgcagctatgtgaaaaactgactgttctgtgctcagctccaggaactctaaaaacactcgctcgctatgccgtgcgccgtagcctgggactccagtatctccccgatgcagtgaagggccttccactgccagcttctttgagggatacctgttacttttagaatagccggagaagatgtttgcaccatcgtgctgctttttctgggtgaggttgtccctgcagtactccttgtcacagaaaacagaaaaacagttgttcctgttgtgtggtttatagatttcgaagcaacatgtcacaacaataacctccatagcacctccccttcccaaaccaaacaacccaacaaaaaaaatccctcacttttgttttctgtttattgcttacctggctttttatattgcattttgcaaaagaagaggtctccctcaatcctcccctttagggaaggagtcaacagtgtaactaaatttctctaggaagatggaaagtacttaaataatgtgtgtgtggttttcctttggggacgtggttaacggtccagaagaatcccttctagaaagcattttaggccagccatggtggctcacgtctgtaatcccaggactttgggaggctgaggcaggtggatcacctgaggtcaggagttcgagcccagcctgaccaatatgatgaaaccccgtctctactaaaaatacaaaaattagctgggcatggtggcatgcgcctgtaatcccagctactcaggaggctgagacagaagaatcgcttgaacctgtgaggcagaggttgcagtgagccaagatcgcgccattgcactccagcctggacaacaagagcaaaactgtctcaaaaaaaaaaaaaaaaaaaaaaaaaaaaaaaaaaaaagggggccggcgcaatcaccagggggcagatgcaaccccctgagagcgcccagcggataataaagcaggcggactagctcagcaccagcagggtcaagactcgggtgtaccacgaacagaaattagcgaggtataattaataaagcacacagaagcacgaga

SEQ ID NO: 5106 - DNA, 5831 bp, Homo sapiens
  misc_feature (34)..(64): n is a, c, g, or t
agattctgggcgcgggcgctcgggctgcgcgggnnnnnnnnnnnnnnnnnnnnnnnnnnnnnnncctctcttcctttacttcccttccgcttctttctcttccttctccttctttttcccccccctccccttcttcccctaacccttctacccctctcctttttctccggagggcgctaagtccgtgagcggtggcagtcgcgaccgcgggtgcatccagtttctgcgcccagattttattgatctaatccaaagtatcttataacttctggctggaattaagattcttcagcttgtctctaagcggaggatcccaggtgattttggtgtcaacacatgtttggaaagaaagaagccagaaaatattatcaaccctttgagaacacgacacaacgaactttatattttaccacttccttgaatagttgcaggagaaataacaaggcattgaagaatggcagatgaacggaaagatgaagcaaaggcacctcactggacctcagcacgctaacagaggcatctgcacactcacatccacctgagattaaggatcaaggcggagcaggggaaggacttgtccgaagcgccaatggattcccatacagggaggatgaagagggtgcctttggagagcatgggtcacagggcacctattcaaataccaaagagaatgggatcaacggagagctgatcagctgacagagaaacagcagaggaggtgtctgcaaggatagttcaagtagtcactgctgaggctgtagcagtcctgaaaggtgaacaagagaaagaagctcaacataaagaccagactgcagctctgcctttagcagctgaagaaacagctaatctgcctccttctccacccccatcacctgcctcagaacagactgtcacagtggaggaagcagcaggtggggaatcagctctggctcccagtgtatttaaacaggcaaaggacaaagtctctaattctaccttgtcaaagattcctgctttacagggtagcacaaagtccccaagatacagctcagcctgccctagcacgactaaaagggctacattttctgacagtttattaatacagcccacctcagcaggctccacagaccgtttgccatactcaaaatcagggaacaaggacggagtaaccaagagcccagaaaagcgctcttctctcccaagaccttcctccattctccctcctcggcgaggtgtgtcaggagacagagatgagaattccttctctctcaacagttctatctcttcttcagcacggcggaccaccaggtcagagccaattcgcagagcagggaagagtggtacctcaacacccactacccctgggtctactgccatcactcctggcaccccaccaagttattcttcacgcacaccaggcactcctggaacccctagctatcccaggacccctcacacaccaggaacccccaagtctgccatcttggtgccgagtgagaagaaggtcgccatcatacgtactcctccaaaatctcctgcgactcccaagcagcttcggcttattaaccaaccactgccagacctgaagaatgtcaaatccaaaatcggatcaacagacaacatcaaataccagcctaaaggggggcaggtacaaattgttaccaagaaaatagacctaagccatgtgacatccaaatgtggctctctgaagaacatccgccacaggccaggtggcggacgtgtgaaaattgagagtgtaaaactagatttcaaagaaaaggcccaagctaaagttggttctcttgataatgctcatcatgtacctggaggtggtaaagtcaagattgacagccaaaagttgaacttcagagagcatgctaaagcccgtgtggaccatggggctgagatcattacacagtccccaggcagatccagcgtggcatcaccccgacgactcagcaatgtctcctcgtctggaagcatcaacctgctcgaatctcctcagcttgccactttggctgaggatgtcactgctgcactcgctaagcagggcttgtgaatatttctcatttagcattgaaataataatatttaggcatgagctcttggcaggagtgggctctgagcagttgttatattcattctttataaaccataaaataaataatctcatccccaaaaaaaaaaaaaaaatacaattttctatttaaaaaatgaatagtacatgcagaaattgacctgatttccatttgcaacaggaagacactggctttacatgggttcaattggacaattatttttgctctgctctgttttgcatggagtattattattttaaaaattgcatttttacctttcatgtgcctgaaggctatccactacattctgaaggccttgttaaaatccaagctgctcatttcactattctgtttctgagtgagaagataaaaactggccattgtaacttatttcaggttaaattaaaccaaggagtctgattgcaggaagggaagagcttgtaagaaataagtttttttaaagtgttattttgtataaatgggaagaaagattccattaagttattaacatttgggacctggataattatatcagagtatgtcagtccaataaattatttaactaattaaaaaatagttgcaaagcatttgagctgtggttgaggaagtggtgtaaaagtgcatccattaggaatgatgcactttcattaggatggactcgtgtctgattagaatgtcagttgatcagctagatttgtgtccacactaccaggtttcacaccccctttccatctgtttgatacagtattatagatataaatatatatatatttctctgtggccatttgtgatacttcctcatatacttgaatattatacttctttattcacagtatctgtgtctcctgcaccctttggtgttgcaattttagatatgtgaaagtagatgttagcagggttctctccctatttaaaaaaaatacattaaaaaagacaaaaaattttagcatgaagttgctttctgtaacaactcaaagccgtaaccctgttttagtgccagatacaagtctctcccgtgatgctagacaaaaaattatttttctttgctttcaccaacatggagtttgtgggggtgggtccagttatacatgaaagggtttacagattgttggtttaagattatggatttatctcatttttaatcacaggatagtttggggtttattcctattattattcatgaaaccgacttaagattttttctttatttttctttttttttccatttgctaaagttgaaagttgaaactaactataatagtttgaaacatgttttctcatttttccaaatagtatctgtttattaaattctctaatagaagatgtttgtctttcttacccaaagtaaagatcccctgatcagaaagaaaaaatacaatactttgggaagctatagctataaaacacttgagacacagatatctaaatcagtttttttccaagactccaacattgcactctgtaaagtaacacactgtgatctagtattatttatcagtagataatactgttctgactgtatatacagtctagaactcacaaatcaattagttcctctcacaaatcattcatcttagacttacaaataaggaatgaaatagtcaatggcctgattaaggcaaagagctaccaggctagatggacactttttaaaaattttatctgttctttttcttgctcagggctggtaggttggatctgaaccattaaaatcaaatggtccactaggcgtatgatctctttgagccaaatcagttcctgaatataaaggaggaaatgatgaggatgtactgaggcaacggggaagtatagaaacatccaagacaaaagccaagggatgcaaaggcagagacacaggtgctttttggtgacccagtggatatggcaaccagtgtaactgccatacaagaaaccctaggagcaaacccacaccactcattctcagctaagagattttacacaggcaaacgtgtcttaaaccatctataaatcagttattttatatgacagtcaaaaccttagaaaccttaggatcattatatctattttctgcctattaattgctgtgaggtttgatttgaccaatctgggcaatttattcatcagcttcccttgaagtgcaccagaaaatagaagaaaggtgtgtggagacttagggtattttattacatgttttcatagtcttaaatagtgattaaatttctctagaaagaagttaacagctcattagaaaagttttaacctgtgaaataagtatttttctcaacattctttaaagtttttatataagttaacactaggtaaacattctgcatactagaagtcagtttattacaaatacatgtcaaaaataaagattatacaaggcaccaaactactagatttggcattaaaacaaatgtttatttctaatcacaacaaaattataatgaataaatgttcttgctttgtatggaaatacaattctttattaaagttaacagaaaggaactgatcgtttgtaccagtaaaagagagaaacacacaggttaaatatcttcttgtggggttaaggggtagaacctatcttgccttcactctcaagataacgactcaaattaagctttttgagcaccactcttgtggggacacacatacgctgatctaggaatgaaatcttcgtggtctcaattctagatctactatgccagtttctctctggctttagcctttgagaacctgtataagaatacgtaagtaatccagagctgtgaagagtttaaaggccaacttctccagtgaactcaacctctgggtcacttgcaaccagaaattggatacctcataatgatgcaggaaagacccgagttcatgatgagtttcaaaggccacgttcatttaggaaccaactctctctggatttacctgctgagttccagcagcgtgatgggctgacatcccacctacaagtatgacacctgtgtaacaccagctaggtacggctggagaaggctgaagagagaatgccattaaatggaagaatgtactgattgtagtgaccttctccacacacacacacacacacacacacacacctacagtaatacagcaagcgtggaataatcagccaatatataacattccatcagtattttattaaggaaataacctgaatgtggttgattttgacatagctgcaattacagttttcttctatttttcaagccacaataaggaaaataaactactcatggtctaaatactagagataaagtagattcatggcttggtaaggaaattttaagcattccttcaaagattgacgtgctaaaataagcattgatgttttgagtttttttacacctaggatttttagcttgggtgtgtaggtgaaggccaagactctctgcaggaaaaagcttattttcaaactcagaaaataaaatgtcaatcataaaaatctacttcaactttagcaaaaagaaaaaaaaatcaacaaaaagtatactctgtatgctgggattccgaggttccaacacactgttacaaatctgtggggggtttctttcttctgataattctagagcctgttaccatagaaaggcatttcttcaatggctggttgtagttagttcatgtttttcaatcaaatttgcaaatgtatttgttgctgtatagtgattgttttgcaaaataaaattgcttgtcccctaaaaaaaaaaaaaaaaaaaaaaaaaaaaaaaaaaaaaaaaaaaaaaaaaatataaaaaaaaattaacaaatgaaagtgataag

SEQ ID NO: 5107 - DNA, 2807 bp, Homo sapiens
tactacggcgtggccgagactagccccccgctgtgggcgggccaggagaacgccacgcccacctccgtgctcttctcctctgcctcctcctcctcctcctcttccgccaaggcccgcgctgggcccccgggcgcacaccgctcccctgccacttccgcgggacccgagctggccggactcccgaggcgccccccgggagagccgctccagggcttctctaaacttggtgggggcggcctgcggagccccggcggcgggcgggattgcatggtctgctttgagagcgaagtgactgccgcccttgtgccctgcggacacaacctgctctgcatggagtgtgcagtacgcatctgcgagaggacggacccagagtgtcccgtctgccacatcacagccacgcaagccatccgaatattctcctaagccccgtgccccatgcctccggggcccactccactgggcccaccctggacctgttttccactaaagccttttggaaagcggtgatttgaggggcaaggtgcttagagatactcgctcgctggggaaggggggagggaggcagtggtggctggagggtgcgccactttcagagcctctggtcaccctgtcctggaaagattgggagggggccagactgaaaattttactagagttacaactctgatacctcaacacacccttaaatctggaagcagctaagagaaacttttgttttgccagaggtggccactaaggcattctgacgccctctgcccacctcccccgctgtgtgtcactccaccccttcttccgaggagggggtgggtaaaagggagagggagaattaccacctgtatctagaggtgctctttgcaatccctaagccctctggtcctgacctccgacctcctaacatgaccctttacctcccaccccacccccatatcctgtttgggaaactgtcaccagtttccagcagtgtaagggagttggagtcctatcagaagttgcatagatcttctaggggttggggagagaagcatgtcaatcgtttctgtggctgaaaggctcagaagccatctgtccccacaaagctgggctagaggaatctggagaggagtcctcctctctgcccctgtcccccgcagtgtttcccttcactctctccgcctatcttcccttcctttgggatcttccctttcctcaactctttcctttccctccagctctttgctttgctttcttttggtggctgtcactcccagctctgtcttgttccttgtctttgtctttcttcccttccccctgcccctgcccctaccagcccagctttggggacaccatccttctggggagaagtagggggaggaatatttggatggtccctccattcctcttcaggcatctggaggccctctcccccactcctccaaagaaacatctcaaattattgatggaatgtatccccattctcagtgaaaatgtgaggaggggactaatactggggtaaagggtcaaacccccaccttcatcactatgggcattatatttagggagtagttcttgggctggattttctggttgtggaagtgggggcgccagagtagtgtgtctgctatttaaaggagcaggaaagggcgtgaggcaggaggagagactggtggagggaagagctgctcctcccatgcagtgcccgactccctgcacccctctcaacctgacctgaacctttattgaatccttattagcttgaatccttattagcttgaatcctccatgcaaatcatggagtctgtgtcccacctgatgtggttgaggagaagccaggtcttcaaagaggggtcagcctggggcaaagcaggactggggggaggtgggcagcagggcctattctgagaatcacatattgttacaggccttgcaccccctttgctgcttccctcctgctcatttggggctgccaccagctctccaccctcctggttccgctggccgggccaagggaggatggagggatgggagtcccaggagatccttgtaaatagtggggtgggactgttctgagtgatcacccgagcacttaaagctccagagtcccattcttcctggatggagcaggtggaggtgcagaggggatttcctcctctccttcctcctgtcgagaattaacacctctccacagccttcccctccagaacaccagccagggaggggtggggaaggaggtcacagccaagaaaactgccctgtgacgacttccctccttcccgcctatgtgagccatcctgagatgtctgtacaatagaaaccaaaccaaatgggcaccctcggttgccggggggcaggtggggaggggggtgggaagaagggatgtctgtctgtcgtccccctccccctctccactctttacccacaaaggcagaagactgttacactagggggctcagcaaattcaatcccacccttaccaattgagccaaacctagaaacaaacacaaaacacgaatagtgagagacaaaatagaggagagaaagagagcatgagagggagcgagacaggcgaccaacacagaggagagaaaacaaaaatagcaaaaaaaaaaaaaaaaaaaacaaacaaaacaacaagcatctgtgttggggcgcgccgggccccccagaaagacgtttttgaacaccactcgcgtgtgacccgcgaggccccacagagggttagcggacccgggcccaagcgggttcccccagagaacacccgggccagaacaaggcgcggggactccccgcataaaaaagcgcgcgcgggacccggaggggtcgaaaaaatc

SEQ ID NO: 5108 - DNA, 3978 bp, Homo sapiens
  misc_feature (1649)..(1663): n is a, c, g, or t
  misc_feature (1741)..(1766): n is a, c, g, or t
  misc_feature (1950)..(1988): n is a, c, g, or t
aaggtagcgaggcctgggtggggatctcaagacgagggccgccgccgctgtttttgctggagatcgcggctcggtgcaggcggcgcccatgcctcctctcctccactagcccgcgcgccagtccgcctgccggggccggctctccgcctcctgcctcccgtcgcagccgcgcagccgccgcagaacccgcggcgccaccgctcgccctccaggttctgccacttgctgggaaaacagcaacagaaggatattaaggagccacccctataatttacccagatagccccagcaaggtcaaagacatatcatgtcccaaggagaaaagctgcaggcatctgaggataaatcactgtgaaacagctttgaccataaagctgacttggaagactttgactccaaggtgcaaggtggtttggacaccctcaatattgcctgctcttttctagtcaaacctgattcatgaaatggaatgaagctgaaaaatcatctacttctttgtttgtggatttgagagaagattgggatggtcttaagtgcataaaacgagactctaactgcagcgatgagttcagatgagaagggcatttcccctgcccataaaacatccactccaacccatagaagtgcctcctcttcaacatcctcccaaagggacagtaggcagagtattcacatactggagaggactgcttcctctagcaccgagccctctgtaagtcggcaattgctagaaccggagccagtccccctctccaaggaagctgacagctgggaaattatagaagggctgaaaataggccaaaccaatgtccagaaaccagacaaacatgagggctttatgctgaagaaaagaaaatggcctttaaaaggctggcacaagcgtttttttgtcctggataatggaatgttaaagtattcaaaggcaccactcgatattcagaaaggaaaggtccatgggagcatagatgtgggactctcagtcatgtcaattaaaaagaaagctcgaagaatagaccttgacaccgaagagcacatctatcatttgaaggtgaaatcccaggactggtttgatgcatgggtctccaaactgcgacatcatcggttgtatcgtcagaatgaaattgtgagatcaccaagagatgctagttttcacatatttccttcaacgtccacagctgaatcctcaccagctgctaatgtttctgtaatggatggaaagatgcaaccaaacagctttccgtggcagtcccctttaccatgcagcaatagcctccctgcaacgtgcacaactggccagagtaaagtggcagcctggttacaggactcggaagagatggacaggtgtgcagaagatcttgcacattgccagtcaaaccttgtggaacttagcaaactcctgcaaaatttggaaatacttcagagaactcagtcagcacctaactttactgacatgcaggctaactgtgtagatatttcaaagaaagacaagcgggtcacaagacgatggagaacaaaaagtgtcagcaaagatacaaaaatacaactgcaggttcctttcagtgctaccatgtcaccagttcgcttgcattcctccaaccccaacctttgtgcagatattgaatttcagactccccctagccacctcactnnnnnnnnnnnnnnntcaacagattatacaaagctgcaagaagaattttgtctaatcgcacagaaagtgcattctcttttgaagtctgcattnnnnnnnnnnnnnnnnnnnnnnnnnnagctgaagcagatggtttccgagcaggatcacagtaaaggccacagcacgcagatggcacggctccgacagtcactgtctcaggcactcaaccagaatgctgaactaaggagtcggttgaacagaatacattcagagtctattatttgtgatcaggttgtcagtgtaaatattattcctagccnnnnnnnnnnnnnnnnnnnnnnnnnnnnnnnnnnnnnnntatcacagcaagtagccaatgagagccgcctctccatgtcggagtctgtttctgagttctttgatgcccaagaggtgctcctctctgcaagttcgtcagagaatgaggcttcagatgatgagtcttacatcagtgatgtgagtgataatatatctgaagacaacaccagtgttgcagacaatatttctcggcaaatcctgaatggggagcttacaggaggggccttccgaaatgggcgtcgagcatgcctgccagctccttgtcctgacaccagtaacattaacctgtggaatatcttgaggaacaacattggtaaagacctgtctaaagtctctatgcctgtggagctaaacgagccgctcaacaccctgcagcacctctgtgaggaaatggaatacagcgagctcctggacaaggcttcggaaactgatgatccatatgagcgcatggttctcgttgccgcatttgcagtttcaggatactgctccacctatttcagagcaggaagtaagccattcaacccagtccttggggagacttatgaatgcattagagaagacaagggattccgctttttctcagaacaggttagccatcatccacccatttctgcctgtcactgtgaatcaaagaattttgtgttttggcaagatatcagatggaaaaacaagttctgggggaagtcgatggaaatcctgcctgttggaacactgaatgtcatgcttccaaagtatggagattactatgtgtggaataaagtcaccacttgcatacacaacatcctcagtgggagaagatggatagaacattatggagaagtaaccatcagaaataccaaaagcagtgtttgcatttgcaaactcacatttgtcaaggtgaattattggaattctaacatgaatgaagtccagggggtggtgatagatcaggaggggaaggcggtgtaccggctgtttggaaagtggcatgaaggactctactgtggtgtggccccctctgcaaagtgcatttggagaccaggttccatgccaacaaactatgagctgtactatggcttcacaaggtttgctattgagctcaatgagttagatccagtactaaaagatctccttccaccaacagacgcccggttccggccagatcaaagatttttggaagaaggaaatttagaagctgcagcatcagagaagcaaagagtagaggaactccagagatctcggagacgatatatggaagaaaacaatcttgaacatataccaaaattttttaaaaaagttattgatgccaatcaaagagaagcctgggtttctaacgacacctactgggagcttcgaaaggaccctgggtttagcaaagtagacagccctgttctttggtagactgggaatgtagagctagccaacatatcacattctgaatgaataaataactatgcacaattatgtttcttatagctatgtgtggtttctgggtcaactgaaaacctaccatttgcttttctattcatctttataatggactttcagaagtgcattagacaaggcccctaaccactttgggatcctttctgttttgctgcaaccatattccttaaaaaaaaaaaaaaaaaaaaaaaaaaaatccacaccgtccttggaaagcagaataaaaggagcagaatataaaatccaaagtctgaccagtttgtaaagaaaaacaaatggtaactggtgcttaaagctgatcaagaaagttaacaacaacatagaaaccacacgattgttccactgtctggaagcaccatcccctatcgcaggactcctgggccacaagcagtcggtcagtgcagacttcaagtgtgtctgtttgatgtggtgtgattgtgctggccttgtcgaaaaagatgtgatgcttctcagaacctgttccatctgtatgccattgttcatgccttaagaaatgcaaagatgtacaataaatcatttttaaaaaaaaaaaaaaaaaaaaaaaa

SEQ ID NO: 5109 - DNA, 4743 bp, Homo sapiens
  misc_feature (4703)..(4722): n is a, c, g, or t
cccattgccatcacctgttcaagacagtgagaatttatcaggggagagtggtaccttttacgaaggcactgatgataaagttcgaagagatttggccacagacctttcactgattgaagtgaaactggcagcagccggaagagtcaaagatgagttcagtgttgacaaagaagcatccgcgcatatctctggtgacaaatcaggactgagtaaggagtttgaccaagagaagaaagctaatgataggttggatactgtactagaaaagagtgaagaacatgctgattcaaaagaacatgccaagaaaactgaagaggctggtgatgaaatagaaacattcggattaggagtaacctatgagcaagctttggccaaagatttgtcaataccaacagatgcatcctctgagaaagcagagcagggaagagtggtacctcaacacccactacccctgggtctactgccatcactcctggcaccccaccaagttattcttcacgcacaccaggcactcctggaacccctagctatcccaggacccctcacacaccaggaacccccaagtctgccatcttggtgccgagtgagaagaaggtcgccatcatacgtactcctccaaaatctcctgcgactcccaagcagcttcggcttattaaccaaccactgccagacctgaagaatgtcaaatccaaaatcggatcaacagacaacatcaaacaccagcctaaaggggggcaggtacaaattgttaccaagaaaatagacctaagccatgtgacatccaaatgtggctctctgaagaacatccgccacaggccaggtggcggacgtgtgaaaattgagagtgtaaaactagatttcaaagaaaaggcccaagctaaagttggttctcttgataatgctcatcatgtacctggaggtggtaatgtcaagattgacagccaaaagttgaacttcagagagcatgctaaagcccgtgtggaccatggggctgagatcattacacagtccccaggcagatccagcgtggcatcaccccgacgactcagcaatgtctcctcgtctggaagcatcaacctgctcgaatctcctcagcttgccactttggctgaggatgtcactgctgcactcgctaagcagggcttgtgaatatttctcatttagcattgaaataataatatttaggcatgagctcttggcaggagtgggctctgagcagttgttatattcattctttataaaccataaaataaataatctcatccccaaactgtagtaattgttacaattttctatttaaaaaatgaatagtacatgcagaaattgacctgatttccatttgcaacaggaagacactggctttacatgggttcaattggacaattatttttgctctgctctgttttgcatggagtattattattttaaaaattgcatttttacctttcatgtgcctgaaggctatccactacattctgaaggccttgttaaaatccaagctgctcatttcactattctgtttctgagtgagaagataaaaactgcccattgtaacttatttcaggttaaattaaaccaaggagtctgattgcaggaagggaagagcatgtaagaaataagtttttttaaagtgttattttgtataaatgggaagaaagattcaattaagttattaacatttgggacctggataattatatcagagtatgtcagtccaataaattatttaactaattaaaaaatagttgcaaagcatttgagctgtggttgaggaagtggtgtaaaagtgcatccattaggaatgatgcactttcattaggatggactcgtgtctgattagaatgtcagttgatcagctagatttgtgtccacactaccagtttcacaccccctttccatctgtttgatacagtattatagatataaatatatatatatttctctgtggccatttgtgatacttcctcatatacttgaatattatacttctttattcacagtatctgtgtctcctgcaccctttggtgttgcaattttagatatgtgaaagtagatgttagcagggttctctccctatttaaaaaaaatacattaaaaaagacaaaaaattttagcatgaagttgctttctgtaacaactcaaagccgtaaccctgttttagtgccagatacaagtctctcccgtgatgctagacaaaaaattatttttctttgctttcaccaacatggagtttgtgggggtgggtccagttatacatgaaagggtttacagattgttggtttaagattatggatttatctcatttttaatcacaggatagtttggggtttattcctattattattcatgaaaccgacttaagattttttctttatttttcttttttttccatttgctaaagttgaaagttgaaactaactataatagtttgaaacatgttttctcatttttccaaatagtatctgtttattaaattctctaatagaagatgtttgtctttcttacccaaagtaaagatcccctgatcagaaagaaaaaatacaatactttgggaagctatagctataaaacacttgagacacagatatctaaatcagtttttttccaagactccaacattgcactctgtaaagtaacacactgtgatctagtattatttatcagtagataatactgttctgactgtatatacagtctagaactcacaaatcaattagttcctctcacaaatcattcatcttagacttacaaataaggaatgaaatagtcaatggcctgattaaggcaaagagctaccaggctagatggacactttttaaaaattttatctgttctttttcttgctcagggctggtaggttggatctgaaccattaaaatcaaatggtccactaggcgtatgatctctttgagccaaatcagttcctgaatataaaggaggaaatgatgaggatgtactgaggcaacggggaagtatagaaacatccaagacaaaagccaagggatgcaaaggcagagacacaggtgctttttggtgacccagtggatatggcaaccagtgtaactgccatacaagaaaccctaggagcaaacccacaccactcattctcagctaagagattttacacaggcaaacgtgtcttaaaccatctataaatcagttattttatatgacagtcaaaaccttagaaaccttaggatcattatatctattttctgcctattaattgctgtgaggtttgatttgaccaatctgggcaatttattcatcagcttcccttgaagtgcaccagaaaatagaagaaaggtgtgtggagacttagggtattttattacatgttttcatagtcttaaatagtgattaaatttctctagaaagaagttaacagctcattagaaaagttttaacctgtgaaataagtatttttctcaacattctttaaagtttttatataagttaacactaggtaaacattctgcatactagaagtcagtttattacaaatacatgtcaaaaataaagattatacaaggcaccaaactactagatttggcattaaaacaaatgtttatttctaatcacaacaaaattataatgaataaatgttcttgctttgtatggaaatacaattctttattaaagttaacagaaaggaactgatcgtttgtaccagtaaaagagagaaacacacaggttaaatatcttcttgtggggttaaggggtagaacctatcttgccttcactctcaagataacgactcaaattaagctttttgagcaccactcttgtggggacacacatacgctgatctaggaatgaaatcttcgtggtctcaattctagatctactatgccagtttctctctggctttagcctttgagaacctgtataagaatacgtaagtaatccagagctgtgaagagtttaaaggccaacttctccagtgaactcaacctctgggtcacttgcaaccagaaattggatacctcataatgatgcaggaaagacccgagttcatgatgagtttcaaaggccacgttcatttaggaaccaactctctctggatttacctgctgagttccagcagcgtgatgggctgacatcccacctacaagtatgacacctgtgtaacaccagctaggtacggctggagaaggctgaagagagaatgccattaaatggaagaatgtactgattgtagtgaccttctccacacacacacacacacacacacacacacctacagtaatacagcaagcgtggaataatcagccaatatataacattccatcagtattttaataaggaaattttaagcattccttcaaagattgacgtgctaaaataagcattgatgttttgagtttttttacacctaggatttttagcttgggtgtgtaggtgaaggccaagactctctgcaggaaaaagcttattttcaaactcagaaaataaaatgtcaatcataaaaatctacttcaactttagcaaaaagaaaaaaaaatcaacaaaaagtatactctgtatgctgggattccgaggttccaacacactgttacaaatctgtggggggtttctttcttctgataattctagagcctgttaccatagaaaggcatttcttcaatggctggttgtagttagttcatgtttttcaatcaaatttgcaaatgtatttgttgctgtatagtgattgttttgcnnnnnnnnnnnnnnnnnnnnctaaaaaaaaaaaaaaaaaaa

SEQ ID NO: 5110 - DNA, 1119 bp, Homo sapiens; identical to SEQ ID NO: 425

SEQ ID NO: 5111 - DNA, 403 bp, Homo sapiens
cgagaattggtcaacttcattctatagattgaaggtgtgactcaatccctaaaatctgagatttgcaacctattccaaactgagcactcaggattaccctcgtgggtgtcaagtgcctaaggagaatgttccatgtttgctagaattagaaaggggaggtaataattcttagggcctagagaaggttgggctagcccagatgaatattttcttttttgaagtaatggattatttctgaataattcaatattatgttaggaaacactttattccaggtcagtagaaggttgtctacctaagtgcccagatgttaaataagagtagtctgtcccatagaacaacatcacatagctcttcagaaaagacttccagaaaatctgagtaacttgaatgagcactcttg

SEQ ID NO: 5112 - DNA, 2719 bp, Homo sapiens
  misc_feature (21)..(23): n is a, c, g, or t
ccacacgcgaaaaaacaacgnnnctgcatacctagctggtacggtccggaattttcccgatttagggcacgagggtgggacaaagcctggggctgggcgggggccatggcgctgccatcccgaatcctgctttggaaacttgtgcttctgcagagctctgctgttctcctgcactcagggtcctcggtacccgccgctgctggcagctccgtggtgtccgagtccgcggtgagctgggaggcgggcgcccgggcggtgctgcgctgccagagcccgcgcatggtgtggacccaggaccggctgcacgaccgccagcgcgtgctccactgggacctgcgcggccccgggggtggccccgcgcggcgcctgctggacttgtactcggcgggcgagcagcgcgtgtacgaggcgcgggaccgcggccgcctggagctctcggcctcggccttcgacgacggcaacttctcgctgctcatccgcgcggtggaggagacggacgcggggctgtacacctgcaacctgcaccatcactactgccacctctacgagagcctggccgtccgcctggaggtcaccgacggccccccggccacccccgcctactgggacggcgagaaggaggtgctggcggtggcgcgcggcgcacccgcgcttctgacctgcgtgaaccgcgggcacgtgtggaccgaccggcacgtggaggaggctcaacaggtggtgcactgggaccggcagccgcccggggtcccgcacgaccgcgcggaccgcctgctggacctctacgcgtcgggcgagcgccgcgcctacgggcccctttttctgcgcgaccgcgtggctgtgggcgcggatgcctttgagcgcggtgacttctcactgcgtatcgagccgctggaggtcgccgacgagggcacctactcctgccacctgcaccaccattactgtggcctgcacgaacgccgcgtcttccacctgacggtcgccgaaccccacgcggagccgcccccccggggctctccgggcaacggctccagccacagcggcgccccaggcccagaccccacactggcgcgcggccacaacgtcatcaatgtcatcgtccccgagagccgagcccacttcttccagcagctgggctacgtgctggccacgctgctgctcttcatcctgctactggtcactgtcctcctggccgcccgcaggcgccgcggaggctacgaatactcggaccagaagtcgggaaagtcaaaggggaaggatgttaacttggcggagttcgctgtggctgcaggggaccagatgctttacaggagtgaggacatccagctagattacaaaaacaacatcctgaaggagagggcggagctggcccacagccccctgcctgccaagtacatcgacctagacaaagggttccggaaggagaactgcaaatagggaggccctgggctcctggctgggccagcagctgcacctctcctgtctgtgctcctcggggcatctcctgatgctccggggctcaccccccttccagcggctggtcccgctttcctggaatttggcctgggcgtatgcagaggccgcctccacacccctcccccaggggcttggtggcagcatagcccccacccctgcggcctttgctcacgggtggccctgcccacccctggcacaaccaaaatcccactgatgcccatcatgccctcagacccttctgggctctgcccgctgggggcctgaagacattcctggaggacactcccatcagaacctggcagccccaaaactggggtcagcctcagggcaggagtcccactcctccagggctctgctcgtccggggctgggagatgttcctggaggaggacactcccatcagaacttggcagccttgaagttggggtcagcctcggcaggagtcccactcctcctggggtgctgcctgccaccaagagctcccccacctgtaccaccatgtgggactccaggcaccatctgttctccccagggacctgctgacttgaatgccagcccttgctcctctgtgttgctttgggccacctggggctgcaccccctgccctttctctgccccatccctaccctagccttgctctcagccaccttgatagtcactgggctccctgtgacttctgaccctgacacccctcccttggactctgcctgggctggagtctagggctggggctacatttggcttctgtactggctgaggacaggggagggagtgaagttggtttggggtggcctgtgttgccactctcagcaccccacatttgcatctgctggtggacctgccaccatcacaataaagtccccatctgatttttaaaaaaaaaaaaaaaaaaaatctgaaactccgtctcctggggctgggcaaggcatgagtctgggcctgggagtcctcgtctccacctggaacccctgacatcatcccattccttgggctgaaaggtctgggtctgggtcctctgggagttggtgtcctgggaaggggacctttgagctagttctgtgtggcttctggtcgtggaggagttcagattccccttgagggctgacctggacgtgaggaggggggacgtggtggtggctgtgaggccagagggaaggccgtgggagcacagctcttggagaggcagaggaacgaggagcgggagtagtgggatgcgggtcagacacttgcaaagggggcgggagcaa

SEQ ID NO: 5113 - DNA, 4792 bp, Homo sapiens
  misc_feature (1991)..(2012): n is a, c, g, or t
cacatttcttagcttctctgagcctccatttcagcatctgtaaaatgttactacctactttataggttttctgatgaggcttaagtgtggttgtgcatgtgaccatcttagcatagtgtgtggcaatggtaagcactcagtgctgtcagctgtttttaccgctgttattatattactgtgttttcccatgtcattaggtctgtgatccaggcttcagcagacaatccaggctgatgcttttgctgagtgcgctaagggatgctggcctggcgggatggtgaactggaagcagaaacgtcatcctctctcttccttcttgccatgcaggtgtggatgtgtgggggccgcatggaggacatcccctgctccagggtgggccatatctacaggaagtatgtgccctacaaggtcccggccggagtcagcctggcccgggtaagaaccttaagcgggtggccgaagtgtggatggatgagtacgcagagtacatttaccagcgccggcctgaataccgccacctctccgctggggatgtcgcagtccagaaaaagctccgcagctcccttaactgcaagagtttcaagtggtttatgacgaagatagcctgggacctgcccaaattctacccacccgtggagcccccggctgcagcttggggggagatccgaaatgtgggcacagggctgtgtgcagacacaaagcacggggccttgggctccccactaaggctagagggctgcgtccgaggccgtggggaggctgcctggaacaacatgcaggtattcaccttcacctggagagaggacatccggcctggagacccccagcacaccaagaagttctgctttgatgccatttcccacaccagccctgtcacgctgtacgactgccacagcatgaagggcaaccagctgtggaaataccgcaaagacaagaccctgtaccaccctgtcagtggcagctgcatggactgcagtgaaagtgaccataggatcttcatgaacacctgcaacccatcctctctcacccagcagtggctgtttgaacacaccaactcaacagtcttggaaaaattcaataggaactgagccctcatgtccccttggcaggccccccagggtctggcactcactgcagacttcctctttcaagggaggcagggcccctgtgggcactaggtgtaaaaggtgctggccaaatggttcagggtgaagagggctcttgattcaggggctggggtctgcctggtccttgagcccctgagttgtgggggtagggtgaagagcatatcccacaagaggccccacagggagcagagactgctttaatccctgctgacatcacggaaaagcaacagagccttttcaactttgtcactatgtccccttgaacattatgtgggagaacaccaaggtagcctaggccacccaaaagtgagtcctgcgaggttgcccagccctcagatggctctcctacatgatggtgctttagaaacaaaggtaaaatttgcctgtttggggcagcttttagtatcgatgccactcatctgcagcagaagagaaagaagtcctcttggggctttttagtttctgccgtcctggggggaacattgcagttactgcacagcttctgttctctgtcacaaccccaggtgatttggtccggtcaaaggccatacttggggccctaagagtgttcagtattgaatgctgatcagctgccaggtgaggagtcagaagagggagcccccctagacatttctttgcagctatggacatgcgggatatctccccctgctctctgggtatttgaaatgtcaattttagcactctccaggcacaaggacagcccagcaccagctttacagggcagtgtttcagatggccctgagcccacggaaaaggccaggtagacctccaaactagaaatgctggctgatttgccctgatccatgcttccatttccctgtctctcttccccaggcaattacnnnnnnnnnnnnnnnnnnnnnnggtgctgcgaggtgctcacctcacagagtctggaggcctccaggatcaactgtgggcaaagtgcctgcctctgacctcatcatggttctagttctcatacagaactccagaatttttaaagaactctataattggattgcaaactaggatgctacataggattctggtattccacatccaatatggatttctagaatgctgtgattaaaggagccagccaggtgtaatacagtcaaggcagcccccagcctagagacaatctgtgaaatccaaagttggtggtgttgggaaagcagggggacatgtgtccctcagctcagcagaggctgtggtacaacatggtccttggtgaagacctgcacccctggaacctcccaccatcatcacaactgtagtctcatttgcagtggagaaaagaacccgacgtcccacagccagatatacacccagctccatgccagcccttcatgtttaccttttgctttgttaattacatgtcagactcctagagggcctccagactaataggaagcatttctgtaaccaacctgccacccactgattcagaaatggaaatcacattccacaatctatggcttccaccagctagcccaggaaatacttgaaatcagcattccaattagtgttgagtctcttgattgtgtcatttaccaattaaataactgagacctaagtctgggaacagagccacgaatctgcctttgagatgctggcagatctcaaggccatcaattattgggggagggagggacaaacactcccaatcatccaccagtcagactgaatgtgtagctggcgaggaattacttccacttctggcccagcacaagccctgctttggccacctgtctgcaagagaggcggcccctgtgcttgcaacgcttacgtgttgatcccagtgtccttttccaaatgagtgctgtagctttagaagtggccctctatagaaagaagtcaaaagatgaggccccttctagaatctaggataacaagagtgttgacagtttgaggagtcgaattgagattcatcatcaaagagcaatgcagcgtcgttaaaataaaaactgtgccttttaaaaagaaaaatgcaaatatagagcaaatccctaaacttgaaaaaaaaaaaaaaaaattgctagacaaacataaaggggcagggttgtggggaggggaacgtttttggtggtgtgtgcagttcctactggatgagtgtgtgtttcttaatgtctcatttcaagcaggagatgttgggtctggagcaagatctgagactgagatgtcccccaagggtgacaggtcagatttatttcagtcagtgcaagtcacactccaaactaaaggctgggcagtgcgtttagtctgtggcctagaagacctcatcagcccccgagaggaggccttgcattacctcactgggacctgtttgggggccatccctgcggtccaccctctgaacccccagcatgtttgtcctgtttctcaccattgggttaaggggtgccgagcactagctagacttccacatagtcccaccccaagtgggcggcagtgttcctggcatgaccaggattcctgtgaaagcaggagcagcagcaagccgtcccgggcctgcctttcccatcctttggttctcctttccagtctgggttcacaccctgaaaagggatgggtgtgtcctctgagcactctggcatttgtcattgctgagcccatatcagtaggtcctgggacttgacaaagtatgtgggaggggaaggaaggacagaacttgactggctccatttcatggaccaactgatcaattgccagtactaagccactcattgttatggcttcctttttgaaaaccacctgtctcaaggattcaggtttctgctcacatccccagctgatgctcaataaaactcagccaggagcatatggagatgctgacagccaggtaatgggtgagactgtggggtcccttttcctctaaagcctttactctgaggataaggtcacaaagtagggtgtgacttgaaagtatcgtgaccatgtggcccaccagcagcctttccaaaggggaactccagagacatttcataatgcaaacagcactgttgctttaagaacaaggcctttggaggtggctaaacttgcacgcacgtgtgtgaaaagccatcccatcttctgcctccagttggagctttcagctgttaaaacagtcagaaactatgattcttccctttaggaaaaaatgctcaggcagaacggggtacatccacaggaggaatcggacgagaggatgtgacattcggtccaggagagaaagagcagtttctgtttaaagatgtaacaaatggatttccaaagtctacatgacattcacttttcaaacttcccaccagttgaatttctttttttccttaagaaacaggtgatgtcttggaaaacagtccttatgtctctctgtgcatctccatttccctagtctctggagtctcaaaaagagtggcaaagcacttacagtagtaactgaggatccgagtctctgcttcaagcgatatctaagttgacagggggggacttggattctaagagggatgatttatatttctgaagctgtagtgggacaggccagaagtgcgctggctgaacctatggtcacggaccctgtgagatcaggaatttgtcactgttggacagcctgcctggggggcggaaacaggagcctaagcaagtgtcggcgcaaagagcccgtctggaacaggggggaaaag

SEQ ID NO: 5114 - DNA, 3078 bp, Homo sapiens
  misc_feature (336)..(377): n is a, c, g, or t
  misc_feature (1110)..(1141): n is a, c, g, or t
  misc_feature (2851)..(2867): n is a, c, g, or t
ggcacgagggcgtcaggccacaccggtggtctgggctggggaccgcgggtcgggtccggtttccagggggttcctggtgctcgaggctggcggcgaggaaggaccagatggcctttgaggatgtggctgtgtacttctcccaggaggagtgggggctcctggacacagcccagagggccctgtaccgccgcgtgatgctagacaacttcgcacttgtggcctcgctgggactctccacctctcgacctcgtgtggtcatccaactggagcgtggcgaggagccctgggttcccagtggaacggacacaaccctgtccaggaccacctacaggaggnnnnnnnnnnnnnnnnnnnnnnnnnnnnnnnnnnnnnnnnnngatgtttctggagaatggccacgagctttcccagataccccacctgggatgactactagcgtcttccctgttgccggtgcctgccacagtgtaaaaagcctgcagagacaacggggtgcctccccatctcgggagagaaaacccacgggggtgtcggtgatctactgggagaggctcctgctaggctcaggcagtgggcaagccagcgtcagcctgcgactgacctccccgcttaggcctcccgagggcgtccggcttagggaaaagacactcacagagcatgcgttgctggggaggcagcccaggacgcctgagcggcagaaaccatgtgcacaggaggtccctgggagaacctttgggagcgcccaggacctggaggctgccggcggtcggggacatcaccgaatgggtgcagtttggcaggagcctcatagactcctcggtggccaggagccctcgacctgggacgagctgggcgaggctcttcacgctggggagaagtccttcgaatgcagggcgtgcagcaaagtgttcgtgaagagctccgacctcctcaagcacctacgcacccgtgtgcggcaaggccttccggcatagctcctcgctggtgcggcaccagcgcatccacacggccgagaagtccttccgctgctccgagtgcggcaaggccttcagccacggctccaacctcagccagcaccgcaagatccacgcgggtgggcgtccttatgcnnnnnnnnnnnnnnnnnnnnnnnnnnnnnnnnactcgcacctgatccagcacgagcgtacgcacacaggcgagaagcccttcgtgtgcgcgctctgcggtgctgccttcagccagggctcctcgctctttaagcaccagcgcgtgcacacaggcgagaagcccttcgcctgcccacagtgcggccgcgcctttagccacagctccaacctcacccagcaccagctcctgcacacgggcgagcggcccttccgctgcgtggactgtggcaaggccttcgccaagggcgccgtgctgctcagccaccggcgcattcacacgggcgagaagcccttcgtgtgtacgcagtgtggccgcgccttccgtgagcgcccggccctcttccaccaccagaggatccataccggcgagaagaccgtccggcgatccagggccagcctgcacccccaggccaggtctgttgccggggcatcatcagaaggtgcgccagcgaaggaaaccgagcccactcccgcctcgggcccagccgccgtctcgcagccagcggaggtctgaggtcacaggttgcagccctggccttctgtgaatcccttccacagctaaagggcatatgtcctctgcagatccacagcagagaaaaagtcccgtgcttgctagtcagggacaagggaggccctttggctgtgatttcatttgcacgtggggacaggatttgccagttcacccacagatcacacctccatccccaaagaggtagcactgcagcaacatcagggggaggacgtggtggctgaactctagtggggccgagactattcagagccagtaggaggccgacagtcacagcactgcactgtggtgcggcttcatgtgatatgacagtggatgctaaggtgagagggatgcaggcatgggttgggggtggcccagagaaacttatgacagctgtacacaaactggccgctggagagatgcccgctgagggtattctcccctcaacccactgcctctgttcatccaagacttcctaggggccagcctagcagacaagagaccacaagggactggggatcagggtctgggctctgtcagccgccacctctgggaaagagaaaaggtttgggtccactgaacatcatgtttgtagacgctgacaggtggggtcctaatgagagccaacacatgctcactgccagctcctgtcctgagtactgggaagtttctcctgaagccctgtgagatggctctgtggctggtatcccgacttggaagatgaggaaactgaggcacacggcctggcctggcttcacacacatagccgactcaggagagggatgcccatgggggaacatgtgactctcagcattggaaggacagagctaggatgatggctttccggtggcactcgttcaggtttttgcccaagtctcagcttggccaaggcctgtcactgactggtttaccaaagtcgatgtgaggaggaggctttatacctgaggggatgatgttaacttcagacaagatggagctgctcacttttgccgggtttggtggccacttcacccccaaccctgtctcacccccattatccctcctcaattggaggctggacagagctgaataggaaagacttgctattgcctaaggctatgtgtgacaccctcctgaggacctccccaccccagtgtaatggcccttcatggcagggacagaaaggtggactgggggccatttgcttcctgtnnnnnnnnnnnnnnnnngccctgtccctacctggagcctcacctccaaggaaattcatgttctccttaatggaaaaaaaaaaaaaaaaaaaaaagactaccatctgcaactcagagtaggtgttgcagtttcctgtacagcagtttggacctccagagcacagcctcttgtccctactccagagcatggttcagtcttaatagcagttcaagagcttctctgataaag

SEQ ID NO: 5115 - DNA, 1887 bp, Homo sapiens
  misc_feature (809)..(826): n is a, c, g, or t
gcagtgccctctgtccactgctctgggccattccccaatcccccctcccacttgagcccctaactcagaatctgggacccaggggcccctccctaccccagctaacctcttctggaccaggagagccaacccagatcccactacctccatgagtgctacagacaggatggggcccagagctgtgccgggtctgcggctggcactgctgttgctgctggtgctagggacacccaagtcaggggtacaggggcaggaagggctggacttccctgagtacgatggtgtggaccgtgtgatcaatgtcaatgcaaagaactacaagaatgtgttcaagaagtatgaggtgctggcactcctctaccatgaaccccccgaggatgacaaggcctcacaaagacaatttgagatggaggagctgatcctggagttagcagcccaagtcctagaagacaagggtgttggcttcgggctggtagactctgagaaggatgcagctgtggccaagaaactaggcctaactgaagtggacagcatgtatgtattcaagggagatgaagtcattgagtacgatggcgagttttctgctgacaccatcgtggagtttctgcttgatgtcctagaggaccctgtggaattgattgaaggtgaacgagagctgcaggcgtttgagaatattgaggatgagatcaaactcattggctacttcaagagcaaagactcagagcattacaaagccttcgaggatgcagctgaggagtttcatccctacatccccttcttcgccaccttcgacagcaaggtggcaaagnnnnnnnnnnnnnnnnnngaatgagattgatttctacgaggccttcatggaagagcctgtgaccatcccagacaagcccaatagcgaagaggagattgtcaacttcgtggaggagcacaggagatcaaccctgaggaaactgaagccggagagtatgtatgagacctgggaggatgatatggatggaatccacattgtggccttcgcagaggaagctgatcctgatggtttcgagttcttagagactctcaaggctgtggcccaagataacactgaaaacccagatcttagcatcatctggattgaccctgatgacttccccctgctggtcccatactgggagaagacgtttgacatcgacttgtcagccccacaaataggagtcgtcaatgttactgatgcggatagcgtatggatggaaatggacgatgaggaggacctgccttctgctgaggagctggaggactggctggaggatgtcctggagggcgagatcaacacagaggacgatgacgatgatgatgatgactagttgctatggcaaccatctttcagccccactggtcttttcatgctctctcctgccttcccttgtccttccctgagttcctccagggagactaggttattctctgccatagagctaactggggtctatatgctgggtgctgagacactgatccccctcatttgatgagcaaatgagctacttttccctagacaccaggccagctctctcttatctgacttctgtttcttatcccataacttacttgtatctattatgtgtctcttccatcactctccatactctttcttgtgattctcctctagccatatatatgggccccatctctgttctgttccctccatctatgcacagctttcccccactctctctaatcctgtatctttctgactgtcctgtccttggccagaaggaagggagaatactgtgtttgggactgtatctcagcaatcacttgttaatgtatttgggtcaaatgagaggcctcaataaagacatctggggcagcatgaaaaaaaaaaaaaaaaaaaaaaaaaaaaaaaaggaattc

SEQ ID NO: 5116 - DNA, 1378 bp, Homo sapiens
gcacgaggggccagcacagatttcttatcggcttccacactgcggagctgcagccctcagaagtaagcaaggtttcctgccgggagaaaaggatttgaagcattccagccaaaatgacggacagaagccccttcgaaaccgacatgctcaccctgacccgctacgttatggaaaaggggcgtcaggccaaagggactggggagctcacccagctgctgaactcaatgctgacggccatcaaagccatctcctcggctgtgcgcaaggccggtctggcccacctgtatggaatcgcaggaagcgttaacgtgacgggagatgaggtgaagaaactggatgtgctatccaattccctggtgatcaacatggtccaatcctcctatagtacctgcgtcctggtctcagaagagaataaggacgccatcatcaccgccaaggagaagcgggggaaatacgtggtctgctttgacccactggatggatcttccaatattgactgcctggcctccatcggaaccatctttgccatctatagaaagacctcagaggatgagccttctgaaaaggatgccctgcagtgtggccgcaatattgtggccgcaggttatgcgctgtacggtagtgcaaccctggtggctctctccacagggcaaggcgtggacctcttcatgcttgacccggctcttggtgaatttgtcctggtggaaaaagatgtcaagattaagaagaaaggaaagatttacagcctgaatgagggctatgccaagtattttgatgcggccaccactgaatatgtgcagaaaaagaaattccctgaggatggcagtgctccctatggggccaggtatgtgggctccatggtggctgacgtgcaccgcaccctggtctatggaggaatcttcctgtacccagccaaccagaagagccctaagggcaagctccggctcctgtatgaatgcaatcccgtggcctacatcattgagcaggcaggaggcttggcgaccacggggacccagcctgtactggacgtgaagcccgaggcaattcaccagcgagtccccctcattctggggtcaccagaggatgtgcaggaatatctcacctgtgtgcagaaaaatcaggcaggcagctagcgagtttgaccccacatgccctcttctgtttgttttgcaccttgtctaaggaccctaaatgaacgataaacagagatggtagctatgagtatacaaaaggtaaatccacttaatcacatacagaagagcaacaacaaactgcttacgacaggtttggaagccacaggcgattctatggtcaatgtgaaggactagaaataaaaacccacatgtggaaaaaaaaaaaaaaaaaaaaaaaaaaaaaa

SEQ ID NO: 5117 - DNA, 6792 bp, Homo sapiens
  misc_feature (1759)..(1773): n is a, c, g, or t
  misc_feature (2056)..(2077): n is a, c, g, or t
  misc_feature (3735)..(3750): n is a, c, g, or t
  misc_feature (6492)..(6504): n is a, c, g, or t
ctttatccagcctattttgttcagctacactcttacctgcttaaagccctaattccaaattggacacgagcaagacacagtaaaaataagttagttttaaaaaatcattagttgtcaagtatgttttgaacaactgttgatgcccagctaggaagtgaaatttatttaaagttagaatatctgtaactagtacataaaaaaaaaaaaaaacctaattacacattttgggagagcatagccaggaaattgcatctgtgaaaagaaaatacagattttcctctagatgagtttgtgaacgcctgtgtggccccagcgctctgagaggtggggcctagaatgagtccgagtgttctcagctcctgcagctcttaccataacaattgctgccaaccttctgggattcctgggtcctggaaacccggcagcaacactgtgtctcaagcctacagtgggcatgctggcgaggactgcaggcatggtcatgactgttttgaataattacatgcgaggaatgtttttaaccaaaggccccaaagcatccgaagcctggcttcaaggtggaggagtaaggaggatgagtctgggacgtggggtggtttcgtggcgcagacctctattgtggaagtgtcatgatcgcattcttggatattgactcgattctatatgggtctctcgaatggaacccctgcgagtagctggagaactcaaccttctagacagtgatctagatgttgacaccaaagtcagacacacctggtctcctggtgccctgcagtattatggtcgtgcggagctacaagccttctgatcacaggtgaggtcctgacttccatggcgttttctcctgtgctgggcaaggcagcgtctccctctccgcaggaaaatgcatgctgtccccataaggatgtgtgtgcgcatgggggtgcattttgtgtgcatacaatacaccaaagaacaaagaatgatggaacaaatatctgtggacccaccaccaagaactaattaatcttagcattttgtcattgctccatatcataaatgacatcattgatgaaaatttcaaagatgcaacctacgtattttgtggcttttatattttcttaaatgatgtcgttgtgcaacttgcttttttgttactatttttgagatacagtcgtgttgatgttatagctctggtgcattcatttgtaactgctgtctagtatcccactaaatatatccatggaacttacaacttatccattcacctcttgatgaatattttctccaggattttatgattacaaacaccatagggtttttaaatctgggatgcacaaccttttttttttttttttttttttgagagagtcttgctctattgcccaggctggatggagtacagtggtgtgatctcagctcactgcaacctccgcttcccagattcaagcaattctcctgcctcagcctcccaagtagctgggattacaggtgcacaccaccatgcctggctaatttttgtgtttttagtagagacggggtttcaccatgttggccaggctggttccaaactcctgacctcaggtgatccacccaccttggcctctcaaagtgttgggattacaggcgtgggccaccgcacctggccctaggatgcagggctttttaaatgctctgtgcatcatgcattgaggatagagtggaggcagcaaagggagcaccgtgggcaccagcacctgtgccctgggattgctgcagaggaagactcaccctgcagaannnnnnnnnnnnnnnaggagaggatggcatttgagggtgtgaagaaggaagagtttgatcttcccaaggctgctgcctaaactctcatgtcagtttcaacttttacaaggaaagaaattaagaaaaagaagacctgtgctggcgatcgtggaggtggaagttcaggaagtcgatgtgggtgctcgggagagggttttccaggaagtgtcctccttccagggccccctggatgccactgttgtagtaaaccttcaatcaccgaccttagaagagaaaaacgagtttccagaggacctgnnnnnnnnnnnnnnnnnnnnnntggggagttatgggacaattgttcttgtcaggatcaaccaagggcagatgctggtaacttttgcagacagtcactcggctctcagtgtcctggacgtggacggtatgaaggtgaaaggcagagcagtgaagattagaccgaagaccaaggactggctgaaaggtttgcgagaggagatcattcggaaacgagacagcatggcccccgtgtctcccactgccaactcctgtttgctggaggaaaactttgacttcacaagtttggactatgagtcagaaggggatattcttgaagacgatgaagactacttggtggatgaattcaatcatcctggggtctcggacagtgaactcgggggagacgacctctctgatgtccccggccccacagcactggctcctcccagcaagtcacctgctctcaccaaaaagaagcagcatccaacgtacaaagatgacgcggacctggtggagctcaagcgggagctggaagccgtcggggagttccgccaccgttctccgagcaggtctctgtcggtccccaaccgacctcggccacctcaacccccgcagagacccccccctccaaccggtttaatggtgaaaaagtcggcttcagatgcgtccatctcctccggcacccatgggcagtattcaattttgcagacggcaagacttctaccaggagcacctcagcaacctcccaaggctcggactggaataagtaaaccttataatgtcaagcagatcaaaaccaccaatgcccaggaggcagaagcagcaatccggtgtctcctggaagccagaggaggtgcctccgaagaagccctaagtgccgtggccccaagggaccttgaagcatcctctgaaccagagcccacaccgggggcagccaaaccagagaccccacaggcgcccccactccttccccgtcggcccccacccagagttcctgccatcaagaagccaaccttgagaaggacaggaaagcccctgtcaccggaagaacagtttgagcaacagactgtccattttacaaatcgggcccccggagacaagcgttgaggcccctcctgtcgtgacagcccctccgagtccctcctgttcccaaaccaagaacatttcagcctgggaaagctgcagagaggccaagccacaggaagccagcatcagacgaagcccctcctggggcaggagcctctgtgccaccacctctggaggcgccgcctcttgtgcccaaggtacccccgaggaggaagaagtcagcccccgcagccttccacctgcaggtcctgcagagcaacagccagcttctccagggcctcacttacaatagcagtgacagcccctctgggcacccacctgccgcgggcaccgtcttcccacaaggggactttctcagcacttcatctgctacaagccccgacagcgatggcaccaaagcgatgaagccagaggcagccccacttcttggtgattatcaggaccccttctggaaccttcttcaccaccctaaactgttgaataacacttggctttctaagagctcagaccctttggactcaggaaccaggagccccaaaagagatcccatagacccagtgtcagctggcgcttcagctgccaaggcagagctgccaccagatcatggacacaaannnnnnnnnnnnnnnngtgacaatcagtgaccaagaaaagaggacaggcactgcaggtgtttgacccactggcaaaaacatgactgagcagctttgaaggctgcagtcctatagaatgcataccttcctccctctaggcatccctccaccagaagagacatctatttaaaggcacactggccaaaacgtttgtgcatctgtcactctcgtgtagtttacaaaaatcgtgtctcttattcagtaagatggttactcagccaccaaaatatatttcactcaaggcttgtacatctgaagtttgctcttcaaggaatgggaaccttcctgttaaattcggtgtatggattttaagaaaggaatctagccaatgaggtccaagaagttctcacccattgaatttttaaatggctgttcagttcatgttgtacgtgatggaaatttgtcttttgttttatttgcattttacagatttggtataacattttggggagccacctgaaggttgatgtataaagtaaggattagaggaagaggtcgttgtgaccattagtagctgtcctggcccacttaaacaaggttacaaaaaatcagagtcggaagcagccaaataggtcaacctaatgactagactgtacattcccatgagccttcatgtttaagtgtgtacatgtgcgttaaccttgatgatgcgtgaatcccgagggagccggtggcatacaccgttagcttaaccttagcttaaactagctgaaggctcctgtgccatgtcttagacattgcatgccctatcaattactataatcctgagccatggtgtgctactgaaaccaatttttatccaccatctagtccttattaaatgaaacctcacggatcctttgttccgcttatattccatgcataccacataaaagcacacagtgcgaaaactcttgctgatacgcgatattgattctcattgttagaatatggagagtgtttcagcctcgtctgtccggctggagcttcgggatggaaagtgctatgtgtccctgcatataagaatcaccaggccagtgtttctgggtttgcttgtctatatgtttgtctatattttttgcctatacatttttcccacgtttccaacagcacttctcacctattcaataactgaaaaagacattaccatagtgctttacatttttaaagtaatgctacaaggtctggaatccatttggagcagataccgtgttttcgctatttaataagaagttcagtagtgaaatcttactgtaccgcctgttgtatctgggagcctcgtacagaggctcgcacagcagtgatcaagtgtcatcccttacgtgactgggggatgtctgtcctaaaagctgactgctaggatagtaaggatcatcttgcctgggctatgccactgtcttgttaccaattagacatctggaatttcataattagttttcattgtcactgtcaagatatattgcagattacttaaatatggccatcaaaacaaaagttacaacacgtatctcttttcatctgaaaactaatacctggaaaaggataaaaaaaaaaaaaaaatccgtgacccacagagctagacagataagatgcatagttgaccagtcataaaaggcggtgtttaggtgatcaggatgccgttggtggcatttacgtgctttatatgatttttacctccgtaacaaacacaagaaataaacagaatggtccttaacagagtttgggggagagagcaagatgggttccttggagaagctgatttgccaagatgcacatcgctattaacagccagagtcataaatgaaatgaaattgaagaattcattcaaatgctcttttccctataacctcttttctcaccaaaaaggagataaatttgaaaacagataaatgtaacaaccagtcaaagaagcaggggaaaagtaagctcctccaaagttgcttgcagtgctggaaatagatctcatttttaggttttctcttcgttccagataccaaataaatgggacagagaataaaatttttgttaaaatatgtgctcatctcctaagtagctcttcagagtctgaccgtaagtaaaaacacacagaattgtgttgactgggggaggtgaatcacaaaaaagttacgaggagtttaagagttaaatattatttgatcgtggctgtcaaatttagtgaacaacatagattggatttggagttggtagtaggtatggttctcataccagaattctcttaaaaaaaaaaaaaaaggacaatgggaattggccttatttatttttaaaatcaaggcttactagttgggtaggattcccaggttagaagcaggggttggattaaataatcttggacaatggagcagcttgccatctggggggattacattctgggggtttttcaaaatggttccggtctttgatggctaccatccaggggcttcttaatggtggacctgtgtagcctaatttgggtgcccttgcggtgtcatctaacatggtggaagttcaacgcagactgggttaagagtacttcaaaagttcaacaatgggtctctctgtgaccccaaaggctaagtccctctttaagttcaaccaatcttatacagactgtctttgcctaattcttaaaatatgttggggggcaaggatggaattaggacatcaggttaagcaattccgtgtaaaggttaacgttgttgaagttcagggccataataaaattctccctgattgtgtgtgnnnnnnnnnnnnnaagctcataaaccaaaactatggtacacaagagagtcacaactaaaaagaggagcacgcgcacgcgggaacgagacaaccggcacaacattagggggccaacgtacataacaaccccgcaagattaggagaacaacggaaagtgacaggaacacccaagagagtcggataatgaaaaaaaaaagggagggaacaacaggacaacaaaccaaatacgaccagatagagaaagcgagagcacagcaaagaacagaaaacgacaaaagaaatatgagcatcagaccgcccg

SEQ ID NO: 5118 - DNA, 662 bp, Homo sapiens
atttttgtgttttttatttattccaacagaagaactttaaaaaaactttcccatgacagcatcccatcacaatcataaggagaaaacccatagtgttaaaatttgtgaggataattctcaaattccttgtccataaacaaatatactagaagacagtagtagtaacttttgctttctaacaaaaatactccacattcggtaacagcaataatgttacaatgccttcgtaaatattccacaatcaattttatttatgcttcatgatctatttttaaaagtaatcacatttttaaacatccaaaaaagtatacggaataccagctagagtatgtttaccatgaaccagagggctttgtatagctcaacttaatctatatatatatcaaccctatagaattgctttattagcatctttatcttacagatgagaaaactaagccacagaaaggttaagtaacttgccacagtcacccagaaaagaagggggcagggctgggatatgaatccaggctgttgtgtgtaaagttcaaccctgaagcattgtgctaaggttgcctcctgttaacataaactcatgttcccatcactcagatttttttttaagagactgggtcttgctgttgttcaggcttgcgtgcagtggcacaatcatagctcactgc

SEQ ID NO: 5119 - DNA, 2732 bp, Homo sapiens
  misc_feature (237)..(251): n is a, c, g, or t
  misc_feature (416)..(438): n is a, c, g, or t
  misc_feature (1234)..(1276): n is a, c, g, or t
acattgcgctctgtgattctgaggaatacagtgtgccagcatccgatccagtctcctttcacctgcaggtgttccagaaacttcaaaatgcgtctggaagaactgaaaagattgcagaatcctctagaacaagttaatgatggaaaatattcatttgaaaatcaccagctggccatggatgcagagaataatattgaaaagtatcccctcaatctacagcccttggaatcaaaggtnnnnnnnnnnnnnnnagcatggcgagagtacctgcagcggcaggagcccctggggaagaggagcccgtccccaccctctgtctcctcagagaagctgagcagctctgtcagcatgaacaccttctccgacagcagcacacccgattaccgagaggatgggatggatctaggcagtgacgnnnnnnnnnnnnnnnnnnnnnnncgcgccagttcacagtccaactccaccaaagtgaccccttgctccgagtgcaaatcttcatcgtcgccggggggcagcctggacttggtgtctgccctggaggactatgaggagcccttcccggtctaccagaagaaggtgattgatgagtgggcgccggaggaggacggggaggaggaggaagaggaggacgagcgcgaccagcgagggtaccgggatgaccgctctccggcccgggaaccgggggacgtaagcgccaggacccgcagcggcggcggcgggggcaggagcgccaccaccgccatgccgcccccggtgcccaacggcaacctccaccggcacgacccccaggacctcaggcacaatggcaacgtggtggtggctggccggccgagctgttcccggggcccccgccgggcgatccaaaagccccagccggctgggggccggcgcagtggccgcggcccggcggctggggggctctgccttcagcccccagacggcgggacgtgcgtccccgaagagcccccggtgccacctatggattgggaggcgctggagaagcatctggccgggctgcagttccgggagcaggaggtacggaaccagggccaggcgaggaccaactccacctccgcacagaaaaatgagagagagtctatcagacagaagttggcacttggaagcttctttgatgatggcccaggaatttataccagctgtagcaaaagtgggaagccaagcctttcctcccgactgcagagtgggatgaacttgcagatatgctttgtcaacnnnnnnnnnnnnnnnnnnnnnnnnnnnnnnnnnnnnnnnnnnnagactgaaaccagcttggacacccccttgtctcccatgagcaaacagagttcttcctattctgatagagacactactgaagaggagtctgaatccttggatgacatggacttccttacaaggcaaaagaaattgcaagctgaagccaaaatggcccttgccatggccaaaccaatggccaaaatgcaagtagaagtggagaaacagaacaggaaaaagtctcccgtcgctgatcttctgccacacatgcctcatataagtgaatgcttgatgaaaagaagtttaaaacccaccgacctgagagacatgactattgggcagctacaagtgatagtcaatgatctccattcccagatagaaagcttgaatgaagagttggtccagctgcttctcatccgagatgagctgcacacagagcaggatgccatgctggtggacattgaagacttgaccagacatgctgaaagtcagcagaagcacatggcagagaaaatgcctgcaaagtgaaaagaagccattcaaccagagaacaagctagaatttattttgcttctgtggttgtaaaaatgctgttgctaaaggtggcgcagaaacaaatatcagtgttagtcattgataatgtctgaagcttaatgtccagtgattggcctttgcttcttaatttattttaattttttacttgtgccacttaatatcaggcattttaataaaatattgttacaaaaaatgtacagtactgacaccaccacaaatcatggttaataaaagagagtagttttaactttatttttatttgtttagagattttaagttggaacagtattttcccattgactacttttcattcttcactgtagttttaaagaagaactgtaaatgacggtgctatacaagtcaaaaaatacatgcctgcctcgtagtgaagttgtagctctccgtaatatgtatattttactcagttttcaacattttgtgaatgttgactacctgaagttcctttttagatgtgctattaacattctgttggattcagagggttccttgaaagttttatgtataaatatgtaaaataaaaattaaaactttgtttcataaaaaaaaaaaaaaaaaaagacaacaaaaaaagaaacaaacaaagcagcacaacacgcacagcaacaaacaacgcaccaaacacaaaaacacaccccaaaaacaaaggaggggggggccactaaaaaaaacacccccggagagggcacacaaaacataaacacgcaacaagtgcgtgcaaacaaaggggccccacaaaaaggcggatataaaacacgacggagaggggggaggcactgaacacaaagccgcgggcgagcacaaagcccccaaaggaagactcttggaagcgacacaccccccaagcgcggggcggacaacacgagggaaacacaccccagacactataccccgcggagaaaaca

SEQ ID NO: 5120 - DNA, 1354 bp, Homo sapiens
  misc_feature (529)..(557): n is a, c, g, or t
gcggacgcggggcgccagcaggtggcgctggacgcgcaacggacaaggaggcggggcctgcagctggcttggaggctccgcgctctggaggctcgagggcgccgcgtggggcccgcacctctgggcagcagcggcagccgagactcacggtcaagctaaggcgaagagtgggtggctgaagccatactattttatagaattaatggaaagcagaaaagacatcacaaaccaagaagaactttggaaaatgaagcctaggagaaatttagaagaagacgattatttgcataaggacacgggagagaccagcatgctaaaaagacctgtgcttttgcatttgcaccaaacagcccatgctgatgaatttgactgcccttcagaacttcagcacacacaggaactctttccacagtggcacttgccaattaaaatagctgctattatagcatctctgacttttctttacactcttctgagggaagtaattcaccctttagcaacttcccatcaacaatatttttataaaatnnnnnnnnnnnnnnnnnnnnnnnnnnnnncaatggtttccatcactctcttggcattggtttacctgccaggtgtgatagcagcaattgtccaacttcataatggaaccaagtataagaagtttccacattggttggataagtggatgttaacaagaaagcagtttgggcttctcagtttcttttttgctgtactgcatgcaatttatagtctgtcttacccaatgaggcgatcctacagatacaagttgctaaactgggcatatcaacaggtccaacaaaataaagaagatgcctggattgagcatgatgtttggagaatggagatttatgtgtctctgggaattgtgggattggcaatactggctctgttggctgtgacatctattccatctgtgagtgactctttgacatggagagaatttcactatattcagagcaagctaggaattgtttcccttctactgggcacaatacacgcattgatttttgcctggaataagtggatagatataaaacaatttgtatggtatacacctccaacttttatgatagctgttttccttccaattgttgtcctgatatttaaaagcatactattcctgccatgcttgaggaagaagatactgaagattagacatggttgggaagacgtcaccaaaattaacaaaactgagatatgttcccagttgtagaattactgtttacacacatttttgttcaatattgatatattttatcaccaacatttcaagtttgtatttgttaataaaatgattattcaaggaaaaaaaaaaaaaaaaaaaaaaaagaaaaacaaaaaaaag

SEQ ID NO: 5121 - DNA, 2941 bp, Homo sapiens
agtccgggggcatcgcgatgctgctgcgcctgttgctggcctgggcggccgcagggcccacactgggccaggacccctgggctgctgagccccgtgccgcctgcggccccagcagctgctacgctctcttcccacggcgccgcaccttcctggaggcctggcgggcctgccgcgagctggggggcgacctggccactcctcggacccccgaggaggcccagcgtgtggacagcctggtgggtgcgggcccagccagccggctgctgtggatcgggctgcagcggcaggcccggcaatgccagctgcagcgcccactgcgcggcttcacgtggaccacaggggaccaggacacggctttcaccaactgggcccagccagcctctggaggcccctgcccggcccagcgctgtgtggccctggaggcaagtggcgagcaccgctggctggagggctcgtgcacgctggctgtcgacggctacctgtgccagtttggcttcgagggcgcctgcccggcgctgcaagatgaggcgggccaggccggcccagccgtgtataccacgcccttccacctggtctccacagagtttgagtggctgcccttcggctctgtggccgctgtgcagtgccaggctggcaggggagcctctctgctctgcgtgaagcagcctgagggaggtgtgggctggtcacgggctgggcccctgtgcctggggactggctgcagccctgacaacgggggctgcgaacacgaatgtgtggaggaggtggatggtcacgtgtcctgccgctgcactgagggcttccggctggcagcagacgggcgcagttgcgaggacccctgtgcccaggctccgtgcgagcagcagtgtgagcccggtgggccacaaggctacagctgccactgtcgcctgggtttccggccagcggaggatgatccgcaccgctgtgtggacacagatgagtgccagattgccggtgtgtgccagcagatgtgtgtcaactacgttggtggcttcgagtgttattgtagcgagggacatgagctggaggctgatggcatcagctgcagccctgcaggggccatgggtgcccaggcttcccaggacctcggagatgagttgctggatgacggggaggatgaggaagatgaagacgaggcctggaaggccttcaacggtggctggacggagatgcctgggatcctgtggatggagcctacgcagccgcctgactttgccctggcctatagaccgagcttcccagaggacagagagccacagataccctacccggagcccacctggccacccccgctcagtgcccccagggtcccctaccactcctcagtgctctccgtcacccggcctgtggtggtctctgccacgcatcccacactgccttctgcccaccagcctcctgtgatccctgccacacacccagctttgtcccgtgaccaccagatccccgtgatcgcagccaactatccagatctgccttctgcctaccaacccggtattctctctgtctctcattcagcacagcctcctgcccaccagccccctatgatctcaaccaaatatccggagctcttccctgcccaccagtcccccatgtttccagacacccgggtcgctggcacccagaccaccactcatttgcctggaatcccacctaaccatgcccctctggtcaccaccctcggtgcccagctaccccctcaagccccagatgcccttgtcctcagaacccaggccacccagcttcccattatcccaactgcccagccctctctgaccaccacctccaggtcccctgtgtctcctgcccatcaaatctctgtgcctgctgccacccagcccgcagccctccccaccctcctgccctctcagagccccactaaccagacctcacccatcagccctacacatccccattccaaagccccccaaatcccaagggaagatggccccagtcccaagttggccctgtggctgccctcaccagctcccacagcagccccaacagccctgggggaggctggtcttgccgagcacagccagagggatgaccggtggctgctggtggcactcctggtgccaacgtgtgtctttttggtggtcctgcttgcactgggcatcgtgtactgcacccgctgtggcccccatgcacccaacaagcgcatcactgactgctatcgctgggtcatccatgctgggagcaagagcccaacagaacccatgccccccaggggcagcctcacaggggtgcagacctgcagaaccagcgtgtgatggggtgcagacccccctcatggagtatggggcgctggacacatggccggggctgcaccagggacccatgggggctgcccagctggacagatggcttcctgctccccaggcccagccagggtcctctctcaaccactagacttggctctcaggaactctgcttcctggcccagcgctcgtgaccaaggatacaccaaagcccttaagacctcagggggcgggtgctggggtcttctccaataaatggggtgtcaaccttaaaaaaaaaaaaaaaaaaaaaaaaaaaaaaaaaaaaaaaaaaaaaaaaaaaaaaaaaaaagggggggggggccaaaaaaaaaccccgggggggcccaaagcaactaagggcagcaacacactttttggtagaaagaggggcccccacatagggaggaggcgggctaaaatcacaagaaacgcgagggcgggccggtaacaacaactgtcggggcgtgcgaaacacggcgatcaccggaggacccctgtggagagcaacaacccccactgcggggggggcgacaagtgagcaacaaccaccccaagaagatataccacctggggaaaactaacacacggcgtgatggcggaaccacctatttggcccggaaaagtggccgcgattcttagaa

SEQ ID NO: 5122 - DNA, 2107 bp, Homo sapiens
  misc_feature (878)..(889): n is a, c, g, or t
  misc_feature (1458)..(1469): n is a, c, g, or t
gtctccggtgagttttgtggcgggaagcttctgcgctggtgcttagtaaccgactttcctccggactcctgcacgacctgctcctacagccggcgatccactcccggctgttcccccggaggtgagcggccctgtgggcttccccggctccccacccccatcgctagagtgctcgccgcgctagcagcctcgcgttccagggctgggggtgcgccgccgggatcctctctgatcgcccacgccccatctggggtccccattcagccgtcagccctgttttgtcctaaggtggtcctaactaggatccacgtggcccatcccacgcccacaggtgctgagttaggcatccctgccatgccctcccagagcaccttcacgatctccttgctgtcccaacacttagcgtgttgcgtgttaactaccctttgtctataaggtttgcaatgtggccctagtatcttccagggtacctaacacattgcagatattcatggtatgtttgttaaataaatgaacttgatagatttgaccctcatagagttatttggacttgcaaaaagtttgtagttaactccaatctgtgatgtgggagagacttctaggcaggttcctttctccagggcatgttcttatatttcccattacccaccacccccctgcaaaaggactgggcctatttcaggaaggtgactgatgcctgcactgtagcacaggggttgtgcattgtgccttgcaggaacaaaattttcaataaagtaaatgtttgtttgtttgtttttgagacggagttttgcttttgttgcagtgagccgagatcgcactgctgtacccagcctgggccacagtgcaagactccatctcaaaaaaaaaaagaaagnnnnnnnnnnnngtttaatgcacaggtgtgagtggattgcttatggctatgagataggttgatctcgcccttaccccggggtctggtgtatgctgtgctttcctcagcagtatggctctgacatctcttagatgtcccaacttcagctgttgggagatggtgatattttcaaccctacttcctaaacatctgtctggggttcctttagtcttgaatgtcttatgctcaattatttggtgttgagcctctcttccacaagagctcctccatgtttggatagcagttgaagaggtgtgtgggtgggctgttgggagtgaggatggagtgttcagtgcccatttctcattttacattttaaagtcgttcctccaacatagtgtgtattggtctgaagggggtggtgggatgccaaagcctgctcaagttatggacattgtggccaccatgtggcttaaatgattttttctaactaataaagtggaatatatatttctaaaaaaaaaaaaaaaaaaaaatgctcttgaaattcgtggtagggagggtcttaatttctagacctgaggtttaattttaacatctcnnnnnnnnnnnncaggaaagtgcttaaatcactttgtttaaaacatagtatcagtagacttctgaatttgggggcagaggcagttgggtctgccatgtatcaaccagttatgtgagcctagccacgattatttcagcctctgtcatgactagatctgtaaagaagaagaaaaatgatcaccacttccagcccctctccttgagtctctggggcaaagaggactatcagtccaggaggctgtgggctttttcttttgtactcttcagcgtgttttacttacccaccaaaaaggctgcttaattcagattgttctcaaagtcagttggtaaagtgtccacaccacacagatgattatatctgctctcccagatctaagcaacttggcctttactcaaaagttggaggggtttttttttcttgtatccatcacttttgtacttcctgtcccacgtacaattgtattcactcctttgcccttcagaatatatttatttacactcccatctgggcgtgtgcatcattttattaacttgactgacttttgctaaagcgcaacaatgaagtacagtgtcttctgttaagccagttttgcttcctgagtgttcttagaatgaccctaccctataagtcggtgggtcagagcataagtt

SEQ ID NO: 5123 - DNA, 3296 bp, Homo sapiens
tcgcagagccgccgatgcgtgtccagtgacccggacagcaaggcccgcgcgcggcgggggcggcggcagacgcctggtcaccgtgaccccgattttggatttaccgcttgggggctggggggatcctggatttaactggcgactgttttgggggacgccggacgccatgttgtggaaaataaccgataatgtcaagtacgaagaggactgcgaggatcgccacgacgggagcagcaatgggaatccgcgggtcccccacctctcctccgccgggcagcacctctacagccccgcgccacccctctcccacactggagtcgccgaatatcagccgccaccctactttccccctccctaccagcagctggcctactcccagtcggccgacccctactcgcatctgggggaagcgtacgccgccgccatcaaccccctgcaccagccggcgcccacaggcagccagcagcaggcctggcccggccgccagagccaggagggagcggggctgccctcgcaccacgggcgcccggccggcctactgccccacctctccgggctggaggcgggcgcggtgagcgcccgcagggatgcctaccgccgctccgacctgctgctgccccacgcacacgccctggatgccgcgggcctggccgagaacctggggctccacgacatgcctcaccagatggacgaggtgcagaatgtcgacgaccagcacctgttgctgcacgatcagacagtcattcgcaaaggtcccatttccatgaccaagaaccctctgaacctcccctgtcagaaggagctggtgggggccgtaatgaaccccactgaggtcttctgctcagtccctggaagattgtcgctcctcagctctacgtctaaatacaaagtgacagtggctgaagtacagaggcgactgtccccacctgaatgcttaaatgcctcgttactgggaggtgttctcagaagagccaaatcgaaaaatggaggccggtccttgcgggagaagttggacaagatcgggttgaatcttccggccgggaggcggaaagccgctcatgtgactctcctgacatccttagtagaaggtgaagctgttcatttggctagggactttgcctatgtctgtgaagccgaatttcctagtaaaccagtggcagaatatttaaccagacctcatcttggaggacgaaatgagatggcagctaggaagaacatgctattggcggcccagcaactgtgtaaagaattcacagaacttctcagccaagaccggacaccccatgggaccagcaggctcgccccagtcttggagacgaacatacagaactgcttgtctcatttcagcctgattacccacgggtttggcagccaggccatctgtgccgcggtgtctgccctgcagaactacatcaaagaagccctgattgtcatagacaaatcctacatgaaccctggagaccagagtccagctgattctaacaaaaccctggagaaaatggagaaacacaggaaataaaattggaacgaagaaaggttaggagagtagggaaggaacaggactgcaaaaatccttctccaccgcacagactgggaacccctcctggcctgggggaagagtttgttacctaccttactatttaaagagccttcactggttctgcatcacccgcccctggacttcttagttgtttctctagcgctgagctatctcctaactttggacctattatcagaaggtgacaagtactggctctttattcattaagctttttttttttgaaccccattctttccttctctgaaagtggtgctataagttttagaatcttttaaatacattccctgggccaacagacccacacacttagccattgaaatgtcaaattgatgtgccctagatcaacagatcaacaataccttttttttcagtgttaaggtaatggttggtttttgtgtccgctaaatatttaccttgaaaaaaagaaaagtgtgtatctagcttcttcagagatcaagtcctctggtaggaggcaaaggttctatctgcttagcaactagttaataagtggtatctgacacactctaaaccccgtgttcaaacgggggccttctggttttaggaaacttgtagaaacgaagcctgctgattgatttttttctcctttttttttttttttttttttaactttgaaagttaactcttcaaatgggagactctttgaaatgacatgttcccttaaggtactgaagctttatttgcatatttatttcagatgtttcgagtaaacttgaaaagggtaggcacgaagcaatttgttgctgcttgtcacccccaagtccccgtggaggttctgtattttaagaaacagtgcgttgagtgtacagattttatttatgcgtaatttaatggggtctgtaaatactggtgcacttcttacgacttttttgagacatgggatccaattttaatattaacttttaatggtgatggggtaatctataacacatcataaggttttattcatatatatacagggtattaagaattaagaggatgctgggctctgttcttggcttggaagattctatttaattgaaactctctgttcagaaagcaataactttgtctcgttcctgttgggctgaaccctaaggtgagtgtgcagtacagtgtgtgtgggtgaaatggagatttggaattgaactctctgcctgtaaatgttccccaaataattgttgtgtgtatgatacgtgtataataaaagtattcttgttagaattgaaaaaaaaaaaaaaaaaaaaccaaaagaaacaaagacacagaaaccaacagagaagggggcacacacgcacagaccgccacgacgagagacgacaacacagacacaccgacagccgaggagcgcgacagagcgagagacgcacacgaggggacggcacggcgaagagagcacaggaagacacgctcgtcagagtgggcacgggggcgaagcgaggacaccataggcgcccgcacgagggaaagcaacaggaatccgagcacatgaagacgcggaggaggcaccgcacgtaggagcggcggagaagacggacgaccgacggaccgcggccgcggcgaagaaccgcacgcgcacgccgaggatgaaccgcccgaagagagagggagataagacgcgacaacaaggggcggcgacgagcaaacgcaacaagaaagatcgggcaccagaggcgacgccgcgagagagcacagacccaggcagggagaagagagagaaggccaggcggagcgaaag

SEQ ID NO: 5124 - DNA, 1187 bp, Homo sapiens
aattcgcggccgcgtcgaccggctgcgagaagacgacagaggggggccatggaaacgaaagcggccaagtagagctccgtcctgacgcgccgcctcccgtgggctccggccggctaagccgcggcggacaactatgctgaaaccaagatcctcttcgtggggccttgcgagagtggaaaaactgttttggccaactttctgacagaatcttctgacatcactgaatacagcccaacccaaggagtgaggatcctagaatttgagaacccgcatgttaccagcaacaacaaaggcacgggctgtgaattcgagctatgggactgtggtggcgatgctaagtttgagtcctgctggccggccctgatgaaggatgctcatggagtggtgatcgtcttcaatgctgacatcccaagccaccggaaggaaatggagatgtggtattcctgctttgtccaacagccgtccttacaggacacacagtgtatgctaattgcacaccacaaaccaggctctggagatgataaaggaagcctgtctttgtcgccacccttgaacaagctgaagctggtgcactcaaacctggaagatgaccctgaggagatccggatggaattcataaagtatttaaaaagcataatcaactccatgtctgagagcagagacagggaggagatgtcaattatgacctagccagccttcacctgggactgccacatccccagtgaaatcagcatgtttctcggtgcagatctgaaatcacatccagctcctgatgttttcttctccctctgactgcagaggaagtgttcctacctgcaggaaggcacctgtcacgcagggcgttcactcagaccatctgtgctctgccctgagttcagttgagaaaatcctattatcaaatttggatttcctggccccagaacttcccaaagacctgtaaaatggagggatttaccacctcacatatgtccagttaaacagtttgtggacttgtaaccgtcgcagcccaatgatacaacagtagtttaatcacgtgaaaaaaaaaaaatatactaagaaaaaaaaacaatgcacaaaaaaaagaaaaaaaaaaaacatacctaaaagggggggccccctctaaaaagttcccctcgagggggcccaaggtttttaccggtaccccaagtttttcttggaacaaaggg

SEQ ID NO: 5125 - DNA, 736 bp, Homo sapiens
  misc_feature (34)..(34): n is a, c, g, or t
  misc_feature (80)..(80): n is a, c, g, or t
  misc_feature (107)..(107): n is a, c, g, or t
caactgtcaagatcgtcctgaaggagaaacatangaaagcctgtgtgcatggcgggaagacgtactcccacggggaggtngtggcacccggccttccgtgccttcgncccttgccctgcatcctatgcacctgtgaggatggccgccaggacttgccagcgtgtgacctgtcccacggagtaccccctgcccgtcacccctgagaatagtggcctgggaagtgctgcaagatttgcccagaggacaaagcagaccctggccacagtgagatcagttctaccaggtgtcccaaggcaccgggccgggtcctcgtccacacatcggtatccccaagcccagacaacctgcgtcgctttgccctggaacacgaggcctcggacttggtggagatctacctctggaagctggtaaaagatgaggaaactgaggctcagagaggtgaagtaccttgcccaaggccacacagccagaatcttccacttgactcagatcaagaaagtcaggaagcaagacttccagaaagaggcacagcacttccgactgctcgctggcccccacgaaggtcactggaacgtcttcctagcccagaccctggagctgaaggtcacggccagtccagacaaagtgaccaagacataacaaagacctaacagttgcagatatgagctgtataattgttgttattatatattaataaataagaagttgcattaccctcaaaaaaaaaaaaaaaaag

SEQ ID NO: 5126 - DNA, 2700 bp, Homo sapiens
ttttttttttttttttttttttttttttttttttttttttttttttttttttttttttttttttttttttttttttttttttttttttttttttttttttttttttttttttttttttttttttttttttttttttttagcaaaaatgtttaatctctccttaatgtgtgtgtttatttacaagtactaaatctgaagaacagtaaaataggaaatagccgtatatgtacacatctgagggccgggcccacagtcagcggtgctgcttctgcaaagagcccggctgagggtgcccgcccggaccgtccgagggatcgctcttcttctgggagggggttctgcggtgttaaaggacagctaattgtgggctttgtcttaaaaatatctctctctctaaatatatctattctagctgtgtagcaccaacgtgagccactgaatccagacagggagaaagccagggcggaggctctcagcaaggccgagccgagatggcacgccgctccgggctctctcccggactcgacgctgcaggtcgtggggcccccagcccctcaggccaaggggccagtggtcctggggctggggagcacaggggaagctcgaggtatatcaagaggccaggctcccaggccgaggcgtgagcttttccagcactcctgagccaggcgcggggagagggaggacacggagcagggtaggaggtgctgcaggaagcaagtggcggcagcagcacgccaggtgggtgccagtttcacagcacatgtgccgcagccctggctccctgcagacacagggcccatgggagccgctcaccgctgctgggcacagaacggcctccaactgcagctcctaccagggcctccagccccaggccagagctcccaggtgctgcacagttaggagcacagtgggaaccagtgacaagtagggactggggcctaactccacgacctggcagagggaggtacggagtagctcggagactgctgtcccagtagacagcacaggtagtcggcttgatccttgcgcatgtaaacagatactgctaaagtgcttgcgcctagacacagccatgtgctctgtggtggccacgccccagccacacgcccatgtgggaactgcttcatgaggcctgtggtgcacccccttcatcaccactgccgtccccaccacccgcccatgctactcacatggacaagggcagcctggcagggcagagcagagcacaaagcctaaggagagtgggggttggaactggattctgaaggtgatgcaggagcccctacctaacccgtgaggaactggaagaaccagggacttcaacctgaagccagcatccagggaagactttgggggaaactgaggttcccaccccaccatagccaggaagcatcagaagggaggtggaggcgcacccaggaacaggaatcccagccaatgctaggggctactgaaaaaaacagcccagccactgtaatatggactggcctcagctctggcccccaagactgcccagggagtaagcccaccccctcagtcccctgggggcaggggctggcccaggcctgagctgggtgtggcagcagcagaaggccccagccctggcacagtgcccacggggccaaggagctccctgagtcagcagtcactgattccacaccgacccgcgttcagggaagaggcgggtctctgtggcgtcatctggctcacgctactcaggtggggcggactgcaagactggcacaccccatggggccgagtcctctccttgggcctggccaaggacatggggctgagtctggccacagttagctgtcccttaatgtccatgggatcttcggtaccatcaaaaaagtgaccttgaaaaggggatggaccgcttgtttgcttttacaagtgactgattaattaaaaaacataaaaaagggtctaacaacctctagtattcaacacttgcagttttaaaaagatcaactcagactaaacgctagcacaatcatgcatgccccgtggtgccgcggcaccccagaggctctcagggtcagcaggaagtcctttccttgtcatgtcaaaccaaaacagcggcccgcaggtcggggggcacaggcttcagggctgctccactccagggaggctccggccactttctccacaaccatttggcattgctttcccactgccttcattttcttgttcaaatcgtctttaaaattcttcttcagttaactgtacagtaccccactggggctggagcctgaggctagagccacatatatatatatgcatatatatacatgtacagctttcttttaagaatgcattctctcttgctgagggcaagggtggacaccgctggcctccagtccctctggtcactgcccgtcactcatggcccagatagatccaggccactgcgggccagaggagccctgccacagacctcaaggcccaagcagagtgcagcagaattttttcccctaaacacaaaaacagtccccagatgtcccactgctctggaggggccaggacactgctgagatgccacatctggaagccgctggggcagggacagagagagtggagagagaggagtgctcagggtccgccctcaggggctccagggtggggagctcagcctacccttgaagacagctgccagggcagcctgtgtaggacgtcggaggggaataaataacg

SEQ ID NO: 5127 - DNA, 2091 bp, Homo sapiens
cattccggacttccttcggttacgcggccttctgtataccctatggccctgtgcagaatcggtaccttagctggccctcaggtttttttttttttttttttcttttttaaaaaaagtttattttccacactatttgtacagctgtaaactcaaggaatcatccaatacttgtacaaatctgggagaacagttaataagcaccttcagtggtttccacagtttaagaatttaccattaaaaaattttagaataaatctaataaaatgaataaaatagttataaaaatcatacaaaatcatgatgaacatttgatatagagggtttaatatgaaacgataaatacaaaaagtgagactaatttatggatttgggctacgtaaaagacctacatggtcctcgaatcttgtgattcttggggctatatttgcctctcaagacaaactccaattattcaaggaagactttctttcaattcaggttccaatgtactgcagaagcaagtgaggacaaagtcaggagaaggtggggcagagaggctgagtgtactggggtttgaggaaaagaggagagactcttttccccaaagagagtatcaggcaaattcttccatgttctcaagtataagtggtctttggcaaaatgtaccattttctttttggagttacttaagagttttacttattgctgttcttaaattccttcccctaccacttcctcttgggcttttttatttctcttgttgatcaatctcttttttgtgatacttttcattgaatcatctcgactcctttatcccatcctttactgactcaaactccttatgctgaacttttcaatccaaaatttctattgttttaggactctgggaagcagttgataaaaagataacacgagctactgatatggtcaggagatgttttctaaacaaattgtagaaatataaacatgaaatgtggcaatgatccctttaattagatcattgagcaataaaggatatgaaccattagtataaatattcaattcagtctttccggattgtgttgttagataagaatacatccaaaaagggccacagatcgagggagaaaccaaggaggggtgaggtcatggttgagtgtaaattggttctgtccatgtggaggccggaggtgagggactgtggtgggacatcatctggtgccagccccatcctgtacctcagatagggtctccgtggaaaaggagggacatcagtgcaagcagtggggctaaagaccagcacagcaacaggagactagaaccttggatgcaagtattttgtgaaaaggaggaataattagtaatctttggtataatttaaggcacatcaaaaaaatcccctattctcaaatatctgacctacaccttgaaattcctaccattggacattcttttgatttaagcctttaactaacaaatgccaatatcctactgctcaaatattgacattctatctgggaggggctgctcattatcatccaccaaatgcccatagatctctaggacagggtaggttttgatgaaaaagcagcgcatgaatattataatgggggtcttagacaagatgatgatggtgaggaactgaggagtaaaactataggactataataaagaagaaattcagagcaccaaaacaaaacattaaggaatgctaatttcctccttaactcccaacttttcctagtcaggccccagctcataggtcaagggtgcaactcaaatttgggaggttctgttcaccactggggggctagtattgggaaaaggtcctaggacactgggatgggcatgtaatcctcactcaggggtgtataagtctgtctgagggttgggggtaggggtggagggttctgtccttgtgtaggggtggagacttttctattagagaagtccagggtgcatgttttggggaacagtgagggaaaagttgttggggctcaggctgggctgggtctgggcctagtggccactcagccagaggacacttttcaatctggaccaagttgcttcaagtagagtgttgctgtgaaatacttggaaaggaaataaggcactcttgtcttcatttccgtt

SEQ ID NO: 5128 - DNA, 4537 bp, Homo sapiens
  misc_feature (4198)..(4224): n is a, c, g, or t
ctttcagtggtgttgttgaaagggcttggcagctcccaaatgtttgcagtgtccttagtcctatgagggctgccttcttcttcttcttcttcttttttttttttttttttttgctagcttttagctagtatctggaaacatctactggacatgttggactcattttctcaagaatccactttacccttcagggaagccaggaaaagaacaagcttccaaccggtacaagtctggaggaatttcacagcctctcaaactacggagtccccggcgtgcagtggagcctcgctgggggaaatgacagcttggaccatgggcgcccgcggtctggacaagcgaggaagtttctttaagctcattgacacaattgcctcggagatcggagaactgaaacaggagatggtgcggacagatgtcaacctggaaaatggcctggaacccgctgaaacccacagcatggtaagacacaaggatggtggctattccgaggaagaggacgtgaagacctgtgcccgggactcaggctatgacagcctctccaacaggctcagcatcttggaccggctcctccacacccaccccatatggctgcagctgagtctgagtgaggaggaggcagcagaggtcctgcaggcccagcctccggggatcttcctggttcataaatctaccaagatgcagaagaaagtcctctccctccgcctgccctgtgaatttggggccccactcaaggaatttgccataaaggaaagcacatacaccttttccctggaaggatcaggaatcagtttcgcagatttattccggctcattgctttctactgcatcagcagggatgttctaccatttaccttgaagttgccttatgccatttcaacagccaagtcggaggctcagcttgaagaactggcccagatgggactaaatttctggagctccccagctgacagcaaacccccgaaccttccacctccccataggcctctttcctccgacggtgtctgtcctgcctccctgcgtcagctctgccttataaatggagtgcattctatcaaaaccaggacgccttcagagctggagtgcagccagaccaacggggctctgtgctttattaatccccttttcttgaaagtgcacagccaggacctcagtggaggcctgaaacggccgagcacaaggactcccaacgcgaatggcacggagcggactcggtcccccccacccaggcccccgccacccgctattaatagtctccacacaagccctcggctggccaggactgaaacccagacgagcatgccagaaacagtcaaccataacaaacatgggaacgtagctctgcctggaacgaaaccaactcccatccctccaccccggctgaagaagcaggcttcttttctggaagcagagggcggtgcaaagaccttgagcggcggccggccgggcgcaggcccggagctggagctgggcacagctggcagcccaggtggggccccgcctgaggccgccccgggggattgcacaagggccccgccgcccagctctgaatcacggcccccgtgccatggaggccggcagcggctgagcgacatgagcatttctacttcctcctccgactcgctggagttcgaccggagcatgcctctgtttggctacgaggcggacaccaacagcagcctggaggactacgagggggaaagtgaccaagagaccatggcgccccccatcaagtccaaaaagaaaaggagcagctccttcgtgctgcccaagctcgtcaagtcccagctgcagaaggtgagcggggtgttcagctccttcatgaccccggagaagcggatggtccgcaggatcgccgagctttcccgggacaaatgcacctacttcgggtgcttagtgcaggactacgtgagcttcctgcaggagaacaaggagtgccacgtgtccagcaccgacatgctgcagaccatccggcagttcatgacccaggtcaagaactatttgtctcagagctcggagctggacccccccatcgagtcgctgatccctgaagaccaaatagatgtggtgctggaaaaagccatgcacaagtgcatcttgaagcccctcaaggggcacgtggaggccatgctgaaggactttcacatggccgatggctcatggaagcaactcaaggagaacctgcagcttgtgcggcagaggaatccgcaggagctgggggtcttcgccccgacccctgattttgtggatgtggagaaaatcaaagtcaagttcatgaccatgcagaagatgtattcgccggaaaagaaggtcatgctgctgctgcgggtctgcaagctcatttacacggtcatggagaacaactcagggaggatgtatggcgctgatgacttcttgccagtcctgacctatgtcatagcccagtgtgacatgcttgaattggacactgaaatcgagtacatgatggagctcctagacccatcgctgttacatggagaaggaggctattacttgacaagcgcatatggagcactttctctgataaagaatttccaagaagaacaagcagcgcgactgctcagctcagaaaccagagacaccctgaggcagtggcacaaacggagaaccaccaaccggaccatcccctctgtggacgacttccagaattacctccgagttgcatttcaggaggtcaacagtggttgcacaggaaagaccctccttgtgagaccttacatcaccactgaggatgtgtgtcagatctgcgctgagaagttcaaggtgggggaccctgaggagtacagcctctttctcttcgttgacgagacatggcagcagctggcagaggacacttaccctcaaaaaatcaaggcggagctgcacagccgaccacagccccacatcttccactttgtctacaaacgcatcaagaacgatccttatggcatcattttccagaacggggaagaagacctcaccacctcctagaagacaggcgggacttcccagtggtgcatccaaaggggagctggaagccttgccttcccgcttctacatgcttgagcttgaaaagcagtcacctcctcggggacccctcagtgtagtgactaagccatccacaggccaactcggccaagggcaactttagccacgcaaggtagctgaggtttgtgaaacagtaggattctcttttggcaatggagaattgcatctgatggttcaagtgtcctgagattgtttgctacctacccccagtcaggttctaggttggcttacaggtatgtatatgtgcagaagaaacacttaagatacaagttcttttgaattcaacagcagatgcttccaatcccgtcctcccggtatttctcactcctgtggatggcttcatccctgccttccttcctttctttttccttttttttttttttttttttttttacaaagagccttcatgtttttatatatttcatagaaatttttatagcagttgcaggtaaactgtcaggattggttttaaaatatttttgtaactttaaaatattctataattatgcatgtgattttaacatttaatattcaaaaataaatctcttgctggatttgagagtattgcatttttaaagtctctcttctgtaactggatgttttggcaactttgtggggagagactgctggatttcttaaagcaacgtattcctgacactggccacagaatgcctttggaaatcggatgtactgttctcttgttcacgtttagtggtgttttgctgttttgttttttaaacaaatgatgctgagaataaggagagaaatgaatgtagagagaggtagagagagaaatatgaactctaacaaaggactgaggagtgcagtctgctggttcaggctcttcaaaagatgtagaaaaagagatagaaggaaccacctatgcttaaaatactgtaaatatgcagtgaggtttggcaaaatctattccatgtgtgatttgcttgtagaaacaattttgaaagccccttgaggaaaataaaaatcaagaagaacacttttctcccttttccatacaaattaaaacttaacagcatcaaattattgggaccagaaaccaagtaatgtataatgtggcttttgttgagttaaataagatgctatataatggagaagaatttgaaaatgcacaaaaaaatcaatctacattatcagnnnnnnnnnnnnnnnnnnnnnnnnnnntatgttaaataaaaccagtttgcaggtgcacaaactatgagggtcttgtatccacgtaacacaggtagttacaaaaacatgttattgtactgtgtaaagatgcatagtcatctcatttggttggctttgtaccttgtaccttttttagccttggcttttgttgaactagaaccctcagcacatactgtgttgtacttttgtaaatgattttttaaatggaattttgcacataatacattgtaatactgtatgataatcatgtgtgaaaataatttttgaaataaaaaaaaaaaaaaaaaaaaaaaaaaaaaaa

SEQ ID NO: 5129 - DNA, 884 bp, Homo sapiens
  misc_feature (8)..(35): n is a, c, g, or t
ccttgacnnnnnnnnnnnnnnnnnnnnnnnnnnnnccggtaaatgtagatacagctgcattatggccgtggcagaacggccgatctccagcccaagatgattccagcagtggtcttgctcttactccttttggttgaacaagcagcggccctgggagagcctcagctctgctatatcctggatgccatcctgtttctgtatggaattgtcctcaccctcctctactgtcgactgaagatccaagtgcgaaaggcagctataaccagctatgagaaatcagatggtgtttacacgggcctgagcaccaggaaccaggagacttacgagactctgaagcatgagaaaccaccacagtagctttagaatagatgcggtcatattcttctttggcttctggttcttccagccctcatggttggcatcacatatgcctgcatgccattaacaccagctggccctacccctataatgatcctgtgtcctaaattaatatacaccagtggttcctcctccctgttaaagactaatgctcagatgctgtttacggatatttatattctagtctcactctcttgtcccacccttcttctcttccccattcccaactccagctaaaatatgggaagggagaacccccaataaaactgccatggactggactcaaaaaaaaaaaaaaaaaaaaaaaaaaaaaaaaaaaaaaaaaaaaaaaaaaaaaaaaaaaaaccacacgcacaacagcaacaaaaggagggagcaacgggagacgagcggagaaaaaagaccgacgaggaaagacagacagcgcaccgacaggagagacgtgccccggcacccactcgagggaacagacacagacagaaggcgacgacaaaaagagacgaagc

SEQ ID NO: 5130 - DNA, 767 bp, Homo sapiens
gaggctggagtgcggttggcatgatcatagctcactacagcttcaaactcctgagctcaagtgattctccccatttcagcttttcagctcagtaggcgtgaccataggcacctgccaccatacctggctaaattttttcactttctgtagagacagggcctcactatgtttcccagactagccttgaactcctggcctcaagcaaacctccctccttggcctcccaaagtgctgggattataggcatgagcctccacacctgcctgatctgaaaacattaataagggtataaagggcatgaatgagtaaggaagatattgtatgttttctggaagcaaagcttaggtatttcaagggatgacaattctaacgtgtctgttcgtttattggaaattgagtttaaaataccgatgggctattctggggaaaaggtaacttgaaaaacatgagctttaagtatacattaaagcccaggaacatttgagtgatcttttaaacatgaatcaggtcatgtgagtcttgctcagaaacctccaagagccacatatttcacgcacggaaagagtccaaactctaaagaccctacaaaaattggctcttgtaatctgtgtgacttcatctccagccattctccctcccattccctgttccagccaaactgttctttctccttctcaaacatgccaagcatacacctgcttcaggacatttactcttattgtgctcaccacctaaaccccttcccagatattctgtatgccagattc

SEQ ID NO: 5131 - DNA, 2417 bp, Homo sapiens
  misc_feature (180)..(194): n is a, c, g, or t
aaaagctggaaccctgcccctttggagggggaggcggcggcggcggcggcggcggcggcggcggctgcgcgggcctcgggtgcgcgggcacgcgggactcccagctgtcaatcaggcgcgggctgagctctacgaggcggagcggcggcgggtggccgacggcgatgggaccccagcgannnnnnnnnnnnnnngctggctgcacttgctccacgggtcaggggatcggagggggattgaagaatgcgccattaaaaggaaagatcaaggagtaaaccagaagaagaagaaaaagaggacttcaaagctgggaaggatgagttcttgcagcaacgtctgtgggtccaggcaggcacaggctgcagctgagggtggttaccagcgctatggagtccggtcctacctgcaccagttttatgaggactgtacagcctcaatttgggagtatgaggatgatttccagatccaaagatcacctaacaggtggagctcagtattctggaaggttggactcatctcaggtacagtttttgtgatcctcggattgactgttctggcagtgggctttcttgtgccccccaaaatcgaagcatttggcgaagccgattttgtggtggtcgacacacatgctgtccagtttaacagtgctctggacatgtacaagctggcaggagctgttctcttctgcattggaggcacgtccatggcagggtgcctgctgatgtcggtgtttgtaaagagctactccaaagaagaaaaattcctccagcagaagtttaaagaacgaatcgcagacatcaaagcccacacccagccggttacaaaagctccagggccaggggaaacaaagattccagtcactttgtccagggttcaaaatgtccagcctctactggcaacctgaaacctttcccaccccagttcttcttgtctgatttatgcccgtggttaaaaagagcaggccagttttcgagataaagaagatttggcgttgactgccctagggctgtgttcagctgtgggcaatataatgggtggactcacacttgctcagttcaggcagctctgctggagggcggtgccatgcctaagcctgtgcacatgcatccagctgcttaagatgggtgcttccttgtacccggccaccagaaaacccctggaactcctctttcatagatcgtgactttgtgttattttccgtgttgtttgaaagtgccgaacagtttagaccagctcaccaatggctaatgtggtccattttattttctaatattggtttatctaatgttttctgcgtggtgctgtcttccattcctgtctcactatgtgtaagattttgtcatatgtgttcatagaaacatggaattctctgattttgagccgaacatgagtttttagactgtatcttgacatgaggttcctgacattggatacaaagttatcagcattcacaaatctttttgttttctccattttttttccctttgagatgaagtgctgttcttttgcctaggttggagtacagcggtgaaatcatagcgcactgcagccttgaactcctgggctcaagcgatcctcccacctcagcctcccaagtagctgggactacaggcacctgccaccacccccagttaatattttttttaattttttttagaggcaggatcttgctgtccaattttttttaaaaagctaaaattgccaactttagaatcttgaccaaaaaaaattaattttaggagcatctatttatgcagtgttcaaaagtactgaattagaaaccaggaagttttagttccttctactacctgtgtgatcttggggaaattatttaacctctcagtcctaattttccccttctgtataatgggagttctggatcacaatatgtctgggctctcattacccaaacatctgagattccatttttgccatgtgtcatcgagtcgctccccaacagatgtttgtgatgtttttgtggctgtcaccatggtgggattctttcagaatgagactcctggaaattcactgagtcagcagccttcacaccatctacccttaaatatccaaccccagcaatttatacaacgctgtcatatttttaaaaaaacaaaagtaagccatcctcaaataaggaaccccttggtagatattaaccttaaaaagggttttcattctcaaacaagatgctttgttctccaacaagatgttcgtctcatcacttgcacttttgttttaatgtatggattcagattagactgagaaaaatggatggtattttcttaaaattgtgccaccttaaagcccccccccttttttttttcttccttcactggataaataaaatatgtgaacaagtggaaaaaaaaaaaaaaaaaaaaaaaaaaaaaaaaaaaaaaaaaaaaaaaaaaaagggg

SEQ ID NO: 5132 - DNA, 3102 bp, Homo sapiens
ccagtgtgtataggtgcggcctggtgtatattcgtggcacgaggggagtcagtgatttgaacgaagtactttcagtttcatattactctaaatccattacaaatctgcttagcttctaaatatttcatcaatgaggaaatcccagccctacaacttcggaacagtgaaatattagtccagggatccagtgagagacacagaagtgctagaagccagtgctcgtgaactaaggagaaaaagaacagacaagggaacagcctggacatggcatcagagatccacatgacaggcccaatgtgcctcattgagaacactaatgggcgactgatggcgaatccagaagctctgaagatcctttctgccattacacagcctatggtggtggtggcaattgtgggcctctaccgcacaggcaaatcctacctgatgaacaagctggctggaaagaaaaagggcttctctctgggctccacggtgcagtctcacactaaaggaatctggatgtggtgtgtgccccaccccaagaagccaggccacatcctagttctgctggacaccgagggtctgggagatgtagagaagggtgacaaccagaatgactcctggatcttcgccctggccgtcctcctgagcagcaccttcgtgtacaatagcataggaaccatcaaccagcaggctatggaccaactgtactatgtgacagagctgacacatagaatccgatcaaaatcctcacctgatgagaatgagaatgaggttgaggattcagctgactttgtgagcttcttcccagactttgtgtggacactgagagatttctccctggacttggaagcagatggacaacccctcacaccagatgagtactgaacatactccctgaagctgaagaaaggtaccagtcaaaaagatgaaacttttaacctgcccagactctgtatccggaaattcttcccaaagaaaaaatgctttgtctttgatcggcccgttcaccgcaggaagcttgcccagctcgagaaactacaagatgaagagctggaccccgaatttgtgcaacaagtagcagacttctgttcctacatctttagtaattccaaaactaaaactctttcaggaggcatccaggtcaacgggcctcgtctagagagcctggtgctgacctacgtcaatgccatcagcagtggggatctgccgtgcatggagaacgcagtcctggccttggcccagatagagaactcagctgcagtgcaaaaggctattgcccactatgaacagcagatgggccagaaggtgcagctgcccacagaaagcctccaggagctgctggacctgcacagggacagtgagagagaggccattgaagtcttcatcaggagttccttcaaagatgtggaccatctatttcaaaaggagttagcggcccagctagaaaaaaagcgggatgacttttgtaaacagaatcaggaagcatcatcagatcgttgctcaggtttacttcaggtcattttcagtcctctagaagaagaagtgaaggcgggaatttattcgaaaccagggggctatcgtctctttgttcagaagctacaagacctgaagaaaaagtactatgaggaaccgaggaaggggatacaggctgaagagattctgcagacatacttgaaatccaaggagtctatgactgatgcaattctccagacagaccagactctcacagaaaaagaaaaggagattgaagtggaacgtgtgaaagctgagtctgcacaggcttcagcaaaaatgttgcaggaaatgcaaagaaagaatgagcagatgatggaacagaaggagaggagttatcaggaacacttgaaacaactgactgagaagatggagaacgacagggtccagttgctgaaagagcaagagaggaccctcgctcttaaacttcaggaacaggagcaactactaaaagagggatttcaaaaagaaagcagaataatgaaaaatgagatacaggatctccagacgaaaatgagacgacgaaaggcatgtaccataagctaaagaccagagccttcctgtcacccctaaccaaggcataattgaaacaattttagaatttggaacaagcgtcactacatttgataataattagatcttgcatcataacaccaaaagtttataaaggcatgtggtacaatgatcaaaatcatgttttttcttaaaaaaaaaaaaaagactgtaaattgtgcaacaaagatgcatttacctctgtatcaactcaggaaatctcataagctggtaccactcaggagaagtttattcttccagatgaccagcagtagacaaatggatactgagcagagtcttaggtaaaagtcttgggaaatatttgggcattggtctggccaagtctacaatgtcccaatatcaaggacaaccaccctagcttcttagtgaagacaatgtacagttatccattagatcaagactacacggtctatgagcaataatgtgatttctggacattgcccatgtataatcctcactgatgatttcaagctaaagcaaaccaccttatacagagatctagaatctctttatgttctccagaggaaggtggaagaaaccatgggcaggagtaggaattgagtgataaacaattgggctaatgaagaaaacttctcttattgttcagttcatccagattataacttcaatgggacactttagaccattagacaattgacactggattaaacaaattcacataatgccaaatacacaatgtatttatagcaacgtataatttgcaaagatggactttaaaagatgctgtgtaactaaactgaaataattcaattacttattatttagaatgttaaagcttatgatagtcttttctaattcttaacactcatacttgaaatctttctgagtttccccagaagagaatatgggattttttttgacatttttgacccatttaataatgctcttgtgtttacctagtatatgtagactttgtcttatgtgtcaaaagtcctaggaaagtggttgatgtttcttatagcaattaaaaattatttttgaactgaaaaaaaaaaaaaaaaaaaaaaaaaa

SEQ ID NO: 5133 - DNA, 1896 bp, Homo sapiens
gaacgtgcggaggaagagtggcgggagaggggagagaaggggggggggacgggagcagggctggtaccgaccaaccaaccagttgagttccagattctatgtgaattaaaaagtcaatatatgtataattctgagatgacttaggttggacattcaatgttgtgctatgaatttcctctttatgcagagtatctgtttgcttgcagagtggctttctggcttgctgccagcctgtgcatggtccacgcttatgagttcaggatctacggcaatgtgaatcattcagatgtttacaataaaaaacaccacatgagtaaatgaattcactaatgttaatgttaaacttcatggaaaaatagtcctttgaaccttcggtggttagcaattaaagaccctgagttatgtgcaataaatagtaaataaagttataccgaatgatgtattttttgctgtggttgttacttaattaaaataccttaaagatggcaccaatataaagtatataccagtggactattgacctccaattttttaaaaagttgaaattttaacaattaccaatacttttttttcttccttcaattggaaattctgagggatacagttatgtcatgattacttgtgaaatctctccccacaaaaattttactgataataaacatgagtaaatgagaaagtctataaataacaatagactttgcctcataacacgtgttgtgttaggttttgggatggctttctagggagcaattctgaaattacttgacagatacactctttatggtaaacaggtcatttcagagtctagagtgctaaccattacactatggaaccatgataaataggtcatttcaaactgatatgtcacaatgcaatatggatagaatatgaatcccatacattcatccctataactgcattttaaaatatagtctaaatatcatgggaggaggttaaaacctgagaacatggtacaataagaaggaataattttttatctatatataatttcaggagaagggattaaaactaccaaaggttatttgccactccactgcaaacatgttgcctgcaatcctgagctcatgatttagtgtgttgttaagcgtaattctgttgcctcaagtaaataccacttaatgctacacatttttaaacctttaaaagctacagacacaagtaatgaaattatgagtcacttaaggggggaggtaatatgcttgtatgttacattgacattgctctgcatgtctctactgggaaatatttggatttcaatgatagcttgactggttggacattgcatcaaatacacgccccatgtatcctttctgtcgtaaagttaagaacgctcttgcatttgatgtggaataaatatagatgatattactatctgctattctgcctttgttctgaaacaattgctttgtcagctaatttcattcaatatttgttttttagacgatctctataagttattaatttaacctgaaaccaaagtggtctccatttaaagttacttaatccctttgtaccacctatttctagttaaatatatgttgctatgcaaataggtaaagtgcttccttgccatgatggtaatggattggaactatgaaggctctcagtgtattggcttctgtaaagatgaggcgtctcctcagaaacaaaacttttcacatttctgcttactagacctgggttgatgtacatggtaagtctcaaacagatgcaagctatgtgcaaaaagtaactttagccaaatggaaatagctggatgctttgagaattacttggttgaagtaagaaaactgtaccatcctctatcctgtgtgccataataaaatagtaaaaaacctaaaaaaaaaaaaaaaaaaaaaaaaggagggggggccc

SEQ ID NO: 5134 - DNA, 3058 bp, Homo sapiens
ggcacgagggtcccttgcgcctccttgcccggccgcgcccagcccggcgtcccgagcagcgcaggggaggatccccgcgcagtgacccgggagccaccacagactctgggaggctcggcggctggagcagcaggcagctccccgcagctcccggcgcttccaggcagctctctgagccgtgccagaggcccggcccgccattcccagccccgagccatgatgaagactttgtccagcgggaactgcacgctcagtgtgcccgccaaaaactcataccgcatggtggtgctgggtgcctctcgggtgggcaagagctccatcgtgtctcgcttcctcaatggccgctttgaggaccagtacacacccaccatcgaggacttccaccgtaaggtatacaacatccgcggcgacatgtaccagctcgacatcctggatacctctggcaaccaccccttccccgccatgcgcaggctgtccatcctcacaggggatgtcttcatcctggtgttcagcctggataaccgggagtccttcgatgaggtcaagcgccttcagaagcagatcctggaggtcaagtcctgcctgaagaacaagaccaaggaggcggcggagctgcccatggtcatctgtggcaacaagaacgaccacggcgagctgtgccgccaggtgcccaccaccgaggccgagctgctggtgtcgggcgacgagaactgcgcctacttcgaggtgtcggccaagaagaacaccaacgtggacgagatgttctacgtgctcttcagcatggccaagctgccacacgagatgagccccgccctgcatcgcaagatctccgtgcagtacggtgacgccttccaccccaggcccttctgcatgcgccgcgtcaaggagatggacgcctatggcatggtctcgcccttcgcccgccgccccagcgtcaacagtgacctcaagtacatcaaggccaaggtccttcgggaaggccaggcccgtgagagggacaagtgcaccatccagtgagcgagggatgctggggcggggcttggccagtgccttcagggaggtggccccagatgcccactgtgcgcatctccccaccgaggccccggcagcagtcttgttcacagaccttaggcaccagactggaggcccccgggcgctggcctccgcacattcgtctgccttctcacagctttcctgagtccgcttgtccacagctccttggtggtttcatctcctctgtgggaggacacatctctgcagcctcaagagttaggcagagactcaagttacaccttcctctcctggggttggaagaaatgttgatgccagaggggtgaggattgctgcgtcatatggagcctcctgggacaagcctcaggatgaaaaggacacagaaggccagatgagaaaggtctcctctctcctggcataacacccagcttggtttgggtggcagctgggagaacttctctcccagccctgcaactcttacgctctggttcagctgcctctgcaccccctcccacccccagcacacacacaagttggcccccagctgcgcctgacattgagccagtggactctgtgtctgaagggggcgtggccacacctcctagaccacgcccaccacttagaccacgcccacctcctgaccgcgttcctcagcctcctctcctaggtccctccgcccgacagttgtgctttgttgtggttgcagctgttttcgtgtcatgtatagtagtagaaatggaaatcattgtactgtaaaagcctagtgactccctccttggccaggccctcacccagttcagatccacggcctccacccgggacgccttcctcctctgctcccaaacagggtttccgtggcctgtttgcagctagacattgacctccgccattgagctccacggtttacagacaattgcacaagcgtggggtgggcaggccaggactgcttttttttaatgctcccatttcacagaggataccaccgagactcggaggggacacgatgagcaccaggccccacctttgtcccctagcaaattcagggtacagctccacctagaaccaggctgccctctactgtgctcgttcctcaagcatttattaagcacctactgggtgctgggttcactgtgtcctaggaaaccaagagggtccccagtcctggcctctgcccgcccctgctgccccaccaccttctgcacacacagcggtggggaggcggggaggagcagctgggacccagaactgagcctgggagggatccgacagaaaagctcagggcgggtcttctccttgtgcccgggattgggctatgctgggtaccaccatgtactcaggcatggtgggttttgaacccataaaccaaaggcccttgtcatcagctcttaacaagtatattttgtattttaatctctctaaacatattgaagttttagggccctaaggaaccttagtgatcttctattgggtctttctgaggttcagagagggtaagtaacttcctccaggtcacacagcaagtctgtgggtggcagaagcaagctagcgctgggcattcagtacataccacgatgtgctccctctcttgatgcttggcccctggggccttcagggctttgggacatcttgtcctcaaccctctccctagatcagtctgtgagggtccctgtagatattgtgtacaccatgcccatgtatatacaagtacacacagatgtacacacagatgtacacatgctccagccccagctctgcatacctgcacctgcaccccagccttggcccctgcctgcgtctgtgctcaaagcagcagctccaaccctgcctctgtccccttccccacccactgcctgagccttctgagcagaccaggtaccttggctgcaccggtgtgtggcccgctctcacccaggcacagccccgccaccatggatctccgtgtacactatcaataaaagtgggtttgttacaaaaaaaaaaaaaaaaaaaaaaaaaaaaaaaaaaaaaaaaaaaaaaaaaaaaaaaaaaaaaaaaaaaaaaaaaaaaa

SEQ ID NO: 5135 - DNA, 1658 bp, Homo sapiens
cagcctgctcccctccaggcttgctcctcccccacccagctctcgtttccaatgcacgtacagcccgtacacaccgtgtgctgggacaccccacagtcagccgcatggctcccctgtgccccagcccctggctccctctgttgatcccggcccctgctccaggcctcactgtgcaactgctgctgtcactgctgcttctgatgcctgtccatccccagaggttgccccggatgcaggaggattcccccttgggaggaggctcttctggggaagatgacccactgggcgaggaggatctgcccagtgaagaggattcacccagagaggaggatccacccggagaggaggatctacctggagaggaggatctacctggagaggaggatctacctgaagttaagcctaaatcagaagaagagggctccctgaagttagaggatctacctactgttgaggctcctggagatcctcaagaaccccagaataatgcccacagggacaaagaaggggatgaccagagtcattggcgctatggaggcgacccgccctggccccgggtgtccccagcctgcgcgggccgcttccagtccccggtggatatccgcccccagctcgccgccttctgcccggccctgcgccccctggaactcctgggcttccagctcccgccgctcccagaactgcgcctgcgcaacaatggccacagtgtgcaactgaccctgcctcctgggctagagatggctctgggtcccgggcgggagtaccgggctctgcagctgcatctgcactggggggctgcaggtcgtccgggctcggagcacactgtggaaggccaccgtttccctgccgagatccacgtggttcacctcagcaccgcctttgccagagttgacgaggccttggggcgcccgggaggcctggccgtgttggccgcctttctggaggagggcccggaagaaaacagtgcctatgagcagttgctgtctcgcttggaagaaatcgctgaggaaggctcagagactcaggtcccaggactggacatatctgcactcctgccctctgacttcagccgctacttccaatatgaggggtctctgactacaccgccctgtgcccagggtgtcatctggactgtgtttaaccagacagtgatgctgagtgctaagcagctccacaccctctctgacaccctgtggggacctggtgactctcggctacagctgaacttccgagcgacgcagcctttgaatgggcgagtgattgaggcctccttccctgctggagtggacagcagtcctcgggctgctgagccagtccagctgaattcctgcctggctgctggtgacatcctagccctggtttttggcctcctttttgctgtcaccagcgtcgcgttccttgtgcagatgagaaggcagcacagaaggggaaccaaagggggtgtgagctaccgcccagcagaggtagccgagactggagcctagaggctggatcttggagaatgtgagaagccagccagaggcatctgagggggagccggtaactgtcctgtcctgctcattatgccacttccttttaactgccaagaaattttttaaaataaatatttataataaaaaaaaaaaaaaaaaaaaaaaaaaaaaaagtagtatagatgt

SEQ ID NO: 5136 - DNA, 2803 bp, Homo sapiens
  misc_feature (1155)..(1167): n is a, c, g, or t
  misc_feature (2713)..(2714): n is a, c, g, or t
  misc_feature (2727)..(2727): n is a, c, g, or t
  misc_feature (2749)..(2750): n is a, c, g, or t
  misc_feature (2785)..(2785): n is a, c, g, or t
caaagccctgtcacccccaggatccggtcatcagggaaagaggacagggagaccagaagagggccagctgggacgagggggcggacgcccaggaggcaacttctgagacgcagctcctgagaggggcagggaccaggcgcgggaggccagagggggcacagagaacaaaccccctcagaagtgaagaggagagcggaaggaaccgagaggggacggacaggagctgaggaggaaagaggaggggagaggggtcaggccaggcagccaaggagaagacgtgtggccgggggctatcagaaggaaactgggacggacgggccgggctcgggctgtcctgtggagcagcagcatccccggggccggcagaggcgccagtggctgggcgggatgagtctctgagggccactgtggagcgccccgccatggcccccgcaccctctggagctgctacctctgctgcctgctgacggcagctgcaggggccgccagctaccctcctcgaggtttcagcctctacacaggttccagtggggccctcagccccggggggccccaggcccagattgccccccggccagccagccgccacaggaactggtgtgcctacgtggtgacccggacagtgagctgtgtccttgaggatggagtggagacatatgtcaagtaccagccttgtgcctggggccagccccagtgtccccaaagcatcatgtaccgccgcttcctccgccctcgctaccgtgtggcctacaagacagtgaccgacatggagtggaggtgctgtcagggttatgggggcgatgactgtgctgagagtcccgctccagcgctggggcctgcgtcttccacaccacggcccctggcccggcctgcccgccccaacctctctggctccagtgcaggcagccccctcagtggactggggggagaaggtcctggggagtcagagaaggtgcagcagctggaggaacaggtgcagagcctgaccaaggagctgcaaggcctgcggggcgtcctgcaaggactgagcgggcgcctggcagaggatgtgcagagggctgtggagacggccttcaacgggaggcagcagccagctgacgcggctgcccgccctggggtgcatgaaaccctcaatgagatccagcaccagcacgnnnnnnnnnnnnnccgcgtctccacccacgaccaggagctgggtcacctcaacaaccatcatggctgacctgggggcaaccaaggaccgtatcatttctgagattaacaggctgcagcaggaggccacagagcatgctacagagagtgaagagcgcttccgaggcctagaggagggacaagcacaggccggccagtgccccagcttagaggggcgattgggccgtcttgagggtgtctgtgaacggttggacactgtggctgggggactgcagggcctgcgcgagggcctttccagacacgtggctgggctctgggctgggctccgggaaaccaacaccaccagccagatgcaggcagccctgctggagaagctggtcgggggacaggcgggcctgggcaggcggctgggtgcccttaacagctccctgcagctcctggaggaccgtctgcaccagctcagcctgaaggacctcactggtgaggggacaaaagggcctgcaggagaggctgggcccccagggcctcctgggctgcagggacccccaggccctgctggacctccaggatcaccaggcaaggacgggcaagagggccccatcgggccaccaggtcctcaaggtgaacagggagtggagggggcaccagcagcccctgtgccccaagtggcattttcagctgctctgagtttgccccggtctgaaccaggcacggtccccttcgacagagtcctgctcaatgatggaggctattatgatccagagacaggcgtgttcacagcgccactggctggacgctacttgctgagcgcggtgctgactgggcaccggcacgagaaagtggaggccgtgctgtcccgctccaaccagggcgtggcccgcgtagactccggtggctacgagcctgagggcctggagaataagccggtggccgagagccagcccagcccgggcaccctgggcgtcttcagcctcatcctgccgctgcaggccggggacacggtctgcgtcgacctggtcatggggcagctggcgcactcggaggagccgctcaccatcttcagcggggccctgctctatggggacccagagcttgaacacgcgtagactggggtcccgcccgacgtgtctacgtcggctgaagagacagcgggggcggcgggctcctggggtctcgcctgagacggggcacctagccctgggcgagcgccgcacccgggcccgcagcggcaccgcgcccagagcggcctctccccacgcccggggcgcgccggctcagggaggctcggggccgcccatgcagacttttggcctggcgcgatcccccaagaacccctccagggccggcctgcggaggagccgatcctcgcaccctccgctccctccactggccctccaggtcgattccctgggctccaggctcccccgcgcgggcgccgcccaccgccatactaaacgatcgaggaataaagacacttggtttttctaaaaaaaaaaaaaaaaaaaaaaaaaaaaaagtacggggtcgggggctgccgggcgtgcacagggcacggggcggnngagacgacggccnccggagaggaccccgggttccnnactgcgttcgccgcctccgcccggctcggggcggntcggggttggctcaggca

SEQ ID NO: 5137 - DNA, 5277 bp, Homo sapiens
  misc_feature (821)..(917): n is a, c, g, or t
atctttgatcaatgtacttgccagggagagcccaagtccttcaaacctcctccttttcaccttcatccttaactttgtgctagagcgagacccacacaacaacagccgaccctccccgccccacccccacccccaaaccagccctcgatcccagcccccggagaggactcgcatttcgacttgcgggacacttttgtgcgttcctctccagagcgcctctcgtgctcgcccctcttgcgctcgctctttattaccttcacctccttttctcccccttctctccctttctccttctcgttctctcccggagttgttgttgcccccctcgctccttctccccccttttttccccttcccctcccgggggtgtgtggcaacttttcctctcgcttctcctccgtctgtttccccttatatgtgaccatggcagtgccggcggctttgatccctccgacccagctggtcccccctcaacccccaatctccacgtctgcttcctcctctggcaccaccacctccacctcttcggcgacttcgtctccggctccttccatcggacccccggcgtcctctgggccaactctgttccgcccggagcccatcgcttcggcggcggcggcggcggccacagtcacctctaccggcggcggcggcggcggcggcggcagcggaggcggcggcggcagcagcggcaacggaggcggcggtggcggcggcggcggtggcagcaactgcaaccccaacctggcggccgcgagcaacggcagcggcggcggcggcggcggcatcagcgctggcggcggcgtcgcttccagcacccnnnnnnnnnnnnnnnnnnnnnnnnnnnnnnnnnnnnnnnnnnnnnnnnnnnnnnnnnnnnnnnnnnnnnnnnnnnnnnnnnnnnnnnnnnnnnnnnnccccctccccgggaaacccgtgtactcaaccccgtccccagtggaaaacacccctcagaataatgagtgcaaaatggtggatctgaggggggccaaagtggcttccttcacggtggagggctgcgagctgatctgcctgccccaggctttcgacctgttcctgaagcacttggtggggggcttgcatacggtctacaccaagctgaagcggctggagatcacgccggtggtgtgcaatgtggaacaagttcgcatcctgaggggactgggcgccatccagccaggagtgaaccgctgcaaactcatctccaggaaggacttcgagaccctctacaatgactgcaccaacgcaagttctagacctggaaggcctcctaagaggactcaaagtgtcacctccccagagaactctcacatcatgccgcattctgtccctggtctcatgtctcctgggataattccaccaacaggtctgacagcagccgctgcagcagctgctctgctaaccaatgcagcttttgctgaagcaatgaaggtgaaaaaaatcaaattagaagccatgagcaactatcatgccagtaataaccaacatggagcagactctgaaaacggggacatgaattcaagtgtcggactggaacttccttttatgatgatgccccaccctctaattcctgtcagcctacctccagcatctgtcaccatggcaatgagccagatgaaccacctcagcaccattgcaaatatggcagcagcagcacaagttcagagtcccccatccagagttgagacatcagttattaaggagcgtgttcctgatagcccctcacctgccccctctctggaggaggggagaaggcctggcagtcacccatcatcacatcgcagcagcagcgtgtccagctcccctgctcggactgagagctcttctgacagaatcccggtccatcagaatgggttgtccatgaaccagatgctgatgggcttatcaccaaatgtacttcctgggcccaaagagggagatttggccggtcatgacatgggacatgagtcaaaaaggatgcatattgaaaaagatgagaccccgctttctacaccaaccgcaagagacagccttgacaaactctctctaactgggcatggacaaccactgcctccaggttttccatctccttttctgtttcctgatggactgtcttccatcgagactcttctgactaacatacaggggctgttgaaagttgccatagataatgccagagctcaagagaaacaggtccaactggaaaaaactgagctgaagatggattttttaagggaaagagaactaagggaaacacttgagaagcagttggctatggaacaaaagaatagagccatagttcaaaagaggctaaagaaggagaagaaggcaaagagaaaattgcaggaagcacttgagtttgagacgaaacggcgtgaacaagcagaacagacgctaaaacaggcagcttcaacagatagtctcagggtcttaaatgactctctgaccccagagatagaggctgaccgcagtggcggcagaacagatgctgaaaggacaatacaagatggaagactgtatttgaaaactactgtcatgtactgaatctttcctgttgaagaaatccatgttatagaaaagaactttgcagtcagacattcgtcatgggaaagttcagaaaaaaataaagtccttttaagggaacttcctgaattttgtgtattaatgttctttaaaagtttaagtattctacaaaaaaaaaaaaaaagttttctccattgattttcacctgtggttcataccagagacctgagaatgtttgtaaatgtacaagtatcaaagttcttacagttaattactgcaacttgctgctggacaattgtatacagagttaaaggcaggtctgaataagacctagctttgtttttttctaatggaatgaaccattttcctcttctgaaaattctgtatctgagcacatcaagagactcttgtagcagtggttacccagacttacagaattatgtcctccagaaaccagcaagaacacttggaatgaacgaatgaacttgtagggggcatagaggattcttgaaaaaaaaaaatgcaagagtgattttctgttacattcaatttcaaactctctaattgtgggttttctcctgaagaattttttttcacatactttccaaaagaccaacaaatggatgttgacaacaacccaatgaaataacattttgcatatctgaaaagaagcattgaatataagccaaaagctttcactgaaggtttttttttcttaaaaaaaaaaaaaaatatataaatgtaacatgttttcattccaaactggtagtggtatatagaattaaagataataatgttgcttcttattcaaactgttggtcatatgtacagtatataaacataaaacacacaaggaaggtattatgtatgcagtagtatactagagtttaggaaaatgaaaattttagaaaatatgttttgtcaccctgttggtcagaaagatgtctttctggttttaacgcatgcaggcatgtaaatatttgtctggagtcacagtattaatgaatgagatcttaaggcatctggtgacatcagaactctgtgtcagccacttttatttgtatattgaaccctaggctagtgccccaagctgcactattgggaatggattgtggctgaacagcaaatcaaaacaccagaaatatttttatatgttaacgtcatattatgttaatgttgctgaaaacaaaacctaacaaaccttgatgtaccagtccaataccatgtagcgctgagtgataaagttaaaatgtgctgtgcttcccacccttgtcagagggaagggtggctatgtgttattttcactgtctttttgaaagttacagtatgtgttttcactttcgtgcagataactggaagtaaagcggcaaacagtgcttattacatgctaaagttaccttctctttgttttttgcatatctggaattacacctttaaagactgatatgaatcagtacggtcactatacattttatgatttttctgtcatcttaaaattgtatgatcgtaacattatttattaccacaaaacagcaaaatcttcaatgtctaagaaaactagcttaaaatgtttaaatatagttctgattgggtattaattacttgattaagaaaaaattaacattatagatactctggcattacgcttctataccttttaggtcttccttgcaatactggaacataattcttttgtgtagctcactattagccagctaagttcatctttttaataccataaaaaggttatatgtacagttcctattttagcttgcttacaaagggagcattatttttatttaaagtattgctagtaaatgatttgtagaaacttggttttctaagcatagttcttccataaccaccttttgttgtttgagcacaagggattcttttcctagttctatgtgtttgtttccctatatgcagtctttaaaggattacaacacttaaaattgaatggacttgtgtcaagctttttgcatcatacattttttgaaagatttttaaaaaagcctacaacttacatatgtagtagaatcagccattgctctgctcctggcatagagtcacctgttatgtggattaaatagttttaaaatacatatttgaagacctttgagaatgctttagtgtttgatttgaaataaaaggaaattttagcaaggattaaagaaaaaagctatcagctgtatgttaagagagactcttactaacatgttgtaaatattacaattcatgaaatgttattgtaagtctgtaacttaattttttccctgttttagttatacaggttggtttggaaatttgtgttttggcataaacaagtaaaatgtgcccattttatggtttccatgcttttgtaatcctaaaaatattaatgtctagttgttctatattataaccacatttgcgctctatgcaagcccttggaacagaacatactcatcttcatgtaggacctatgaaaattgtctatttttatctatatatttaaagttttctaaaaatgataaaaggttattacgaattttgttgtacaaaatctgtacaaaaatctgtttttacatcataatgcaagaattggaaatttttctatggtagcctagttatttgagcctggtttcaatgtgagaaccacgtttactgttattgtatttaattttcttttccttttcaacaatctcctaataaaactgtctgaaatctcaaaaaaaaaaaaaaaaaaaaaaaaaaaaaaaaaaaaaaaaacaa

SEQ ID NO: 5138 - DNA, 5941 bp, Homo sapiens
  misc_feature (5)..(5): n is a, c, g, or t
  misc_feature (7)..(7): n is a, c, g, or t
  misc_feature (9)..(9): n is a, c, g, or t
  misc_feature (1104)..(1122): n is a, c, g, or t
  misc_feature (1505)..(1505): n is a, c, g, or t
agacnanancaaaaaccccccgacaggccgcttcgggaaaggagcgagcctgggtggcgattccggcacgagggcccgtcggacagccacagcggccagcgcagcggcagcggcggcggcaccaccatcaccgctcgcaccccagccgcccggcccgcgaccaggcagcggcggccgccggcgggatcggaggaggcggcggagcggcgaggaggaggagcaggagcgcgcagccagcgggtccacgcatctcagcacttccagaccaactccggcaccttccacacccctgcccgggctgggggctccgagagcggccgcgaagcgactccgatcctccctctgagccttgctcagctctgccccgcgcctcccgggctccggtccgcgcggcggggtccctgctcctgcgccccgggcgcgcttcccggacaccccggtccccgcagccaggacaaagccatgaagccagcgctgctggaagtgatgaggatgaacagaatctgccggatggtgctggccacttgcttgggatcctttatcctggtcatcttctatttccaaagtatgttgcacccagtcatgcggaggaatccctttggtgtggacatctgctgccggaaggggtcccgaagccccctgcaggaactctacaacccaatccagctggagctctcaaacactgctgtcctgcaccagatgcggcgggaccaggtgacagacacgtgccgagccaacagcgccacaagccgtaagcggagggtgctgacccccaacgacctgaagcacttggtggtggatgaggaccacgagctcatctactgctacgtgcccaaggtggcctgcaccaactggaagcggctcatgatggtcctgaccgggcgggggaagtacagcgaccccatggagatcccggccaacgaggcacacgtctccgccaacctgaagaccctgaaccagtacagcatcccagaaatcaaccaccgcttgaaaagctacatgaagttcctgtttgtccgggagcccttcgagaggctagtgtccgcctaccgcaacaagttcacccagaagtacaacatctccttccacaagcggtacggcacnnnnnnnnnnnnnnnnnnnagcgacaacgccacccaggaggccctgcgcaaaggggacgatgtcaaattcgaggagtttgtggcctatctcatcgacccacacacccagcgggaggagcctttcaacgaacactggcaaaccgtctactcactctgccatccctgccacatccactatgacctcgtgggcaagtacgagacactggaagaggattctaattacgtcctgcagctggcaggagtgggcagctacctgaagttccccacctatgcaaagtctacgagaactactgatgaaatgaccacagaattcttccagaacatcagctcagagcaccaaacgcagctgtacgaagtctacaaactcgattttaatgttcaattactcagggtggcaggtancctgaaattggaataaagggggtggggagagggagagaatcatgctttttaatttaagatttttatttgtcaaaagaattatatggatattgggttattttgtaaattaatatttctttggggatgatgctgcgagcagcatagtgagaattatttaaaatccttcgtagggaaggacagctgtctttgcaggggaaataggatgggtcgtccttgtctgtagaagtgaatactgcaacactgtctcaaaggtttcttgtgttctggtgaattccatgaattgtgcattccataaattctaattaatattatttatagttatttaaaaaaaaaaaaaaaaaatatatttgtggcagcaaaattctaacatctttccagaagaaatctatgattcctgctttgcttgctacagctcatttgggggcatgaatgttctccttactaacctctcatggagtcatgtgataacagccattgtcatgtgtatggatgccaccattcttgaatttctgctagaaataagtaggttgctattgcacttagagtcatctttgcaagggactcattccaaaccaattccaatcgacctgaaagtcccttgcactaaagaaatgtgatttttttttaacccaaggagaaagttggttgtaacaatttttcaccagaattagcaatctgatagaataggcttttttaacaggaattttaaactggcggtgccagttgcagtgaaggtgaagtggctattgctttatattcgacaaatatttattgagcatctactatatactaggccctgaagatagagcgttgaacaaacccaatggtcttggccctcaaaaagctttatgtgacatagagcatccagctcgacaattagcaaacccctgatattattcatggacttgacatgaggtttggactattcatgagcaacagcagaaggtccatgacccctacaaatttacatttttctatggcccatatttgaaaacctcacattcggagcaggccactttatattcgtgagtgatcccaagctcactgaccaacagaaaagatgctaaaaaaatgtgtcctatcatgtgcctgctccaactgatgggtaatgtctgcctttaagccccagaatggattctccaggcacagtgtggaagagtgctgtggttgattagcaatgtctgccttgggtgaggaaaggggaacactcctcaagtgcctcctactgtcatctccattcagcctagcaccacatccccatgtagaagtgttgtcttctactgcttgccacgtacaagtgtgaaatgccaaggtgagactcgtacacttggggatttgcaatggtttttacccctcatgaaggtcagaggtggactatttgtacacatacacacatgcacaccctctcacgtcctccagaggctgaaagaccatcagcatcttggtaactgccatgcatgagcagcaaggacagccttccataatccatgccccatttcctctggaagcctggaaacttttcatttcctgttccttgctaattaacatctaaacatgcttctcatttccagccattgctgatgcttctcagttgaagtttgagccacatccctcttacagctagtgaatgagttggtagcagatactgtatataataataataatagttttaataataggggagggtgggatggggtgtgggtaagttttgccttttgttttgtttttgatgccgtatatagtgaaggggtgaggatattctaaacaaacaaaaattgaataatttattcacagaaactattaagattgtattgtaaagctcacagcaagctcagtgggcagcagctgcaacatctcaccggggaaattattttatttaacgtgagtgagatgtgggccggagaaggtagctgaagctatttataaaacgttgtgtaccttcttccgagctctctcccctttgtgaagggcgcagcaactatacccttgatggatggagatttatgcaatgtgttttactgggtagagtgacagaccttggctgtccctggaattgagaatctggaccttatttccaggcagagaacactgtcctcagaaatgggacttctgataatgaaacaggttgtccaacattttctaatacgcattctacagaacacaggttccaggaggcatcaggttggtgtgatgcagactaagggttttgtggtcaaatatccttaagaaacaaagttaagtcagtttcctttctgcaaggacttttcagccttcaatgtgtgctgtgcatggtgaatccccaaaaataatccttgagtctgtagcatttcctgaacttacatgaccaggatactctattttgcagatcaccccacagagctagggttccaccgagtatactttgcttaggttgacttagcatatctgaggtcttcaaggataaaaactgccaccccaacacccttccattaaaaaaaaaaatacaaaatagcaccacagtctccatctggtttatagcaacaaaggtactttatttaatgaagcaatggttctaatcctggatactgccatggactacaattccatccctcccagagggagtggaggaagtcttgggtggtgtggacagaaggaagagaggagagggtgagtggggtatagggcccagggtggctccctactcctcaggctcaaaaggatgctcagtgggaacagatgatctcttgatgagtgcttcttcagtttcatagtttggaatcgttcactgtgtgctttttggggggttttcaatggaaattcacgttgctttgcatttctgtgtccgtctttggtcagttgtgcaagcctgctcactgtcatgtgaagatggcctttcatctggcttctctctcttaagtgagaaagattgtccttcaggggacatgacatcaataggtttctggaatgagggactctttctccccgtgttttgctttgtgttcacattttcttttctaatggcattgaaactttaaaaaaaatggattcaactgtttttgcagaatgtagaaagtattctgtgtccttggttaaagaaatccacttgtgaagtgtgcctggaaaatgaaagtttgtgttttttaaagaggaatatttgaaactgctttctatgcatgcttagctggagaaaagtacaggcaggcgtcccatctcccagccacttctcaaaggtgctgctgtgttttaaagaccaggtacagccagggcagtatttgcaaggacattcctgcttactttatccctttggttggaaagctctagatgattcccgcagctcctccagaccccgcctccctgccctccccagctggtctgggaagaggtggtctgctgacctgtggtatctcagaggggacgttcctcctcctccctgtgcaccaggtgggctgcaccctcctgcctattcaggatgtggatgccacaggagagcagcaggcagtggaaacttcagttgcactggttctcctggtggcaaaggcatgaagcacaggggtcgattaatccaggctactagaaagctccagagcaaagtgtgcgggtcccacaaatgcttggctggtggggtctggatcagtgctgagatagagttggcagaagaagcagaggcactctgcttgctttcctagccagtcctcccctacacacacacacacacacacacacacacacacacacacaatctcagctgcgccattctgtgcaatcccagtgaccaaatcccttccttgcccacctctatgtcagcaggactgaccacatcactcccccgagttcccaccaccagcatttcctccaacctttttccatcacaaccagttagaaccctacaggcaacaaggccttctagaatccgcttaacccttggctgataacaggcaaatttcagtctgctacactttgttaggtccagaaggagctgcccatactactttcttatgagcatgctcagtatggcatatggacatgtaatgtcacatctttgtggagtgtgattttctttttttacatatttgtatgcagtagagagcctgttgtagaaaacgctccctgtatcttgctgtactgttaaagaaagctgaattccacattgccaacaaaagcgtgaaaatgttcatgaaccttcctccaggaaaagccattcaagcctgattatttttctaagtaacttcaattaaattgaagaaaaaagaaaaaaaaaaaaaaaaaaaaaaaaaaaaaaaaaaaaaacaaacaaaacaaaagacaaaaaaaaaaagaaacaaaaaaacaaagaaacaaggaaccaacagaccaaaaaaagaaggaagagagacagaagaagggaagagacagggagcggaggggaggagggacccgggaagagacacaccacgggaggcgacgcccggactggagca

SEQ ID NO: 5139 - DNA, 3572 bp, Homo sapiens
aaaagcagcaactagggagctggtgaagaaggatgtctcagcagtgtttactaggcctccaacactagagcccatcccccagctccgaaaagcttcctggaaatgtccttgttatcacttcccctctcgggctgggcgctgggagcgggcggtctcctccgcccccggctgcagggggggggggggggggggggctggcgccgccgcgcagcacggctcagaccgaggcgcacaggctcgcagctccgcggcgcctagcgctccggtccccgccgcgacgcgccaccgtccctgccggcgcctccgcgcgcttcgaaatgagggtcctgggtgggcgctgcggggcgctgctggcgtgtctcctcctagtgcttcccgtctcagaggcaaactttttgtcaaagcaacaggcttcacaagtcctggttaggaagcgtcgtgcaaattctttacttgaagaaaccaaacagggtaatcttgaaagagaatgcatcgaagaactgtgcaataaagaagaagccagggaggtctttgaaaatgacccggaaacggattatttttatccaaaatacttagtttgtcttcgctcttttcaaactgggttattcactgctgcactgtcagtcaactaatgcttatcctgacctaagaagctgtgtcaatgccattccagaccagtgtagtcctctgccatgcaatgaagatggatatatgagctgcaaagatggaaaagcttcttttacttgcacttgtaaaccaggttggcaaggagaaaagtgtgaatttgacataaatgaatgcaaagatccctcaaatataaatggaggttgcagtcaaatttgtgataatacacctggaagttaccactgttcctgtaaaaatggttttgttatgctttcaaataagaaagattgtaaagatgtggatgaatgctctttgaagccaagcatttgtggcacagctgtgtgcaagaacatcccaggagattttgaatgtgaatgccccgaaggctacagatataatctcaaatcaaagtcttgtgaagatatagatgaatgctctgagaacatgtgtgctcagctttgtgtcaattaccctggaggttacacttgctattgtgatgggaagaaaggattcaaacttgcccaagatcagaagagttgtgaggttgtttcagtgtgccttcccttgaaccttgacacaaagtatgaattactttacttggcggagcagtttgcaggggttgttttatatttaaaatttcgtttgccagaaatcagcagattttcagcagaatttgatttccggacatatgattcagaaggcgtgatactgtacgcagaatctatcgatcactcagcgtggctcctgattgcacttcgtggtggaaagattgaagttcagcttaagaatgaacatacatccaaaatcacaactggaggtgatgttattaataatggtctatggaatatggtgtctgtggaagaattagaacatagtattagcattaaaatagctaaagaagctgtgatggatataaataaacctggacccctttttaagccggaaaatggattgctggaaaccaaagtatactttgcaggattccctcggaaagtggaaagtgaactcattaaaccgattaaccctcgtctagatggatgtatacgaagctggaatttgatgaagcaaggagcttctggaataaaggaaattattcaagaaaaacaaaataagcattgcctggttactgtggagaagggctcctactatcctggttctggaattgctcaatttcacatagattataataatgtatccagtgctgagggttggcatgtaaatgtgaccttgaatattcgtccatccacgggcactggtgttatgcttgccttggtttctggtaacaacacagtgccctttgctgtgtccttggtggactccacctctgaaaaatcacaggatattctgttatctgttgaaaatactgtaatatatcggatacaggccctaagtctatgttccgatcaacaatctcatctggaatttagagtcaacagaaacaatctggagttgtcgacaccacttaaaatagaaaccatctcccatgaagaccttcaaagacaacttgccgtcttggacaaagcaatgaaagcaaaagtggccacatacctgggtggccttccagatgttccattcagtgccacaccagtgaatgccttttataatggctgcatggaagtgaatattaatggtgtacagttggatctggatgaagccatttctaaacataatgatattagagctcactcatgtccatcagtttggaaaaagacaaagaattcttaaggcatcttttctctgcttataataccttttccttgtgtgtaattatacttatgtttcaataacagctgaagggttttatttacaatgtgcagtctttgattattttgtggtcctttcctgggatttttaaaaggtcctttgtcaaggaaaaaaattctgttgtgatataaatcacagtaaagaaattcttacttctcttgctatctaagaatagtgaaaaataacaattttaaatttgaatttttttcctacaaatgacagtttcaatttttgtttgtaaaactaaattttaattttatcatcatgaactagtgtctaaatacctatgtttttttcagaaagcaaggaagtaaactcaaacaaaagtgcgtgtaattaaatactattaatcataggcagatactattttgtttatgtttttgtttttttcctgatgaaggcagaagagatggtggtctattaaatatgaattgaatggagggtcctaatgccttatttcaaaacaattcctcagggggaccagctttggcttcatctttctcttgtgtggcttcacatttaaaccagtatctttattgaattagaaaacaagtgggacatattttcctgagagcagcacaggaatcttcttcttggcagctgcagtctgtcaggatgagatatcagattaggttggataggtggggaaatctgaagtgggtacattttttaaattttgctgtgtgggtcacacaaggtctacattacaaaagacagaattcagggatggaaaggagaatgaacaaatgtgggagttcatagttttccttgaatccaacttttaattaccagagtaagttgccaaaatgtgattgttgaagtacaaaaggaactatgaaaaccagaacaaattttaacaaaaggacaaccacagagggatatagtgaatatcgtatcattgtaatcaaagaagtaaggaggtaagattgccacgtgcctgctggtactgtgatgcatttcaagtggcagttttatcacgtttgaatctaccattcatagccagatgtgtatcagatgtttcactgacagtttttaacaataaattcttttcactgtattttatatcacttataataaatcggtgtataattttaaaaaaaatgtgaatatctttattatatcaactgtttgaataaaacaaaattacataatagaaatttaactcttcaaaaaaaaaaaaaaaa

SEQ ID NO: 5140 - DNA, 2091 bp, Homo sapiens
ggtcgacgtgatcagaaagtaaacagaaaactcccactgccccaaatatggaccagtagagaggtagaaaggatgccagagataatcatacttgtttagaggtatcgtaattttatttgtggtgtggtttcttgttttgttttgttaatgtgggatgggcctgtaaggtggcctaagacactaccaatttatgagtttggctaagggactggaaaggagaagagtgcctttgcagaaagcaggagctggaacaaacacttatgtttaatattgctcctttacaggtcgccagcaaaagaagagataacactgcatttccctttaccaactagcgctgggagcactggacacttaaatcctcatctgtcctcctttcctgtaaataaaagcccttctatccattttgcctgcctccttccttgggctttggggtgagaatcttggcgctaacccccaagggttactgccagttcaccaggggattatttatactctggggatcagcaggcagggaggttcaggttactaggaggaggtgggggtgttccctcccttggtgttccccataaccctgccaatgccttttgactcttctactttcacagggaacttagccacagccctgtttccagatgtggccaggtccccctagtgcctacctgcagtccttatgtgatttgaagggggaaaggactttgagtggtagtggagaagcaggcagacaacatgaagggcaaagacctctttttgacagtcttattaatagggcaccaggctgatgcagctgacgcttggcatggctttggtaggaggtgggggaggggttagaagtatggatagccgtggctgggtgcggtggctcatgcctgtaatcccagcactttgggaggccgaggtgggcggatcacgaggtcaggagatcgagaccatcctggctaacacggtgaaaccccgtctctactaaaaatacaaaaaattagctgggcatggtggcgggcgcctgtagtcccagctactcaggaggctgaggcaggagaaaggcgtgaacctgggaggcagagcttgcagtgagccgagatcgtgccactgcactccagcctgggcgatagagcgagactctgcctcaaaaaaaaaaaaaaaaaaggagtgtggagagctgtgtaccttgcaggcaaggagtagttggaatgagaatgaacagatctgaaatcctgagatccttttttttttttttttttttttttttttttttctcagcacccattgtaatttatttgtgaatgaatgggaaaagggtatcagtccaaggggagatcaggtggttcctcctcatcagagtcaaactcaacattttcatcttttacccatcgacctcgtccatctgggatccatccagagcttcgaagggtgagataatggtccagggctcgtcttcttgtggggctcatgggtgcaggggctgagacagttgctgactcctcggcctgtgggccagccgcaggttcaggttccctactgatcttcccactttggagtttgacctctgagggtggcataggggaaagggagacagagggaccaggggcttctggtctgtacttccggcggcagcaactgttatagtggggagctctgtgcagagcactctgggtgataagtcgtgtctgagttagcagaggagcctcagctttggtttcttcccttctcaattcattctgatgttttggattctgctttctttcctttcccggctgcttcttgccatagaaaagctgcaagctggacagatgtttcttgcctgcacggtgggcagtcagcatggccagggtgtccagtaccggtcgatgggggcagatggcacaagcaaagcgtccatcccgaagcatcagcgcctcatcctctggaatgtaactggctaggaggtccccgactcttctttttttgagcacattgagttgactccaatcgtctccttccctcttgaaagacatcacgactgtgagtcccagaagtgataaattctctgttccggtttcgccactcctccaggccaccgtagcaagagcgggacagcgccttctcttttttttt

SEQ ID NO: 5141 - DNA, 2021 bp, Homo sapiens
aaaaaaaagctctctccagctccagctgggcctgaagtctcagagctgtcgaccagcagcaggctcagacactgggctcccagctggggactgctccatggccatggagatagacagcaggcctggggggctccccggcagtagctgcaacctaggtgcagcccgagaacacatgcaggcggtcacccgaaactacatcacccacccccgtgtcacctacaggactgtgtgcagcgtgaacgggcccctggtggtgctggaccgggtcaagtttgcccagtatgcggagatcgtccacttcaccctcccagatgggactcagaggagcgggcaggtgcttgaggtggctggcaccaaggcgattgttcaggtgtttgaagggacatcagggatcgatgccaggaagaccacttgcgaatttacaggggacatcctacgaactccggtgtcagaggacatgctgggtcgggttttcaatggctccggcaagcccattgacaaggggccagtggtcatggcggaggactttctggatatcaatggccagcccatcaacccgcactcccgcatctaccccgaggagatgattcagacgggcatttctcctattgacgtcatgaacagcattgcccgcggccagaagatccccatcttctcagcagccgggctcccccacaatgagattgccgctcagatctgccgccaggcggggctggtgaagaagtccaaggctgtgctggattaccatgacgacaacttcgccatcgtctttgcagccatgggggtgaacatggagacagccagattcttcaagtctgactttgagcagaatggaaccatggggaacgtctgcctcttcctgaacttggccaatgaccccacgatcgagcggatcatcaccccgcgcctggcgctgaccactgctgaattccttgcctaccagtgtgagaagcatgtgctggtcatactgacggacatgagttcctatgcagaggccttgcgggaggtctctgctgctagagaggaggtgcctgggcgccgagggtttcctggatatatgtacacagacctggccaccatctacgagcgggcgggccgtgtggagggtcggggaggatccatcacacagatccccatcctcaccatgcccaacgacgatatcacccaccctatcccagacttgacgggcttcatcacagagggacagatctacgtggacagacagcttcacaacagacagatctacccccccatcaacgtgctcccttccctgtcgcggctgatgaagtcagccattggggaaggcatgacaagaaaggaccatggagatgtctccaaccagctgtacgcctgctatgccatcgggaaggacgtgcaggccatgaaggcagtagttggggaggaggcgctcacctctgaggacctgctctacctggaattcctgcagaagtttgagaagaacttcatcaatcagggcccctacgagaaccgctcggtgttcgagtcgctggacctgggctggaagctgctgcgcatcttccccaaggagatgctgaagcgcattccgcaggccgtgatcgacgagttctattcccgcgagggggcgctgcaggacctcgcgcctgacactgcgctctagccccgcgcgccgtggcaccccaacaccggcagggaacctaccctcggctcccgggtctcccctccctcgccaccccaaccagcggcttttgcgccgccctccgccctccgctggctccgaggtggtgggggcgccgcacgctccatccctttccctcgctcgattccttttcccgcgctccatgcctccccctcgactcccggtgctgcggaagaactgaaggttgcgatgccttactctgacgggagcatctgtatttttatgttaaaagcccacaaaataaaaataaaaagtaactgagatgaaaaaaaaaaaaaaaaaccacccccccacgcccccccctccccgccccgccccaccccggccacaccgccccggcacc

SEQ ID NO: 5142 - DNA, 3487 bp, Homo sapiens
ttgtaattcaaaataaaattattaatgaattctccttgtttgggatcacatcttaatttttaatctgttaaaagttcttgatgtattttaatgagaagactttaggtgaggctacagtgattccagagtgagccttctaactggctagcagaagttccctaggtttggcatctgtgccttggagatactgaaagagaatctgtcatttgacaattgacctctttgtgggatggactcattaagtatgctctcagagactggtatattaccagaatgcctattaattttcagtgagaggcaacaggtattaagtagaacagaatgctcaggttggcagattagaacgatctttcaggagacaaagcaagttttaatcagttgtttggttaataagtatggggtgttcgctgtgatagggccccgccagcttctggctcttgtggacctcaaaagtatcaggtggttttgcaagtggtggtcctttcccctgccccaccccaataggttccccatctgtctagtttgatttttgtagacctttgttttctctagttagaaaatcaggtacactgaatatggttttcatgtaacacctcttctctggagataggggtatgttttcctacccttctagtggagaatcctacttgaggatgacctttcctctcttactaaataatattagtaaatagtgggcaatatattctgctttcagattttgatttgttgagatgtaaaagttgtttggggcttaccaaatctcaagactttctttagctcctgcaggattgtattgcttttcttactggatatttttcctgggtaagcatctttgtggcttcatctcttccccctgtggttttcagtgtatttagtcgagacctctctgctgagcttgcaacctgtttattcacatggcctgccatgccacttggaggtttctgattactcccaaacctgctggttctttatgtctttctcagcgaataattccatctattcatgttggaaacttaggtgatatgctcatctccttttgcctgtttatggaggtcaccagcctctatcatttgtatgatttcgtttacactgtttatatctctctgtcccccctttttctgccattggcatggtttagacctgtactctttatcagcagaggtactgtaatatatttgtgatccctcagcttccaggcttactcctggtctctgccttcctatctacatatccttttaaaataaaattttaactatctcctgaaaaattgttgagtaggtcacgcacaatcaggagaaaaatctattcatgacatacaagtctctgtctaatctgaacactgcacctgtctctggcctttttttcttgtcatttcctagaccttaaaaaatgtgtattgagaaagaactctgttagctatacagaagatgaactgggcaatatagagtagcagcatggagaccagtctgactgaactaaggcagtggaagtgtggatgaggaagagaggtgaaaattgagaagcgctatcctttctctttgggcattattaggaggctcacagacaagtccaggagcctggttataccctcctgtgccattcaaccaggtggctttcccatgactgtgatgaataaaattgagaagcccctgcccttttcagagcagagggtgaggagaaagctaccattttgtcctcatccttacccccgttgacttggcgagagatttgacctttcaggttttgatcctgtcattttctaggatgtggtgcacgcactttgctgttgcgcatggtgaagtattgtgcctaggtcctgggtcttcatctgtttggctctgctactgtttcctcctcccaggaagtgtggttagacaaataatgtgttttaattacctgtcacactcaggattaatacatactcaggttaactgtagagaggcattggcttcagaacactcctcgtgacaattttaaccattttctttgtctagagtctgcctttttcttttttacaatttcttttatttcaacactaggtttcaatatggtgttcctgctacctcccacctccctcctccctcatcacacatgcaaattgtcagcttattgagacaacccacttagattcatatatggacaaggacaaggtattttgcatttgttactggaattcagttttcctaactatttactaccagaaatggtcaataacttactttgtgtttagcaaatcaaattgtgtgatagatagtttcccagtatgatggccagtcagtctttccatccctgtgcctacatgctgctcttcccgtccacaagtggagtctgtttctcttgagttttggctggccttatgaatggctttgcttactgaagtgcagcagaagaaatttagtatatgtccaagcctaggctttaagagactggcagctttccttttatcctttttggaagctagccaccatgctgcaaagaagctcagctggattactgaaagatgagaggccatgtggagagagactcttgaggatgagagattatcttggatgttccagccttaagctcccagctgaatgtgggtgtatcctcagctacaccacagaaaacagaggaactactcagtcgatcccaatcaacccacagactcactagaaataacaaattattgttttaagccacgaggttttgggggagggttgttaaacagtaatagataagtgagacagattgcttgttatttatggtcaaatggtgattatctctggtgagattacaggtgatgttttttttaagttatgcctatctgtagtttcctttttttcctaaaattgatttgaattattagtgtattaacagaataaagaatgaactttaaaacacaaaaaaaagaaatatgcttcctctaattaaaattcatggctctcaccacaccttagcatcaagttccaacttcgtactgcggcttagaagacccagctgattgtgttcccggctcccttttcagccttgtttcatggcatccacatccacgtatttcccaggcccactacatctgagatgagtcagagacccctcttaggggcctgttccctactcccaaacatggaaattaaaaaaaaaaatcgtgagttcttccaagagaaattccaggcatctggttagccctgagaagtaagagagacatgtgataagcaaccaaatagcggtcaaaaaatagccaagtaagttagaatcatgggatgttgtggttcccctatagagactacagaataacatcttaatatatatccctgagtgtgtgttccagaaactgaacccttagaatggatggctagaaatagacttagataaaaagggactgaggactgatctgacaccggccttgtttaaatttactggaggccggggaggttggccagagcaaagtatacatttttgggatcaggtgggcaagtttttttaacgcttaaagttgttccccctg

SEQ ID NO: 5143 - DNA, 3305 bp, Homo sapiens
  misc_feature (1354)..(1387): n is a, c, g, or t
  misc_feature (1721)..(1726): n is a, c, g, or t
tcagaggtccccgtcagtaaggtgtgccagcattagtaaaacggtgcatctcaagacttttatcacatactcgtaatatcagaggagtgtgaaccttcagagatctagggttaaaagctaaaggcatagctccagctacaacttttcttggtctacagatgtgtaaaatcttgatgcaaaaatctaccccaaatttctgaacaaaattaatattcagtattatatctagcctatagattctcttactcttggtgtaatgacagcattcccagtttaggaaactgttttaaaatcttgtgtcttggttgtggctgaggctttgggaaggccagagccccctttgccaccacccctagggtgtcagctccaagcctgggcctgagggtttgatggggagcgggtgagctggatcctgatcccagtggtcagtggccagatcctgggctgctggccagaaccctggctttgtgagtggctgcagcttggctctgctccagcccacaggggctaaaggggcgggtagggagtgtgtagggagcgtgtacgtggctttgtgtccttggctcctccagactctcacatgtgcgggcaccatatacttctgctgcccttgtgccccaatcattgcacaaacagaaacagctctgacagagaagggactgctagagttaggaaccctagggcctggaaggaaggtatggctctcagagtgacctggggtctattcagtcccctctggacctgtttccctggcaacgctgtgggaacaacagtctatgcaacacaggagacctgatgccactggtgtcctccaaattttaaggcgaaggcaggcattgtgaatgatgcagggatggccagaatggtttttgccttcgttctttccccaggggaaccaagcctgtgggtggggaaatcacactaaggctggacagtgactgaatctggcccaggagaaacttggctgcctgccttccagaccagggtttttcttccctgagatcctggaggggaagtacctggaacttgggagtgttgccctggtctggaagatctgatagacatagtatgcacacatttccctcgagcttcccatgactggggagtagatgagaaccctgagtgggtggctggtttcttgaggcatacatatacccgacacaccttacacctctgatttggctgcattttggaatcatctgggaagttttaaacaatactggtgcctaggtccaacctccagagactctgatttaattggtatggggtggggttttgcagttttcaaaccacaatatccagcaaagtttgagaaccactgccctacacagccctccttcttctttatcttatnnnnnnnnnnnnnnnnnnnnnnnnnnnnnnnnnncctggccagtggctcttgtttccagtcctgctgttccagggtggataggccttcaggcggagacccaggaatccagctccgggggctgtagctggtgagaggaagtcctagaggctatggacactctgctgctgggatcaccgagatgagcagcagctgctcagggctgagcagggtcctggtggccgtggctacagccctggtgtctgcctcctccccctgcccccaggcctggggccccccaggggtccagtatgggcagccaggcaggtccgtgaagctgtgttgtcctggagtgactgccggggacccagtgtcctggtttcgggatggnnnnnncaagctgctccagggacctgactctgggctagggcatgaactggtcctggcccaggcagacagcactgatgagggcacctacatctgccagaccctggatggtgcacttgggggcacagtgaccctgcagctgggctaccctccagcccgccctgttgtctcctgccaagcagccgactatgagaacttctcttgcacttggagtcccagccagatcagcggtttacccacccgctacctcacctcctacaggaagaagacagtcctaggagctgatagccagaggaggagtccatccacagggccctggccatgcccacaggatcccctaggggctgcccgctgtgttgtccacggggctgagttctggagccagtaccggattaatgtgactgaggtgaacccactgggtgccagcacacgcctgctggatgtgagcttgcagagcatcttgcgccctgacccaccccagggcctgcgggtagagtcagtaccaggttacccccgacgcctgcgagccagctggacataccctgcctcctggccgtgccagccccacttcctgctcaagttccgtttgcagtaccgtccggcgcagcatccagcctggtccacggtggagccagctggactggaggaggtgatcacagatgctgtggctgggctgccccatgctgtacgagtcagtgcccgggactttctagatgctggcacctggagcacctggagcccggaggcctggggaactccgagcactgggaccataccaaaggagataccagcatggggccagctacacacgcagccagaggtggagcctcaggtggacagccctgctcctccaaggccctccctccaaccacaccctcggctacttgatcacagggactctgtggagcaggtagctgtgctggcgtctttgggaatcctttctttcctgggactggtggctggggccctggcactggggctctggctgaggctgagacggggtgggaaggatggatccccaaagcctgggttcttggcctcagtgattccagtggacaggcgtccaggagctccaaacctgtagaggacccaggagggcttcggcagattccacctataattctgtcttgctggtgtggatagaaaccaggcaggacagtagatccctatggttggatctcagctggaagttctgtttggagcccatttctgtgagaccctgtatttcaaatttgcagctgaaaggtgcttgtacctctgatttcaccccagagttggagttctgctcaaggaacgtgtgtaatgtgtacatctgtgtccatgtgtgaccatgtgtctgtgaggcagggaacatgtattctctgcatgcatgtatgtaggtgcctggggagtgtgtgtgggtccttggctcttggcctttccccttgcaggggttgtgcaggtgtgaataaagagaataaggaagttcttggaaaaaaaaaaaaaaaaaaaaaaaaaaaaaaaaaaaaaaaaaaaaaaaaaaaaaacctcgggccaagttaaagggtaccaagttttgggaaaagggccccaagggggggataaaagg

SEQ ID NO: 5144 - DNA, 4444 bp, Homo sapiens
  misc_feature (1106)..(1118): n is a, c, g, or t
cctcttgcggccacaggcgcggcgtcctcggcggcgggcggcagctagcgggagccgggacgccggtgcagccgcagcgcgcggaggaacccgggtgtgccgggagctgggcggccacgtccggacgggaccgagacccctcgtagcgcattgcggcgacctcgccttccccggccgcgagcgcgccgctgcttgaaaagccgcggaacccaaggacttttctccggtccgagctcggggcgccccgcaggcgcacggtacccgtgctgcagtcgggcacgccgcggcgccgggggcctccgcagggcgatggagccggtctgcaaggaaagtgaggcgccgccgctgcgttctggaggaggggggcacaaggtctggagaccccgggtggcggacgggagccctccccccgccccgcctccggggcaccagctccggctccattgttcccgcccgggctggaggcgccgagcaccgagcgccgccgggagtcgagcgccggccgcggagctcttgcgaccccgccaggacccgaacagagcccgggggcggcgggccggagccggggacgcgggcacacgcccgctcgcacaagccacggcggactctcccgaggcggaacctccacgccgagcgagggtcagtttgaaaaggaggatcgagctcactgtggagtatccatggagatgtggagccttgtcaccaacctctaactgcagaactgggatgtggagctggaagtgcctcctcttctgggctgtgctggtcacagccacactctgcaccgctaggccgtccccgaccttgcctgaacaagcccagccctggggagcccctgtggaagtggagtccttcctggtccaccccggtgacctgctgcagcttcgctgtcggctgcgggacgatgtgcagagcatcaactggctgcgggacggggtgcagctggcggaaagcaaccgcacccgcatcacaggggaggaggtggaggtgcaggactccgtgcccgcagactccggcctctatgcttgcgtaaccagcagcccctcgggcagtgacaccacctacttctccgtcaatgtttcagatgctctcccctcctcggaggnnnnnnnnnnnnnatgatgatgactcctcttcagaggagaaagaaacagataacaccaaaccaaaccgtatgcccgtagctccatattggacatccccagaaaagatggaaaagaaattgcatgcagtgccggctgccaagacagtgaagttcaaatgcccttccagtgggaccccaaaccccacactgcgctggttgaaaaatggcaaagaattcaaacctgaccacagaattggaggctacaaggtccgttatgccacctggagcatcataatggactctgtggtgccctctgacaagggcaactacacctgcattgtggagaatgagtacggcagcatcaaccacacataccagctggatgtcgtggagcggtcccctcaccggcccatcctgcaagcagggttgcccgccaacaaaacagtggccctgggtagcaacgtggagttcatgtgtaaggtgtacagtgacccgcagccgcacatccagtggctaaagcacatcgaggtgaatgggagcaagattggcccagacaacctgccttatgtccagatcttgaagactgctggagttaataccaccgacaaagagatggaggtgcttcacttaagaaatgtctcctttgaggacgcaggggagtatacgtgcttggcgggtaactctatcggactctcccatcactctgcatggttgaccgttctggaagccctggaagagaggccggcagtgatgacctcgccctgtacctggagatcatcatctattgcacaggggccttcctcatctcctgcatggtggggtcggtcatcgtctacaagatgaagagtggtaccaagaagagtgacttccacagccagatggctgtgcacaagctggccaagagcatccctctgcgcagacaggtaacagtgtctgctgactccagtgcatccatgaactctggggttcttctggttcggccatcacggctctcctccagtgggactcccatgctagcaggggtctctgagtatgagcttcccgaagaccctcgctgggagctgcctcgggacagactggtcttaggcaaacccctgggagagggctgctttgggcaggtggtgttggcagaggctatcgggctggacaaggacaaacccaaccgtgtgaccaaagtggctgtgaagatgttgaagtcggacgcaacagagaaagacttgtcagacctgatctcagaaatggagatgatgaagatgatcgggaagcataagaatatcatcaacctgctgggggcctgcacgcaggatggtcccttgtatgtcatcgtggagtatgcctccaagggcaacctgcgggagtacctgcaggcccggaggcccccagggctggaatactgctacaaccccagccacaacccagaggagcagctctcctccaaggacctggtgtcctgcgcctaccaggtggcccgaggcatggagtatctggcctccaagaagtgcatacaccgagacctggcagccaggaatgtcctggtgacagaggacaatgtgatgaagatagcagactttggcctcgcacgggacattcaccacatcgactactataaaaagacaaccaacggccgactgcctgtgaagtggatggcacccgaggcattatttgaccggatctacacccaccagagtgatgtgtggtctttcggggtgctcctgtgggagatcttcactctgggcggctccccataccccggtgtgcctgtggaggaacttttcaagctgctgaaggagggtcaccgcatggacaagcccagtaactgcaccaacgagctgtacatgatgatgcgggactgctggcatgcagtgccctcacagagacccaccttcaagcagctggtggaagacctggaccgcatcgtggccttgacctccaaccaggagtacctggacctgtccatgcccctggaccagtactcccccagctttcccgacacccggagctctacgtgctcctcaggggaggattccgtcttctctcatgagccgctgcccgaggagccctgcctgccccgacacccagcccagcttgccaatggcggactcaaacgccgctgactgccacccacacgccctccccagactccaccgtcagctgtaaccctcacccacagcccctgctgggcccaccacctgtccgtccctgtcccctttcctgctggcaggagccggctgcctaccaggggccttcctgtgtggcctgccttcaccccactcagctcacctctccctccacctcctctccacctgctggtgagaggtgcaaagaggcagatctttgctgccagccacttcatcccctcccagatgttggaccaacacccctccctgccaccaggcactgcctggagggcagggagtgggagccaatgaacaggcatgcaagtgagagcttcctgagctttctcctgtcggtttggtctgttttgccttcacccataagcccctcgcactctggtggcaggtgccttgtcctcagggctacagcagtagggaggtcagtgcttcgtgcctcgattgaaggtgacctctgccccagataggtggtgccagtggcttattaattccgatactagtttgctttgctgaccaaatgcctggtaccagaggatggtgaggcgaaggccaggttgggggcagtgttgtggccctggggcccagccccaaactgggggctctgtatatagctatgaagaaaacacaaagtgtataaatctgagtatatatttacatgtctttttaaaagggtcgttaccagagatttacccatcgggtaagatgctcctggtggctgggaggcatcagttgctatatattaaaaacaaaaaagaaaaaaaaggaaaatgtttttaaaaaggtcatatattttttgctacttttgctgttttatttttttaaattatgttctaaacctattttcagtttaggtccctcaataaaaattgctgctgcttcatttaaaaaaaaaaaaaaaaaaaaaaaaaaaaaaaaaaaaaaaaaaaaaagggggggggggctaaaaatttccccggggggggcccaattttgggtgtcccggttttttgggaaaagggggggcccatattgggaggcgtggatattatagactgaaggcgtggggcgcgggtgtgtttaaaaaagttgtgaagcggggaaaccactggtgactgtgggaatgtggggagagggaacccctacttggtgggggggcaatactggggacaactcccttgagaggatttaaggctcagggagcaactataactttgagggttaataggggttcagccagcgtatttagctc

SEQ ID NO: 5145 - DNA, 2973 bp, Homo sapiens
ggttgagcctgtttttggtcatatttatgtggtagcctccgtgtcttgctcgttctgtcgggcgtacctgtgtgtttgtttgggttgttggtttggtcgtgagttttgtgtgttcgtgtcgctgattccgttgtggttgggttaatgagggtgtttgcggttgtttgccgcttgtcctctccggtgtgttgtggggtctcaatttgtcctggctgttccctgttgttcccccgcgtggggctgtacgcttgttctctcagtttctgtattttatgtttatcttagatctttagcggtgatctgtgactgtgaatgttaagaatagtgccagtgcctgtgtgtcccgtgcctcccttgctctattttgttcaccctttggccattgattagatagtggcttctattagggggacttccacacactctcaattattgtctttattaccaaatgttgttaaatataccaaatcttgttaaaatactattaattagtcattcattgaattaatattcaatgaattaatctaacattaaatgaattcattgaatattcaattaatattgaattaatatttggaaaactttaaattttcgttttgatattagaggaagtagattttgacctctagcttagggttagctgattaaacttattgagaagggatacatgtaattttaaattattttaatgtgcaagatggaaaataatgactcagaagttccgaaatatggaaaagaatgtaggtaaaataatttagtctgaagtaggatttaaggaaatagtcttaatatagttgaatccagtaattggttcaattatgccatttatgccatttttatgtatacttgtactaatatataaagtattttatgatttgttttatcttaatctgaagaaatttctaactgctttaggcaagtgtttttatattttatactgtgatcacctttcaattattcaattataagaatactctgaagttaactgccttaaacatatattctttgttaaacatatattctttgttttacttggtaaaatctaaagtattacatgtgttgtgcttttaatttgtctagcttctactgaaactaaaattgatgtggccagcatcaaggaaaaggttaagaaagcaaagaataagaaactgggagctcttacagctgaagaaattgcacttaagatggaggcagatgaaaagaaaaagaagaaaaaaaagtaacatacccaaaactccttgactagaactatctccttttgtaaaggattttgagatatcaggcattagttgccttatttgtgagaaattttctgagggctttttttttttttggtggtggtggttgttcatagaagagtgttctttataaattatattattattgtattttttgaaaaatttatacgagaaagtggtatataagtctttgtatacattacgaccattgtgatatcataatcaggctgatcgtatgtatatagtgccagcatttgatgttccctctctaatgataacaagtaaatatttaggtttatcccttttgaaagtttggttttacttttaacagtccatgaacagaaaattaggcctctaaaatcagatcccctagttactcctctgttctgaatctggggaagtagtaaaccaaaaagacagggaaaacaagatatttagagtcgaagcagcatgcaaaaaataataatgtttttaactaatgaaggctactggagttactaagaatcacctaaaaatgtgctactgtacctgtaccttgctcattttcgagatttagaagctgaaacatgggttaggttacttactaaaagtccacctgtaggcaacctgcaaataatgcttatttatactaaagatgagtttatctgatagagttaggaaatttcttcttttgagtaagagtattgctataacatatatttttttctgaaatgttttaaaatagaagtacacctaattgttattggttaaaaaaaagccatatgtgaatgaggttggtttttgggttttttctttcctgaattgtattagtccaaaagaactaaattagggtacttgtgctgtaccaaaatggtaattataacagacagtattagaattactgaattaacaatgagaaagagagaagtgtatctgttacgtggatatatgggccagcctggatatacaacagagtagtaacgtttgacttggtctcgctgtcggttaacacagagattgtccaaacacttgtcattattggggcaggcactgcaggtggctcctctcttatatggccaagttgggtaattccctcctggtccgtagttgcatataaaatgtgctccattggaaagagcgtcaaagccagaaactttagggcaaaattgaactgcgcagccaactttgtaactatctgcccaaacaacctgagtgtagtggccacagacttttttgcatatccgagtcttgaagtcatagtcctggatttcgtcataccagtttgtgatggcggaagacacagaaaaaatgggcacagacccagtccagatgttctctcccagtgaagtgaagtttgggtgcagcttgtggggtggcttcagccgtgtattatgtgaaaactggcaattgctggcccatgcttttgcaatttgggctagtgctgggtcccaagtcatgtatagcatatcactggctgttggtttcacctctgatcggaacttgttatggattcgaacgcagtctttgatgaaatcttcattttcgatatctggcaaaatatttgctgtgtgtgaataattggagacaaaagaaaccatccaggctattgtagcaagtgtgacacgcatgctttgtctggcatggagccttgggaggctgcagtccagagccgccgcagtttctgagagtgtgattgcctgagtgctcagcccacagctttgcaaacctagccgactttccggtcgagaaaacagag

SEQ ID NO: 5146 - DNA, 2891 bp, Homo sapiens
  misc_feature (287)..(320): n is a, c, g, or t
atgtcggccgtgaagttcaccccattgccgacctgcctgcagcataggagctgtgacgcctgcatgtcctcagacctgaccttcaactgcagctggtgccatgtcctccagagatgctccagtggctttgaccgctatcgccaggagtggatggactatggctgtgcacaggaggcagagggcaggatgtgcgaggacttccaggatgaggaccacgactcagcctcccctgacacttccttcagcccctatgatggagacctcaccactacctcctcctccctctnnnnnnnnnnnnnnnnnnnnnnnnnnnnnnnnnncttcagaacaacctgtcccccaagacaaagggcactcctgtgcacctgggcaccatcgtgggcatcgtgctggcagtcctcctcgtggcggccatcatcctggctggaatttacatcaatggccaccccacatccaatgctgcgctcttcttcatcgagcgtagacctcaccactggccagccatgaagtttcgcagccaccctgaccattccacctatgcggaggtggagccctcgggccatgagaaggagggcttcatggaggctgagcagtgctgagaacaccaagtctcccctttgaagactttgaggccacagaaaagacagttaaagcaaagaagagaagtgacttttcctggcctctcccagcatgccctgggctgagatgagatggtggtttatggctccagagctgctgctcgcttcgtcagcacaccccgaatattgaagagggggccaaaaaacaaccacatggattttttataggaacaacaacctaatctcatcctgttttgatgcaagggttctcttctgtgtcttgtaaccatgaaacagcagaagaactaacataactaactacatttttatttaaggggcctttacctattcctgcacctaggctaggataactttagagcactgacataaaacgcaaaaacaggaatcatgccgtttgcaaaactaactctgggattaaaggggaagcatgtaaacagctaactgtttttgttaaagatttataggaatgaggaggtttggctattgtcacatgacagactgttagccaaggacaaagaagttctgcaaacctcccctggaccttgcttggtgtccagatgtctgcggttgtcagccccttcctttcccccgacctaaacataaaagacaaggcaaagcccgcataattttaagatggttctttaggacattagtccaccatcttcttggtttgctggctctccgaaataaagtccctttccttgctccaactccttgtctctcaacgtattggctatgacgcagcaagaagaatgaatttggactcagttacaggctgtcaatggtctgctctgtagcagtctcagagcctccccgacccactacctggagatagccagatagccagatgccctgctcctggccacctttaaagcccctgcatatgacacaggttaactaaagtcaagattggggctgctgcattccaggttccctagactcacaagctggtccttggccaggtgcggtggctcacgcctgtaatcccagcactttgggaggctgaggcaggcggatcacctgaagtcagaagtttgagaccagcctggccaacataattaaaatgtctctactaaaaatacaaaaaaaaaaaaaaaaaagaaagcagatcctcatggctatagagttggcattttagccccagcttctgtagctctgaaagcctaaagaaggtattctctccatctgttaaacacagtatagtggctctcagcccttggggcatgttatcatgggagggaagtcaaataagaggagagaaaagaactcaagggggaaactgcatttttaggctttgctctcttaccttgccctttctactcagaaccaataacttctgcatcaaaacatgttacagcctgcatcaagggctttaccccaacctgcagcccagccttccctgggtgagcttgctatgcgcagccacatttaccatgtggggctccctattctgatggcctgttcggtgccgggtttactcactgccctgttctgatgtcagtgcctgtacatacctccaaaggcaggacttgcctgataaatatttttcctcctctgaactggattttataggcattaaagacaagtcgggtggctagagggctccttgagacatacctagcagggaactgcaggtggattctgttgagaggcaaagcacctgagtggttgggacacaggcagctggcatgggagggactttttttgagacagggtctcactgtgtcgcccagggcaaggatgcccaaagacaccaggttggagaggcacctgccaactacttgctttccctggagcctgcatgtgcctgtggggtggggaggcgtaggggtctacggctgcctgagatgggtgtgcacagtgtgtgaagtacctacctccttgccttgctggactgtcagccagtcgcagggccggccacaagacccatgtctccatctggtcatactccatagctaccaagttaacctgctctaaactttggagaactggatctgtccaataaacgcttatttggccaagcctgatggctcgtgcctgtactcccagcactttgggaggctgaggtgggagggttgcttgagcccaggggtttgagaccagcttgggcaacaacaacaaaaatgccaggtgtggtggggtgcacctgtagtcccagctactagggaggctgagccaggaggatcacttgagcccgggaggttgaggctgcagtggggggtcataatcatgccactgtactccagcctgggtgacagagtgagaccctgtctccgaaaaaaaaaaaaaaaa

SEQ ID NO: 5147 - DNA, 1593 bp, Homo sapiens
  misc_feature (1322)..(1327): n is a, c, g, or t
cagcttactgcaacctctgcctcccaggagattcacttgaacccaggaggtggaggttgcagtgagccaagatcgcgccattgcactccagtcagggcaacaagagtgaaactccgtctcaaaatataaaagaaaattgagtgtcccacccaaattttagggcgtacctccttccatttgataagaagatgctatttccagtgtccctgggagaattcttccatccagtttatatggtgaattgccaccagcgttccctaaaggaagagagaacttagcttatttctgtctgtgacttttatcagctagatcagttaattgtatttttaaattaaaaattagtaactagaggaagagactaagagaactatttttacctgagtaaatgctctcctcttcttgtgtccaaatctaatgcagaggtgaaaacacttgatgagaaaatcctttgtggcttgaggggaatcatgtttctttcaggacgtgttgtttccctgaagtctatgtcacactgagaactttttctgactgcactgctttggagctattcatttaaattgagtttggcctagttttcctggtataaaacaggaaatctacattgttccctctttctctcccttccatcccttcccctgcctttcctatacacgctggtgtgcttttgccctcagaaattcttggtttgggagttatgtatttttgagtgatcgaggttatgacatacttggagcggcatgatttcaagaagccattccaaattcttatagctccttagctctggttttactctcgtattttccccaagaaaattttttggctattcaaagaaagcacaaaatatgtgatgtggaactcatgaaaatagggacttttgatatctctttaaatattccctgactcacggaaaagatgtcctcttttggtgtatacattgtgaaaatctacccatttatctctctctctctcttttcttttaaataaattatctgataaggccggcaaggtggctcacgcctgtaatcccagcactttgggaggccgaggcgagcggatcacgaggtcaggagatcgagaccgcggtgaaaccccgtctctactaaaaatacgaaaaaaaaattagccgggcgcagtggcaggcgcctgtagtcccagctacttgggaggctgcggcaggagaatggtgtgaacctgggaggcggagcttgcagtgagccaagatcgcgccactgcactccagcctgggcgacagagcaagactccatctcaaaaaaaattatctgataggttactattgctaaattaattggccattataatannnnnngatggtatctagatgcagccaagacctctttgacgaatgtgacaaattacacatacatagaatccattagtaattatcccggattacagggcaccgaggaacactaagaaggcgcaagggaacacactgcagatgacaaccactgcgaaatccacattcagagcattgttgaacaattaacagaaagttaaaaaacggtcacacaataacagaaaaggagggggacacagactaaagaggtcggacagaaacaccatgacaacaag

SEQ ID NO: 5148 - DNA, 6843 bp, Homo sapiens
  misc_feature (936)..(997): n is a, c, g, or t
  misc_feature (1274)..(1336): n is a, c, g, or t
  misc_feature (2433)..(2457): n is a, c, g, or t
  misc_feature (3626)..(3640): n is a, c, g, or t
  misc_feature (6639)..(6653): n is a, c, g, or t
ctcgcccaagatggcgatggaggggcgggtgaggcggcagcggccctggcccccgcgccggccccagctcgggcccgggcccccgaggccgcgcccccgcccgcggcgccgcgcctccccgggccactgacgcccggcgcgctctccccccgcggcggcggccgaagcacggggaggcggcggcggcggcggcggcccgagcccagccccatggcgcggggggacgccggccgcggccgtgggctcctcgcgttgaccttctgcctgttggccgcgcgcggggagctgctgttgccccaggagacgactgtggagctgagctgtggagtggggccactgcaagtgatcctgggcccagagcaggctgcagtgctaaactgtagcctgggggctgctgccgctggaccccccaccagggtgacctggagcaaggatggggacaccctgctggagcacgaccacttacacctgctgcccaatggttccctgtggctgtcccagccactagcacccaatggcagtgacgagtcagtccctgaggctgtgggggtcattgaaggcaactattcgtgcctagcccacggccccctcggagtgctggccagccagactgctgtcgtcaagcttgccacactcgcagacttctctctgcacccggagtctcagacggtggaggagaacgggacagctcgctttgagtgccacattgaagggctgccagctcccatcattacttgggagaaggaccaggtgacattgcctgaggagcctcggctcatcgtgcttcccaacggcgtccttcagatcctggatgttcaggagagtgatgcaggcccctaccgctgcgtggccaccaactcagctcgccagcacttcagccaggaggccctactcagtgtggcccacagagggtccctggcgtccaccagggggcannnnnnnnnnnnnnnnnnnnnnnnnnnnnnnnnnnnnnnnnnnnnnnnnnnnnnnnnnnnnntggaatgtgtggcctcagctgaccccaccccttttgtgtcctgggtccgacaagacgggaagcccatctccacagatgtcatcgtcctgggccgcaccaacctactaattgccaacgcgcagccctggcactccggcgtctatgtctgccgcgccaacaagccccgcacgcgcgacttcgccactgcagccgctgagctccgtgtgctggcggctcccgccatcactcaggcgcccgaggcgctgtcgcggacgcgggcgagcacagcgcgcttcgnnnnnnnnnnnnnnnnnnnnnnnnnnnnnnnnnnnnnnnnnnnnnnnnnnnnnnnnnnnnnnnggcccaacgggcgcgtcaaggtccagggcggcggtggcagcctggtcatcacacagatcggcctgcaggacgccggctactaccagtgcgtggctgagaacagcgcgggaatggcgtgcgctgccgcgtcgctggccgtggtggtgcgcgaggggctgcccagcgcccccacgcgggtcactgctacgccactgagcagctccgctgtgttggtggcctgggagcggcccgagatgcacagcgagcagatcatcggcttctctctccactaccagaaggcacggggcatggacaatgtggaataccagtttgcagtgaacaacgacaccacagaactacaggttcgggacctggaacccaacacagattatgagttctacgtggtggcctactcccagctgggagccagccgcacctccaccccagcactggtgcacacactggatgatgtccccagtgcagcaccccagctctccctgtccagccccaacccttcggacatcagggtggcgtggctgcccctgccccccagcctgagcaatgggcaggtggtgaagtacaagatagaatacggtttgggaaaggaagatcagattttctctactgaggtgcgaggaaatgagacacagcttatgctgaactcgcttcagccaaacaaggtgtatcgagtacggatttcggctggtacagcagccggcttcggggccccctcccagtggatgcatcacaggacgcccagtatgcacaaccagagccatgtcccttttgcccctgcagagttgaaggtgcaggcaaagatggagtccctggtcgtgtcatggcagccaccccctcaccccacccagatctctggctacaaactatattggcgggaggtgggggctgaggaggaggccaatggcgatcgcctgccagggggccgtggagaccaggcttgggatgtggggcctgtccggctcaagaagaaagtgaagcagtatgagctgacccagctagtccctggccggctgtacgaggtgaagctcgtggctttcaacaaacatgaggatggctatgcagcagtgtggaagggcaagacggagaaggcgccggcaccnnnnnnnnnnnnnnnnnnnnnnnnncccctgcctccagcccacgtccatgcggaatcaaacagctccacatccatctggcttcggtggaaaaagccagatttcaccacagtcaagattgtcaactacactgtgcgcttcagcccctgggggctcaggaatgcctccctggtcacctattacaccagttctggagaagacatcctcattggcggcttgaagccattcaccaaatacgagtttgcagtgcagtctcacggcgtggacatggatgggcctttcggctctgtggtggagcgctccaccctgcctgaccggccctccacacccccatccgacctgcgactgagccccctgacaccgtccacggttcggctgcactggtgcccccccacagagcccaacggggagatcgtggagtatctgatcctgtacagcagcaaccacacgcagcctgagcaccagtggaccttgctcaccacgcagggaaacatcttcagtgctgaggtccatggcctggagagcgacactcggtacttcttcaagatgggggcgcgcacagaggtgggacctgggcctttctcccgcctgcaggatgtgatcacgctccaggagaagctgtcagactcgctggacatgcactcagtcacgggcatcatcgtgggtgtctgcctgggcctcctctgcctcctggcctgcatgtgtgctggcctgcgccgcagcccccacagggaatccctcccaggcctgtcctccaccgccacccccgggaatcccgcgctgtactccagagctcggcttggcccccccagccccccagctgcccatgaattggagtcccttgtgcacccccatccccaggactggtccccgccaccctcagacgtggaggacagggctgaagtgcacagccttatgggtggcggtgtttctgaaggccggagtcactccaaaagaaagatctcctgggctcaaccaagcgggctgagctgggctggttcctgggcaggctgtgagctgccccaggcaggcccccggccggctctgacccgggccctgctgccccctgctggaactgggcagacgctgttgctgcaggctctggtgtacgacgccataaagggcaatgggaggaagaagtcacccccagcctgcaggaaccaggtggaggctgaagtcattgtccactctgactnnnnnnnnnnnnnnnggaaccctgacctccatctccaagacctggagcctgaggaccccctgcctccagaggctcctgatctcatctcgggtgttggggatccagggcagggggcagcctggctggacagggagttgggagggtgtgagctggcagcccccgggccagacagacttacctgcttgccagaggcagccagtgcttcctgctcctacccggacctccagccaggcgaggtgctagaggagacccctggagatagctgccagctcaaatccccctgccctctaggagccagcccaggcctgcccagatccccggtctcctcctctgcctagctcttcccagaggatgtggtttggggcaggcaggtatggatcacataggatgcgatacctgtggccgtgtatgtccacatgtgtgcctgtagatacatcatcaagccctttggagcttcctaagttgctttggctgaggggagaggaaaacatggattattcactccccccatactctttgtgatacacatgtgacatgtgaaagacatacgagacatagctacatgtgatgtgcacatgtgtgaagtgcatgtatgcgtactggttgttgagctgggaaaccgtggcccaggcagtggtcactacagcctgattggtcctccaggtcagaacggtgccccacagtggtcagtccccagccctgtgggcccccacctccatcgcccagccttttattacacactctgagagtgtctccaatgcctgtctgacaaagacagtcccagcccattctcctgtctggctgggttgggtgcaagcaggctctgaatgcctggcatttcagctgcatcacctcccagctccttattgcccaaatagagagggtggccctggctcccctccgagcaactctgcatttaattttgtaatctgggaagtgcctggttttgaaaatccgctttctctcactcttcccctccttccttgcccctggctgctctagtgttctgtctcccagtcacctcgctctcccagaacaagtggaccttatcctgctcccagatactctttcctttcctctctcctgttttccttcctctgctatctctcacacctctcccagactatgtcatcttgttctcctgcctgggttcaaactctgcatccttctctaacaacgtgactacctcatgtctgcttcaaggcccccgtgcccttcctgtatccgcggctgccgcgcactcgcctgccatcctcctgcctcctcttcactcagtgcttctgcttgccctgccccaggcagcccacccacgcccagtgcgggtgtggagaagatcttctggcttccctgcatcttgcctttgggattgggatccaagggttctccatggatggatccaagtcatagaggggaatgtttgagacagggaagggggctgtgatccagaggctcagaataaaaagatgccctcccttctatgcaggggggcaagtttactggatggagatgatttgggcctctcttccagaagaagctaaaggaagagaaggggagtgagagttcagggaggcccttcccaccctgtgaggcttgacttgatctggattggggatgacaggaatctcaccctctggggtgctggcaaggaggtctttgcacaggaaaaggggtagctcatttcagtttgttttttctttaaattgaatcctcaagtcattttctgttcacctgccgcacagggacaagcttgacttctattttctgtgtagtgaaaacaatgtcatttatttggtttttcacctcagccctctcataggagcatagaatgttagggtctttactccctaatgatgtctgattggcacatcaagagttaactctgccttctgggccaaattcgaaataaccagtccatttttccttttttttttttttttttttaaatggtggaatgtctctcagcacagttgcggcttcctcaaaccctgaaagcatctgtgtttattatactcgggtgtcactcactgttgatgtctgcacctacgtttccacctcctccccctccttcagccagcctatgataacactaaagattattaatgttggttttgtatctcgttaaagacagaattgtcacttgtagtatttctgtagcattcagcgctgctgtggctaacaccactgtgtatgtttcatcattgctctgaaggtcaaaagcctcattttattttgctggtttgattttttttttttaaagaagaaaaaaaaactgccctgaattaaatggctgttttaacagtaggctcttagcattataccacatagtcatttttcatgttcttgtttaacaggcactgaggttctggtttaaattaaatagctgcaaatgagacaatttataacccattaggttgggtggaaaattgtttctcaaaagcaaataagtaataaatctggtatctgcctataactcacagttgataagaaagtggccatttctcactagcactatatatgatttgggctctgggtaatttggaagtgttaggtttgtgtctttgtagcagtatttttattagaaaagaatctattggccttttacagggtattaatccctttgtcacctaccattgatgccttaagttttctgagtctcaattaaaaatcttccttttcttgatgcatgacaagtgtaatcagtacttgctcatttatttgtctgtatttagtttatgctgtactatttaattatccttccagcgttttttttttctccttacaaatatgatactctttagtgttaagctaaggcattgattcatgtatctgtccttataatgaattaataaactattttccagaaataaaaaaataaattttggaaaaaaaaaaaaaaaaaaaaaaacaaaaaacacagaaaaaaaaaaacctttttcggggcactctcgagccccacgaaaaagttttatgacaaaccacctcgtgggcgccgcgggggcaccatatggagtagnnnnnnnnnnnnnnnacacacggtctccacacagggaaacccggaggacaacaagaggggtgggaaccaccacaagataaaaaaagagggcgggggggaacacacagaggtgtgtgaaaaacacccccacggaggatacagagagacaagagggggacatacacagcgggcgatccaaagaggaaagcaatacaaaaaaagccgg

SEQ ID NO: 5149 - DNA, 833 bp, Homo sapiens
  misc_feature (664)..(664): n is a, c, g, or t
  misc_feature (670)..(832): n is a, c, g, or t
agtaacttggttcaaggatggaatggaaatcgaaaaggggatgattatggaaataaccgaacgtactggaatccaccagccctattggttagagatgctactcgggaccatcgtgcaaggatatactgttgaatttcactgccaccatctgattctggccttgcccatgtcagggtaatgctgttgcctgttatgttgctaggttctggaatgccaggggcatcaggaacagtatattgtatttgagcaaccactggatcagaatcaagtggcctgccaacaccaaacttgttaactgcagaaacacggaattggtattcattgccgtttattagtttaatggcagtgtaactttgggcttcacatttatcctcaattagtgcccaggcaagtctgctggtttcccgtttttcaatgatgtagtgggttatgggagcacaaccgtcattgagtggggcatcccaccacagagtcatcttctccccagtaatattggtgaatcttattggcccaactacttttcctggtgtatcttgtactttcactttaatttctgcttttgcagaaccagatgcatttttggcttccactgtgtatacaccacgatggtcccgagtagcatctctaacaaattagggctggtgggtccaagtacgtcggtaanttccannnnnnnnnnnnnnnnnnnnnnnnnnnnnnnnnnnnnnnnnnnnnnnnnnnnnnnnnnnnnnnnnnnnnnnnnnnnnnnnnnnnnnnnnnnnnnnnnnnnnnnnnnnnnnnnnnnnnnnnnnnnnnnnnnnnnnnnnnnnnnnnnnnnnnnnnnnnnnnnnnng

SEQ ID NO: 5150 - DNA, 501 bp, Homo sapiens
  misc_feature (6)..(21): n is a, c, g, or t
aggttnnnnnnnnnnnnnnnntaggagttcgagaacagccagaccaatatggtgaaactccatctctactaaaaataaaaaattagccaggtgtggtggcatgcacctgtagttccagctacttaggaggcttgaggaaagggagaattgcttgaaccccaggaggcgtaggtcgccatgagccaagaatcgtgccactgcactccagcctgggcgacagagtgagactctgtctcaaaaattaattaattaaaattaaataaaaattacttctgaatgtgagcacatgaagtattatattcaaaaacaaagctgactggaacatgcagaacaacggaggaaagggttgaatttccctttacttaggagatccttatttaagagtgattatgcttgcctgtcataggagcaaaaagaaagcctaagtgaacctttactgcaagtgagggaaatggtactagaatagaaggaaaatgctttgaatggaagaaaagactttaa

SEQ ID NO: 5151 - DNA, 708 bp, Homo sapiens
  misc_feature (114)..(114): n is a, c, g, or t
cagagtccccctgagtccccttcctcaggggagaagaaggagaaggcaccagagcgcagggtatcagcccctgctcggccccggggccggcgaacacgaaccgcaaagccatcngtggacaagtttggcggggcagcttccggccccacggctttgttccgcaacactaaggcagccggggaagccattggtggtgtcaagaacatgctcttggagtggtgccgagccatgacaaaaaaatacgagcatgtggacatccagaacttctcctccagctggagcagtggtatggccttctgtgccctcatccacaagttcttccctgacgcctttgactacgcagagctggatcccgcaaagcgccggcacaacttcaccctggccttctccacagcagagaaactggctgactgtgctcagctgctggacgtggatgacatggtgcggttggctgtgcccgactccaagtgcgtctacacatacatccaggaactgtaccgcagccttgtgcagaaaggactggtgaagaccaagaagaagtgaggaggtgactggctctgtgggcagagatgggcagggtgcccagctcagcagccacggcccgggggttcccttctgctccatggaggcaccagagccaggggcttaggcaagggtgtgtggcgttggttttaactgcattaaaagtacttttgtaaaatcaaaaaa

SEQ ID NO: 5152 - DNA, 634 bp, Homo sapiens
  misc_feature (607)..(607): n is a, c, g, or t
  misc_feature (619)..(619): n is a, c, g, or t
  misc_feature (626)..(626): n is a, c, g, or t
tgaatgatgagaggaaagggatggggtggtatgttttgttttgggtccagggtgagaaaggcaaggttacaagaatgagtggcttgcaccactgactagtgatgacagattacttctatgccccttgactagtaaacattccaagggacatcgcgatggggtgaggttgctgctatcaagaccagtcacattttgaaaattaacacttgcttccttacaagctgccttccagaggtcaacagcttttcacaagtgaggcacccagttgctgacccttgatttctggaatgtagggggtcaggaatccttggtggcccccagagaaggttggggcacagtgtaacctatataaggaaggatcatactcactctttacatcaattagcaaaattttgaggaaaaagaatctcacttttaaaatgtaaatagctcttcattacccctccagacttaatcctaccagtaactcacaccttagtgtgaaattaataaacagcagctttggagatagctggaggtttgacttagaggaaaaagtaatttttgtagcaggacaattctgggaagatttgtatgggaaggagaaggtgcaagaagagagatcccnaacttaactctncagtgtnccctgaag

SEQ ID NO: 5153 - DNA, 2452 bp, Homo sapiens
  misc_feature (2447)..(2447): n is a, c, g, or t
cggccccctcgtggccaaggacaaccggtgtatcggtataaggtctgggcccccttgcgggggataatttttagagcgtgccgccccttttttttttttttttttagaaaaaccttgttttattcagcccagacctgggcaatctagctctgtggtatggccaaagtataaaaaataaaaaccaacaacaacaaaacaacactgtagagaaaagtgaagtataaaatggggtctggcatccggaatccctgtggttttcatccacgttcgctccctgaggccggcagggagggatgcccctccctgcctgtgggttgggggctgggcccctcggcgggaggctgcccggggagcagggcctgctttggaaggggagagattggccatctgtccctcccggagatcaggattggacaattttgcagtttgttgcagaaacgtagcgacctgtgtagtgaatgttgcatctcaccacgttgttggtgaagtcagactccaaaacaatatactttgggttcacgtgcaccttgaggatgtagttcccaggctgcacgtcggttatgtcgatccactggcagtcgatgtccgcattgtaggtgtcatagcagcctgggctcaggccctgggtatgagaggtgcatgcatagcgcttgaggttgccgaagtcacaggtgctgtcctccaggcagaaactggccttgtggccctcggccaccttcttgcctgtggctgcatccagtaggtcgtagtggctgaactcgtccatgctgtggtaatgctggtggcagctgtgccactcccaggtgtgccgtggccggttggggaggaagtctgctgtgccctggttcttcacgcgctgggggaagcgcagtagcacccgcacatcgtagtcggtggcctcaggggcataggctgtgctggccagacacttctcctccgcagcacagcgcagggagtacaggtgggctctctgcacataagtggatgcttgcacatagttggggtctgggaccaagtcagggagaccgcggccgttctggttgggccggtacacgctgcctacgctgaggcggccctgctgcgcgccgttccgctccccacccggcgggggcgtgtcggagctgcgcaccggcaggtagggcggctccagcgcgcgcggcggcccgtacgcctcgggcggcgggttggcgtagggcgggtaccagcccaggcgtgggtctccgccatgggcctgcgccgcctcgggaccggggtcagggtaggcctgctcgaagccgggggtgccctcgctgtacagactgtgcgagtagcggcggtccaggccgtcggggggcggcggcggcggcggcacgtagggcctctcgggggccgggtagaagccctgaggcgggtactcgggcagctcttcgccgccgccgtactcctcgtagcgcgcccggggctggtaggggtagatgacccccgccgaggccacggccgccgcccccgcgcccacgccgccgcccgcgggccggtagtacacgaaaccctggtcgtaggtccgcgacgcggggtcgtagttctcgtactggctgacgaagggcgcctgcgggtaggggaactgctgcgggtaggagggctgctggcggtaggtgctggcgaaggccgaagccgagaccgaggaggcggagcccccgtgccgttgctgggagacggaggtgcgggccagggccatgcccgtgctgtccccgacggccacctcgcgccagttgtcgggcacctggccaaagccgaatgggtgccgcgcctggccgcgcacggtgtccgagcccacgcgccccggcaggggcagggacggcgcctgccgacgccgggggctcccgtggctgcgccgctgctgggcctggggcgcgccggccagcagcacccgggagctactctcggagcgctgaggtccggccggcacgtactctgagcccgagttgagcaagctgtacacctgcccgttgttctcccactggatcagctgccgccagcgggcggggtccgagccctgcccgggctgcgcctgctgcccgtgcaccagcacgcacaggcaggcgccccacaccagggcccccagctgccggctgcctcgggccagagccatggtgacccctctgcagaggcctggtggacagagaggctctcaggagtggccccctgggcgtgcttctcttcccacggcctcgaggacaggaaggctccttgcttgccccagctctagctttgtccatgctggccttgtcccgagcgggacggctcctccgatgacagcatttcaaggccaaggggtcagggcagggcaggggcggtgcccagggctgcacgaggctctccgcagggcaccgggcgggcaggaccgcctgtgggccttacatggccagccccgcactggctggccgctcggctggccctcgtgccactcntgaat

SEQ ID NO: 5154 - DNA, 3142 bp, Homo sapiens
cggacgcgtgggtcgcccacgcgtccggtttcccgaggtacctagtgtctgagcggcacagacgagatctcgatcgaaggcgagatggcggacgtgctagatcttcacgaggctgggggcgaagatttcgccatggatgaggatggggacgagagcattcacaaactgaaagaaaaagcgaagaaacggaagggtcgcggctttggctccgaagaggggtcccgagcgcggatgcgtgaggattatgacagcgtggagcaggatggcgatgaacccggaccacaacgctctgttgaaggctggattctctttgtaactggagtccatgaggaagccaccgaagaagacatacacgacaaattcgcagaatatggggaaattaaaaacattcatctcaacctcgacaggcgaacaggatatctgaaggggtatactctagttgaatatgaaacatacaaggaagcccaggctgctatggagggactcaatggccaggatttgatgggacagcccatcagcgttgactggtgttttgttcggggtccaccaaaaggcaagaggagaggtggccgaagacgcagcagaagtccagaccggagacgtcgctgacaggtcctctgttgtccaggtgttctcttcaagattccatttgaccatgcagccttggacaaataggactggggtggaacttgctgtgtttatatttaatctcttaccgtatatgcgtagtatttgagttgcgaataaatgttccatttttgttttctacatttaaaaaaaaaatcctgtcctaaaattgaaagttctaaagcatagcaaggctgtatggatcattgtgaagatacttctagggactgaactctatgtatttcttttttttcttttttttgagatagagtcttgctgtgttacccagggtggattgcagctgatcatagctcactgcagcttcaaactcttgggctcaagccatccttctgcctcactgtccctagtagttgggattacaggcacatgccaccatgcccagctaaatttttaatatttttgtagagatggggtcttgctgtgttacctgggctagttatgtgagtttctatattagacatagtctcaagtttcaggtagggtttaaagtagagacactggtcagtatttcttttttggggggaactaggagagcaggagtagaagtgagatgttaagatcttatggcactaaagacttactattctgttcctacatactctgttaggatcagatagatgttatagaaatgccttttgtttctcctgcccttcttgatgtcacagttttttgtacttccagctgtctaaaggcatgaatctcctcttggagcattctcccagacccttctttagaagagtctatactaagttcttggtgccctcttcggcagccaagggtgaaggccccatagaggagaggatccaaaggagcattgaggaggcccaagaggaaaaggatgtggctcaggctgggagggacttcagttagcatggtgggggagaaccagtaccacatacccagtaggtaataaggtgtccagcagaggatgaaggtcagcaagataagcagggccagtctcagggcccggagacgaacacggggacaattgtcaaaggagcgggggagggcaaattcaccagcaggggctaggaatttagaaaatatactgtaattcagacactcagcttctgatctgagtatagggtgaattgatggaggggcatagctagtgagacagagctcgcctcctacaaggaggagaatgttgcaaaccgttttccccttcccaacctgggactatatgatttcttacccccagggattatgatagaaatatgaagccaccaagtctagacttgatggtgttcaagaataaataatactgattgcctccctagtccttgtccagctaactcagctgtttataattgaagggattcaacaaaattatctctagcatcaggtgctagacatggttagaatctcaccatggtttagtgactggtagatagctattaggtaggtagataaataaatgatgctagaggcaacaggtctagggttaaggattaaggcctgggaattggagtctcaccatggctccccttccttgtctggggcctggacacactgaggacaatgcggctatagcagatggccatggcagtcagtggcagcagaaagaggcagcagaaggtgaagaggttataggtggtctcttgccattgagccttgaagctgcctttggtgacacactgagtgaaagggactgggccagctcagtggaccgtgtggaacaggaacagctggagtggagttgaggactattagaactggttcccctcaccacccaacctacccacctatgtcatactgtctcctcccaattcatccttaattccaagtgaagcagcacagtgctgagaaacagttcatccatggtgccatgttaaagaagttggaaatatatcttgaaaatcctatcttccttttaggcttgaatatgatgctgaacagtaagtttgttaaatcttggaacttaaaacaatcctgctttctcaagtactattctaacattgcgctttataagggatgatatttctaccacctcactcatatttttagctgaaatgattttcctggtatgtctgttattttgtggaaaaagaaatattgtgtaaaatgggtgctgccaaaattccaggccattttgcagggactctgaagtgacctttagtagtaatagtcttatgtgcagtaactataatggtaaagaatgttaaataataaaatttaacattttccaaatgctaagaaagagagccaaacgagcaagaacgagcagaaacaaacaacacagggcggaaggcaacgaacagcgcggagagagacagaagacgaagaagagagaagagacggagagagaggggcaggacagacacacacggagaggagagaaaaagacacgccgacaacgtgcagaggatacaggagggccgccgaaaagagaaggatagaagaaaggaggagggagcgcagaaaacacgagagggaggaacaacgacggcgcagcagtaggaggaggagcaaagaggggggcacaagcgggacc

SEQ ID NO: 5155 - DNA, 6337 bp, Homo sapiens
  misc_feature (98)..(136): n is a, c, g, or t
  misc_feature (241)..(377): n is a, c, g, or t
  misc_feature (2331)..(2415): n is a, c, g, or t
  misc_feature (3946)..(3973): n is a, c, g, or t
  misc_feature (5088)..(5115): n is a, c, g, or t
atgcaggccttcccacaagggcccggcagcatgacaaggtgaaggcagagtatgtgcatctcaaccacccgctcaccctcgtgaccagagagcgcgannnnnnnnnnnnnnnnnnnnnnnnnnnnnnnnnnnnnnngccgggcctagaacaggtcctgaagcatatgcgagaggcggctgaacggcggcagcagctgcagttggagcatgaccaggccctggctgttctcagtgccaagcnnnnnnnnnnnnnnnnnnnnnnnnnnnnnnnnnnnnnnnnnnnnnnnnnnnnnnnnnnnnnnnnnnnnnnnnnnnnnnnnnnnnnnnnnnnnnnnnnnnnnnnnnnnnnnnnnnnnnnnnnnnnnnnnnnnnnnnnnggtggcagcgcggtggcccccctggacatctccacggcccccagcaagcctttcccacagttcatgaatggcctagccacctccctcggcaaaggtcaggagagcgctattggaggcagctctgcgatcggtgaatatatccggccccttccgcagcctggtgacaggccggagcctctgtccgccaagcccaccttcctgtcgagatccggtagcgcaagatgcagatctgagtcagacatggagaatgaacggaattccaatacctccaagcagagatactcggggaaggtccacctctgtgttgcccgctatagttacaaccccttcgatggaccgaacgagaaccccgaagctgagctgcccctcacggcgggaaaatacctctacgtctatggagacatggatgaggatgggttctatgaaggagagctcctcgatggccagaggggtctggtgccctccaacttcgtggactttgtgcaggacaacgagtcgcggttggcaagcacgctggggaacgagcaggatcagaacttcttcaaccattccggcatcggcctggagggagagcacatcctggacctccactccccaacccacatagatgcgggcatcaccgacaacagtgccgggaccctggacgtgaacatcgacgacatcggagaagacatcgtgccttaccctagaaaaatcaccctcatcaaacaactcgccaaaagtgttattgtgggctgggagcccccggcggtgccaccaggatggggaacggtgagcagctacaacgtcctggtggacaaggagacacgcatgaacctcacgctggggagcagaactaaagccctcatcgagaagctcaacatggcagcctgcacctaccgcatctccgtgcagtgcgtcaccagcaggggcagctcggatgagctgcagtgcacgctgctggtgggcaaggacgtggtggtggccccctcccacctgcgggtggacaacatcacgcagatctccgcccagctctcctggctacccaccaacagcaactacagccacgtcatcttcctcaacgaggaggagttcgacatcgtcaaggccgccaggtacaagtaccagttcttcaatctcaggcccaacatggcctataaggtgaaggttctggccaaaccccaccagatgccgtggcagctcccgctggagcaaagggagaagaaggaggcctttgtggagttctccacgttgcctgcaggacccccagcacccccacaagatgttaccgtccaggctggggtgacccccgccaccatccgggtctcctggagaccacctgtgctgacgcccaccgggctgtccaatggcgcaaacgttaccggctacggcgtgtatgccaaagggcagagggtggctgaagtcatcttccccacggcagacagcacggccgtggagcttgtgcggctgcggagcctggaggccaagggcgtgaccgtgcggaccctctccgcccagggcgagtccgtggactctgcagttgctgccgttccccccgagctcctggtgcctcctaccccccacccgagacctgcaccccaatcaaagccattagcaagttctggagtccccgaaaccaaagacgagcacctgggtccccacgccaggatggatgaggcctgggagcagagccgtgcacctggccctgtgcatgggcacatgctggagccgcccgtgggccccggaaggcggtcgccctcacccagccgcatcctgccgcagccacagggcaccccggtgtccaccaccgtcgccaaggccatggcccgggaggccgcgcagagggtggccgagagcagcaggttagagaaaaggagcgtcttcctagagagaagcagcgcggggcagtacgccgcctcagacgaggaggacgcctatgactctccagacttcaagaggaggggcgcctcggtgnnnnnnnnnnnnnnnnnnnnnnnnnnnnnnnnnnnnnnnnnnnnnnnnnnnnnnnnnnnnnnnnnnnnnnnnnnnnnnnnnnnnnctgacctctcagacatcatggaggaggacgaggaggagctgtattctgaaatgcagctggaagatgggggaaggaggcggcccagcggcacgtcccacaatgccctcaagattttagggaacccagcctctgcaggacgggtggatcacatgggccggaggtttccccgtggcagcgctggtcctcagaggtcccggcccgtgacagtcccatccatcgacgattacgggcgagaccgcctttctccagacttctatgaagagtcagaaactgaccctggtgccgaagagctcccggcccggatctttgtggctctctttgactacgacccgctcaccatgtccccaaacccagatgctgcagaggaggagcttccctttaaagaaggccagatcatcaaggtttatggtgataaagacgctgatggattctaccgtggggaaacctgtgcccggcttggccttattccttgtaacatggtctctgagatacaagcagatgatgaggagatgatggatcagcttcttagacagggctttctccctctgaatacacctgtggagaaaatagagagaagcaggagaagtggcaggcgtcattcggtatcgacgcggagaatggtggccctgtatgactacgaccccagagaaagctcgcccaacgtcgatgtcgaggccgaacttacattttgcacaggagatattattacagtttttggtgaaattgatgaagatggattttattatggggagctgaacgggcagaaaggccttgtgccctcaaacttcttggaagaagtgcctgatgacgtagaagtctatctttctgatgctccatcccactactctcaagatacgccaatgcgctcaaaggcaaaaaggaagaagagtgttcatttcataccttaatcaggcaatgtagccttcacgtaagtgagcaactgaagataccgataaagataccaacttaagctaccttaaccgggccagtgtggtagacttaaggcttcattgtggggttaaaaaaaaaaaaagatacaaagaaatatgtctcaaaaaactattggacctaaataattagaatattacttggtctcagttgtaaagcaactgaatttatagtgaagcaaatcatctttaataatcatttcctactatttgcattaagaatatttgaaaggccaacattgggaacatatttcttaacaagctaactgtgtgtttacatagagagagctgcatattgcattgttagccactcttggaaaaagcacaacctaacaaacatgtttactataggaagctttactttagaaacttaacccaaggtcaagcagatgagtagtgaacacaggtgatcgagtgttggctctgaacactccaaacactggctcgagtggccagaacgtgttttccttaagtaaccctgcctctaccttacgagagagctatgctcctcctcaaagcacaatcatcctgtgacagaagttgctgcaacacgcgtttgttgttggtataccaatgcaatactnnnnnnnnnnnnnnnnnnnnnnnnnnnntcacattagatggaatagatggtatcttcaggtgtactttgggatgctttactaggtgttttccattagaattagaccttgattttaaatccaagcaagcttgaagccccttggcttacagcatttgcctgctgaatactaaacactcacatggcaagagttgctctggagaggtagggccagaggaatgctgctgcactgccaactcaggcacatgcttagctgtaaagggaagcgaggtgaagtcgtcctgcagcgtattagagtaaaagtctacccctctgaagcactatttaagcgcttaacgtatatttaaatactaccatgtgctatctactgaggaagattcatgttcaattatttggaaataatgcaagcatccactaagggcctttaagctttctttgattataattaaggttcattttagttttttttttttctttcaaccagtgtgccatctccaatatttctatagtataccaaccaccccaggaatgcactttaacaatatcaggattttatataaccaaatagtttcaaatacaacaaaattccctttatgaactttcgctttttaagactactgatgggtactcggccaactttactatcaacctaatttcagatcatgtctcccctgcccttagtcttcatttatgaagtgaattattacctgccttagctttgccaaagcaacggccaccccgcactccctcgagacagagaaacggaacccacacatttatgtctggggcctctctctggcgtgctgtgggagaggacctttgcttctcatggcatacttcaacaactgaaagaacaaatgaacccccctgacctttcctggtgggaaacggggacagtacgatgttaccaagtgaattctgttgttggcgctcacacactcaataaactgtaacactgtacctactaggttcctcctgagggttcaggtacagcaaggagagctccatcccccacagtccatctccattcggggtcacctacgtcatctatgggttctggtagtcctgggagaggcagggaaatgtcctcgaaaaagaaaaaggggctgctttccaaaggcaagaaactgctgaaaaagctgggtnnnnnnnnnnnnnnnnnnnnnnnnnnnncaactgccaaatctatgtaattttctttaattccaaactagggctttcatgactcaagtacttcctaaaaaaacccaatcttctcccctgacaccagtagagaaatgcacttttgcactaccaaccactttaaaccaaccacgagaacaaagaggagcggttgctctctgtcaccgctggcagtctgctctcattgtccaagctctgatttgggaggtgggaggggacgtcttattaacaaacgggggcgcatagctatcacctgtagctccctccctacctgtaattccagtctttgtgcatttgtcatctgcccttaaaggaatgattttcaacctttctcccttctcaaaatgcttgcctcataatgcataactttcactttgactctggtcttgaaattcctagtttaattcgccttgatgttctgccttataaatgcacaatgatttgtactgtctaataaaaacagtgtatactttgtatgtgtcgtgcattcagtggtcttcatcctgacacagtggttcgagatcaagttgtacaggctgtgcattttaagatactagtttcagtctttcaaagccagccaggctacacacagaaaatgtttactcaatcattcaaaaaagagaaaaggagagaaagtaactttgtttggtaaagcaccagtactccaaccttccagaaagccgattatcttcattgcttttaatgttctattctgtggcatatggttttctgttactttcgttgtcaaaatgccatacccaaatacacagcaatgaatggcacacaagtaatccacataatgcataagccacaccaaaaccagactcaatttaaatctgctccaaatgagtccatacccatcttcatcattggcatttgaacaaaagacttacttacaaagttgctggcagatgtatttgatggttactcttttgtaattcttgtccacttgtaaattgtttttactctttatacatacttttcagactgcctttcttttgtaatttatggacggtttataaatgaatgacaaagctttccccattgtgtcttcaaaaacgctattataaattgtaatataatagtatgtggtagatttattattaaaggaaatccatgtgtggttaagctctgtgtgggtgtgtgcatgtgcacagttagtgtaaaatattttctagaaataaaatttgttattttataaaaaaaaaaaaaa

SEQ ID NO: 5156 - DNA, 2493 bp, Homo sapiens
  misc_feature (1381)..(1388): n is a, c, g, or t
gagcagtcgtgcattcccagcctcgcctcgggtgtagggattgcatagaaaagcaaaactacacagtcttgactgtgtagttttgtttttaggattagaggctcaccgattcatgtcggagatggtcagaaaaaccaactctccataggacgtcgtttcagaagcaaccttgggcttagtcccaccctttttaggcactcttgagaaatcagagtgcctagaaagatgacaactcaagcaccgacgtttacgcagccgttacaaagcgttgtggtactggagggtagtaccgcaacctttgaggctcacattagtggttttccagttcctgaggtgagctggtttagggatggccaggtgatttccacttccactctgcccggcgtgcagatctcctttagcgatggccgcgctaaactgacgatccccgccgtgactaaagccaacagtggacgatattccctgaaagccaccaatggatctggacaagcgactagtactgctgagcttctcgtgaaagctgagacagcaccacccaacttcgttcaacgactgcagagcatgaccgtgagacaaggaagccaagtgagactccaagtgagagtgactggaatccctacacctgtggtgaagttctaccgggatggagccgaaatccagagctcccttgatttccaaatttcacaagaaggcgacctctacagcttactgattgcagaagcataccctgaggactcagggacctattcagtaaatgccaccaatagcgttggaagagctacttcgactgctgaattactggttcaaggtgaagaagaagtacctgctaaaaagacaaagacaattgtttcgactgctcagatctcagaatcaagacaaacccgaattgaaaagaagattgaagcccactttgatgccagatcaattgcaacagttgagatggtcatagatggtgccgctgggcaacagctgccacataaaacacctcccaggattcctccgaagccaaagtcaagatccccaacaccaccgtctattgctgccaaagcacagctggctcggcagcagtccccatcgcccataagacactccccttccccggtcagacacgtgcgggcaccgaccccatctccggtcaggtccgtgtctccagcagcaagaatctccacatcccccatcaggtctgttaggtctccattgctcatgtgtaagactcaggcatccaccgtggccacaggtcctgaagtgcctcccccttggaagcaagagggctacgtggcctcctcatctgaggctgagatgagagagacaacgctgacaacctctactcagatcaggacagaagagagatgggaagggagatacggtgtccaggagcaannnnnnnngaacgggtgatgcggtgctgccgccagtgtgtcggccagtgctagctacgcagcagaggctgttgccactggtgctaaagaggtgaaacaagatgctgacaaaagtgcagctgttgcgactgttgttgctgccgttgatatggccagagtgagagaaccagtgatcagcgctgtagagcagactgctcagaggacaaccacgactgctgtgcacatccaacctgctcaagaacaggtaagaaaggaagcggagaagactgctgtaactaaggtagtagtggccgccgataaagccaaggaacaagaattaaaatcaagaaccaaagaagtaattaccacaaagcaagagcagatgcacgtaactcatgagcagataagaaaagaaactgaaaaaacatttgtaccaaaggtagtaatttccgcagctaaagccaaagaacaagaaactagaatttctgaagaaattactaagaaacagaaacaagtaactcaagaagcaataatgaaggaaactaggaaaacagttgtacctaaagtcatagttgccacacccaaagtcaaagaacaagatttagtatcaagaggtagagaaggcattactaccaaaagagaacaagtgcaaataactcaggagaagatgagaaaggaagccgagaaaactgccttgtctacaatagcagttgctactgctaaagccaaagaacaagaaacaatactgagaactagagaaactatggctactagacaagaacaaatccaagttacccatggaaaggtggacgttggaaaaaaggctgaagctgtagcaacagttgttgctgcagtagaccaggcccgagtcagagagcccagagagcctgggcatcttgaagaatcctatgctcagcagaccactttggagtacggatataaggaacgcatttccgccgcaaaggtagctgagcctccccaacgtccagcctcagaaccccacgttgtccctaaagcagtcaagcctagagtaatccaggctccttctgagactcatatcaaaactactgatcaaaagggaatgcacatatcatcacagatcaagaaaactacagatctaatctttctgaactgt

SEQ ID NO: 5157 - DNA, 3366 bp, Homo sapiens
  misc_feature (1999)..(2018): n is a, c, g, or t
agcgggggcacagccggcggccgcgccccgccgccaccatgagggccgagggcctcggcggcctggagcgcttctgcagcccgggcaaaggccgggggctgcgggctctgcagcccttccaggtgggggacttgctgttctcctgcccggcctatgcctacgtgctcacggtcaacgagcggggcaaccactgcgagtactgcttcaccagaaagaagattggcccatgcacaagctggaatgttctcccatggttgtttttggggaaaactggaatccctcggagactgtaagactaacagcaaggattctggccaaacagaaaatccacccagagagaacaccttcggaaaaattgttagctgtgaaggagtttgaatcacatctggataagttagacaatgagaagaaggatttgattcagagtgacatagctgctctccatcacttttactccaagcatctcggattccctgacaatgatagcctcgtagtactctttgcacaggttaactgtaatggcttcacaattgaagatgaagaactttctcatttgggatcagcgatatttcctgatgttgcattgatgaatcatagctgttgccccaatgtcattgtgacctacaaagggaccctggcagaagtcagagctgtacaggaaatcaagccgggagaggaggtttttaccagctatattgatctcctgtacccaacggaagatagaaatgaccggttaagagattcttatttctttacctgtgagtgccaggagtgtaccaccaaggacaaggataaggccaaggtggaaatccggaagctcagcgatcccccaaaggcagaagccatccgagacatggtcagatatgcacgcaacgtcattgaagagttccggagggccaagcactataaatcccctagtgagctgctggagatctgcgagctcagccaggagaagatgagctctgtgtttgaggacagtaacgtgtacatgttgcacatgatgtaccaggccatgggtgtctgcttgtacatgcaggactgggaaggagccctgcaatatggacagaaaatcattaagccctacagtaagcactatcctttgtactccctcaacgtggcctccatgtggttgaagctagggagactctacatgggcctggaacacaaagccgcaggggagaaagccctgaagaaggccattgcaatcatggaagtagctcacggcaaagatcatccatatatttctgagatcaaacaggaaattgaaagccactgaaactatgcagcatttcagttttcatttaaacacttagttcagaaaccttaaaggatttgaatatttcaaattgcacacgtcactccagcatctctgtaaaataattggaatgaaaatacttcttgcacttaaacactgcacatgccgtactttgaggttagtctgaatcttgaactttaataccaaattaattttgaatgcttttgtttcctaagagataatggcatggtttcatatgttatactttggacagacagagttttaaaaatggaattattttttctttcatgcctcttgtaatgttctgaacaaacttgaatgatgaaagtattaaagagatatcagtatttgaaaattgtattttcttctgtctctggggaggatttctcagtggtggtgggagcccagtcttggagtgaaagtgacacctgctgtccataattcagcaagctcaagtcttctccatgggactggggtcgggcagcctctttattctgcagttgctcttgtggggctgtgcctgtggaggaagaaaatgggaagaaagagaaaaaggtacacaaaggaaagaaaactatcatctatctgtggtggaggaacagtccagtgacccaagtgccctccagcaggcgaggttttgaatctgttctctggtgcctggtattccttcagtgtgtaaaggtgcttagtgcgtgctttgctttcttggcttttctgtccccnnnnnnnnnnnnnnnnnnnngccatctctcattctgttgattgttctgtgcagtactctcctttttggaaaaactccagggtatgcttgggaaggaaaaaaatttttttccttaccaaccaacgctgtgttgttgagtaaacactgatctctacccacacagacaacaggaatccagctttctgcagccccacagcctagacagcagcaacctggggagttgtttgttagcaaccattgcacagaaggacgcagcacacgttcctgagtgcaggggtgttactcttagaaaagcgtcttgtagtcgaaagagaggaacttccccactggttaataagtaaagcctgttgaaatttacatgtcaattacctttcatagtcatggtccgaaaacagctagaacagctgtaaatctggtacattttccttccctcctcatctacacgcacccacatcttcacacacactcatgcccctctttcacacgcagtttgctgcacacagtgggatttagcagatagaatgcattctcttgtcctgtgtagtccaataagacatttactgaacacctggtactatctatgctaaatgctctgaatagctctctaggtgcaaagagaagagtaaggcatggtcccagatcagtggaacttaggttttaagaatgttcacttactatacattctgtgacgaagcctaaaataaacttagcctaccatctctataggttttataaaatttgcaaaagtaatcctttctcagtaaattcaagtaatggaaatgtatatgaaaaaagtaaacttctttgttcttcaccagtcccactgcgtggagctaactgccataaacagtttgctttatatggtcccaggtttttccattcctggatgatgatgtagctatataaatagatttagaagaacaaagacaggatggtactgacataggattttgtaacgtgcttctccaaacgaacaaaatggatctctttgcatttcagcacttacagatttgcctcattctatttagaggcagaatattgcattggatgcatgtcatcatggactcggtacttctatttatggacaggaggttttttttcccagtttgctgctattacaaacaatgccacaatgaatgatctgaaacataaaactttgcgttgtgtggtagcattttggggaatagattcctggaagtgcaatttcaagatccaatagtgggaatatttttaaaatttgaataaatatagccacatttccttttgtaaaaaaaaaaaaaaaaaagcatcagatacaaataagatagatataatagtatttgctttcctctccctcataacgttgtattatcattaaaatgtttttggc

SEQ ID NO: 5158 - DNA, 2338 bp, Homo sapiens
  misc_feature (340)..(353): n is a, c, g, or t
  misc_feature (1210)..(1210): n is a, c, g, or t
agctcactgcaacctctgcctcccggtttttcaagcgattcttctgtctcagcctcccaagtagctggaattacaggagcccgccaccttgcccagctaatttttgtatttttagtagagacggggtttcaccatgttggccaggctggtcttgaactcctgacctcgtgatccacctgcctcggcttcccaaagtgctgggattacaggaatgagccactgtgccagctgacacgttttttcttttgtgtgaattttatgttctagttttgggacaagggtaattagttcttgactagtgaacaaatgagagaacatttaccccttactcattttacannnnnnnnnnnnnngaagccctagagttggttggcacagtcgcagttgactgagcatagaggaaacaggtctttttacattctctctcatcactggagctcagttgaactctaagaccttagcactcaaagagtctgaaaagaaatgagggagaggctaaatttaagctctccactcccacagaaaggacagggcaccctacaatctaaaagccagtgaggcagcctatcatctgtttcacatctgttctgaaagggatagtttaatgcaagaagtaagaggcctgtagtgactgtaaactcatgaaatgtgcacattggttatctgtgcacatttccacttgcaccataacataagaaagcgtacatggagtgtaattacttccagaagccccgtctaaccaacctattcagatgtggcacactttctgtcataaatgggagaccacacgtagagctcggtcaccaaggaatgcccaacatccctttacctctcacaatgagcagccacgctcaccgggaagcagtgtggggacttcagtggggtgtcccttagtggagaacacctttcatcatttttatagagacaattcccttgagaatgtaggcttttcatcttaggaacaattaggaagaatctccagctgggagtgttcttatgtatacagaaacaatgggtcgcattggttcatacttaggtgatattaggtttggctatattgatgtttggtgccacttaccttctagattttcccaaaagttgggtcattgctatgggaaattggggcctgcagatgggggagaaatgatcattattggtgcagggaaggggttcaggcagagctggagtctgaggctcagtgtgagaaacngggcagttttactagtagagttcaggtcctgggctcctctcctcacccactgtgtcccgaactgaggccagctgtgatcggcaaattgcttatctctaggtagtttaaagaaaacgtaagagtttggggggtggtgggagaataactgtagaaagaccctaaactcttctctcccccagcaaattatcttgtataatgtttaaaaacccaaaggccagatctccccttttaacgtgaatcagaaggaggatggcaattggaccaagggcagagtggccacacttgaaacacattataaaatgggaatatatttcagggaaccccacccccacacttccactccacctcacacctgttggtcctgctttgtgggtgattgattgatacccaaggactgccccacctttaaattcctgcaatttatgctgcaaccaacatcttagtgtttgctctctccgggaagaggccaggtgggggagaacatacggtccagagcctgagatcgcctggctggggtgcaggcaagcaggaacccagtctagatagaatgcagtgttctctaaagctatggatggtttcagtgaaatgtctgtgtctgacaatcgtcacgcaagagtacttactgtcttcccttgtacatacattgtctgtgtttagcttttcctagtattgtgaggtttcaaataggggttccatgtaaatactctttctgctactgaaatgccggcccccttgagtatgcatcacccccacagatggttttgcctttctctatgctaacactttttgagccactgacgtgcagatcggtggttagtttcttgggcttttattttgcaattttatatatatacacatattatatatatatatatatttatgggttggttttgtatagttttctgtttgaatctctgagcaccaaagctgccctttgattttcacgagaactttccaaagccacttcctgagccctcctgctgctttggtgtctgacggtgatgctgcggtggcatctctgcccgtgaatttctgtatgtgtgtgctgttacctcacctgcagacatgaccctagtaaatctaacgtgcttggcttcccaaaaaaaaaaaaaaaaaaaaaaaagggac

SEQ ID NO: 5159 - DNA, 700 bp, Homo sapiens
gatcaaatgaagcaggagtgccaaacaagcctcataggctcttcaccctacaacatctatgttaggtagaaaagtatgtggatttttaaaaatcatctggtataaagagtttttaagaactatcttcatcatcttagtatcagattgtgcttgagaagttaggtacaatgtaatgtgattcattgctaaaaacaaaatgcctcccacaattgcagactcactcattttaccaaactatggaatttgtcaacaccttttcttgggaccaaggaagcaaagtcagtggataccgtgtcctgtagacatgtcacttgtgataaggcacggacaacatgaactggcaaaaacattggcatttggtcaaatgcttatgagctaaggatagaagggaaaaaatagttgtgtgaatgattttacctcttagttcttacgaaggatggttatcgggctggaaaaatgtttattggactgatgctttggagcctctcaatgaatgtaataaaaaaaatgtgtagtgagcacaaatgtatggatttgcagcacaatccaactttgaaaatgtgaaaataagtgagttagtgatatgtttggttggtgttaatttgagtcctaaataaaatcgagaactggtaaaaaaaaaaaaaaaaaaaaaaaaaaaaaaaaaaaaaaaaaacaaacaaaaaaaaaaaaaagttggggc

SEQ ID NO: 5160 - DNA, 1507 bp, Homo sapiens
  misc_feature (740)..(740): n is a, c, g, or t
  misc_feature (744)..(744): n is a, c, g, or t
  misc_feature (747)..(749): n is a, c, g, or t
  misc_feature (755)..(755): n is a, c, g, or t
  misc_feature (925)..(941): n is a, c, g, or t
  misc_feature (1167)..(1207): n is a, c, g, or t
tttcacaaataaaaaataaaaaaaaatgagaaagggaaagagagaaattaaaagaaaaaagtttttggaaccaaagaagataagaattctgttccatttggtagtttattttaattcttagagcaactctttgagaggaagctggaggagaacatccatgatacggagagggatctgaatgtagatgttatgagaagcatcataggaagtagagctgtttatattgtaggagaactccaaaaagaagaatttgtctttgctttgttgtcttctgtctgttttcagatctcttattgggtcagggacagttgtcttttgctgcttttgaaggcagttctaattaatagagaagcagttttaaggactctccaaagatgattcttggaagtgacacctagaggcttgtatgaacactgggaattgaacttcagaatctccttgggtggaatgagttggattacatgcactcgaaggtcacttttattcctgagattctgtgaaggtctcgattggcaaatgagtgtgctactttacatgttcccatttaatcatcacaccaaccctctgaggcatgttagagaggtagagtaggttttctaaggtaatgtctaattaatggcagagcacactcccccacacatatagcttaattctcctacatttgtatagcccttccttcgttccttcgttccttcgttccttcgttccttccttccttccttccttccttacttacttangganatnnngataanttctataatgccttccgtggagggggctccctgcctgagagcctgcggagggtccaggagctgacaggccgctctgtggagtttgaggagatggacattttggaccagggagccctacagcgtctcttcaaaaagtacagctttatggcgggcatccactttgcggggcnnnnnnnnnnnnnnnnngtcggagcagaagcctctggattattacagagttaacctgaccgggaacatccagcttctggagatcatgaaggcccaccggggtgaagaacctggtgttaagaagctcagcccactgggtacgggaaacccccagtacctgcccccttgatgaggcccacccccacgggggggatgtaccaaacccttaccggcaaggggccaggttcctccattcgcgggaaannnnnnnnnnnnnnnnnnnnnnnnnnnnnnnnnnnnnnnnngggaaagccacaggctgctggcgcttatatgggacccccactcggagccccagggcctccgggcgggaacgtggtggaggaaaccgccgggggaacgtccagagaacgcccctgcgcgtcaagggcccacccctggagggcgcaccgcggcagaaaccgagaagaccccaggcctgggttctggtgggaaattagaagatacgtacccgcagaaggaagggttctcgcgtgggttcgccggtagctaaaccgcgccgtagggctgcgctgttcgacggaccatggagccaagaactgtga

SEQ ID NO: 5161 - DNA, 2955 bp, Homo sapiens
  misc_feature (2111)..(2133): n is a, c, g, or t
ggcacgaggggcggcggagccgactcgtcgcggccgaggcgcacgcggtccgcgccggcgtcagtctgggattggccggcccgcgacttcctccgccccctgccaatcgccggggacgacttccgtgggtttttccggctctcccgcgtcgctaaggagcgacgggctgtcggccagaccccgagttctcggtgcgctcagcggccgccgacgctaggaggccgcgctccgcccccgctaccatgaggccccggaaagccttcctcctgctgctcttgtgggcttggtgcatgcttgcttggccgtggcgggtgccgagggcccggacgaggattcttctaacagagaaaatgccattgaggatgaagaggaggaggaggaggaagatgatgatgaggaagaagacgacttggaagttaaggaagaaaatggagtcttggtcctaaatgatgcaaactttgataattttgtggctgacaaagacacagtgctgctggagttttatgctccatggtgtggacattgcaagcagtttgctccggaatatgaaaaaattgccaacatattaaaggataaagatcctcccattcctgttgccaagatcgatgcaacctcagcgtctgtgctggccagcaggtttgatgtgagtggctaccccaccatcaagatccttaagaaggggcaggctgtagactacgagggctccagaaccgaggaagaaattgttgcctaggtctgagaagtctcccagcccgactggacgcctccaccagaagtcacgcttgtgttgaccaaagagaactttgatgaagttgtgaatgatgcagatatcattctggtggagttttatgccccatggtgtggacactgcaagaaacttgcccccgagtatgagaaggccgccaaggagctcagcaagcgttctcctccaattcccctggcaaaggtcgacgccaccgcagaaacagacctggccaagaggtttgatgtctctggctatcccaccctgaaaattttccgcaaaggaaggccttatgactacaacggcccacgagaaaaatatggaatcgttgattacatgatcgagcagtccgggcctccctccaaggagattctgaccctgaagcaggtccaggagttcctgaaggatggagacgatgtcatcatcatcggggtctttaagggggagagtgacccagcctaccagcaataccaggatgccgctaacaacctgagagaagattacaaatttcaccacactttcagcacagaaatagcaaagttcttgaaagtctcccaggggcagttggttgtaatgcagcctgagaaattccagtccaagtatgagccccggagccacatgatggacgtccagggctccacccaggactcggccatcaaggacttcgtgctgaagtacgccctgcccctggttggccaccgcaaggtgtcaaacgatgctaagcgctacaccaggcgccccctggtggtcgtctactacagtgtggacttcagctttgattacagagctgcaactcagttttggcggagcaaagtcctagaggtggccaaggacttccctgagtacacctttgccattgcggacgaagaggactatgctggggaggtgaaggacctggggctcagcgagagtggggaggatgtcaatgccgccatcctggacgagagtgggaagaagttcgccatggagccagaggagtttgactctgacaccctccgcgagtttgtcactgctttcaaaaaaggaaaactgaagccagtcatcaaatcccagccagtgcccaagaacaacaagggacccgtcaaggtcgtggtgggaaagacctttgactccattgtgatggaccccaagaaggacgtcctcatcgagttctacgcaccatggtgcgggcactgcaagcagctagagcccgtgtacaacagcctggccaagaagtacaagggccaaaagggcctggtcatcgccaagatggacgccactgccaacgacgtccccagcgaccgctataaggtggagggcttccccaccatctacttcgcccccagtggggacaaaaagaacccagtttaaattttgagggggggaagannnnnnnnnnnnnnnnnnnnnnnttatagaagaacatgccacaaaactgagcaggaccaaggaagagctttgaaggcctgaggtctgcggaaggtgggaggaggcagacaccctgcgtggcccatggtcggggcgtccacgccgaggccggcaacaaacgacagtatctcggattccttttttttttttttttaattttttatactttggtgtttcacttcatgctctgaatactgaataaccatgaatgactgaatagtttagtccagatttttacagaggatacatctatttttatcattatttggggtttgaaaaatttttttttacaccttctaatttctttatttctcaaagcagataattcttctgtgtgaaaatgttttctttttttaatttaaggtttaaaattcctttgccaaatcatgttgattttgctctttgctttttcgttgtctgagaaattgttggcgtagatttggcttctggtatgtgtttctgattgcttcctgttgagcacaaagtgagagctgccactgagcagccctgccaggggtgctgtttcaggctgggcatcgccaggcggcctccctgcaaaccaagggctgggggcaaaggggcatgatccagggtcccccagggtgggctcagctccagggagaggccacccacgtggcagccccacctcttgagagcccccagtgccggagcagaaaggaccctggacccagaggcagatactgcggggtggtagaaaaggtagagtaggctgtggcaatggaataaaacacgattaaaaacgttaaaaaaaaaaaaaaaaaaaaaaaaaagaatctatgtcgtgc

SEQ ID NO: 5162 - DNA, 10742 bp, Homo sapiens
  misc_feature (1807)..(1809): n is a, c, g, or t
  misc_feature (1973)..(1998): n is a, c, g, or t
  misc_feature (2011)..(2064): n is a, c, g, or t
  misc_feature (2108)..(2146): n is a, c, g, or t
  misc_feature (2194)..(2296): n is a, c, g, or t
  misc_feature (2442)..(2461): n is a, c, g, or t
  misc_feature (2572)..(2592): n is a, c, g, or t
  misc_feature (4563)..(4563): n is a, c, g, or t
  misc_feature (5108)..(5122): n is a, c, g, or t
  misc_feature (5613)..(5631): n is a, c, g, or t
  misc_feature (5750)..(5829): n is a, c, g, or t
  misc_feature (6028)..(6067): n is a, c, g, or t
  misc_feature (6124)..(6156): n is a, c, g, or t
  misc_feature (6498)..(6528): n is a, c, g, or t
  misc_feature (6599)..(6624): n is a, c, g, or t
  misc_feature (6686)..(6746): n is a, c, g, or t
  misc_feature (6912)..(7001): n is a, c, g, or t
  misc_feature (7019)..(7070): n is a, c, g, or t
  misc_feature (7295)..(7385): n is a, c, g, or t
  misc_feature (7527)..(7575): n is a, c, g, or t
agtatttctctcgcgagaaaccgctgcgcggacgatacttgaagaggtggggaaaggagggggctgcgggagccgcggcagagactgtgggtgccacaagcggacaggagccacagctgggacagctgcgagcggagccgagcagtggctgtagcggccacgactgggagcagccgccgccgcctcctcgggagtcggagccgccgcttctccactggcaggggccgcctgaagtgggagcagcgcctggagaaggcgggaggagcccggcccgggggacgggcggcgggatagcgggaccccggcggcgcggtgcgcttcagggcgcagcggcggccgcagaccgagccccgggcgcggcaagaggcggcgggagccggtggcggctcggcatcatgcgtcgagggcgtctgctggagatcgccctgggatttaccgtgcttttagcgtcctacacgagccatggggcggacgccaatttggaggctgggaacgtgaaggaaaccagagccagtcgggccaagagaagaggcggtggaggacacgacgcgcttaaaggacccaatgtctgtggatcacgttataatgcttactgttgccctggatggaaaaccttacctggcggaaatcagtgtattgtccccatttgccggcattcctgtggggatggattttgttcgaggccaaatatgtgcacttgcccatctggtcagatagctccttcctgtggctccagatccatacaacactgcaatattcgctgtatgaatggaggtagctgcagtgacgatcactgtctatgccagaaaggatacatagggactcactgtggacaacctgtttgtgaaagtggctgtctcaatggaggaaggtgtgtggccccaaatcgatgtgcatgcacttacggatttactggaccccagtgtgaaagagattacaggacaggcccatgttttactgtgatcagcaaccagatgtgccagggacaactcagcgggattgtctgcacaaaacagctctgctgtgccacagtcggccgagcctggggccacccctgtgagatgtgtcctgcccagcctcacccctgccgccgtggcttcattccaaatatccgcacgggagcttgtcaagatgtggatgaatgccaggccatccccgggctctgtcagggaggaaattgcattaatactgttgggtcttttgagtgcaaatgccctgctggacacaaacttaatgaagtgtcacaaaaatgtgaagatattgatgaatgcagcaccattcctggaatctgtgaagggggtgaatgtacaaacacagtcagcagttacttttgcaaatgtccccctggtttttacacctctccagatggtaccagatgcatagatgttcgcccaggatactgttacacagctctgacaaacgggcgctgctctaaccagctgccacagtccataaccaaaatgcagtgctgctgtgatgccggccgatgctggtctccaggggtcactgtcgcccctgagatgtgtcccatcagagcaaccgaggatttcaacaagctgtgctctgttcctatggtaattcctgggagaccagaatatcctcccccaccccttggccccattcctccagttctccctgttcctcctggctttcctcctggacctcaaattccggtccctcgaacaccagtggaatatctgtatccatctcgggagccaccaagggtgctgccagtaaacgttactgattaatgacagtaggtccgctatctctgtcaaaatggacgctgcattccaactcctgggannngccggtgtgagtgcaacaaagggttccagctggacctccgtggggagtgtattgatgttgatgaatgtgagaaaaacccctgtgctggtggtgagtgtattaacaaccagggttcgtacacctgtcagtgccgagctggatatcagagcacactcacgcggacnnnnnnnnnnnnnnnnnnnnnnnnnntacagaatggccnnnnnnnnnnnnnnnnnnnnnnnnnnnnnnnnnnnnnnnnnnnnnnnnnnnnnntgtaatgcgggctttcatgttacacgagatgggaagaactgtgnnnnnnnnnnnnnnnnnnnnnnnnnnnnnnnnnnnnnnnatggaatgtgtatcaatgaagatggcagttttaaatgtatttgcaaannnnnnnnnnnnnnnnnnnnnnnnnnnnnnnnnnnnnnnnnnnnnnnnnnnnnnnnnnnnnnnnnnnnnnnnnnnnnnnnnnnnnnnnnnnnnnnnnnnnnnncctacagatgtgaatgcttccctggactggctgtgggtctggatggccgtgtgtgtgttgacacacacatgcggagcacatgctatggtggatacaagagaggccagtgtatcaaacctttgtttggtgctgtcactaaatctgannnnnnnnnnnnnnnnnnnnagtatgcatttggggaaccttgccagccgtgtcctgcacagaattcagcggaatatcaggcactctgcagcagtgggccaggaatgacgtcagcaggcagtgatataaatnnnnnnnnnnnnnnnnnnnnnatttgcccaaatggaatctgtgaaaaccttcgtgggacctataaatgtatatgcaattcaggatatgaagtggattcaactgggaaaaactgcgttgatattaatgaatgtgtactgaacagtctcctttgtgacaatggacaatgtagaaatactcctggaagttttgtctgtacctgccccaagggatttatctacgtgacagttgtatttatttttttaagttacaataaaatgctatcaagtccttgcattaatggagtctgcaagaacagcccaggctcttttatttgtgaatgttcttctgaaagtactttggatccaacaaaaaccatctgcatagaaaccatcaagggcacttgctggcagactgtcattgatgggcgatgtgagatcaacatcaatggagccaccttaaagtcccagtgctgctcctccctcggtgctgcgtggggaagcccgtgcaccctatgccaagttgatcccatatgtggtaaagggtactcaagaattaaaggaacacaatgtgaagatatagatgaatgtgaagtgttcccaggagtgtgtaaaaatggcctgtgtgttaacactagggggtcattcaagtgtcagtgtcccagtggaatgactttggatgccacaggaaggatctgtcttgatatccgcctggaaacctgcttcctgaggtacgaggacgaggagtgcaccctgcctattgctggccgccaccgcatggacgcctgctgctgctccgtcggggcagcctggggtactgaggaatgcgaggagtgtcccatgagaaatactcctgagtacgaggagctgtgtccgagaggacccggatttgccacaaaagaaattacaaatggaaagcctttcttcaaagatatcaatgagtgcaagatgatacccagcctctgcacccacggcaagtgcagaaacaccattggcagctttaagtgcaggtgtgacagcggctttgctcttgattctgaagaaaggaactgcacagacattgacgaatgccgcatatctcctgacctctgtggcagaggccagtgtgtgaacacccctggggactttgaatgcaagtgtgacgaaggctatgaaagtggattcatgatgatgaagaactgcatggatattgatgagtgtcagagagatcctctcctatgccgaggtggtgtttgccataacacagagggaagttaccgctgtgaatgcccgcctggccatcagctgtcccccaacatctccgcgtgtatcgacatcaatgaatgtgagctgagtgcacacctgtgccccaatggccgttgcgtgaacctcatagggaagtatcagtgtgcctgcaaccctggctaccattcaactcccgataggctattttgtgttgacattgatgaatgcagcataatgaatggtggttgtgaaaccttctgcacaaactctgaaggcagctatgaatgtagctgtcagccgggatttgcactaatgcctgaccagagatcatgcaccgacatcgatgagtgtgaagataatcccaatatctgtgatggtggtcagtgcacaaatatccctggagagtacaggtgcttgtgttatgatggattcatggcatctgaagacatgaagacttgtgtagatgtcaatgagtgtgacctgaatccaaatatctgcctaagtgggacctgtgaaaacacgaaaggctcatttatctgccactgtgatatgggctactccggcaaaaaaggaaaaactggctgtacagacatcaatgaatgtgaaattggagcacacaactgtggcaaacatgctgtatgtaccaatacagcaggaagcttcaaatgtagctgcagtcccgggtggattggagatggcattaagtgcactgatctggacgaatgttccaatggaacccatatgtgcagccagcatgcagactgcaagaataccatgggatcttaccgctgnctgtgcaaggaaggatacacaggtgatggcttcacttgtacagaccttgatgagtgctctgagaacctgaatctctgtggcaatggccagtgcctcaatgcaccaggaggataccgctgtgaatgcgacatgggcttcgtgcccagtgctgacgggaaagcctgtgaagatattgatgagtgctcccttccgaacatctgtgtctttggaacttgccacaacctccctggcctgttccgctgtgagtgtgagataggctacgaactggacagaagcggcgggaactgcacagatgtgaatgaatgcctggatccaaccacgtgcatcaagtgggaactgtgtcaacactccaggcagctatatctgtgactgcccacctgattttgaactgaacccaactcgagttggctgtgttgatacccgctctggaaattgctatttggatattcgacctcgaggagacaatggagatacagcctgcagcaatgaaattggagttggtgtttccaaagcttcctgctgctgttctctgggtaaagcctggnnnnnnnnnnnnnnnatgtgtcctgctgtgaacacatccgagtacaaaattctttgtcctggaggggaaggtttccgaccaaatcctatcaccgttatattggaagatattgatgagtgccaggagctaccagggctgtgccaaggaggaaaatgtatcaacacctttgggagtttccagtgccgctgtccaaccggctactacctgaatgaagatacacgagtgtgtgatgatgtgaatgaatgtgagactcctggaatctgtggtccagggacatgttacaacaccgttggcaactacacctgtatctgtcctccagactacatgcaagtgaatgggggaaataattgcatggatatgagaagaagtttgtgctacagaaactactatgcatccttcatcacagctatgtgcaatatgccaagattaccctcggtcattcctgtcaacaaggggtcaatgtcattggccgggcgtggaacaagctcttcttttttttagtttannnnnnnnnnnnnnnnnnngctacactctgtggaagtcaaaggccaggctttgtcatcgacatttataccggtttacccgttgatattgatgagtgccgggagatcccaggggtctgtgaaaatggagtgtgtatcannnnnnnnnnnnnnnnnnnnnnnnnnnnnnnnnnnnnnnnnnnnnnnnnnnnnnnnnnnnnnnnnnnnnnnnnnnnnnnngagtgtcagaacggcccagtgtgccagcgcaacgccgaatgcatcaacactgcaggcagctaccgctgtgactgtaagcccggctaccgcttcacctccacaggacagtgcaatgatcgtaatgaatgtcaagaaatccccaatatatgcagtcatgggcagtgcattgacacagttggaagcttttattgcctttgcnnnnnnnnnnnnnnnnnnnnnnnnnnnnnnnnnnnnnnnntggacataaatgaatgtgaaagagatgcctgtgggaatggaacttgccggaacacannnnnnnnnnnnnnnnnnnnnnnnnnnnnnnnnttcatcctttctcacaacaatgactgtatagatgttgatgaatgtgcaagtggaaatgggaatctttgcagaaatggccaatgcattaatacagtggggtctttccagtgccagtgcaatgaaggctatgaggtggctccagatgggaggacctgtgtggatatcaatgaatgtcttctagaacccagaaaatgtgcaccaggtacctgtcaaaacttggatgggtcctacagatgcatttgcccacctggatacagtcttcaaaatgagaagtgtgaagatattgatgagtgtgtcgaagagccagaaatttgtgccctgggcacatgcagtaacactgannnnnnnnnnnnnnnnnnnnnnnnnnnnnnnttttccttgtcctccagtggaagaaggtgccaagatttgcgaatgagctactgttatgcgaagtttgaagnnnnnnnnnnnnnnnnnnnnnnnnnnagaaatcactccaagcaggaatgctgctgtgccttgaagggagaaggctggggagacccctnnnnnnnnnnnnnnnnnnnnnnnnnnnnnnnnnnnnnnnnnnnnnnnnnnnnnnnnnnnnnggatcatcgtgggacctgatgattcagcagttgatatggacgaatgcaaagaacccgatgtctgtaaacatggacagtgcatcaatacagatggttcctatcgctgcgagtgtccctttggttatactctagcagggaatgaatgtgtagatactgatgaatgttnnnnnnnnnnnnnnnnnnnnnnnnnnnnnnnnnnnnnnnnnnnnnnnnnnnnnnnnnnnnnnnnnnnnnnnnnnnnnnnnnnnnnnnnnnatgatgacatgtgaagannnnnnnnnnnnnnnnnnnnnnnnnnnnnnnnnnnnnnnnnnnnnnnnnnnncacttatgggtcatatgaatgcaaatgtcccgtgggatatgtgctcagagaagaccgtaggatgtgcaaagatgaggatgagtgtgaagagggaaaacatgactgtactgaaaaacaaatggaatgcaagaacctcattggcacatatatgtgcatctgtggacccgggtatcagcggagacctgatggagaaggctgtgtagatgagaatgaatgtcagacgannnnnnnnnnnnnnnnnnnnnnnnnnnnnnnnnnnnnnnnnnnnnnnnnnnnnnnnnnnnnnnnnnnnnnnnnnnnnnnnnnnnnnnnnnnaccaggacgagtgccttgacaatcgggaagggtactgcttcacagaggtgctacaaaacatgtgtcagatcggctccagcaacaggaaccccgtcaccaaatcggaatgctgctgtgacggagggagaggctggggtccccnnnnnnnnnnnnnnnnnnnnnnnnnnnnnnnnnnnnnnnnnnnnnnnnngtccccatggccgaggattcatgaccaatggagcagatatcgatgaatgcaaggttattcacgatgtttgccgaaatggggaatgtgtcaatgacagaggatcatatcattgcatttgtaaaactgggtacactccagatataactgggacttcctgtgtagatctgaacgagtgcaaccaggctcccaaaccctgcaattttatctgcaaaaacacagaagggagttaccagtgttcatgcccgaaaggctacattctgcaagaggatggaaggagctgcaaagatcttgatgagtgtgcaaccaagcaacacaactgccagttcctatgtgttaacaccattggcggcttcacatgcaaatgtcctcccggatttacccaacaccatacgtcctgcattgataacaatgaatgcacctctgacatcaatctgtgcgggtctaagggcatttgccagaacactcctggaagcttcacctgtgaatgccagcggggattctcacttgatcagaccggctccagctgtgaagacgtggacgagtgtgagggtaaccaccgctgccagcatggctgccagaacatcattgggggctacaggtgcagctgcccccagggctacctccagcactaccagtggaaccagtgtgttgatgaaaacgaatgcctcagcgctcacatctgcggaggagcctcctgtcacaacaccctggggagctacaagtgcatgtgtcccgccggcttccagtatgaacagttcagtggaggatgccaagacatcaatgaatgtggctctgcgcaggccccctgcagctatggctgttccaataccgagggcggttacctgtgtggctgtccacctggttacttccgcataggccaagggcactgtgtttctggaatgggcatgggccgaggaaacccagagccacctgtcagtggtgaaatggatgacaattcactctccccagaggcttgttacgagtgtaagatcaatggctaccccaaacggggcaggaaacggagaagcacaaacgaaactgatgcctccaatatcgaggatcagtctgagacagaagccaatgtgagtcttgcaagttgggatgttgagaagacagccatctttgctttcaatatttcccacgtcagtaacaaggttcgaatcctagaactccttccagctcttacaactctgacgaatcacaacagatacttgatcgaatctggaaatgaagatggcttctttaaaatcaaccaaaaggaagggatcagctacctccacttcacaaagaagaagccagtggctggaacctattcattacaaatcagtagtactccactttataaaaagaaagaacttaaccaactagaagacaaatatgacaaagactacctcagtggtgaactgggtgataatctgaagatgaaaatccaggttttgcttcattaattcaccatccagaaaccaaataattaaaagaaaaacaaatatagataggtagaactatattttcccccaatcagaatcatcatatcataggtacaatctttcaccaagtaaatttgtataaataagcactattctttgtattaccaaagcaaggtacaggtgactaccctagttcaaaacaaccactttctcaggcttctcatgtgtgtagctaagctaccttgtcatatgtgttgattcttgaaaactgggacgtgtatttccattgggggttggccatttatgctgacatgccatccttccagcaaacgtacgggaatgtgctttcaattgatggactactctattttttgcaaatttgtaaactttgcttctccaaatacaagtactaggttgtccatttatggtacctatttggtgctagtaaattttcaaactagatttataaatgcactgtaatatgtacacaacttagaaaccaaattacaagtattcagttccaatacttcattaatttcaatcaaccaaagttagttcagtagcttatctcagttatgagtataatacattacatgtaaattaagtgtgtgtatactgtaatcgtgctattttttatcattgaaacatttataaactagaataataatgcccttaatgtgagggtttgtaatggtgcttattaagaccaaagacttgttaaatgtatacaccaagtggtaatgaaatttctgtgactggcccacacgtgcatagaggtctgggaggaccaggaaacagcctcagtggccagaggatcaccagtgcatccttcatcacagcatgtgcaatatgccaagattaccctcggtcattcctgtcaacaaggggtcaatgtcataaatgtcacaataaaacaatctcttcttttttttagtttaccccttggctttgtgttcttgcatggatttggggttggaggggccattccggaggctaaataaagtctcctggatttaaattatcctgggtctcttacttatggcttatgaaagtaccaaatgtataaccactagaagaaaatttaacatatgagtcgatcccttgttttatccattgaaagtagcagagtctggtgtcattaacctgacttgcttgtgagaaatttagattgtagagtcatttctgaaacatgacctaattcatcttgtgacttttaaatagtcttaaataccaagttcagtcattgtcttagagcacatgaatttcattataatagatttatcatgcccccctctcaaatatacacagttttggcaagccttaggtgttctgttccatttttttttcccctaaacatctttcgttagtcaatgctcatctaattacaaagggataatcccagactgtatccaattgctgtaacttttggtttcttaatgtcataatttttaaagtctgttttattttaagtgcaatattgagtatttagctgttaggctcaatccgtcgatatgaaataattttttaaatccctaagggcaggaaagcatttcgtgggtagtgaaaataagagggaaataagatgggcatgaaggttggtgggcggaggaaactagggtaggggacacagggaaagtgcctcttccaaaattctttggaagagctcagctagaaaaaaatggagtagatttggcttcatactattccggaagcaaccaggtcagctatgtcaccccgaca

SEQ ID NO: 5163 - DNA, 2014 bp, Homo sapiens
caagggatgaaaaaaacaatcagaaaaactgaagacttgtctttggacaaaattgagaagaactcataaacttggcttcctcgcttctgctcctcagacgcgcgtggatgatttgaagatattagcctaacaagatggaagcaggtttaaaattttacataagaagttacctttttcagttgtgttgatgttcctttcagctggtcctatagtacccctcctcaggaatgtctccccagtgcaaggacaaagactgaagagactgctatattgatggactctcaagccaactatgaagttgaaacaaagaaagtgatcacctgaagacacctcctctgctaagaaacacccccaaattgtgcagcttctgccactagaactctcagaacaagagacaatcttttcaagaaacagaaaaactcaataatgacatctagattttcatgagccaagaactttcccttcctcatgtgtattcctctgtttgtacttaaattcatgtgacattcatttttttcctagtatggatatgcttattaatgcacttgtttcaaaatcccaaattgcacaaatgtgttaatattttaagaaacaaaatgaatcctacaaggagaatgatttttagccacacatagggttggatcttgagagtgacctacagaataaaagtacttttaaaataaagtagtcagaggctattcaaagggtaaaataatcatagtaccacattggtccacttgacactaaccaatcgatcatttttttttaatcaagaaagctagattctatcagataaaatcactgcttctaaagagtttaaatctagttagaaaaagttatagaaatgtttgcaaagataagtaacagatagagtcagtagaggataagatcaaaaacaaaaccaagcaaaagatgagttcaggggagtttgccatcaagttggcaaaactgacttacttagggaagaaagttataaaacaggaaaatatgagatgaaccttgagtgatgtggaagatttagataaatggaaaggaaggagaaaatggagttcactatcagtagcttttgcactggtctgcccttcctaaattaagtatgcacttcaatttgatgagtggaaacagtctatctgggcagtaaccagggagctttgtgcctagtagattgcttctgttctgcacttctttggtttcccacctcaatgtaaaaaatagctagcaatgaagtccagaagttgtcaatggttcatccccagaagaatgcataatgtccaaagttgtatgtgtatgatgtcttcaatggtattaagttatttcaaattcttagttcacctacataaatcatttctaacaagcatcttcttaaccaactttatgcacagtgtatgtttgtaagtgcttctgcacgaatgtttatacatgactgtttccatagtacttatgtttttaaaaatattcagtcatttcctactataatcctcatgtatccatgtaactgactcaaaaatacttcagccacagaaagctaaaactgagcaaatctcattcttcttttccatcccctttgcatgtggctggcatttagtaatgattaataatatggccagctgaataacagaggtttgagacacaattctttctcaaaggagtcagctaagctgggtctacttatggacaaacatctaaatgtgtggaagtatctgatatttgacaatggtaaatttccacttagctagctagcattgtcagacttcaatctcctcatggctctggccgtcctgttttaagcatgataattgttggccacatctcacatagttctcattgagtgagttcataaataaacagggtttttttttttttttaaagagcagccaagcacaaagtgtgactttgttgacattttatgtgactttgtcatatgttcctaacccccaataaaagcaatgttgcatcaactgtgaaaaaaaaaaaaaaaaaaaaaaaaaaaaaaaaaaaaaaaaaaaaaaaaaaa

SEQ ID NO: 5164 - DNA, 1664 bp, Homo sapiens
gcaggagagagtaagagatgaagagatgcaactaagccctctaaataccaaactggaataataataaagctgtcttttaaaataacatgcttgtgcctgtcagtagctgctttatttgagtttttcattgctttgtttatattagtgccccctccctcctgggtgcctctagaattaaacaagcaggtatttaccaccaacttaatttttagttttaattttttttttttttttttttttttctctaaattttttatatttatttattgcagaaaaatatacaaagatatttacaaaacaatcataaaaatatgaatgcatttagacaccggatctatttgcattttaccatgggtcctcaataaataaatagaatgttgttttttgtattttaagtttttttttgtttttcccctcagaggaaggatgaaaaaaagaattaactgactatggttttgcaggccagtttgatcccagtatttttatttctaaaggtgttcttatagttcctctgattgttaccattttaaaatagagaaagtccatagtgatgcctttcctttcagtggctgattggcacgacctcttgagaatgcatgcatgaaaaaaataaaaataaaaacattcttcgtcaaaaaaaaaaaaaaaaaaacacaaacaactgttcagacttctatcagaatgcagaggtgtgaggatggtgccgctgcccgtctgggaatcactgtccacgggcctgtctcgctttctcttttaaaagtgcgccccacgccctgtttctttgaatttggattttgctcttctaatttccaagaaaatctttggcatatatttttatttttagttatccagctccagagtctctagactgtccattttctccttctctggaaacaatgacatctaggtctccggccctgctgagggggtggggggctccgcctgctagtgggacgcggacatggaccaggccccctccatcctccagaccgagaaggcgtagctgagccgctcgtgagccacatagctgcagcttgccatcttggagtccagctcgtcgctctggaggacctggtagaggaagtcgatgtacctggccgccagcttgagggtctgaatcttgctcagcttgtccgagggcagcgtggggatgatcttccgcagcgcggcgaacgcctcgttcagcgactgggtgcgctggcgctcccgcacgttggccatgacccgctgcgtctgcagctcctcgtaagactgcggactcccgccgccgctgctgctgccgccgccgccgcccgcgccgccgccgccgccacagcccgcagacttcttgccgcgcttgccctgggccgggctgcccggctcgtcgccgcctccgacgcccccacccgcggctccgccgggccccgcgccgccgcccgcgctgcgcctgctgctgcgccgcttgcgtcccccgcgcttgccgctcggcggctgctgccggtctggctcttcctcgctgttgctcaggctgtcgtcggccggcgagactggcgagctggacacgtcctgcatcatctctcgtgcggcgacgcgtggcctcgcgggcccggggcagaggagaagagcggggcgcctcagcccgccagcttcccccgcccgggccgccgcgcgccgacagcaacgga

SEQ ID NO: 5165 - DNA, 646 bp, Homo sapiens
ggccggaaggtagttgttactgtttgatgatgatatgatcatatacttagtgaaacctaaagactcctccaaaaagctcctagaactgataaatgaattcagcaaagtgtcaggagacaaaattaatgtactacaaatcagtagctctgttataccccagaagcgaccaagcttagaatcaaaccaagaactcaaccgcttttctgatagctgcaaaactaaactaaactaaaataaaatacttgggaatagacctaaccaaggaggtgaaagatgtctacaaggaaaacaactttagtatttttaatgggttaaaatgagaggcagcaggtacagcagaagaagtcagtgcgtgggcatccgcatccaatgggtactgcacctttgatggtaaggctttggttttgacttactaaattactaggtacgattattttctagtttttgtcattaaaccttaaaactactaagtaaccccttccatttcttgttaaatattgtaaaatttcatactctcatttatgctgcctgacgttagagtgtttgtttctattttgtgactaccttaaataatacctataaagagtaaactgttagtagtgtttttgctgtaattaaatgcagtacagcttaccttgggatccct

SEQ ID NO: 5166 - DNA, 2086 bp, Homo sapiens
  misc_feature (12)..(12): n is a, c, g, or t
  misc_feature (36)..(36): n is a, c, g, or t
gttaaaaaaaanattccacaaaatatacaactttcnccatatatataagcctggcaaaattagagtagtgaaagtcatgctagtcccatcacccaaatatgttatagacgccatagacaggtgatgtttggtcacctatggtaactgctacctgatgaagagcataatttctgcatatccatcctcaataccatggtaaattctggggcaatagagaagcaacagaactgccacaaagtatacctcaatataattcctctagttctgcttctaaaatctgaggacagtgctagtggggaaaataattttcaaactacctggttaaccaaaatacaaaagcagctgactatgtgtgatttcataatagcacatttcttgacacttagtgctagaaatgaagatttggattttcctaacaacttacatcaagaatgtagtgtagctcattattgagaatttaggaaagcctgaatccattaattaaggaaataaatgtgactcacatttcttttactgtgacacaataatgtgatcctaaaactggcttatccttgagtgtttacaactcaaacaactttttgaatgcagtagttttttttttttaaaaacaaacttttatgtcaaattttttttcttagaagtagtcttcattattataaatttgtacaccaaaaggccatggggaactttgtgcaagtacctcatcgctgagcaaatggagcttgctatgttttaatttcagaaaatttcctcatatacgtagtgtgtagaatcaagtcttttaataattcattttttcttcataatatttactcaaagttaagcttaaaaataagttttatcttaaaatcatatttgaagacagtaagacagtaaactattttaggaagtcaacccccattgcactctgtggcagttattctggtaaaaataggcaaaagtgacctgaatctacaatgatgtcccaaagtaaccaagtaagagagattgtaaatgataaaccgagctttaaaggataaagtgttaataaagaaaggaagctgggcacatgtcaaaaagggagatcgaaatgttaggtaatcatttagaaaggacagaaaatatttaaagtggctcataggtaatgaatatttctgacttagatgtaaatccatctggaatctttacatcctttgccagctgaaacaagaaagtgaagggacaatgatatttcatggtcagtttattttgtaagagacagaagaaattatatctatacattaccttgtagcagcagtacctggaagccccagcccgtcacagaagtgtggaggggggctcctgactagacaatttccctagcccttgtgatttgaagcatgaaagttctggcaggttatgagcagcactagggataaagtatggttttattttggtgtaatttaggtttttcaacaaagcccttgtctaaaataaaaggcattattggaaatatttgaaaactagaaaatgatggataaaagggctgataagaaaatttctgactgtcagtagaagtgagataagatcctcagaggaaacagtaagaagggataatcattaagatagtaaaacaggcaaagcagaatcacatgtgcacacacacatacacatgtaaacattggaatgcataagttttaatattttagcgctatcagtttctaaatgcattaattactaactgccctctcccaagattcatttagttcaaacagtatccgtaaactaggaataatgccacatgcattcaatgggatcttttaagtactcttcagtttgttccaagaaatgtgcctactgaaatcaaattaatttgtattcaatgtgtacttcaagactgctaattgtttcatctgaaagcctacaatgaatcattgttcaaccttgaaaaataaaattttgtaaatcaaaaaaaaaaaaaaaaaaccccccaacccacccaaacaaaagacaacagcagctctcactaccacagaatacacaaacgacaagagaccacagcgccccgggaggcaaggggagagaaaaagaagaggacaaggagtaatgaggaaagtaatagaggggg

SEQ ID NO: 5167 - DNA, 6480 bp, Homo sapiens
caatattttatagtttatggttgaaagaagcatttccttattgaaaccttggaaaggggaggctacagatctgtgagtagaaatttctgggctagtggccaggtgcggtggctcatgcctgtaatcccagcactttgggaggccgaggtgggtggatcatgaggtcaggaggttgagagggcgagaccatcctggctaacacagtgaaaccccatctctaataaaaatacaaaaaattagctgggcgtggtggtgggcgcctgtagtccagctactcgggaggctgaggcaggagaatggcgtgaacccagaaggcggagcttgcagcgagccgagattgtgccactgcactccagcctgggcgacagagcgagactccatctcaaaaaaaaaaaccaaaaaacaaatttctgggctagtttagatgaggttgaacatacacttaaacattgactcagtacccctttaagtgctcagttttatgctgggtgtggtaacactgtgcttagtttttatagtgtccactaaggagggcaggagggactgtaactaacactaaccaaacatctgccatatggattgtaatgataagggatttacataaattacataatttaattctcacagtaagtgtttgttgaaggcattgttaatatcttttccaaaactaagacacagagaggttaattaacttccccctgatcacaggactgctaagtgttagaggctgagtctagattcagaatcatggtctgcctgacctcagaagctgcagtctttcctctttgtcaagctgtagccccaaaagacaaaactctattctctcataatccagtaagaaagccgataagcaccaagaagggctgtccatgtggcttcagataagagagacgaacatcaggacaatgagtgggattcagaagtcttcgtgaaggaagtagaagttgacctaggttttaaagaatggtggagggtagggaactcttttattgagtgcctactatatttggcattgtagactctctccacagataattttatttaatgcacagcaatccagggttgtgagattattagtccatttcacatatgcaaaataggaggctatgttaagacaacaaagcataaaaaaagaaacatatgagactaaacgataaagcaaatttctgaaacctctacacgtagtgagtgctagagctagggtgagtgggatttggatttcagcaggtagagacagtgtgaggattagcatctgggtgaggaatgaatgacatgaataaagggcaagaatctgggaatgtgaagcttgtccaggaaacataaaggagcccagttgacctgggtttgaggaaaggtggaaggaaatactagaaaggtgttttggagccaggggcagtctggatgttttggcctagaatgccaaggcttaagaaatttgcactgagtttggttttttaggggccaaggattactttgagcaaatgaatgagatggagtatttgccatcagttgctgtgagatagattggaaaaagaaaccgattaggatattgcttcaaaaccagttaggatgttgctttaaaagtcacatagagatgtcagtggaacctgaagagatgggaagaaaaggaaaatgtagtaaattttctttgaaaattaccaaaagtgtcttctttgcacttgtgctttttgtaactgctaggcatgcacgttttatggttaaggaaacgacattggtaaatgtctaataggagggagattcccagatcaccttaatgggtctcagactattaaaaagaactcctaattcaggatttcattccaaagtgccacttgaaccttcagtccaattctgccttccttcctgacccaggatattttaggctctccaaggtctttcgggttctccttttccctctaagccttaaaatgttctaggttttcatttgccttccagacgtctctttaacctttgccaaacttcatgtaggagtctgataatccagtgaactttctttatattctcattgtttgacattgtgaaatcaaaactatttcctaatgcaaagtaaatgcagagctaaagccccctaagcaaccttgcctgtcttttaatgcattcttcacaacactttctcctttttgtaggataaacattttcacttaacatcttaattcagagataccaacctagcacccacagtgttgttcttggaactttgagagtacaaggggttaaggtttcggtgtcagtgagatccgcactggctggcctttgcagctgatagatgttttactttggccttataaagacattttacccgctggaaacccttgtcgcatgacaggatcaaaaatagcccggctgcagcccctgctgtccatcaccacatgtaaactggcataagagtaggctctcttagccgtgtctacacgttgtagacacggcagcctccagggacagtgtttcataaagccacacctgttgttgcgagtgagccagtcacctgacctgcagcaaagttctgagtgtgtgcatgaccacgcgcctggtttctgacaagcagttaagaacatctctgagtgtcctcagaaacacttgatgacgtcgtttctcctggcactgggaaacatctacaagtctggtaaaattgagtgtatttttatcattggggccaaagtccactaccctctgagataaattcatcttttccatggatgttcgttaatgagtgctttcagtaaaactctgaaaaggcaaagcaaaatctatgtttctgaaaaatctacaagtgctgttttctgttttgagttctttgaaattgaaaggttgttacttgtccttgtacttcttacaagttggctttgccagcaaccacacagtattatagtgtcatgtttttagatataaatatagggggctttaatggagattattttaaagaagaagataaatcagatattcatggtagtgtttcagatgggcagtaataaattgcaagagtgagaatggagatgcatggaatttttgtttaaatacctcttgtgatttatttttttaaccacattaacttttaagtaacgtcattggagtctgtcttgtattatctgtgaatgtataattttaaaagatacttggttttgtttgactttcttgaacttttgcaggataacacatgattatacaattgatatgatttgtacaaaatatcaacgaatagggcagatttcgaacataacactaacgtatttctgctaatttggaggatgaaacaagagttagtagatgtgcaaaaaaagtttccttgttatgtaaaccttttaaatttctattaattttagaaatatttagttgtacttccctgtcctgccttttccctcaacctcatcatttccccaaaaccccttctgtctgtcttgcatagagataaacaagctggctgaccctcaggtgcctgatagtcaaacaggtttggttgaccgttgtgtccttatgaattttatgggggaaaaaaaagagaaagaaagaaaataagtgtgctgcacatctctttgggaatcactgccatgaatgttaatagcatttttgtagcttcccacgacagcctcttgtgacagagtgagctgcactacagttcgtttgagaagtgtgattctgctgtgtttaccacacttgtgaacttttaaactcctttttcttattttgtcgcctgcttccttttttaattattatttttaataagggtgactgaggttgcagagagattaatgtgtgctgagtctgcatagcaatttcaagtagggttgccatgataataaacatacggattttgttaacgtttatgttaatttcgacaaactggtgatcaccccacagaagtgaataattatggactaccttttgagtcctatattcttggctaagaatttttctatttacttaattaaacattcttattttatgaactcattacaaaattttccaaagtcttcatcaattgagcacttgttaaacctctcttacgtgtgtagccctcatgaatcttgatttattttccaaactcttgataaactgtacttagcagctccaaataatcatacatgacaattctagcagggagggtgtcatcatatttttggggtccagttcttctgggggcactctatgactttggctactgcctgagtattctcaatggaccactagaaagtagatattgtggcaaccctatgctcataataaccactaaatttgagtttgttttatctttgaacaacatgctacagttaggaggtgactaccgcctgactttgttttccatttctcaacaggatacctgcccactatgtctatccgcaggcttttgtgcagccgggagtggtcattccacacgtccagccgacagcagctgccgcctccaccaccccttacattgattacactggagctgcatacgcacaatactcagcagctgctgctgctgccgccgccgctgctgcctatgaccagtacccctatgcagcctctccagctgctgcaggatatgttactgctgggggctatggctacgcagtccagcagccaatcaccgcagcggcacctgggacagctgccgccgccgctgcagcagctgctgccgctgcagcatttggccagtaccagcctcagcagctgcagacagaccgaatgcaatagaccagccatctgatcaaagttgaattgttttctctttccctcccaattttccaatttttagtagctaataagagagttaacattgacttaacagctttaaaaaaaaaaacagccatgctattgtgaagcagagttattattttttttatactccaggtagtgttctaggtgagaaagaggtaagaatgaggggaatgggcacaattttggaaatcaatcccaaagagcctgagtaaatgaaaggccactacgaaatgacgccaggagtaacaacggaacttcacttttgtaacgggatttttatttttgctctttttatagtatcagggaagcaaactgccttttacaagttagaaaatgctgtttgaatctagttgaaccagggaatacagagcgagcaatatgtagcttgaattacatttaaaagcagattttttacaaacaaaatggcgaaagcactgattgtcatttttagcagtcacttaaggcctatagaacttttttcaagtcggaaggtcctgttcttactatctcaaaaatgggcatcgaacaatcaatctaggagcgtggcagtgggtaaaatggtggacaggcaccaaagctattttctcatctgtcctgtggatgagtggaactgtggaacaagtgatgtggaattaatgggtgcaacagctgtacagacaatcaataacacacacagttctggaaagaacacatcacttgtgcttgtttgatgagcttgtcacattctaatccctctccccatcctgtttcaattttgggaaacttgtatctgctggtgtcagcaattctgattctgaaataggatcaggcttttactacaacagccttctctttctatttattgtgtcgactcgtggcttatgaataaaggcaggcaaagtttgcagaactgtcttaaggacatttattttttttccctttttaagtaattttacactttagtatctatttcagagtcatatttaaaactatttattagtgactacagtacatgagacaacaaggttactgagattacaattcttcaaaggttaatgataatgtggtttatactgtgccttaatagtaatgctatttaagatatttatttttaagttttactatgctgcactctaaagaaaggaactttagatgtgacactgtaaaattatgtattcatctcatggcataaattatttagtaagtctagatgtagcgtattaaatattaacctattcaactaaagatgttgacttggatttatttaaattcatatgtgcactgtataagagagtactcttacattaacacattttagtttagtttttagatttttttttaaacgatatattgctagtttcatgcttcctcctctgattttgcctgtgtagatttcatttattggtaattcattagtttaacactattatgtagtttttaaatgctgctttacatttttcttctgaaactgcaatacttgcaatttttattcttaaactaaattgaatactattttacactgtattggatttttatacttgaacaatttcatacaagggaagacaggttagcatttttatggactttctccattatcactggatttactttaagtattcccatactagacagtgttatgtaatgtagacatgactctcctgtgcaaattatttattcgttgtgtatattgctttataacatttcagatcttctaatctattcacttgtattaaatataatttttaaaaaattcaaaaaaaaaaaaaaaaaaaaaaaaaaaaa

SEQ ID NO: 5168 - DNA, 1863 bp, Homo sapiens; identical to SEQ ID NO: 506

SEQ ID NO: 5169 - DNA, 4228 bp, Homo sapiens
  misc_feature (4120)..(4120): n is a, c, g, or t
  misc_feature (4124)..(4124): n is a, c, g, or t
tcatcaagactctgtcagcctttcatggcaacaaccagctttcgatggaggtagcaagattacaggctacattgttgagagacgtgaccttccagatggcagatggaccaaggccagcttcaccaatgttactgaaactcaattcatcatctctggcttgactcagaattcccagtatgaattccgtgtctttgctaggaatgctgttggttccattagcaatccatctgaggttgtagggcccattacttgcatcgattcttatggtggtcctgtaattgatttgcctctagaatatacagaagttgtcaaatacagagcaggtacatctgtgaagctcagagctggcatttctggcaaacctgcgcctactattgagtggtataaagatgataaagaattacaaaccaatgcactggtgtgtgttgaaaataccacggacctcgcatctatactcatcaaagatgccgatcgccttaatagtggatgctatgaattaaaactaaggaatgccatgggctcagcctcagccaccatcagagtacagatccttgacaaaccaggcccacctggtggaccaattgaatttaagactgtaactgctgagaagatcacccttctctggcggcctccagctgatgatggtggtgcaaaaatcactcactacattgtggaaaagcgtgagacaagccgcgttgtgtggtctatggtgtctgaacatttggaagagtgcatcattaccaccaccaaaattatcaaaggaaatgaatacatcttccgggtccgagccgtgaacaaatatggaattggcgagccactggaatctgattccgttgtagccaagaacgcatttgttacacctgggccaccaggcgataccagaagtgacaaagattaccaagaattcgatgactgttgtatggagcaggccaattgcagatggcggtagtgatataagtggctatttccttgaaaaacgagacaagaagagcctaggatggtttaaagtactaaaagagactatccgtgacaccagacaaaaagtaacaggactcacagaaaacagtgactatcaatacagagtttgtgctgtaaacgctgctggacagggtccattttctgaaccatctgaattctacaaagctgctgatcctattgatcctccaggtccacctgctaagataagaatcgcagattcaaccaagtcatccatcacccttggctggagtaagcctgtctatgatgggggcagtgctgttactgggtatgttgtcgagataagacaaggagaggaagaggaatggactactgtctctaccaaaggagaggtcagaactacagaatatgtggtatccaacctgaaacctggagtcaattactacttccgggtatctgctgtaaactgtgctggacaaggagaacctatagaaatgaatgaacctgtacaagctaaagatatacttgaggcaccagagattgacctggatgtggctctcagaacttctgttattgccaaagctggtgaagatgtacaagtgttgattccctttaaaggcagacctccacctactgtcacatggagaaaagatgagaagagtcttggcagtgatgccagatacagcattgaaaacactgattcatccttattactcaccattcctcaagttactcgcaatgatacaggaaaatatattctcacaatagaaaatggagttggtgaacctaagtcttcaactgtgagtgttaaagtgcttgacacaccagctgcctgccagaaactacaggttaaacatgtttctcgaggcacagtcactttgctctgggatcctcctctcattgatggaggatctccaataattaattatgtcattgaaaagagagatgccaccaagagaacatggtctgtcgtgtcacacaaatgttctagcacatccttcaagctaatagatttgtcggagaagactccattcttcttcagagttcttgcagaaaatgaaattggaattggggaaccctgtgaaactacagagccagtgaaggctgctgaagtaccagctcctatacgtgatctctcaatgaaagactcaacaaagacatctgtcatcctcagctggaccaaacctgactttgatggtggtagcgtcatcacagaatatgttgtagaaaggaaaggtaaaggtgaacagacgtggtcccacgctggcataagtaagacatgtgaaattgaggttagccaacttaaggagcggtcagtcctggagttcagagtgtttgccaaaaatgagaaaggactgagtgatcctgtcactattgggccaattacagtgaaagaacttattattacacctgaagttgacctgtcagatatccctggggcacaagtcactgtgagaattgggcacaatgtgcaccttgaattaccttataagggaaaacccaaaccatccatcagttggctgaaagatggcttgccactgaaagaaagtgaatttgttcgcttcagtaaaactgaaaacaaaattactttgagtattaagaatgccaagaaggagcatggaggaaaatacactgttattcttgataatgcagtgtgtagaattgcagtccccattacagtcatcacccttggcccaccatcaaagcccaaaggacccattcgatttgatgaaatcaaggctgatagtgtcatcctgtcatgggatgtacctgaagataatggaggaggagaaattacttgttacagcatcgagaagcgggaaacttcacaaactaactggaagatggtgtgttcaagtgttgccagaacgactttcaaagttcctaatctagtcaaagatgctgagtaccagtttagagtgagagcagaaaacagatacggagtcagccaaccacttgtctcaagcattattgtgcaaacaccagttcaggattcctggtcccccaggaaagccagttatatacaatgtgacttctgatggcatgtcactaacttgggatgctccagtttatgatggtggttcagaagttactggattccatgttgaaaagaaagaaagaaatagcatcctctggcaaaaagttaatacatcaccaatctctggaagagaatatagagccactggactggtagaaggtctggattaccaattccgtgtatatgctgaaaattctgctggcctaagctcacctagtgacccaagcaaatttaccttagctgtttctccagtagacccacctggcactcctgactacattgatgtcacccgggaaaccatcacacttaaatggaacccaccattgcgtgatggaggcagtaagattgtgggctatagcattgagaaacggcaaggaaatgaacgctgggtgagatgcaactttactgacgtcagtgaatgtcagtacacagttacaggactcagtcctggggatcgctatgagttcagaataattgcaagaaatgctgttggaactataagcccgccctcacagtcttctggcattattatgacaagagatgaaaatgttccaccaatagtagagtttggccctgaatactttgatggtctcattattaagtccggagagagccttagaattaaagctttggtacaaggaagaccagtgcctcgagtaacttggttcaaagatggagtggaaatcgaaaagaggatgaatatggaaataaccgacgtacttggatccaccagcctatttgttagagatgctactcgggaccatcgtggtgtatacacagtggaagccaaaaatgcatctggttctgcaaaagcagaaattaaagtgaaagtacaagatacaccaggaaaagtagttgggccaataagattcaccaatattactggggagaagatgactctgtggtgggatgccccactcaatgacggttgtgctcccataacccactacatcattgaaaaacgggaaaccagcagacttgcctgggcactaattgaggataaatgtgaagcccaaagttacactgccattaaactaataaacggcaatgaataccaattccgtgtttctgcagttaacaagtttggtgttggcaggccacttgattctgatccagtggttgctcaaatacaatatactgttcctngatnccctggcattccagaacctagcaacataacaggcaacagcattaccctgacatgggcaaggccagaatcagatggtggcagtgaaattcaacagtatatccttg

SEQ ID NO: 5170 - DNA, 3741 bp, Homo sapiens
agcggatctgcacagctggggcccctgggaggagacgccatgatccccaccttcacggctctgctctgcctcgggctgagtctgggccccaggaccgacatgcaggcagggcccctccccaaacccaccctctgggctgagccaggctctgtgatcagctgggggaactctgtgaccatctggtgtcaggggaccctggaggctcgggagtaccgtctggataaagaggaaagcccagcaccctgggacagacagaacccactggagcccaagaacaaggccagattctccatcccatccatgacagaggactatgcagggagataccgctgttactatcgcagccctgtaggctggtcacagcccagtgaccccctggagctggtgatgacaggagcctacagtaaacccaccctttcagccctgccgagtcctcttgtgacctcaggaaagagcgtgaccctgctgtgtcagtcacggagcccaatggacactttccttctccaaggagcgggcaagccatcaccctactgcatcttgagatcagagcacggagctcagcagcaccaggctgaattccccatgagtcctgtgacctcagtgcacggggggacctacaggtgcttcagctcacacggcttctcccactacctgctgtcacaccccagtgaccccctggagctcatagtctcaggatccttggagggtcccaggccctcacccacaaggtccgtctcaacagctgcaggccctgaggaccagcccctcatgcctacagggtcagtcccccacagtggtctgagaaggcactgggaggtactgatcggggtcttggtggtctccatcctgcttctctccctcctcctcttcctcctcctccaacactggcgtcagggaaaacacaggacattggcccagagacaggctgatttccaacgtcctccaggggctgccgagccagagcccaaggacgggggcctacagaggaggtccagcccagctgctgacgtccagggagaaaacttctgtgctgccgtgaagaacacacagcctgaggacggggtggaaatggacactcggcagagcccacacgatgaagacccccaggcagtgacgtatgccaaggtgaaacactccagacctaggagagaaatggcctctcctccctccccactgtctggggaattcctggacacaaaggacagacaggcagaagaggacagacagatggacactgaggctgctgcatctgaagccccccaggatgtgacctacgcccggctgcacagctttaccctcagacagaaggcaactgagcctcctccatcccaggaaggggcctctccagctgagcccagtgtctatgccactctggccatccactaatccaggggggacccagaccccacaagccatggagactcaggaccccagaaggcatggaagctgcctccagtagacatcactgaaccccagccagcccagacccctgacacagaccactagaagattccgggaacgttgggagtcacctgattctgcaaagataaataatatccctgcattatcaaaataaagtagcagacctctcaattcacaatgagttaactgataaaacaaaacagaagtcagacaatgttttaaattgaatgatcatgtaaatattacacatcaaaccaatgacatgggaaaatgggagcttctaatgaggacaaacaaaaaatagagaaaaattaataaagtcaaaatgtttattcttgaaaacattaatgatacatgaatcttggccacaatgagaaaaataaaaatgaaaaaagagcaggcatccatttccatacaggaacaaaataggaggcagcactacagaccctacacacagctttacagaggtgaaagaaaactgtcagcaattctatgctgacataacagaaaatgtagatgagatagatgaaatacgaaaaattacagtttacttaatgaacataaggataaatagaaaaactgaatcatcatacataaacatatataaaatgcattgatcctgtaatcaaaaatgttcccacaaagtaaatgccacttcagcaaggtttgttggtggttttttcaaactcttatgcactcatgaaacacacagacacacacacacacaaacttgcataaattttccctgagaatattttgtatatatttacacaaatacatttgatcagactaggaacaagttgataccaaaacctgaaaaggaaactacagaatgggaaagtcatagaagatctctcacagaaatataaatcccttaacaaatattaacaagtaagattcatgtctctataaaatagacagtatatcatgaccacactggttttttgttatcctttgattttgtttatgaaaagcaaggatagcttaattttcaaaaactcaatcaatgtaattcagtattttaacaaaaggaatgaaaaattatcatctcaatagacaaagcttttgtctgagcaccttttcatatagctgctgaccatttgtatgtcttcttttgagaaatgcctgttcagctactttgcccatgtttcaagtagtttttggtttcttgctgttgctttgttttagttccttacatatttttgcatattaaccctttatcaggtatacagcttgcaactattttctcccatttctgagttgtctcttcattctgtttgcagaagctgtttagaagccacaccttttgtctatttttgcttttgttgcttgtgttttcagggccatatccaaaaaaaccttgcccggaccaacgtcttgaagcttttctcacacccatttttgtatatgggataagggttcaatttcattcttcttcatatgaatatccccaggatgtgtcatatgcccagctgcacagcttaccctcaaacagaaaataatgaagccttcttcctcccaggaaaggggacgttcagctgagccgagtgtgtatactgctctggccatccactagcccagggaggacccagacctccacactccatggagactcagttctcctaggaccatttattcaaaaggactgccctctcttgttcttggaaactttgttgaggatcaattcaccataaatatgtgtgtttccttctttgctttcatccctgttgcactgatcactatacctgtttctattccagttccatgatgtcttcctggctgtagctttgtaggatatttggggattccatagtgtgatatccccttcttccctttgctcaagattgttttggctatttggggtccttttgtagtcccattcaaattttaggattgtttttctatttctgtggaaaacgaccttggaattttgttaggaattgcattgagtctgcaggtatgaacttttttttaaagttccagggcacatgtacaggacctgcagctttgttacataggtaggcttgtgccatggtggtttgctgcacctatcaacccattacctagttattaagcccagcatgcattagctctttttcctgatgctctccctcccttcatcatccgccctcccactacaagccccagtgtgtgttgttcccctccctgtgtccatgtgttctcattgttatacgaacattttaacaatgttaattcttgcagaccatgaacataagctaccttcccatttatatgcgtcttgttcaatttcattcatcaatgttataaagattttagtgcagaaaaaaaaaaaaaaaa

SEQ ID NO: 5171 - DNA, 1196 bp, Homo sapiens
aggaaaagtgaaaaaacagcaatttaggaagctttcaccgacagcaagcagtcaagttcagactcaaatcgtccaactctggtaataaaaatgagaggtcagaataccacaaactaatcaaatcaatcaaacaaagcgggaaacaggtggctgacaccagactgggcagggttttcctaaattgggcttaccttcactaatccaaatcagttttcagaaatggcttctacaaaaactacccaaacatccccctaataatttgcactcctcctccacaatagggaagccaagccgtttatttcccagaaggtttactttctctttcaagctctgctggcttcttcctgccccgcatacggccaggaaaaaagaaaagcactgccttttctttcctgccttctctaaaactggggagatggggtgagagaacctgtttcatggacaagctgggtggttcttaactgcaacactgttctgaatacagattagtttgcaaaggaaagttacaggacaggaaaataaaggtctacccctccaactaactcatacacatgtacatttgcatgtacgcacacacacagatgtgagggcacatttaattcagctgagtaatgtgcagcaatcagctcccagcttcatacctggccaccgggatgcctcctcactcccaccttctttacctgactcaaaataaggttcctcctgttggcttcttcctgagacacaaccactctaatcattcctcttcccctcaaaccttcaacactacctgcactttctgggtcgggagcattccttgggtggtaatccatttttaatgtgttaaatattacttaaaataagggagaggtaatcatggactgtgggcaatgcagagatttatcagaagggcatttgtgtaaacaggaatttacagtttgccttacctattccttttatatgacagcctcaatttcctctaacagaatgtaagtcccccatccctattcatttagtttttttcccattaggttagaatctgctaattattctttctctcctttgggtcattagtggctgccatgaatcataattcgcctgactttgtaatatctaacagatattaccattttagtttagtttttgatatgacagttttttgttttttgtttttgtgacggagtcttgctctgtctcccaggctggagtgcagcggc

SEQ ID NO: 5172 - DNA, 4348 bp, Homo sapiens
  misc_feature (16)..(16): n is a, c, g, or t
  misc_feature (3120)..(3213): n is a, c, g, or t
gcgcctggttctgcgngcaccggctgtacggagcaggagcaagaggtcgccgccagcctccgccgccgagcctcgttcgtgtccccgcccctcgctcctgcagctactgctcagaaacgctggggcgcccaccctggcagactaacgaagcagctcccttcccaccccaactgcaggtctaattttggacgctttgcctgccatttcttccaggttgagggagccgcagaggcggaggctcgcgtattcctgcagtcagcacccacgtcgcccccggacgctcggtgctcaggcccttcgcgagcggggctctccgtctgcggtcccttgtgaaggctctgggcggctgcagaggccggccgtccggtttggctcacctctcccaggaaacttcacactggagagccaaaaggagtggaagagcctgtcttggagattttcctggggaaatcctgaggtcattcattatgaagtgtaccgcgcgggagtggctcagagtaaccacagtgctgttcatggctagagcaattccagccatggtggttcccaatgccactttattggagaaacttttggaaaaatacatggatgaggatggtgagtggtggatagccaaacaacgagggaaaagggccatcacagacaatgacatgcagagtattttggaccttcataataaattacgaagtcaggtgtatccaacagcctctaatatggagtatatgacatgggatgtagagctggaaagatctgcagaatcctgggctgaaagttgcttgtgggaacatggacctgcaagcttgcttccatcaattggacagaatttgggagcacactggggaagatataggcccccgacgtttcatgtacaatcgtggtatgatgaagtgaaagactttagctacccatatgaacatgaatgcaacccatattgtccattcaggtgttctggccctgtatgtacacattatacacaggtcgtgtgggcaactagtaacagaatcggttgtgccattaatttgtgtcataacatgaacatctgggggcagatatggcccaaagctgtctacctggtgtgcaattactccccaaagggaaactggtggggccatgccccttacaaacatgggcggccctgttctgcttgcccacctagttttggagggggctgtagagaaaatctgtgctacaaagaagggtcagacaggtattatccccctcgagaagaggaaacaaatgaaatagaacgacagcagtcacaagtccatgacacccatgtccggacaagatcagatgatagtagcagaaatgaagtcataagcgcacagcaaatgtcccaaattgtttcttgtgaagtaagattaagagatcagtgcaaaggaacaacctgcaataggtacgaatgtcctgctggctgtttggatagtaaagctaaagttattggcagtgtacattatgaaatgcaatccagcatctgtagagctgcaattcattatggtataatagacaatgatggtggctgggtagatatcactagacaaggaagaaagcattatttcatcaagtccaatagaaatggtattcaaacaattggcaaatatcagtctgctaattccttcacagtctctaaagtaacagttcaggctgtgacttgtgaaacaactgtggaacagctctgtccatttcataagcctgcttcacattgcccaagagtatactgtcctcgtaactgtatgcaagcaaatccacattatgctcgtgtaattggaactcgagtttattctgatctgtccagtatctgcagagcagcagtacatgctggagtggttcgaaatcacggtggttatgttgatgtaatgcctgtggacaaaagaaagacctacattgcttcttttcagaatggaatcttctcagaaagtttacagaatcctccaggaggaaaggcattcagagtgtttgctgttgtgtgaaactgaatacttggaagaggaccataaagactattccaaatgcaatatttctgaattttgtataaaactgtaacattactgtacagagtacatcaactattttcagcccaaaaaggtgccaaatgcatataaatcttgataaacaaagtctataaaataaaacatgggacattagctttgggaaaagtaatgaaaatataatggttttagaaatcctgtgttaaatattgctatattttcttagcagttatttctacagttaattacatagtcatgattgttctacgtttcatatattatatggtgctttgtatatgccactaataaaatgaatctaaacattgaatgtgaatggccctcagaaaatcatctagtgcatttaaaaataatcgactctaaaactgaaagaaaccttatcacattttccccagttcaatgctatgccattaccaactccaaataatctcaaataattttccacttaataactgtaaagtttttttctgttaatttaggcatatagaatattaaattctgatattgcacttcttattttatataaaataatcctttaatatccaaatgaatctgttaaaatgtttgattccttgggaatggccttaaaaataaatgtaataaagtcagagtggtggtatgaaaacattcctagtgatcatgtagtaaatgtagggttaagcatggacagccagagctttctatgtactgttaaaattgaggtcacatattttcttttgtatcctggcaaatactcctgcaggccaggaagtataatagcaaaaagttgaacaaagatgaactaatgtattacattaccattgccactgatttttttttaaatggtaaatgaccttgtatataaatattgccatatcatggtacctataatggtgatatatttgtttctatgaaaaatgtattgtgctttgatactaaaaatctgtaaaatgttagttttggtaattttttttctgctggtggatttacatattaaattttttctgctggtggataaacattaaaattaatcatgtttcaaagttttaaaaaaaaaaaaaaaaaaaaacctattttgatttagaaatcactttaagataaatgaacaaaattattgtaagtcttctaaacttgnnnnnnnnnnnnnnnnnnnnnnnnnnnnnnnnnnnnnnnnnnnnnnnnnnnnnnnnnnnnnnnnnnnnnnnnnnnnnnnnnnnnnnnnnnnnnntttagaaacacagcaagggagattttgaataaagagagagatgaatttataaagtaggaaaaaaagaatctgaaagatacaaagtgattataaaagaattgacaggacaataaatacttcaaatactttcaggaagtaaatgagtaggagtttaggagggataaacgagataaattccatgcaatgatcaaggaaagcaagagagcagataatacaaaagaaaaagaagaaggttcacataaatagcttctggagtgcaaattataaagacatcaacatttttgatcatataataagtactggcttacagctaagtggttccaaatactggtaattaaaacgatgtatacgttaaagattgcaaaacttaaaagcagatttttatgggaactttttttgaaaggatacatgaccaccttcttaaatagtatgactttacatagactctttttctggtccttactgctcctcccacaacagggaagcccgatcagttctgtcagtataaggttttcttctatttgcccttagtttagatctccatcatcaattccacttactattgtaataccttcagctggagcctgtgtctttctccattcctttttaatacattcgtatttcccagccccagaacccttgaaattaactcttccatgagttttcattgctgaagaaaaaccaaacattcttgtaaaaacatttaagaacttccatagtcttgttcatattgtttacctatcttctacacaaggcgtgtccttgggtaagttatttaacttcaatttaccttacctgtaaaatggaacaaataatatctccttaagattgctctacgaattaattgacacattatgtgtgatgtacttaaaggaataataaatgcataatatgaggtcagtggacgccattttctgttataatcatttttgttatctaatttggggaaactattcatctgtcatatactattgatcctttggcacttaaataaatgtgaaatcctccaggaattttcctgtgattctccttgtaagaattaaatgctctctaatatgatatccctttaaaaaaaaaaaaaaaaagtgggggggggcaaaaataaaaagtgggggcgggaaaaaagagaaagaaa

SEQ ID NO: 5173 - DNA, 943 bp, Homo sapiens
tttctggcttctcgagggtgttcagagtctcccaagtgcacagggctcgtgcccaaagggtggaggtcggtctacctcgctcaattcaggagtggagaaggaagctagaggaccctctggaggtggcaggtttaatgtcctgcttttttatttatttatttatttatttatttatttatttatttatttattttgtaatcaactgaaagaaggcagaaggagtcgatgggcctcttaggccggaaaccttacaagcataggaccaaggcagaaaaggtccagagggttcatggtcctccgttccacctgaatccagctagagagcgagccagggggataggtgtgcccctcgtcgcccgtgcgctgaggcactgtcacgcaaagagacattcaccttccacgtcaacgcacctttaagggcgagagcggtccgccgtgcccaagaggaacgggatgacattcaactgggacttgcctcaccttggcttgggggacctcgagagcggtcccgtgggggcggtgttactcgtggtggtagaagtggagggcgtgtccgggtacttgagttcatgggcatctctcccgccgcctctcagcctatctgcaccatgtctcacacgttcagttgcagctcttaccgttttgaaggcgcacgtgggcaagaagtcctgggcagcacaagaaagtcaatcacgttgagacagagagagcaggagaggaagtgggccccagtagaagtgggcgagagagcgttgggtgggaacgtggcacgagaaagagagagagaaagagaaagagacagagaaaagaaactatgttgtttaaaatgccagcggaaagtccatgggggtgaaagagtccggcaatggccagggagttagcagcctggcgtagtgtcttcccactgttttgtctgtcttgagaatagcattcaacgcgactg

SEQ ID NO: 5174 - DNA, 492 bp, Homo sapiens
aggaaagcaacacaggacacagcataccaggacacagctactaacaggaacagccataaccatcaaaccacgctgccactcacggatcacctgacgaagccaacgcctgacgcaacacacgcttacgtgacagccaaggatggccaaacaccaagtaaagcggcaaaccaaatacagggacgaaaccaatcagcaataaccagctgcgtgcagcactaggggtggttcgtgctggaatccaaagcaacgcaaccaaacggatcacccaatccaatgcaaacagccaagttccttccatccaaacctacaaagaactttcctcagcacaaagtcaggacggctctatgtcagaacctttcggagtcatcgcaaagcaaccaactagcgcctgactccaccagcacagaagatgcaccacactaagaaaacggaaatgacgcttgacaaatagcatctctaaacaaaataaaaaaacaatcaggggatcctcta

SEQ ID NO: 5175 - DNA, 4153 bp, Homo sapiens
  misc_feature (3519)..(3550): n is a, c, g, or t
cggcacgaggctctagagtgccaaaaaagaaaaaaaaaagtgctgaagagtcctagggagatgaggctatttttgtttgaagctgatacttctagctgagccacaagtgctgcttggaaagggcttaggttgtttccagggggagaactggggagaggagaggcaaagttcaacaggacaacaaagaagcagcagaaacagccaggaaaacgaagagcccccaggttttgacacagaaccctccaccagagttctcaaatccccaaatactctgcaaagtgcaacttgacgggaacttttcaactgacttttacttttgacgaccaccatgactgagatcactgctgaaggaaatgcatctacaaccacaactgtgatagacagcaaaaatggatctgtgcccaaatcccccggaaaagtgctgaagaggacagtcacagaagacatagtgacgacgttcagctcccctgcagcctggcttctggtcattgccctgataatcacgtggtcagctgttgccatcgttatgtttgatttagtggattacaaaaacttttcagcaagctctattgccaagattggctcagatcctttaaaactggtacgtgatgctatggaggaaaccacggactggatctatggcttcttttctttgttatctgacatcatctcatctgaagatgaagaagatgatgatggtgacgaagatactgataaaggagaaatagatgagcctcccttgagaaaaaaagaaatacacaaagataagactgaaaaacaagagaaacctgaaaggaaaatacaaactaaagttacacacaaagaaaaagaaaaaggaaaagaaaaagtaagagaaaaagaaaaacctgaaaagaaagcaactcacaaggaaaaaattgagaaaaaagaaaaaccagaaacaaagacagtggcgaaagaacagaagaaagctaagactgcagaaaagagtgaagaaaagactaaaaaggaagtgaaaggtggaaaacaggagaaagtgaagcaaacagctgcaaaagtaaaagaagtacagaaaacaccatcaaaacccaaagaaaaggaggacaaagagaaagcagctgtgtcaaagcatgaacagaaagatcagtatgcattctgtcgatatatgattgacatatttgtccatggggatttaaaaccaggacaaagcccagccattccacctcccttaccgacagaacaagcttccagacccactccggcatcacctgcccttgaagaaaaagaaggggaaaagaagaaggctgagaagaaagttacttctgaaacaaaaaagaaagaaaaagaagatatcaaaaagaaaagtgagaaggaaactgccattgatgtggaaaaaaaagagccgggaaaagcttctgaaaccaaacaagggactgtaaaaattgcagcacaagcagcagctaagaaggatgaaaagaaggaagattccaagaaaacaaaaaaacctgcagaagtagaacaacccaagggaaaaaagcaggaaaagaaagaaaaacatgtggaaccagcaaagtcaccaaagaaagaacactcagttccaagtgacaaacaagtaaaagcaaaaactgaacgagccaaagaggagattggtgcggtttcaagtaaaaaagctgtacctggaaagaaggaagagaaaacaaccaagacagtggagcaagaaattagaaaagaaaaatctgggaagacttcttcaattctgaaagataaagaacctattaaagggaaagaagagaaagttccagcttccctaaaggaaaaagaacctgaaactaaaaaagatgaaaagatgtccaaagcaggcaaagaagtcaagcctaaacctccacaactacaaggaaaaaaggaagagaagccagagccccaaattaaaaaagaagcaaaaccagctatatctgaaaaagtgcaaatacacaaacaagacatagtgaaaccagaaaagactgtttctcatggtaaaccagaagaaaaagttctcaagcaggtaaaagctgtcacaatagaaaaaacagccaagcccaaaccaacaaaaaaagctgaacatcgagaaagagaacctccatctataaaaacagacaaaccaaaaccaactccaaaaggaacatcagaagtcacagaatcaggaaagaagaaaactgaaatatctgaaaaagaaagtaaagaaaaagcagacatgaagcatcttagagaagaaaaagtctcaacaagaaaagaaagtcttcaattacacaatgtgacaaaagcagaaaaacctgcaagagtatcaaaagatgttgaagatgtaccagcttcaaagaaagctaaagaaggaactgaagatgtgtctcccacaaagcagaaaagtcccatcagtttcttccagtgtgtctacttggatgggtacaatggctatggatttcagtttcctttcactcctgcagaccgccctggagagagctctggtcaagcaaattctccaggacagaagcaacaaggacagtaaacacacatgtatgacccttacaagtgctttaagattttaaaaatgtgatgttttgtccacagtagttcaggcaattaagaatatgcaacccagagaatttctgtgaaaacattttgctctttggcctggtgtggacggaaagggtggccaaatggattgagtgatgagcagacatgtttaagggtctaagtctcaagaatctgttatgtgtgtttgctgcggtgggagggggtgcttgtatttatcttatttccagtcactataaggttgtacacaaactaatttaaagtttacttaataatggtatctttaaaataattgacacaattgcaaaatgaattcctggcttcagttagctattatttttttaatgacaacatagactgtgctctaagtttaaaagatggggaagcttatataaaagtgacccttttgcatcatatgggtatctaaacttaatttacccaataagttgatgcttaatgattttattttatttttgtctattttctattttagttgtggctttgctctaagaatgggtaatagttgtactacagactgctataaatttcttgtgatactcttttagagctcaaaatatctctgagctttagacatggtaaggtggagagtaaatgcttgataaatctttaagatatgtcttgaatgataattaggacattcagtccagtggaaatacaccattcaattagtcaggtctggtgaatttccgtttaaaatattagcaaatgagatgtggaattctgaaatttctccagactgtgtcttaataaaaatgtcacctgggtgaaattttagatcaatcactaaatttgggtgacaaatataaaaatattttcatttcactttaatacattctttctgtgaagtaaaatgtttttctttctcataatggcaaaatatgaatgccatcaaagtttaaggaattcattttagccttaaatgccttcgtgagatgtcttacttgtattttaggnnnnnnnnnnnnnnnnnnnnnnnnnnnnnnnncatttttaatctactcgacagtgcatccctgggaatgactgttatgtttttgtcatattcctggtaatataaaatactcgtgttctttactacattgtttttatcaactctaaaagtcatgcctctgtgacctttatcatgtttacaattgcaactgaacttatgacaaattaactcaggaaataaattgggttatcctttctaagcattgtaattaccatcagcaaggcctgagatagccagagccaatactagccagtgattattttccaaggatgggcactaactacggttctttaggaccagatataaacacagtcactaaaaatcattaggtaagtatcagtaataccattcattactaattatgccttttggggaactttgtgcacagcagttggggcctctgcaaaggtggtggccacatttcaaccacgaaagcgggtcatgacccgatagatccttttgggatgtggccacccggaggtaattcggagcgcaaaacatctttgaagaccctcgtgcaaccaacgggcggaaggcaaagatttcacggcccacgggtagtaaaaaaaaagttacaaagggcagtaaagtgagaaa

SEQ ID NO: 5176 - DNA, 1374 bp, Homo sapiens
cggccgccaatttttttctcttagagggttagcatacatttatctgaaattgaaattcaagaggagagacaggcacctgtactagttttctcttgctgcctattatcacattaccacaaaccagtggtttgaaaccacagaagtctggaatgaagtggccgggttctctgatcagagtcatgtgaggctaaaatccgggaatgggctggctgtgtttttttcctagagctcaagctatttttccaggttcactacagataatgaaagagttcctattcttgtttgtgggggactgagggccctttttctgtgctggctgtcagcggggagacagtctactctgactccagaggccacatgctttcctccttacctgtctgtttcatctttcaaccaataacaactcatggagtccttctcaagctcccaccttctctgacttcatcttctccaaccagccacacaaagctctgtcatgtatggagtgatgtgattagatccagttcatgcggtaacctcaccatcttaaagtcatataactggcatataacaacatagtcacaggaatggtgtctcatcaccttaagaggctttagagacaagggtgtggcatgtttggggaccatttcagaaattccatttaccacagtaggacactcacattcccccatctgcaaagtgcatttaccctctcccctgaggtttccagatttcatgtcattaaagcattagttcaacatgaaaaatgtcatgtagaccacatcaggttcaaaagtttaaaatcccatctaaaacatccacaccaggtgtgaaatgaggctttccgagagtgtccattaagtgcagatccttgacataattcccttacctctgtcgacctgtgaaactgaacaaacagcttatctgcccctaatgtgaaatgatgggacagacatagaataaccactacagtgattctagttcaaaatgagggaacatggaggggataaagaagtcaataacccaaaatagtttggaaatggagctgggcaaaatccagcaggagtttcttagttaggatccacagcctgggactgaccctctgtcctgtgggtctttgcctctgggctctctgctctgcatttcttgaaaccattattatttatcatttttctcacactgttttgcgtatggctcctattgcactcaaaatgtttttgagattcatccatgttgttttgtgtgtcaaaagtttgttcctttagccattccatggaatgaatgtatcacagtttattgatccattcttgtattgatagatatttgaatgtttccagtttttcctattatgaataaaactgctatgaacattcttgtataaaacaaaaaaaaaaa

SEQ ID NO: 5177 - DNA, 908 bp, Homo sapiens
taagttctgggatacaatggcagaacgtacaggtttgttacataggtatacgtgtgccatggtggtttgctgcatttatcaacccatcatctaggttttaagccctgcatgcattagctatttgtcctgatactctccctcccctcgcccccaaccttccaacaggccctggtgtgtgttgttcccttccctaaaatataataaatttttaaagcaaaacaaatcctactcatcatttagttacttaatgcctaggatgtgcaaaagcactttactaggggttgaggatatagtaaatgaataagaaatagatcctgccctcaagaaaatcacagtgggttgaagaaagatacataaaccaataataatagtactttacaatagacaaaaccatgagaatgaaagaaaggcctcttttaactagcggacagatgagaaggtttcacaaataaagtgaaatctgaactgagctataaaaaaaacgaagaaattttgcctggtgaaaataagggtgagggaattatagagttgcaacaataagaatatatatttggtctttgtctccacttccaaacagagagcttctaaaacctatggtattcctaagtgacaggaatatcttttgttacttgtaacaagcctattcccaagtgacaggaatatcttttgttacttgtaacaagcctattcccaagtgacaggaatatcttttgttacttgtaacaagcccctttcaaccacactagagtttatgctaatgaggtgactagtggtgagtcccctgacacttcaggatggacactggttgctagaggaaccaaccatgtgactagcgggttggtaccttcagttccacctctgggaatctagagaggggatgggggttggagattgacgtatccgtgagg

SEQ ID NO: 5178 - DNA, 642 bp, Homo sapiens
  misc_feature (355)..(395): n is a, c, g, or t
cgagcaacaaaaaccaaatatttctgttatgacacacctatgggacaaaattcatttagttttctacatttttgtctttgaatgctgcattagttaaattagatgtgtttggtcccaaaatataatgtgggatatagaagataacaattatttcttaaaatgggcaaagtgagttttgtagacctgaaacttcgtaaagaaaatatttataactttcccaaagcctcaaaccttatatgacaaatgcattgtcacattttatttgaagtcttttcagtggtctgggttgtaaatcagagttaggaagggtgtgatagctcctatggttagggagtttagagccacaggaatttannnnnnnnnnnnnnnnnnnnnnnnnnnnnnnnnnnnnnnnnacccgtaggtaatttagtttcctaaaccattggatccatctttatcgataaaggagcatctgtttcggtctttcagatcatactattagctccaaaattttttaacttccaaaattaaatacatattagtcagagaaatggtccttacttaagtcaaattgaaaaaatgaataaacgaggcacagtggctcacgcctgtaaccccaacactttgggaagtcaggtatggagagacattggggatctt

SEQ ID NO: 5179 - DNA, 5833 bp, Homo sapiens
  misc_feature (3576)..(3593): n is a, c, g, or t
gcctcctttttgtctgtcgctctctctgcgcttgtgtctgtctctctcttctttcttgtgctttttctttctcttctccatcttttctttttttttgttttctttttgtttttttttcttgttgtccttttggttatttttgtgttttgtgtcgttgttttctttttttttttttctctctggttgttccatttgttgtgtcttccttgtgttttgtgttgtttctctgtgttgtttgtccctttttctcttggtccgcttttgcctttttcttgtgtttttgtggtcgttttcctttttttttgttttcgtgctttcttttttctcttttggctctccttgttttcttcttttttttttgtttgttttctgagacatggcccgggcagtggctcctggaagaggaacaagtgtgggaaaagggagaggaagccggagctaaatgacaggatgcaggcgacttgagacacaaaaagagaagcgttcctctcggatccaggcattgcctcgctgctttcttttctccaagacgggctgaggattgtacagctctaggcggagttggggctcttcggatcgcttagattctcctctttgctgcatttccccccacgtcctcgttctcccgcgtctgcctgcggacccggagaagggagaatggagagggggctgccgctcctctgcgccgtgctcgccctcgtcctcgccccggccggcgcttttcgcaacgataaatgtggcgatactataaaaattgaaagccccgggtaccttacatctcctggttatcctcattcttatcacccaagtgaaaaatgcgaatggctgattcaggctccggacccataccagagaattatgatcaacttcaaccctcacttcgatttggaggacagagactgcaagtcctgaatgttcccagaactacacaacacctagtggagtgataaagtcccccggattccctgaaaaatatcccaacagccttgaatgcacttatattgtctttgcgccaaagatgtcagagattatcctggaatttgaaagctttgacctggagcctgactcaaatcctccaggggggatgttctgtcgctacgaccggctagaaatctgggatggattccctgatgttggccctcacattgggcgttactgtggacagaaaacaccaggtcgaatccgatcctcatcgggcattctctccatggttttttacaccgacagcgcgatagcaaaagaaggtttctcagcaaactacagtgtcttgcagagcagtgtctcagaagatttcaaatgtatggaagctctgggcatggaatcaggagaaattcattctgaccagatcacagcttcttcccagtatagcaccaactggtctgcagagcgctcccgcctgaactaccctgagaatgggtggactcccggagaggattcctaccgagagtggatacaggtagacttgggccttctgcgctttgtcacggctgtcgggacacagggcgccatttcaaaagaaaccaagaagaaatattatgtcaagacttacaagatcgacgttagctccaacggggaagactggatcaccataaaagaaggaaacaaacctgttctctttcagggaaacaccaaccccacagatgttgtggttgcagtattccccaaaccactgataactcgatttgtccgaatcaagcctgcaacttgggaaactggcatatctatgagatttgaagtatacggttgcaagataacagattatccttgctctggaatgttgggtatggtgtctggacttatttctgactcccagatcacatcatccaaccaaggggacagaaactggatgcctgaaaacatccgcctggtaaccagtcgctctggctgggcacttccacccgcacctcattcctacatcaatgagtggctccaaatagacctgggggaggagaagatcgtgaggggcatcatcattcagggtgggaagcaccgagagaacaaggtgttcatgaggaagttcaagatcgggtacagcaacaacggctcggactggaagatgatcatggatgacagcaaacgcaaggcgaagtcttttgagggcaacaacaactatgatacacctgagctgcggacttttccagctctctccacgcgattcatcaggatctaccccgagagagccactcatggcggactggggctcagaatggagctgctgggctgtgaagtggaagcccctacagctggaccgaccactcccaacgggaacttggtggatgaatgtgatgacgaccaggccaactgccacagtggaacaggtggcaccactgtgctggccacagaaaagcccacggtcatagacagcaccatacaatcagagtttccaacatatggttttaactgtgaatttggctggggctctcacaagaccttctgccactgggaacatgacaatcacgtgcagctcaagtggagtgtgttgaccagcaagacgggacccattcaggatcacacaggagatggcaacttcatctattcccaagctgacgaaaatcagaagggcaaagtggctcgcccggtgagccctgtggtttattcccagaactctgcccactgcatgaccttctggtatcacatgtctgggtcccacgtcggcacactcagggtcaaactgcgctaccagaagccagaggagtacgatcagctggtctggatggccattggacaccaaggtgaccactggaaggaagggcgtgtcttgctccacaagtctctgaaactttatcaggtgattttcgagggcgaaatcggaaaaggaaaccttggtgggattgctgtggatgacattagtattaataaccacatttcacaagaagattgtgcaaaaccagcagacctggataaaaagaacccagaaattaaaattgatgaaacagggagcacgccaggatacgaaggtgaaggagaaggtgacaagaacatctccaggaagccaggcaatgtgttgaagaccttagaccccatcctcatcaccatcatagccatgagtgccctgggggtcctcctgggggctgtctgtggggtcgtgctgtactgtgcctgttggcataatgggatgtcagaaagaaacttgtctgccctggagaactataactttgaacttgtggatggtgtgaagttgaaaaaagacaaactgaatacacagagtacttattcggaggcatgaaggcagacagagatgaaaagacagtcaaaggacggaagtggaaggacgggagtgagctggggagctgttgatctttcactatacaggctgggaagtgtgttgatgaccactgagccaggcttttctcaggagcttcaatgagtatggccgacagacatggacaaggagctgtgttcaccatcggactcatgtgcagtcagcttttttcctgttggtttcatttgaataatcagatgctggtgttgagaccaagtatgattgacataatcattcatttcgacccctcctgcccctctctctctctctcctctcccctttgtggattctttttggaaactgagcgaaatccnnnnnnnnnnnnnnnnnngtattccgtgtggccctttggatggacatgctacctgaaacccagtgcccagaatatactagaatcaccgcatttcagtggactcctgaagttgtacttgtgtataattgcccgcgtcgtgcataggcaaagaaggattaggctgttttctttttaaagtactgtagcctcagtactggtgtagtgtgtcagctctgtttacgaagcaatactgtccagttttcttgctgtttttccggtgttgtactaaacctcgtgcttgtgaactccatacagaaaacggtgccatccctgaacacggctggccactgggtatactgctgacaaccgcaacaacaaaaacacaaatccttggcactggctagtctatgtcctctcaagtgcctttttgttcgtactggttcattgtgttacattaacgacccactctgcttcttgctggtgaaagccctgctctttaatcaaactctggtggcccactgactaagaagaaagtttattttcgtgtgagatgccagcccctccgggcagacaagggctctgaagatttggcaacgtggcttaattgttctgctttttctgtagttcaatttcatgtttcttgacccttttgtataaagctgcaatattctctcttattgttctttcatatggaatgtattttcaaatgtaaactctcttctctttctctctcctatctctctgtcttttttctctcttagaattggaggatttgccattgtccaggaaagaaacttgcagctttaacctgctgggaatggcaaacgattttactagactttatgtttaaaaataaataaataagggaaattcctaaccttgccctccaaagtctaactttggttttcttgttaactggttaaagtgacagtatcttttttccttatctattctattcaaaatgacctttgatagaaatgttggcatttagtagaaatagtgataagttgaggaaagaaataatacaaattggctttcaagtgagacccaaaggaagaactggataaaatcttccaaatccaaaagcatgagatttttctatccaaatatgcaaaaatgacccaagagaactttcttattttgctactgagtcacacaagggaagtggaaggaagaacagttaatttaagaatgaaactataaatcctgatgcctgggggtcaagtattttaagataagagggggaaaaacacataaagtcaaacaaatgttttaaaaattcataacagcaaccttgaaaaaatagacttaaatgaatgcttctagaaacttccagcggctcacaaagaataagcctgccttagggctggcaacatctaagcctctaacagcacagggaagcaaatatcttaccaggcagcctatgaattaacccaaagaagctttggttggttttggtggatttttatcatgccatgttggacatgagattttttagatcttccttcccacattgctagacgtctcactcaaagacatttgttgggagtcacatttgcatcatagacgagacagtccattcatcttagttaaattggattgagaatgccttttgtttccaggaaaatattgatcaccatgaaagaagaatagttttttgtccccagagacattcatttagttgatataatcctaccagaaggaaagcactaagaaacactcgtttgttgtttttaaaggcaacagacttaaagttgtcctcagccaaggaaaaatgatactgcaactttaaaatttaaagtatcttgcactgataaatatatttaaaaattatatgtttataaagttattaatttgtaaaggcagtgttacaaaatgttcagtttatattgttttagattgttttgtaatttttaaaggtgtaaaataacatattttttctttatggaaatctataaaactttctgtagtaaaatgttttcattttactggtatattattgcttcatgttttgtaccatcataagattttgtgcagattttttttacagaaattattattttctatgacaatatgacacttgtaaattgttgtttcaaaatgaacagcgaagccttaactttaaatgacatttgtattctcagacactgagtagcataaaaaccacatagaactgaactgtaacttaaattccaaactatgactactacattccaaagaaacagttgaattaaacattttcataaaataaaaaaaaaaaaaaaaaaaaaggaggtggg

SEQ ID NO: 5180 - DNA, 2022 bp, Homo sapiens
cggacgcgtggggtcttcccttcccgcgttccccgggagaaacatggccgggagcagcgaggaggcgccagactacgggcgaggcgtcgtgattatggatgattggccagggtatgacttgaatttattcacgtacccacagcactattatggagacttggagtatgtcctcatccctcatggtatcattgtggacagaattgagcggctggccaaggatattatgaaagacataggatatagtgacatcatggtcctgtgtgtgcttaaaggaggttacaaattctgtgctgatctcgtagaacaccttaagaacatcagccgaaattcagatcgatttgtctcaatgaaggttgatttcatcagactaaaaagttacaggaatgaccagtccatgggtgagatgcagataatcggaggcgatgatctttcaacgctggctggaaagaatgttctcattgttgaggatgttgtcggaactgggaggaccatgaaagcactactcagcaatatagagaaatacaagcccaacatgattaaggtagccagtttgttggtgaagagaacatccagaagtgacggctttagacctgactatgctggatttgagattccaaacttatttgtggtgggatatgccttagattacaatgaatacttcagagatctgaatcacatatgcgtcatcaatgagcacggtaaagaaaaatatcgagtctaaagacatgaattctcaccactaaagtcccagatagcatcatatttacgcctgtacttgggaagccagctgtcaagtttgtccccccaggcatcttcactcagcaggatataaaagaaaaaaatgttcaaatgagagagctttcttttctgaggttaatataaagagtatcaaaggttcctaaggaaaagaaagcagtgcttttatttgacttgttccaaattaaacactccgccttgtgactcagcaatgctatctaccttcacactcctgagctccgccttcctttgttttgatacagtcattatatttgattagtattcccaggaatacccccacctagttactcaaatatttttcacttaactttttatactcttattttggtaataagcttacaatattaagaagctggggacttttttttaactgaagacttgagtcccctataccgggaatgcagctattaatagattcccatattttaaaaggagggaaaggacaatttaatataaatttctgtttgtgcatttctgacaggccattattatctgctttgacaaagcctttctgaaacgcagtgtacaatgaatcttaatgatgttatgaaacgagctttgctcggggctcttgattggagcttccggtatgtgatgacggtatgtcatgtatgcatggatgtactcaactgtgtttaatactctgaattttaattagaaaaaaatacaatagcagcaaggccctggtttctaagctgtatccttttattcatgtgggacatgagcaaatggcagaattaggggcgagtgctttcaatgctcgaaactaagcaagtataaatttttcctcttatttgcatgaaaggacaagacactgttatgccctgtcctaaatgtgaagacagaggttgaattttttaaaaaatatctttaaaagactgatcacaaaatccaaggtgctacaggaaacaagcacactcaagaaagtttttttctgaataacatttttttccaatttctccgttttataagacatttcctaatttatggggattttaattgaaaataaacttgagtcccaatagagctgtttttttctcacttcctacaaaatgcaaatgcaaaataaataactaagcagcttttgtttggttctgaaccgtatgtggcgtattgttattaggttctagcttcctttaaactaataaagaataagaagacttgttatgttttaaaacaaacaagacactagaaagaaacaaaccatcaacactcgacgcccacccaccaccatgcaaacaaggg

SEQ ID NO: 5181 - DNA, 1159 bp, Homo sapiens
ggcgggccgctcccacttcggcacgaggggcacgaggtaaatcttttctgcttactgaaaaggaagagtctgatgattagttactgatcctctttgcatttgtaaagctttggagatattgaatcatgttaccatttctgtttttttccaccctgttttcttccatatttactgaagctcagaagcagtattgggtctgcaactcatccgatgcaagtatttcatacacctactgtgataaaatgcaatacccaatttcaattaatgttaacccctgtatagaattgaaaggatccaaaggattattgcacattttctacattccaaggagagatttaaagcaattatatttcaatctctatataactgtcaacaccatgaatcttccaaagcgcaaagaagttatttgccgaggatctgatgacgattactctttttgcagagctctgaagggagagactgtgaatacaacaatatcatttttcctttaagggaaaattttctaagggaaaatacaaatgtgttgttgaagctatttctgggagcccagaagaaatgctcttttgcttggagtttgtcatcctacaccaacctaattcaaattagaataaattgagtatttaaaaaaaaaaaaaaaaaaaaaaaaaaaaactttgtgtgggcggcttgggcccctggagaaaggttctttagaacacttttgtttggggccgggggcccattgggtacgtgcacactgggctcatagagggtgtcccccagggatactcctgggctaggaactatgtgcttgggatttctccccccatttaaaaaagtccgcgggtgggacccggagcgtttcggaacacattgcgaaggggatccgggaaggccatcccgtgacattacacaccaagggattcacgagagactccttattaaatttaccggctctcgcgtggagaccaacgcaacgataacacggcacaccaaagacaaagcaaaaaacaccaccaccgaacaaccctgaccaacaaacctcaaacaacacaatataacgcacaacctctcgccaacaacacaacccacgccaacgaacactacaccacaataaaagagaaactaccactatccacacaaacaaaataccagcagacagccagaactatactcacag

SEQ ID NO: 5182 - DNA, 2892 bp, Homo sapiens
agcgggcttgcgcgcgggatttaaactgcggcggtttagcgcggcgttaagacttcggcacgagggcgaaattgaggtttcttggtattgcgcgtttctcttccttgctgactctccgaatggccatggactcgtcgcttcaggcccgcctgtttcccggtctcgctatcaagatccaacgcagtaatggtttaattcacagtgccaatgtaaggactgtgaacttggagaaatcctgtgtttcagtggaatgggcagaaggaggtgccacaaagggcaaagagattgattttgatgatgtggctgcaataaacccagaactcttacagcttcttcccttacatccgaaggacaatctgcccttgcaggaaaatgtaacaatccagaaacaaaaacggagatccgtcaactccaaaattcctgctccaaaagaaagtcttcgaagccgctccactcgcatgtccactgtctcagagcttcgcatcacggctcaggagaatgacatggaggtggagctgcctgcagctgcaaactcccgcaagcagttttcagttcctcctgcccccactaggccttcctgccctgcagtggctgaaataccattgaggatggtcagcgaggagatggaagagcaagtccattccatccgaggcagctcttctgcaaaccctgtgaactcagttcggaggaaatcatgtcttgtgaaggaagtggaaaaaatgaagaacaagcgagaagagaagaaggcccagaactctgaaatgagaatgaagagagctcaggagtatgacagtagttttccaaactgggaatttgcccgaatgattaaagaatttcgggctactttggaatgtcatccacttactatgactgatcctatcgaagagcacagaatatgtgtctgtgttaggaaacgcccactgaataagcaagaattggccaagaaagaaattgatgtgatttccattcctagcaagtgtctcctcttggtacatgaacccaagttgaaagtggacttaacaaagtatctggagaaccaagcattctgctttgactttgcatttgatgaaacagcttcgaatgaagttgtctacaggttcacagcaaggccactggtacagacaatctttgaaggtggaaaagcaacttgttttgcatatggccagacaggaagtggcaagacacatactatgggcggagacctctctgggaaagcccagaatgcatccaaagggatctatgccatggcctcccgggacgtcttcctcccctgagaatcaaccctgctaccggaagttgggcctggaagtctatgtgacattcttcgagatctacaatgggaagctgtttgacctgctcaacaagaaggccaagctgcgcgtgctggaggacggcaagcaacaggtgcaagtggtggggctgcaggagcatctggttaactctgctgatgatgtcatcaagatgatcgacatgggcagcgcctgcagaacctctgggcagacatttgccaactccaattcctcccgctcccacgcgtgcttccaaattattcttcgagctaaagggagaatgcatggcaagttctctttggtagatctggcagggaatgagcgaggcgcggacacttccagtgctgaccggcagacccgcatggagggcgcagaaatcaacaagagtctcttagccctgaaggagtgcatcagggccctgggacagaacaaggctcacaccccgttccgtgagagcaagctgacacaggtgctgagggactccttcattggggagaactctaggacttgcatgattgccacgatctcaccaggcataagctcctgtgaatatactttaaacaccctgagatatgcagacagggtcaaggagctgagcccccacagtgggcccagtggagagcagttgattcaaatggaaacagaagagatggaagcctgctctaacggggcgctgattccaggcaatttatccaaggaagaggaggaactgtcttcccagatgtccagctttaacgaagccatgactcagatcagggagctggaggagaaggctatggaagagctcaaggagatcatacagcaaggaccagactggcttgagctctctgagatgaccgagcagccagactatgacctggagacctttgtgaacaaagcggaatctgctctggcccagcaagccaagcatttctcagccctgcgagatgtcatcaaggccttgcgcctggccatgcagctggaagagcaggctagcagacaaataagcagcaagaaacggccccagtgacgactgcaaataaaaatctgtttggtttgacacccagcctcttccctggccctccccagagaactttgggtacctggtgggtctaggcagggtctgagctgggacaggttctggtaaatgccaagtatgggggcatctgggcccagggcagctggggagggggtcagagtgacatgggacactccttttctgttcctcagttgtcgccctcacgagaggaaggagctcttagttacccttttgtgttgcccttctttccatcaaggggaatgttctcagcatagagctttctccgcagcatcctgcctgcgtggactggctgctaatggagagctccctggggttgtcctggctctggggagagagacggagcctttagtacagctatctgctggctctaaaccttctacgcctttgggccgagcactgaatgtcttgtactttaaaaaaatgtttctgagacctctttctactttactgtctccctagagatcctagaggatccctactgttttctgttttatgtgtttatacattgtatgtaacaataaagagaaaaaataaaaaaaaaaaaaaaaaaaaaaaaaaaaaaaa

SEQ ID NO: 5183 - DNA, 2949 bp, Homo sapiens
atgctttgtaactccggccttggtggcgggtggctggcggttccgttaggtctgagggagcgatggcggtacgcgcgttgaagctgctgaccacactgctggctgtcgtggccgctgcctcccaagccgaggtcgagtccgaggcaggatggggcatggtgacgcctgatctgctcttcgccgaggggaccgcagcctacgcgcgcggggactggcccggggtggtcctgagcatggaacgggcgctgcgctcccgggcagccctccgcgcccttcgcctgcgctgccgcacccagtgtgccgccgacttcccgtgggagctggaccccgactggtcccccagcccggcccaggcctcgggcgccgccgccctgcgcgacctgagcttcttcgggggccttctgcgtcgcgctgcctgcctgcgccgctgcctcgggccgccggccgcccactcgctcagcgaagagatggagctggagttccgcaagcggagcccctacaactacctgcaggtcgcctacttcaagatcaacaagttggagaaagctgttgctgcagcacacaccttcttcgtgggcaatcctgagcacatggaaatgcagcagaacctagactattaccaaaccatgtctggagtgaaggaggccgacttcaaggatcttgagactcaaccccatatgcaagaatttcgactgggagtgcgactctactcagaggaacagccacaggaagctgtgccccacctagaggcggcgctgcaagaatactttgtggcctatgaggagtgccgtgccctctgcgaagggccctatgactacgatggctacaactaccttgagtacaacgctgacctcttccaggccatcacagatcattacatccaggtcctcaactgtaagcagaactgtgtcacggagcttgcttcccacccaagtcgagagaagccctttgaagacttcctcccatcgcattataattatctgcagtttgcctactataacattgggaattatacacaggctgttgaatgtgccaagacctatcttctcttcttccccaatgacgaggtgatgaaccaaaatttggcctattatgcagctatgcttggagaagaacacaccagatccatcggcccccgtgagagtgccaaggagtaccgacagcgaagcctactgaaaaagaactgcttttcttcgcttatgatgtttttggaattccctttgtggatccggattcatggactccagaagaagtgattcccaagagattgcaagagaaacagaagtcagaacgggaaacagccgtacgcatctcccaggagattgggaaccttatgaaggaaatcgagacccttgtggaagagaagaccaaggagtcactggatgtgagcagactgacccgggaaggtggccccctgctgtatgaaggcatcagtctcaccatgaactccaaactcctgaatggttcccagcgggtggtgatggacggcgtaatctctgaccacgagtgtcaggagctgcagagactgaccaatgtggcagcaacctcaggagatggctaccggggtcagacctccccacatactcccaatgaaaagttctatggtgtcactgtcttcaaagccctcaagctggggcaagaaggcaaagttcctctgcagagtgcccacctgtactacaacgtgacggagaaggtgcggcgcatcatggagtcctacttccgcctggatacgcccctctacttttcctactctcatctggtgtgccgcactgccatcgaagaggtccaggcagagaggaaggatgatagtcatccagtccacgtggacaactgcatcctgaatgccgagaccctcgtgtgtgtcaaagagcccccagcctacaccttccgcgactacagcgccatcctttacctaaatggggacttcgatggcggaaacttttatttcactgaactggatgccaagaccgtgacggcagaggtgcagcctcagtgtggaagagccgtgggattctcttcaggcactgaaaacccacatggagtgaaggctgtcaccagggggcagcgctgtgccatcgccctgtggttcaccctggaccctcgacacagcgagcgggacagggtgcaggcagatgacctggtgaagatgctcttcagcccagaagagatggacctctcccaggagcagcccctggatgcccagcagggcccccccgaacctgcacaagagtctctctcaggcagtgaatcgaagcccaaggatgagctatgacagcgtccaggtcagacggatgggtgactagacccatggagaggaactcttctgcactctgagctggccagcccctcggggctgcagagcagtgagcctacatctgccactcagccgaggggaccctgctcacagccttctacatggtgctactgctcttggagtggacatgaccagacaccgcaccccctggatctggctgagggctcaggacacaggcccagccacccccaggggcctccacaggccgctgcataacagcgatacagtacttaagtgtctgtgtagacaaccaaagaataaatgattcatggttttttttaaaaaaaaaaaaaaaaaaaaaaaaaaaaaatttttggggcgccgggcccaaaaaagtttaaaaccctggtggggggcggggccccggggtacggtagcccctgtggggccaacgcggtgtcccaagagagaaacccgggggcaggacctgagggcgggggtttccccaccattaaaaaacgcccgggggggaacccgggcggtcctggaacaaaccacagggggacgtcccggagggcccatcacggggctctacccacggagcccccaagcgagagccgataccaaatgacgcggcgccgggggaaaacacagcaggaaaacgagacaaaacacacacaacaacacgaaacatg

SEQ ID NO: 5184 - DNA, 742 bp, Homo sapiens
  misc_feature (572)..(572): n is a, c, g, or t
  misc_feature (592)..(592): n is a, c, g, or t
  misc_feature (610)..(610): n is a, c, g, or t
  misc_feature (617)..(617): n is a, c, g, or t
ggatcccccgtttagtacacaatcaacccatttgtgtttgttttcttgagatcactgtagttacatactgttcataatggcagttttctctgaaaattttgcacaaaatttctttttttttagagttgataagtattcttcatttttttcacttggtcatgtgttttttctgtgacattttcttttataatcatttgtgttctttctgccattctgattttagaaatatttggtagtagtttcccctgcctatttgaatggattagattgtacgttcggcaaccattaaagaaatgattcctaacttctgagttacaggccagcttcccagaaccactaaatgttaatgaggaaaatatattgtgaagggcactcgaggtcactgcagatcacattatattaagtaagggacaataaataaattaaacaggtttctagccacatgtttcccttcttcaaaatgattacattttactgagtccaatgtaaaaagtattcattcttacaacctagatggcctattttaaatatccatattcttttccattcttattaaaatgttcatatttcancacattagagaaaggaaaangtcaatatctcgcaggangataggncgaattgaaacgtggaaccagagaactgctccagtgtaatgactgtgatgcttcacgggagcttatttcagtcacctcctttgcaatatagtgagcacaaatgctttccactgcagctgcaaatg

SEQ ID NO: 5185 - DNA, 6564 bp, Homo sapiens
  misc_feature (2653)..(2667): n is a, c, g, or t
  misc_feature (3002)..(3016): n is a, c, g, or t
  misc_feature (3650)..(3710): n is a, c, g, or t
  misc_feature (4380)..(4401): n is a, c, g, or t
  misc_feature (5020)..(5040): n is a, c, g, or t
tcagcaaagactggttataagaggctcgaccagattcaagaccagcagttaaaaaagaatcaactttgcctcccaggacctatggaaagaagctagagagagagatggtttccagatcaaggatacagaggtcgaggccgaggtgaatattactccagaggtcgaagctatagaggttcttatggagggcgtggcaggggtggtaggggacacactcgagattatcctcagtatagagacaataagccaagagcagagcatataccctcagggcctctcagacagcgagaagaaagtgaaacacggagtgagagctctgattttgaagttgtccccaaaagaagacgacagcgggggtcagagactgacactgacagtgaaattcatgaaagtgcaagtgacaaggacagtttaagtaaaggcaaacttcccaaaagagaggaacggcctgaaaacaaaaaacctgtaaagcctcattcttctttcaagcctgataatcatgttcgaatagataatagactgctagaaaagccttatgtaagggatgacgataaagctaaaccaggctttcttcctaaaggagagcctacaaggagaggcagagggggaacattcaggcgtggtggaagggatcctggaggccgtccatcacgcccttccactttacgaagaccagcttatcgggacaatcagtggaacccaaggcagtcagaagttcctaaaccagaagatggagagccgccaagaagacatgagcagtttattcctatagcagcagataaacgacctccaaaatttgagcgaaaatttgacccagctagagaaaggcctcgaaggcagcgtcctactcgaccaccaaggcaagacaagccacctcgatttagacggctaagagagagggaggctgcttcaaaatcaaatgaggtggtagcagtgcccacaaatggcacagttaataatgtggctcaagaaccagttaatactcttggggatatttccgggaataagacaccagatttatctaatcagaactcttcagatcaggcaaatgaagaatgggaaacagcttctgaaagcagtgatttcaatgagaggcgagagagggatgaaaaaaaaaatgctgacttgaatgcacaaacagttgtaaaggttggagagaatgttctacctccaaagagggaaattgcaaagagaagtttttctagtcagagaccagtagatcgtcagaatcgacgtggcaacaatggtccacccaaatcaggaaggaatttctcaggtcctagaaatgaaaggagaagtggcccaccatcaaaaagtgggaagagagggccatttgatgaccagcctgcaggcacaactggggttgacctcatcaatggcagctctgcacaccatcaggaaggagtacctaatggtacaggacaaaagaactccaaagattgtactgggaaaaaaagagaagaccccaaaccaggccctaaaaaaccaaaagagaaagtggatgctctatcacagtttgatctcaacaattatgcaagtgttgttataattgatgatcatcctgaagtaacagtaattgaagatccccagtcaaatttgaatgatgatggttttactgaagtggtatccaaaaaacaacaaaaacgtttacaggatgaagaacgccgaaagaaggaagaacaagtcatacaggtctggaacaaaaagaatgcaaatgaaaaaggaagaagccagacttctaagcttcctccaagatttgccaaaaaacaggctacagggatccagcaagcacagtcttcagcctcagttccacctctagcttcggctccacttccaccttcaacctcagcttcagttccagcctcaacctcagctccacttccggcaaccttaactccagttccagcctcaacctcagctccggttccagcctcaactttagctccagttctggcctcaacctcagctccagttccagcctcacccttagctccagtttcagcctcagcctcagtctcagcttcagttccagcctctacttcagctgcagctataacctcttcttcagctccagcctcagccccagctccaacccccatccttgcctcagtttcaaccccagcttctgtcaccattcttgcctcagcctcaattcccattcttgcttcagccctagcatcaacttcagctccaacgccagccccagcagcctcttccccagctgccccagtcatcacagcaccaactatcccagcctcagccccaactgcctcagtcccacttgcccctgcctcagcttcagccccagccccagcccctaccccagtctcagccccaaatcctgccccacctgccccagcccagactcaggcacagacccacaaaccagcccagaatccactacagactacatctcagtcttcaaaacaaccaccaccatcaattaggctgccttcagctcaaacacctaatggcacagattatgtagcctcaggaaaatccatccagaccccacagtcacatggcactctgacagctgaattatgggataacaaggtggccccaccagctgtgctgaatgatatctctaagaaattaggtcccattagtccaccacagccaccttcagtcagtgcatggaataagcccttannnnnnnnnnnnnnngctccttcatcagagggagcgaagaatggtcaagaaagtggactcgaaattggaactgacacaattcagtttggtgctccagcctcaaatggaaatgaaaatgaagttgttcctgtgctttcggaaaaatctgctgacaaaatacctgaacctaaagaacagcggcagaagcagccacgagcaggacctatcaaagcccagaagcttccagatttgagtccagtagaaaacaaagaacacaaacctggtcccattggaaaggaacgttcattaaaaaatagaaaagtaaaagatgcccaacaggtggagccagaaggacaagagaaaccaagccnnnnnnnnnnnnnnngcacagatcctgtcacgacaaaggagactaaagcagtctcagaaatgtctactgaaataggaacaatgatctcggtatcatctgcagaatatggtactaatgcaaagatggagtctgcacgcaaagcatgggagaattctccaaatgtaagggaaaaggggtctccagtaacttccacagcacctccaattgcaactggagtcagcagtagtgccagtggaccaagcactgctaattacaattcgttctcaagtgcatccatgccccagattcctgttgcttcagtcactcctacagcatcactatcaggagctggtacatacactacctcttctttgagcacaaaatctacaaccacatcggaccctccaaatatttgtaaagtgaaacctcagcagttacagacaagcagcctgccttctgcaagtcatttttcacagttaagctgtatgccttcccttattgcccagcagcaacagaatccgcaagtttatgtgtctcagtctgcagcagctcaaatcccagccttctatatggacacaagtcatttattcaatacccaacatgcacgattggctccgccatccttggctcaacaacagggtttccaaccaggtctctctcagccaacttnnnnnnnnnnnnnnnnnnnnnnnnnnnnnnnnnnnnnnnnnnnnnnnnnnnnnnnnnnnnnccaactgagtttgggggctggccctgctgtttcccaggctcaggaattgttcagctcctcacttcaaccatatagatctcagccagcttttatgcaaagcagtttatcccagccatctgtggtcctttctggtactgctattcacaactttccaactgtccaacaccaagaacttgccaaggcacaatccggtcttgcctttcagcaaacatcaaatactcagcccattcctatattgtatgaacatcaactggggcaggcatcaggactaggaggttcccagctgattgacacacatcttctccaggccagagcaaatcttacccaggcctcaaatctttattctggacaagtacaacagcctggtcagacaaatttttataacactgcccagtcaccaagtgctctccagcaggttacagtacctttaccagcatcgcagctttccttgcctaattttggatctacagggcaacctctaattgctttgcctcagactcttcagcccccattacagcataccactccccaagcacaggctcagagtctgagtcgtcctgcacaagtaagccagcctttcagaggattaattcctgctggaacacagcatagcatgattgcaaccacaggaaaaatgtctgaaatggaactaaaagcctttggaagtggnnnnnnnnnnnnnnnnnnnnnnacctccaatcgctggtagaagcaccacaccaacatctagtcccttccgggctacttctacaagtccgaacagccagtccagcaaaatgaacagcattgtctaccagaagcagttccagtcagcccctgccactgtgagaatgacacaaccatttcctacacagtttgcaccccaggcaaagcagagagcagaggttcttcagtccacgcaacggttcttctctgaacagcaacagagcaaacagataggaggaggcaaagcccagaaagtggacagtgattcaagtaaacctcctgaaacactgaccgaccctcctggggtctgtcaggaaaaagtagaagaaaagccaccccctgcaccctccatagccaccaaacctgttagaactggaccaatcaaacctcaggcgatcaaaaccgaagaaacaaaatcttaaaggctatggtttattgcaggggattgggaggggggcgggaaaacatggagaattaagtcagataatgctggcagccaaaggggcaaaatggcctgtgacattatcctgttcagagcttggagatgtacaagggacataggagcaatttacactgacacacagctgctgtaccagtgaaaacgnnnnnnnnnnnnnnnnnnnnnactatataacatgtgcttggttgatggccatgcatcttcagtcagaatttatatataaatgtatgcacccatttttttgagtgcatataatttagacctaaaaatccttatgattagatgaaacaccaaaaatataaggaaaataacacagcagaggaatagctcagcctgaacagtgtgatggtcccagctactacatcagatgcggtttttttgctcccttatgttcttcggatatggttatggcatttgtaggcttggaggtaaagaactgaagataactggtgctggatagaggagccttattttttattatggcagcttgctatttttataacatggtgattgagttgaacacaatcaaagtacagtagtaactgatgtccccttcttcctggatgaatgagcagataaatattgatgtcagcatccttgaaccatatcaaagtgagcagtgtttggctactgcttctatttgaaatggtgctgtgttttggttgtggtctgaagctttgaagcgctacttagcatctcctttcttccatggagctctcacgattcaaacatgacagatttggtaaaatgctggttaggttgagtcttccttgcccccactcagtcatctttgtatgatcccatgatttgggggtttttttcttttttttttataccagtttttagctggtgtttatgaagaacagtgagtacctagaactgtgccactaattaaaggaaatcctaagaaggtgcatttctttacagagctgtgtcatgccatcctttgggccctctgctggaaaagtagaatcaagtctcaaataatgcctttttaattgtatcctctagtattatagatataggacagtactgtatcatacctctgtgaatgtaaaatatcttgtacctgctttatgatacgtagtagtgaccgtgctttatcagagctgtttttaatgatgttattctagaatgttttctttccagatgatgattcagaagctaattttaaaaaacggtgccaggtaccacaacagtaacagaactttgcaattttctggggttttgttttttacctttttccccccttttttttaaatggagtgtgctggatgtctctataattttattcagatgactgcagaacctggaaaagctgttgctgctattgatgcataacatactgctattggtctttttatataaatatatatatatatatacatatatatatataatttgaatttttggaaactttagctgtgctgtcaactttggaaaaagtatcccggtttactgtgttgagttggcattgtacagaaattaacagccatattggtctagaaacgttaaacttaatttttttccatttgtacaggggtaacgcactgtattaaatatgtaaggtcttatctacatgggtttgattacagaaactaataaagtattctctaaataatgaaaaaaaaaaaaaaaaaaaaaaaaaaaaaaaaaaaaaaaaaaaaaaaaaaaaaaaaaaaaaaaaaa

SEQ ID NO: 5186 - DNA, 4309 bp, Homo sapiens
gggacacggcggtggggctgaaccacacggcggagcccagcctgcagaccctggagcggcagctggccgggcggcccgagcccctgcgagccgtaaagaggctgcagggcctgctggagacgctgctgggctacacggccgccatccccttttggaggaacacggcggtgtcgctggaggtgctggcggagcaggtggatctctacgactggtacagggtctgcctgctgggagtcctggccctggtcatcagctggggcgcgctgggcttggagctggctgtgtccgtgggctccagcgacttctgtgtggaccctgacgcctacgtgaccaaaatggtggaggagtactcggtgctgagtggggacatcctgcagtactacctggcctgctcgccccgcgccgccaaccccttccagcagaagctgtcgggcagccacaaggcactggtggagatgcaggatgtcgtggctgagcttctgaggaccgtcccctgggagcagccggccactaaggaccccctcctccgcgtccaggaggtgctgaatggcacggaggtgaacctgcagcacctcaccgccctggtggactgccgcagcctgcatctggactacgtgcaagcgctgaccggcttctgctatgacggcgtggagggcctcatctacctggccctcttctccttcgtcacagccctcatgttcagctccatcgtctgcagcgtcccgcacacctggcagcaaaagagaggccctgatgaggacggggaggaggaggccgctccagggccgcggcaggcgcacgacagcctctaccgcgtccacatgcccagcctgtacagctgtggcagcagctacggcagtgagaccagcatcccggccgcggcccacaccgtcagcaacgccccggtcactgagtacatgagccagaacgctaatttccagaacccccgctgtgagaacaccccactcattgggcgcgagtccccgccgccctcatacacctccagcatgagagccaaatacctcgccacgagccagcctcgccctgactccaggggcagccactagaccgcgcccggcagccacccaccccacgtgccaacttcccctccccgtgccagcactgccgcttccacctgggccacccaccggaccctcgcacgccgtgccaggcctgccccagacgcgtctgcaggccgcttgccctcctgtcccctccccgcaggggcacagtggagacgcaggggctctgggcccgtaccgccaactcgggtcacacctgaacgctgctgccagccgatgccccagccctgcacgccacccactatcccggcacgctccctctgcagatggtcgccgcacctacaagccctggccgcacccaacctgtgttgttgccgcccggcccttccctccacagctctccttcctcccgcccggcacttctgtggaccccttcttagttcacaggcacggctggggccgctctgtgctggcgcctgctggccactgagggacagggacacgtgccacctgctcatctctgccctgaggtcaccccgtggtccctccacgtgcccatctctctgcagtgccctcctcgcctgtgcagcccgcccacccacaggctcacccctcctgccggctgccagaggccccctccagcagggcctctctccgttgccccagcttcactctctccctcagcacctgccctgctggaggccccagccctccgtggacagcaggggccacgtggagcccgggccgctcacccgccacccagtgctggccgccttcttggtgccaaacccccttcccccacccagagactgggcagctgtgtctggttcgttctttgcactaaccacatttgtcatctctagggcaggctggggctgcgggctgagggggaccgctggcaccccccttccctcccttcttggttccatttccatccatgacaggtacagcatcccaggagcccggcctgaggggctggacccgagccagctgtgaacatccctcagcccctgctgtccccccttgggactaaccactaacctcacccccaaactccacgggtgcccctagctggcccagagccggcagtgtgagcccaagtccgggctggagccgaggccggagcagctgtctgggagtcaaggctgcagtagcgtttcttcatggggtgctccagggggtgccacagaccgacaggcagcccaagggcctggacacccctccccaggcaggtgctgccccaggaggactgtcctcgggaatgaacctcccgcgggctttggactgaggtccctgtggcctcggtctcctccccatgaagtgggagcgaggctccccaatggtgcttttggctttagtgtacgatgtttgctgtgcttcccgccgtggagggcagagccaccccacatcaggatcggacgtgctacccctcccggtcccggccctggcccagccagcccagccctcgaggctcgatgcctgtgccaaggccaggggcagccagagggcagctggatggccacgtgcaggggtcaaggctgggccccgcagtggggcgggccgccagccccagcagtttacagacgcatggctcttcctcccagagcagccggcagctacctggaccggaaatgtcctcatcccctccctggggccaggctctgccctggccttcctctgtgaacccctcctttctttgtgctggtgtctgggaccaaaaagggggaatatgggagggcagagtggggaggggagtccatgggcctggggccccaagccggggcgtctgagctccccaggcatgaccaaacctcagtggaggggcctctgcttcaggccccgcctggctgacattctgagcccccctcggaggccccgccacagccaacctgcccagtctttcctctgggcttgacccgccaggggagttctccaggcctagggccaggagagaggccctggcaccctggcgtgggtgcccgccaaacgccctgcgaccgctcagaagcacaaatgctgtccatggccgtgaggctgcctgccaggtgaatggacatagcgtgagaggcggtgaggccagggcttccagcctcgtgctgtctcgggactcctgaccgtggtgtgcgtgtgtgcccgtctgtgactttctactcaccaaggttgaagaaaggaaacggggaaaatcaaaaggggttcaaaccccacctcagtaggtggaggggagcgcctgccattggttgtatttttgttctgagttttcggtgccgtgttcctaactactccatcccatgacctcgccacacctactggggcatctggctggtgcctgctgccatggccagcccccactctcacccctgcacagggggtcttgcagcccccaggcccacagcctcgttgggaggacagggtggccctggggacaagagggaggagcccaggggcttacctcactgagagtgctccccagcaggcatccactaccccagggccccccacatgtcatggcaaggttggtagtgaatgggcctggttgggagcagcccctggcccattgcccacccacccatctcactatgcaattcgagttccaagcaacatttgctcctgccctggggccagctctgccccagccctgagaggggtggtgaggcagccccctggaccccagaaccccagacaagggggcaggcgggggaccagggcctctcctgtgggatctttgttttgtgtttaaccataatggttgtgtactgaaccacttcatatttgttatatataatatatatatatataatctccttaagactcagcctcctggtttacccccccggcctgggcatctgacctcccccaccccagtgtgatttaacatccaggaactgaggcctgaaccattttgcatttccccctcctccagcctctgtagggccatggctgtatgtactgtcgctgtgtttttttgtttttttagaactgggtttgggggctgatttttatttctttgggggctttttttcttggcaaatactaaaaatctcgtcaatgtaatttctgtggtttctattcagcttgggtttcatgttttaaaataaattttaaaaagcaaaaaaaaaaaaaaaaaaacacgaaaaaccgatgggggctctattttttcgggggggggaaaaagcgggtatgaagggggcatgggccataggtgttccgtgccccacgtttctttccaccgggggggtacccgcggggccccaatagggggccgaataatccaatcagcgggtaccgag

SEQ ID NO: 5187 - DNA, 3988 bp, Homo sapiens
  misc_feature (2864)..(2894): n is a, c, g, or t
  misc_feature (3472)..(3486): n is a, c, g, or t
ctcagtttctttgcgtaaccaatactggaaggcatttaaaggacctctgccgcctcagaccttgcagttaactccgccctgacccacccttcccgatgcagtccctgatgcaggctcccctcctgatcgccctgggcttgcttctcgcggcccctgcgcaagcccacctgaaaaagccatcccagctcagtagcttttcctgggataactgtgatgaagggaaggaccctgcggtgatcagaagcctgactctggagcctgaccccatcgtcgttcctggaaatgtgaccctcagtgtcgtgggcagcaccagtgtccccctgagttctcctctgaaggtggatttagttttggagaaggaggtggctggcctctggatcaagatcccatgcacagactacattggcagctgtacctttgaacacttctgtgatgtgcttgacatgttaattcctactggggagccctgcccagagcccctgcgtacctatgggcttccttgccactgtcccttcaaagaaggaacctactcactgcccaagagcgaattcgttgtgcctgacctggagctgcccagttggctcaccaccgggaactaccgcatagagagcgtcctgagcagcagtgggaagcgtctgggctgcatcaagatcgctgcctctctaaagggcatatagcatggcatctgccacagcagaatggagcggtgtgaggaaggtcccttttcctctgttttgtgtttgccaaggccaaactcccactctctgcccccctttaatcccctttctacagtgagtccactaccctcactgaaaatcattttgtaccacttacattttaggctggggcaagcagccctgacctaagggagaatgagttggacagttcttgatagcccagggcatctgctgggctgaccacgttactcatccccgttaacattctctctaaagagcctcgttcatttccaaagcagttaaggaatgggaacagagtgttttaggacctgaagaatctttatgactctctctctttcactctttttttttttttgtcactaagttaaaagcgaagtgagagtattaacgtttttgttctcctccggccccctgttacaatgaaggggcaaaagtatttgctcttagtctattcctcccttaacttctgtgactaatttttatttcctttctagatttgcccaattaatactagggtgcagtgtatcctggagaggtagggtgtgtgggggaggaatcccttgggggagatattaggagtgctctgttgtttacaaactcaggtacccgcagggcctagcaagagacttaaatgactgataagaaccgtgagaaacatgttgcttccaggcttgatttcgatttttcgctttttttttttgggacggagtctcgctttgtcaccaggctggagtgcagtggtgcaatctcacctcactgcaacctccgcctcctgggttcaagcaattctcctgcctcagcctcccaagtagcttggactacaggccctgccaccacgcccggctaatttgtgtatttttagtagagatggggtttcaccatgttggccaggatggtctcgatctcttgacctcgtgatccgtccaccttggccttgcaaagcgctggattacaggcatgagccactacacccagccgatttttcctttttgattaaagatgctattacaatgtaaatatttcttacacagaaagtcacagcacatgtgcccattgatacaaggctgctgaggcctggtctccagttggaaatataattaagggtggcagggactggagtcagttggagagtgcatagccagtctgtgaagacaactgccagatactggcaatactccagcctggtgacagagtgagactctgtctcaaaaaaaaagtttcaatgtttactcctagagaagccaaaaatccagatttgtatatgaaatcttaccattttaaaagattggcagctaattatttttttaaaaagctgtgcagtgtgatgtgtcccaaacggactggctcatgggtggccacgtcacaacctctgatctcagaccgtgcatgccttgtcctcttaagacaactcctgtggcaccgtttctccctccacagggccaaagccatagtgtccggtcccaaggacaaggctcttccagtgctaggagaggtatgagcagcctctcacctgtgagctgtggggatcacaaggctgcctgcctcagtcttggagtcctgttgggtgaatgaggcagatgggaaagagcctcaccagcagctgcttttggagcaggggtccaaggaagagagggtggcctcgacatcaaactgcctggatttttctaccaccctgttacatcataacaacttctgaaacacacaccagccctgagttctgggctcatttgaagcctggaatagcaataaatctttttaacttgcaaaaaaaaaaaaaaaaaaaattggctgcatatttcactgatcacatctcaggatttcaaaagcatttttggggtggggctcttttggttggaagggtttgttggaacggtacaggtgagccgaggtgattccagggacggacccttctgcaggagcttgagcttgcttgttgtctctgcttcatcgccatccagctcccttgtttgctattttgctttccatcacatcatgactgcggagagcaaaaatcacctagtgaccattgaacaggtcccagagacaaaatctttttatctgaggaatttaaaagggagcaaagaccacctggtgactatcaggccatgcagaggcaaaacgccttatttggggaaaattaaaagtaattagactttcctattatcnnnnnnnnnnnnnnnnnnnnnnnnnnnnnnntccccgaaaaaaaccttagaagtaactaaaatttctgtacatctccggaatgccatgctgaaactcactgcaaccccacggtcccgctttaaggtccataaatatccctaaggaaaaatccaccgtggtacattcagtcctctcaccgaggtgccccatggcagtcttctgcagcattcttctaatacctttcctttttcaaacctatactgttgttggtgaattctttttaccaacccacgagttgaccacttcccaatgccggggatctgacacctcacctggcaatgacctccacagccgtttccctctgttggatcttccagccttattctcaacagttcatttttagttcacattcttgaccgaatctcagtagctcagttaatctttttatgtctgctctgctcttgggtcatatgttccgtgaggtttcttaggggtgggggatgaggagttaaaggtggcatcttcaatcgcaggtcaaagcagactttaataaatggtgctgagccaactggaaagccccttggagaaagttgaagttagacctgtacttcacaccatatgcaagaatnnnnnnnnnnnnnnnccaggatccaaatgtaagaaaatgaagccatataaatacagaaggaaacgtggtggaaatatccagtggcaacaaaatattgacacatttgactacatgaagataataaaaatgcttagtaaaaacaaaaaaaaaaaacgaaaacacaacagaaaaaaaaaaaaaaaacaacagaacataaagagaaaaaacgcacacacacggaagaagggaacaagaagaatgagaaagcaaaaagacacagaggcaaagcggaaatataacagtggaaggagaaaaaaaggagagacgagcaaagcgagaaggagaggaacgcgaaagagggaggcagaaaaagaaggagaagagcgttgagaagggggagaaagggaaagaaaggaagagaaggagacgagagagagaacgaagaggagaagccagcaacggatgtagaagcaggcgggacagagagaacaagggagaaatgcgcgaccgggggggaaagcagaaaaaaaaggaaaaa

SEQ ID NO: 5188 - DNA, 5343 bp, Homo sapiens
attgaaatgctgtaaatgacgtgggccccgagtgcaatcgcgggaagccagggtttccagctaggacacagcaggtcgtgatccgggtcgggacactgcctggcagaggctgcgagcatggggccctggggctggaaattgcgctggaccgtcgccttgctcctcgccgcggcggggactgcagtgggcgacagatgcgaaagaaacgagttccagtgccaagacgggaaatgcatctcctacaagtgggtctgcgatggcagcgctgagtgccaggatggctctgatgagtcccaggagacgtgcttgtctgtcacctgcaaatccggggacttcagctgtgggggccgtgtcaaccgctgcattcctcagttctggaggtgcgatggccaagtggactgcgacaacggctcagacgagcaaggctgtccccccaagacgtgctcccaggacgagtttcgctgccacgatgggaagtgcatctctcggcagttcgtctgtgactcagaccgggactgcttggacggctcagacgaggcctcctgcccggtgctcacctgtggtcccgccagcttccagtgcaacagctccacctgcatcccccagctgtgggcctgcgacaacgaccccgactgcgaagatggctcggatgagtggccgcagcgctgtaggggtctttacgtgttccaaggggacagtagcccctgctcggccttcgagttccactgcctaagtggcgagtgcatccactccagctggcgctgtgatggtggccccgactgcaaggacaaatctgacgaggaaaactgcgctgtggccacctgtcgccctgacgaattccagtgctctgatggaaactgcatccatggcagccggcagtgtgaccgggaatatgactgcaaggacatgagcgatgaagttggctgcgttaatgtgacactctgcgagggacccaacaagttcaagtgtcacagcggcgaatgcatcaccctggacaaagtctgcaacatggctagagactgccgggactggtcagatgaacccatcaaagagtgcgggaccaacgaatgcttggacaacaacggcggctgttcccacgtctgcaatgaccttaagatcggctacgagtgcctgtgccccgacggcttccagctggtggcccagcgaagatgcgaagatatcgatgagtgtcaggatcccgacacctgcagccagctctgcgtgaacctggagggtggctacaagtgccagtgtgaggaaggcttccagctggacccccacacgaaggcctgcaaggctgtgggctccatcgcctacctcttcttcaccaaccggcacgaggtcaggaagatgacgctggaccggagcgagtacaccagcctcatccccaacctgaggaacgtggtcgctctggacacggaggtggccagcaatagaatctactggtctgacctgtcccagagaatgatctgcagcacccagcttgacagagcccacggcgtctcttcctatgacaccgtcatcagcagggacatccaggcccccgacgggctggctgtggactggatccacagcaacatctactggaccgactctgtcctgggcactgtctctgttgcggataccaagggcgtgaagaggaaaacgttattcagggagaacggctccaagccaagggccatcgtggtggatcctgttcatggcttcatgtactggactgactggggaactcccgccaagatcaagaaagggggcctgaatggtgtggacatctactcgctggtgactgaaaacattcagtggcccaatggcatcaccctagatctcctcagtggccgcctctactgggttgactccaaacttcactccatctcaagcatcgatgtcaatgggggcaaccggaagaccatcttggaggatgaaaagaggctggcccaccccttctccttggccgtctttgaggacaaagtattttggacagatatcatcaacgaagccattttcagtgccaaccgcctcacaggttccgatgtcaacttgttggctgaaaacctactgtccccagaggatatggtcctcttccacaacctcacccagccaagaggagtgaactggtgtgagaggaccaccctgagcaatggcggctgccagtatctgtgcctccctgccccgcagatcaacccccactcgcccaagtttacctgcgcctgcccggacggcatgctgctggccagggacatgaggagctgcctcacagaggctgaggctgcagtggccacccaggagacatccaccgtcaggctaaaggtcagctccacagccgtaaggacacagcacacaaccacccggcctgttcccgacacctcccggctgcctggggccacccctgggctcaccacggtggagatagtgacaatgtctcaccaagctctgggcgacgttgctggcagaggaaatgagaagaagcccagtagcgtgagggctctgtccattgtcctccccatcgtgctcctcgtcttcctttgcctgggggtcttccttctatggaagaactggcggcttaagaacatcaacagcatcaactttgacaaccccgtctatcagaagaccacagaggatgaggtccacatttgccacaaccaggacggctacagctacccctcgagacagatggtcagtctggaggatgacgtggcgtgaacatctgcctggagtcccgtccctgcccagaacccttcctgagacctcgccggccttgttttattcaaagacagagaagaccaaagcattgcctgccagagctttgttttatatatttattcatctgggaggcagaacaggcttcggacagtgcccatgcaatggcttgggttgggattttggtttcttcctttcctcgtgaaggataagagaaacaggcccggggggaccaggatgacacctccatttctctccaggaagttttgagtttctctccaccgtgacacaatcctcaaacatggaagatgaaagggcaggggatgtcaggcccagagaagcaagtggctttcaacacacaacagcagatggcaccaacgggaccccctggccctgcctcatccaccaatctctaagccaaacccctaaactcaggagtcaacgtgtttacctcttctatgcaagccttgctagacagccaggttagcctttgccctgtcacccccgaatcatgacccacccagtgtctttcgaggtgggtttgtaccttccttaagccaggaaagggattcatggcgtcggaaatgatctggctgaatccgtggtggcaccgagaccaaactcattcaccaaatgatgccacttcccagaggcagagcctgagtcaccggtcacccttaatatttattaagtgcctgagacacccggttaccttggccgtgaggacacgtggcctgcacccaggtgtggctgtcaggacaccagcctggtgcccatcctcccgacccctacccacttccattcccgtggtctccttgcactttctcagttcagagttgtacactgtgtacatttggcatttgtgttattattttgcactgttttctgtcgtgtgtgttgggatgggatcccaggccagggaaagcccgtgtcaatgaatgccggggacagagaggggcaggttgaccgggacttcaaagccgtgatcgtgaatatcgagaactgccattgtcgtctttatgtccgcccacctagtgcttccacttctatgcaaatgcctccaagccattcacttccccaatcttgtcgttgatgggtatgtgtttaaaacatgcacggtgaggccgggcgcagtggctcacgcctgtaatcccagcactttgggaggccgaggcgggtggatcatgaggtcaggagatcgagaccatcctggctaacaaggtgaaaccccgtctctactaaaaatacaaaaaattagccgggcgcggtggcgggcacctgtagtcccagctactcgggaggctgaggcaggagaatggtgtgaacccgggaagcggagcttgcagtgagccgagattgcgccactgcagtccgcagtctggcctgggcgacagagcgagactccgtctcaaaaaaaacaaaacaaaaaaaaaccatgcatggtgcatcagcagcccatggcctctggccaggcatggcgaggctgaggtgggaggatggtttgagctcaggcatttgaggctgtcgtgagctatgattatgccactgctttccagcctgggcaacatagtaagaccccatctcttaaaaaatgaatttggccagacacaggtgcctcacgcctgtaatcccagcactttgggaggctgagctggatcacttgagttcaggagttggagaccaggcctgagcaacaaagcgagatcccatctctacaaaaaccaaaaagttaaaaatcagctgggtatggtggcacgtgcctgtgatcccagctacttgggaggctgaggcaggaggatcgcctgagcccaggaggtggaggttgcagtgagccatgatcgagccactgcactccagcctgggcaacagatgaagaccctatttcagaaatacaactataaaaaaaataaataaatcctccagtctggatcgtttgacgggacttcaggttctttctgaaatcgccgtgttactgttgcactgatgtccggagagacagtgacagcctccgtcagactcccacgtgaagatgtcacaagggattggcaattgtccccagggacaaaacactgtgtcccccccagtgcagggaaccgtgataagcctttctggtttcggagcacgtaaatgcgtccctgtacagatagtggggattttttgttatgtttgcactttgtatattggttgaaactgttatcacttatatatatatatacacacatatatataaaatctatttatttttgcaaaccctggttgctgtatttgttcagtgactattctcggggccctgtgtagggggttattgcctctgaaatgcctcttctttatgtacaaagattatttgcacgaactggactgtgtgcaacgctttttgggagaatgatgtccccgttgtatgtatgagtggcttctgggagatgggtgtcactttttaaaccactgtatagaaggtttttgtagcctgaatgtcttactgtgatcaattaaatttcttaaatgaaaaaaaaaaaaaaaaaaaaaaattggggggttgagacgaaaaatcttaacaattggggggggggccagggaaggaaggcaaggtcaagaacgaaagggggtccaaaaagcgggcgggtgaaacaggtgggagaaaagggaaaa

SEQ ID NO: 5189 - DNA, 1075 bp, Homo sapiens
gccagcgggttgccactgtccctcccatactcgccccccaacagagcacacagaacgagggagaaaccaggagcaggagcccgtgcgacgcctctccatcccggcaggttggacacagaaggccgaataccacaacaacataggcaggccaagaatcacggcattgcccttgcaaagggacacggagagtctctcatgggggcctgtgtgtctgagtacctttgtgctgacagcagcacattgtctccacttgtggaggaccaaggaacacttcaatgcaaggtcagcgtaggaggggaagaagcgggacctggagatagaagtagtcctatttcaccccaactacaacattaatgggaaaaaagaagcaggaattcctgaattttatgactatgacgttgccctgatcaagctcaagaataagctgaaatatggccagactatcaggcccatttgtctcccctgcaccgagggaacaactcgagctttgaggcttcctccaactaccacttgccagcaacaaaaggaagagctgctccctgcacaggatatcaaagctctgtttgtgtctgaggaggagaaaaagctgactcggaaggaggtctacatcaagaatggggataagaaaggcagctgtgagagagatgctcaatatgccccaggctatgacaaagtcaaggacatctcagaggtggtcacccctcggttcctttgtactggaggagtgagtccctatgctgaccccaatacttgcagaggtgattctggcggccccttgatagttcacaagagaagtcgtttcattcaagttggtgtaatcagctggggagtagtggatgtctgcaaaaaccagaagcggcaaaagcaggtacctgctcacgcccgagactttcacatcaacctctttcaagtgctgccctggctgaaggagaaactccaagatgaggatttgggttttctataaggggtttcctgctggacaggggcgtgggattgaattaaaacagctgcgacaacaaaaaaaaaaaaaaaaaaaaaaaagaatcgagcttcggacacagaagaacacaggggg

SEQ ID NO: 5190 - DNA, 3969 bp, Homo sapiens
  misc_feature (649)..(677): n is a, c, g, or t
agcccgcgcgagtgctagttttgcccacgcacttttggcacagccgcgccacgcgatcggcgatctgattggaccgcgcgggagggcgcgcggcgccaaacttgcttcccgtcagcccccgcccgtcccgcgggagcgcgcacgctcgcgcacccggatcccggctcctgcatccagtcgccattcgggaggccgctgcgctgcagggcctcgcggagccgcccgcgaccgcgagccgggccctccgcgcggtccatcgcccactggacgccgcccgcggccggaccggttcaacttctcatctttgttcttcttcatatactataggctgtttgctgtggtttagtcaaaaagccatgtagaatgcctgccttttgaagaccacttttaaggtgtctagtaagacagcagcagtattgaaagtttttaaagaatataaccgtgtgtgttggtaacagacagaagaatggaagcattccaggaacttcgtaaaccatcagcacgtttggagtgtgaccattgcagtttcagaggcacagactatgaaaatgtacaaatccatatgggtaccatccatccagaattttgtgatgaaatggatgctggtgggctaggcaaaatgatattttaccagaaaagtgcaaagttnnnnnnnnnnnnnnnnnnnnnnnnnnnnngcaagatgtactctaatgtatactatcacatcacatccaaacatgcatccccagacaaatggaatgataaaccaaaaaatcagttgaacaaagaaacagatcctgtgaaaagccctcctcttcctgaacaccagaaaataccctgcaattcagcagaaccaaaatccatacctgccctttcaatggaaacacagaaacttggttcagttttgtctccagaatcgccaaaacctactcctcttactcccctggagcctcagaaacctggctctgttgtttctcctgagctacagacacctcttccttctcctgagccttcaaaacctgcctctgtttcttctcctgaacctccaaaatcagtccctgtttgtgagtctcagaaacttgcccctgttccttctccagaaccacagaaacctgcccctgtatctcctgagtcagtaaaggctactcttagtaatcccaaaccccagaagcagtctcatttcccggaaacattggggccaccttcagcctcatctccagagtcaccagttctagctgcttccccagaaccttggggaccatccccagctgcatctccagaatctcggaagtcagcccggactacctcccctgagccaaggaagccatccccttcagagtctcctgaaccttggaagccgttccctgctgtctccccagagcctaggagaccagcccccgctgtgtcaccaggctcttggaaaccagggccacctgggtcccctaggccttggaaatccaatccttcagcatcatcaggaccttggaagccagctaaacctgctccatctgtgtctcctggaccttggaaaccaattccttctgtatctcctggaccttggaaaccaactccatctgtgtcttctgcatcctggaaatcttcatcagtctcacccagctcctggaagtctccccctgcatctcctgagtcatggaagtctggcccaccagaactccgaaagacagctcccacgttgtctcctgaacattggaaggcagttcccccagtgtctccagagcttcgcaaacccggcccaccactatccccagagatccgtagtccagcaggatctccagagctcagaaaaccctcagggtcaccagatctttggaagctttctcctgatcagcggaaaacttctcctgcttcacttgatttccctgagtcccagaaaagttcccgtggtggttctcctgatctctggaagtcttccttttttattgagcctcagaaacctgtcttccctgagacccgaaaaccaggtccttctgggccatctgagtcccccaaagcagcctcagatatctggaagcctgttctctctatcgatactgagcctagaaaacctgccctgtttcccgagcctgccaaaacagcccctcctgcttctccagaagcacgcaaacgtgccctttttccagagccccggaagcatgcccttttccctgaactccccaaatctgctctattctcagaatcacagaaggctgttgagcttggtgatgaactacaaatagatgccatagatgatcaaaaatgtgatattttggttcaggaagaacttctagcttcacctaagaaactcttagaagatactttatttccttcctcaaagaagctcaagaaagacaaccaagagagctcagacgctgagcttagtagtagtgagtacataaaaacagatttggatgcgatggatattaagggccaggaatcaagcagtgatcaagagcaggttgatgtggaatccattgattttagcaaagagaacaaaatggacatgactagtccagagcagtctagaaatgtgctacagtttactgaagaaaaagaagcttttatctctgaagaggagattgcaaaatacatgaagcgtggaaaaggaaagtattattgcaaaatttgttgctgtcgtgctatgaaaaaaggtgctgttttgcatcatttggttaataagcataatgttcatagcccttacaaatgcacaatctgtggaaaggcttttcttttggaatctctccttaaaaatcatgtagcagcccatgggcaaagtttacttaaatgtccacgttgtaattttgaatcaaatttcccaagaggttttaagaaacatttaactcattgtcaaagccggcataatgaagaggcaaataaaaagctaatggaagctcttgaaccgccactggaggagcagcaaatttgataacacagtgtgaatatttgttctacaaaggtgtttgttggaaccattctttgtaagtatagcttatcagatagcatagttggatcagtagatgacatgtatggtgtaccgtgtttcactgtctcagttgtgttactaagaatgagcatttgatcatttttttctggtctctgtctatgtgactatcttgtaagtcaataaatttctgtatagtccagatggattaaacttctcatttcttttaaatatgtatgaataataatacaaggaagtaggcattccatttaataatcaagagcaagttgtactcaaagcattcagttaaagtgtatctgtgtgtggaactaatttcagacaatagaaaatattagttgaaatgtttaagaattaggcatgaaaaataaatttgagaaattttgtttccttacatgtatttttaaatcataagagttattttctatctgatgtaaaattagtttataaatcttaatcagcttctagatgtttattagcttttatgtcatgaaatgttggagtctcagggttgctgattttctgctaatgggaaaaattgactaagtctttaaaatagtttgcagccttctcccacaggagacaagtgaaagataagtgtgattttagatctttcttgtccatagttgttttcagtggagtcttccattctgtatcttaccctaagatctggttcttccctccccatccccaccccccacccaccgcctgccagctcacactaatagatgattcttaattgccaaatgtgttagagtttgtatatcctactcctgggccttacatgtcgcctgttggggcttaagaccaggttgataagtaggaactgaaagtcttccagattcacagtagaaaattttatagacatttctgttaaagaaatatatcgattttatgtttttcaattatgttactgtaaataccttgtacctgttcatggattattttattctaaaatattttgtcaaatgtgtatcaaccaaattaaaaagaaaggttttcatgtcaaaaaaaaaaaaaaaaaaaaaatt

SEQ ID NO: 5191 - DNA, 4824 bp, Homo sapiens
  misc_feature (322)..(374): n is a, c, g, or t
  misc_feature (2023)..(2081): n is a, c, g, or t
cggacgcgtgggtacggctgcgagaagacgacagaagggggctgttgctgcagctctgacttgctttttcctgcctccttcctctcctctctcttcttgcttagcttcttgccttctgatactactcccaagatggaggctaatcactctgaacagctctcagcggaacgacagtcaacacctccaggtgacagttcatcattacccagtcacaatggcctggagaaggaagatggccaggattctccaaccccagtccaaccaccagagaaagaggcaagtgtgcaccccgatatctctgaagagctgaatcgacagctgnnnnnnnnnnnnnnnnnnnnnnnnnnnnnnnnnnnnnnnnnnnnnnnnnnnnnctctgccagggccagtgagcagcctgagaatgcagaatcacctgacaacgaggatggggactgtgaggaaacaactgaagaggctggaagagaacccgttgcttctggagagccacccactgtcaaagagcccgtcagcaataaggagcaaaaattggaaaagaaaatcctaaaaggattaggcaaagaagccaacctgctaatgcaaaatctgaacaagttgcaaacaccggaagaaaagtttgattttttattcaagaagtatgctgaattgctggatgaacatcgtactgagcaaaagaagttaaagctcctccaaaagaaacaggtacaaattcaaaaagaaaaggaccagttacaaggtgaacacagcagagctatcctcgctcgaagcaaattggagagtctgtgccgggagctgcagagacacaacaagactctgaaggaagaggcgcttcagcgggcacgtgaggaagaagagaaaaggaaggaaatcacaagccatttccagagtaccctcacggacatccagggccagatcgagcagcagagtgagcgaaatatgaagctctgtcaggagaacacagagcttgcagaaaagctgaaaagcatcatcgatcagtatgagctcagagaggagcatctggacaaaatatttaaacacagagaactgcagcagaagctggtggatgcaaagcttgagcaggcccaagaaatgatgaaggaagcggaggagcgacacaaacgagaaaaggaatatttgctgaaccaggcagcagagtggaaacttcaggcgaaagtgctgaaggagcaagagacagtcctgcaggctcagctcactctctactcaggaaggtttgaagaattccagagcacactaactaaaagcaacgaggtgtttgccacgttcaaacaggaaatggacaaaacaactaagaaaatgaagaagctggaaaaggacacagccacatggaaagcccgatttgagaactgtaacaaagctctgttggacatgattgaagagaaagcactgagagctaaagaatatgagtgctttgtgatgaaaatcgggaggctagagaacctctgccgtgctttacaagaagagagaaacgaactccacaaaaaaatcagagacgcagaaatatctgaaaaggatgaccaaagtcagcacaactccgatgaagagccagagtcaaacgtctctgtggatcaagagattgacgcagaggaggttaatagtgtccaaaccgccgtgaaaaatctggccacagccttcatgataattcatcatccagagtcaaccccgcaccagtccaaagaaacccaacccgaaataggcagttctcaggagagtgctgacgccgctctcaaggagccagagcaaccccctctgatcccttcacgggattcagagagtcccctgcctcccctaactcctcaggctgaagccgaaggaggcagtgatgctgaacctccctccaaggccagtaattctcctgccgggttgggagcagaaacccaatgcgagggtctccctgttggagcacaggctgatcaggcgtcctggaagccagaggcagaagcttccggtcaggccccacaggctcccaccgaggcctccctacagaagatggaggcagatgtgnnnnnnnnnnnnnnnnnnnnnnnnnnnnnnnnnnnnnnnnnnnnnnnnnnnnnnnnnnncagtaggcagcccccacgagcagcagcagaggagctgccagtaggggcctcagctgggccccagccgcgcaacgtggctgacaccaatctggaaggcgtcgactaagcctcaccgtgccttcagaggcttcttcctgcctctttgcatattcagcataacagcttgtcttccgaaaaaggcattaagggctagagatgtcaaatggaagagacttaggatcaagacattttttaatgttaggcagaacacattcattcagactttgctatttgttgtcaatttatagctgatttgaaggttttctatttaacactggttgacagtataattttcccaaagggcaacaaaacatacagatagcaaatttatattccttttctgttaagataatacttaaatttgttaatcaccagtaagatttgatgtttaaagacttccactgcaatatataaatactgaaaatgtgatgttctgcttatttggatatatagtttaacaagttccatagtaatttatggatgcccaggttacatttaaactatacatatacataatatatacatacgtgtgtacttattatatgtatatatacacgtatgtatagatgtgtgaatatttgtttatatacatatatgcacgtatctatatgtatatataaatgcattattacacatacatttctctcaccccttaatgcatttttctcaatgcagaatatttagatgctaatcaaaaaaatgatctcttacttgcacttgagactatggttgactaatgctctataaatccgaagagagttcggactataagtatttaggctatcattatgttgggcaaaaataagtaacccaatggtagataaatgaattcaaccagttgatcaaatggcagaaaagcagttagactacaatctgtgcagacagcatggacacaaagatgaccacaaggggcccaaaacagaaaagagaaacacaagctcacctcttggagctgcttctcctacacttctcagcccattgctttgccaccccctcatgtgccagggcatcccattccaggcttcctgcaaggaaacggttggaagtgggaaaggggagctagggattgaggggttaagggacctcacactaagaaggggctgtgctttgatcccctgcctcttgcactaccaatgtctcaagacataatattcatctcttgctgtcagacccattctatattctaaaagcttctgctccttccttcccaatttctcctttgtagcaggaaattacacccagccctcatctcaattaatgctaaataaagctattgtttttccaaaacacaaatctacactgggtctcaatatcagtgatgaggcttacaaaccaacacgttttctgccatgaggatttctctttaggccagaagtacaaaacaaaaaaaccaatggattttaaccaaaatgatttgaaatataggtgaggattcaggagaaggcaaaagctagaaacacttggggttgtcaacatgagtattacattaacattgcttgatgagaacctctaatgatactgacaacataaattacctagggtaaaggatagctgcaacaatgaaacaggaaagaagagagggagagagaggaaagggaaggaagaaaggaaggagggagaagggaagaaagaaacaatgtctaacccaaccctatcttgaaagttgaactcaagtagaaaaatggatagaaacaaaattctctagtactcatccaggaaaccattcttcaatgttgcatgtggctgtttgccaaggcacacaaagtgcttgtaggcagcaaccatatgctacaagaattgtaaactgcatacagtttgtttgaagtagacagtgaggataataacaaagttgctaggcaggaaaaaaaatcaggaaaaaagcttgtcgctatttgagaatctgtatatttttaaaggcttaaaatattataaccacagggtatccagccaaattcaacattactgcaagtcttagagatttaaacattcatttgattcagagctaaatattcaccataatccaggagggtctccttccccactgcagaggcagaacgtccaagaatggagtaagattagtcatagtaaagtctcagtctgaatatttagcaagagaaacaggcagcagaggaacccaaaggcagtaaatcaaatattctaaaacccaaagttcattattttcatccaaaagactttcacagaaacacattactcacagccatgtatatcttggacagagtttcagatggaatgacttgtctgaaatttgtaaagcttaatataggttttgggggaattattttaatattcaaagaatgttttattatagtcctttgtgttaaaatttagccttactaattataacaataactcataaagttctaaattcagaaggaatgtctgttctttatcaagtgtatgtaactattttttagaaatgccatctactttctagaaacactaaagttattgttttctaagttaaataactataatttatatatctattaaaaaggtacttctcttcccaaaaaaaaaaaaaaaaaaaaaaaaaaaaaaaaaaaaaaaaaaaaaaaaaaaaaaaaaaaaaaaaaaaaaaaaaaaaaaaaaaaaaaaaaaaaaaaaaaaaaaaaaaaaaaaaaaaaaaaaaaaaaaaaaaaaaaaaaaaaaaaaaaaaaaaaaagaaaaaaaaaaaaaaaaaaaa

SEQ ID NO: 5192 - DNA, 7363 bp, Homo sapiens
  misc_feature (343)..(362): n is a, c, g, or t
  misc_feature (590)..(609): n is a, c, g, or t
  misc_feature (2359)..(2385): n is a, c, g, or t
  misc_feature (4386)..(4406): n is a, c, g, or t
  misc_feature (4541)..(4558): n is a, c, g, or t
gcggcggcggctgcggcggtggggccgggcgaggtccgctgcggtcccggcggctccgtggctgctccgctctgagcgcctggcgcgccccgcgccctccctgccggggccgctgggccggggatgcacgcggggcccgggagccatggtccgcttcggggacgagctgggcggccgctatggaggccccggcggcggagagcgggcccggggcggcggggccggcggggcggggggcccgggtcccggggggctgcagcccggccagcgggtcctctacaagcaatcgatcgcgcagcgcgcgcggaccatggcgctgtacaaccccatcccggtcaagcannnnnnnnnnnnnnnnnnnngctcgctcttcgtcttcagcgaggacaacgtcgtccgcaaatacgcgaagcgcatcaccgagtggcctccattcgagtatatgatcctggccaccatcatcgccaactgcatcgtgctggccctggagcagcacctccctgatggggacaaaacgcccatgtccgagcggctggacgacacggagccctatttcatcgggatcttttgcttcgaggcagggatcaaannnnnnnnnnnnnnnnnnnncttccacaagggctcttacctgcggaacggctggaacgtcatggacttcgtggtcgtcctcacagggatccttgccacggctggaactgacttcgacctgcgaacactgagggctgtgcgtgtgctgaggcccctgaagctggtgtctgggattccaagtttgcaggtggtgctcaagtccatcatgaaggccatggttccactcctgcagattgggctgcttctcttctttgccatcctcatgtttgccatcattggcctggagttctacatgggcaagttccacaaggcctgtttccccaacagcacagatgcggagcccgtgggtgacttcccctgtggcaaggaggccccagcccggctgtgcgagggcgacactgagtgccgggagtactggccaggacccaactttggcatcaccaactttgacaatatcctgtttgccatcttgacggtgttccagtgcatcaccatggagggctggactgacatcctctataatacaaacgatgcggccggcaacacctggaactggctctacttcatccctctcatcatcatcggctccttcttcatgctcaacctggtgctgggcgtgctctcgggggagtttgccaaggagcgagagagggtggagaaccgccgcgccttcctgaagctgcgccggcagcagcagatcgagcgagagctcaacgggtacctggagtggatcttcaaggcggaggaagtcatgctggccgaggaggacaggaatgcagaggagaagtcccctttggacgtgctgaagagagcggccaccaagaagagcagaaatgacctgatccacgcagaggagggagaggaccggtttgcagatctctgtgctgttggatcccccttcgcccgcgccagcctcaagagcgggaagacagagagctcgtcatacttccggaggaaggagaagatgttccggttttttatccggcgcatggtgaaggctcagagcttctactgggtggtgctgtgcgtggtggccctgaacacactgtgtgtggccatggtgcattacaaccagccgcggcggcttaccacgaccctgtattttgcagagtttgttttcctgggtctcttcctcacagagatgtccctgaagatgtatggcctggggcccagaagctacttccggtcctccttcaactgcttcgactttggggtcatcgtggggagcgtctttgaagtggtctgggcggccatcaagccgggaagctcctttgggatcagtgtgctgcgggccctccgcctgctgaggatcttcaaagtcacgaagtactggagctccctgcggaacctggtggtgtccctgctgaactccatgaagtccatcatcagcctgctcttcttgctcttcctgttcattgtggtcttcgccctgctggggatgcagctgtttgggggacagttcaacttccaggatgagactcccacaaccaacttcgacaccttccctgccgccatcctcactgtcttccagatcctgacgggagaggactggaatgcagtgatgtatcacgggatcgaatcgcaaggcggcgtcagcaaaggcatgttctcgtccttttacttcattgtcctgacactgttcggaaactacactctgctgaatgtctttctggccatcgctgtggacaacctggccaacgcccaagagctgaccaaggatgaagaggagatggaagaagcagccaatcagaagcttgctctgcaaaaggcnnnnnnnnnnnnnnnnnnnnnnnnnnngtctgccgcgaacatctccatcgccgccaggcagcagaactcggccaaggcgcgctcggtgtgggagcagcgggccagccagctacggctgcagaacctgcgggccagctgcgaggcgctgtacagcgagatggaccccgaggagcggctgcgcttcgccactacgcgccacctgcggcccgacatgaagacgcacctggaccggccgctggtggtggagctgggccgcgacggcgcgcgggggcccgtgggaggcaaagcccgacctgaggctgcggaggcccccgagggcgtcgaccctccgcgcaggcaccaccggcaccgcgacaaggacaagacccccgcggcgggggaccaggaccgagcagaggccccgaaggcggagagcggggagcccggtgcccgggaggagcggccgcggccgcaccgcagccacagcaaggaggccgcggggcccccggaggcgcggagcgagcgcggccgaggcccaggccccgagggcggccggcggcaccaccggcgcggctccccggaggaggcggccgagcgggagccccgacgccaccgcgcgcaccggcaccaggatccgagcaaggagtgcgccggcgccaagggcgagcggcgcgcgcggcaccgcggcggcccccgagcggggccccgggaggcggagagcggggaggagccggcgcggcggcaccgggcccggcacaaggcgcagcctgctcacgaggctgtggagaaggagaccacggagaaggaggccacggagaaggaggctgagatagtggaagccgacaaggaaaaggagctccggaaccaccagccccgggagccacactgtgacctggagaccagtgggactgtgactgtgggtcccatgcacacactgcccagcacctgtctccagaaggtggaggaacagccagaggatgcagacaatcagcggaacgtcactcgcatgggcagtcagcccccagacccgaacactattgtacatatcccagtgatgctgacgggccctcttggggaagccacggtcgttcccagtggtaacgtggacctggaaagccaagcagaggggaagaaggaggtggaagcggatgacgtgatgaggagcggcccccggcctatcgtcccatacagctccatgttctgtttaagccccaccaacctgctccgccgcttctgccactacatcgtgaccatgaggtacttcgaggtggtcattctcgtggtcatcgccttgagcagcatcgccctggctgctgaggacccagtgcgcacagactcgcccaggaacaacgctctgaaatacctggattacattttcactggtgtctttacctttgagatggtgataaagatgatcgacttgggactgctgcttcaccctggagcctatttccgggacttgtggaacattctggacttcattgtggtcagtggcgccctggtggcgtttgctttctcaggatccaaagggaaagacatcaataccatcaagtctctgagagtccttcgtgtcctgcggcccctcaagaccatcaaacggctgcccaagctcaaggctgtgtttgactgtgtggtgaactccctgaagaatgtcctcaacatcttgattgtctacatgctcttcatgttcatatttgccgtcattgcggtgcagctcttcaaagggaagtttttctactgcacagatgaatccaaggagctggagagggactgcaggggtcagtatttggattatgagaaggaggaagtggaagctcagcccaggcagtggaagaaatacgactttcactacgacaatgtgctctgggctctgctgacgctgttcacagtgtccacgggagaaggctggcccatggtgctgaaacactccgtggatgccacctatgaggagcagggtccaagccctgggtaccgcatggagctgtccatcttctacgtggtctactttgtggtctttcccttcttcttcgtcaacatctttgtggcttnnnnnnnnnnnnnnnnnnnnnagcagggggacaaggtgatgtctgaatgcagcctggagaagaacgagagggcttgcattgacttcgccatcagcgccaaacccctgacacggtacatgccccaaaaccggcagtcgttccagtataagacgtggnnnnnnnnnnnnnnnnnnccctttgaatacttcatcatggccatgatagccctcaacactgtggtgctgatgatgaagttctatgatgcaccctatgagtacgagctgatgctgaaatgcctgaacatcgtgttcacatccatgttctccatggaatgcgtgctgaagatcatcgcctttggggtgctgaactatttcagagatgcctggaatgtctttgactttgtcactgtgttgggaagtattactgatattttagtaacagagattgcggaaacgaacaatttcatcaacctcagcttcctccgcctctttcgagctgcgcggctgatcaagctgctccgccagggctacaccatccgcatcctgctgtggacctttgtccagtccttcaaggccctgccctacgtgtgtctgctcattgccatgctgttcttcatctacgccatcatcggcatgcaggtgtttgggaatattgccctggatgatgacaccagcatcaaccgccacaacaacttccggacgtttttgcaagccctgatgctgctgttcaggagcgccacgggggaggcctggcacgagatcatgctgtcctgcctgagcaaccaggcctgtgatgagcaggccaatgccaccgagtgtggaagtgactttgcctacttctacttcgtctccttcatcttcctgtgctcctttctgatgttgaacctctttgtggctgtgatcatggacaattttgagtacctcacgcgggactcttccatcctaggtcctcaccacttggatgagttcatccgggtctgggctgaatacgacccggctgcgtgtgggcgcatcagttacaatgacatgtttgagatgctgaaacacatgtccccgcctctggggctggggaagaaatgccctgctcgagttgcttacaagcgcctggttcgcatgaacatgcccatctccaacgaggacatgactgttcacttcacgtccacgctgatggccctcatccggacggcactggagatcaagctggccccagctgggacaaagcagcatcagtgtgacgcggagttgaggaaggagatttccgttgtgtgggccaatctgccccagaagactttggacttgctggtaccaccccataagcctgatgagatgacagtggggaaggtttatgcagctctgatgatatttgacttctacaagcagaacaaaaccaccagagaccagatgcagcaggctcctggaggcctctcccagatgggtcctgtgtccctgttccaccctctgaaggccaccctggagcagacacagccggctgtgctccgaggagcccgggttttccttcgacggaagagtccacctccctcagcaatggcggggccatacaaaaccaagagagtggcatcaaagagtctgtctcctggggcactcaaaggacccaggatgcaccccatgaggccaggccacccctggagcgtggccactccacagagatccctgtggggcggtcaggagcactggctgtggacgttcagatgcagagcataacccggaggggccctgatggggagccccagcctgggctggagagccagggtcgagcggcctccatgccccgccttgcggccgagactcagcccgtcacagatgccagccccatgaagcgctccatctccacgctggcccagcggccccgtgggactcatctttgcagcaccaccccggaccgcccaccccctagccaggcgtcgtcgcaccaccaccaccaccgctgccaccgccgcagggacaggaagcagaggtccctggagaaggggcccagcctgtctgccgatatggatggcgcaccaagcagtgctgtggggccggggctgcccccgggagaggggcctacaggctgccggcgggaacgagagcgccggcaggagcggggccggtcccaggagcggaggcagccctcatcctcctcctcggagaagcagcgcttctactcctgcgaccgctttgggggccgtgagcccccgaagcccaagccctccctcagcagccacccaacgtcgccaacagctggccaggagccgggaccccacccacagggcagtggttccgtgaatgggagccccttgctgtcaacatctggtgctagcacccccggccgcggtgggcggaggcagctcccccagacgcccctgactccccgccccagcatcacctacaagacggccaactcctcacccatccacttcgccggggctcagaccagcctccctgccttctccccaggccggctcagccgtgggctttccgaacacaacgccctgctgcagagagaccccctcagccagcccctggcccctggctctcgaattggctctgacccttacctggggcagcgtctggacagtgaggcctctgtccacgccctgcctgaggacacgctcactttcgaggaggctgtggccaccaactcgggccgctcctccaggacttcctacgtgtcctccctgacctcccagtctcaccctctccgccgcgtgcccaacggttaccactgcaccctgggactcagctcgggtggccgagcacggcacagctaccaccaccctgaccaagaccactggtgctagctgcaccgtgaccgctcagacgcctgcatgcagcaggcgtgtgttccagtggatgagttttatcatccacacggggcagtcggccctcgggggaggccttgcccaccttggtgaggctcctgtggcccctccctccccctcctcccctcttttactctagacgacgaataaagccctgttgcttgagtgtacgtaccgc

SEQ ID NO: 5193 - DNA, 5148 bp, Homo sapiens
  misc_feature (1519)..(1544): n is a, c, g, or t
ccccgcaggggaaggcgggtcctggcggccagcgcgcggtccgcgcccaccctagccgagcggggccggcagagcgcgcggcgtcggtgcccttgaccatggcggcggctgcgcttctgctggggctggcgctgctggcaccgcgggcggccggcgcgggcatgggcgcgtgctatgacggcgcagggcgcccgcagcgctgcctgccggtgttcgagaacgcggcgtttgggcggctcgcccaggcctcgcacacgtgcggcagcccgcccgaggacttctgtccccacgtgggcgccgcgggcgcgggggctcattgccagcgctgcgacgccgccgacccccagcgccaccacaacgcctcctacctcaccgacttccacagccaggacgagagcacctggtggcagagcccgtccatggccttcggcgtgcagtaccccacctcggtcaacatcaccctccgcctagggaaggcttatgagatcacgtatgtgaggctgaagttccacaccagtcgccctgagagctttgccatctacaagcgcagccgcgccgacggcccatgggagccctaccagttctacagcgcctcctgccagaagacctacggccggcccgagggccagtacctgcgccccggcgaggacgagcgcgtggccttctgcacctctgagttcagcgacatctccccgctgagtggcggcaacgtggccttctccaccctggagggccggcccagcgcctacaacttcgaggagagccctgggctgcaggagtgggtcaccagcaccgaactcctcatctctctagaccggctcaacacgtttggggacgacatcttcaaggaccccaaggtgctccagtcctactattatgccgtgtccgacttctctgtgggcggcaggtgcaagtgcaacgggcatgccagcgagtgcggccccgacgtggcaggccagttggcctgccggtgccagcacaacaccaccggcacagactgtgagcgctgcctgcccttcttccaggaccgcccgtgggcccggggcaccgccgaggctgcccacgagtgtctgccctgcaactgcagtggccgctccgaggaatgcacgtttgatcgggagctcttccgcagcacaggccacggcgggcgctgtcaccactgccgtgaccacacagctgggccacactgtgagcgctgtcaggagaatttctatcactgggacccgcggatgccatgccagccctgtgactgccagtcggcaggctccctacacctccagtgcgatgacacaggcacctgcgcctgcaagcccacggtgactggctggaagtgtgaccgctgtctgcccgggttccactcgctcagtgagggaggctgcagaccctgcacttgcaatcccgctggcagcctggacacctgtgacccccgcagtgggcgctgcccctgcaaagagaatgtggaaggcaacctatgtgacagatgtcgcccggggacctttaacctgcagccccacaatcnnnnnnnnnnnnnnnnnnnnnnnnnntatggccactccaaggtgtgcgcgtccactgcccagttccaggtgcatcacatcctcagcgatttccaccagggagccgaaggctggtgggccagaagtgtggggggctctgagcactccccacaatggagcccaaatggggtcctcctgagcccagaagacgaggaggagctcacagcaccagggaagttcctgggagaccagcggttcagctatgggcagcccctcatactgaccttccgggtgccccccggggactccccactccctgtacagctgaggctggaagggacaggcttggccctgtccctgaggcactctagcctgtctggcccccaggatgccagggcatcccagggaggtagagctcaggttccactgcaggagacctccgaggacgtggcccctccactgccccccttccacttccagcggctcctcgccaacctgaccagcctccgcctccgcgtcagtcccggccccagccctgccggtccagtgttcctgactgaggtccggctcacatccgcccggccagggctttccccgccagcctcctgggtggagatttgttcatgtcccactggctacacgggccagttctgtgaatcctgtgctccgggatacaagagggagatgccacaggggggtccctatgccagctgtgtcccctgcacctgtaaccagcatggcacctgtgaccccaacacagggatctgtgtctgcagccaccataccgagggcccatcctgtgaacgctgtttgccaggtttctatggcaaccctttcgcgggccaagccgacgactgccagccctgtccctgccctggccagtcggcctgtacgaccatcccagagagcggggaggtggtgtgtacccactgccccccgggccagagagggcggcgctgtgaggtctgtgatgatggcttttttggggacccgctggggctctttgggcacccccagccctgccaccagtgccagtgtagcgggaacgtggaccccaatgccgtgggcaactgtgaccccctgtctggccactgcctgcgctgcctgcacaacaccacgggtgaccactgtgagcactgtcaggaaggcttctacgggagcgccctggcccctcgacccgcagacaaatgcatgccttgcagctgtcacccacagggctcggtcagtgagcagatgccctgcgacccagtgacaggccaatgctcctgcctgcctcatgtgactgcacgggactgcagccgctgctaccctggcttcttcgacctccagcctgggaggggctgccggagctgcaagtgtcacccactgggctcccaggaggaccagtgccatcccaagactggacagtgcacctgccgcccaggtgtcacaggccaggcctgtgacaggtgccagctgggtttcttcggcttctcaatcaagggctgccgggcctgcaggtgctccccactgggcgctgcctcggcccagtgccactataacggcacatgcgtgtgcaggcctggcttcgagggctacaaatgtgaccgctgccactacaacttcttcctcacggcagacggcacacactgccagcaatgtccgtcctgctacgccctggtgaaggaggaggcagccaagctgaaggccagactgactttgacggaggggtggctccaagggtccgactgtggcagtccctggggaccactagacattctgctgggagaggccccaaggggggacgtctaccagggccatcacctgcttccaggggctcgggaagccttcctggagcagatgatgggcctcgagggtgctgtcaaggccgcccgggagcagctgcagaggctgaacaagggtgcccgctgtgcccaggccggatcccagaagacctgcacccagctggcagacctggaggcagtgctggagtcctcggaagaggagattctgcatgcagctgccattctcgcgtctctggagattcctcaggaaggtcccagtcagccgaccaaatggagccacctggccacagaggcccgtgccctcgccaggagccacagagacaccgccaccaagatcgcagccactgcttggagggccctgctcgcctccaacaccagctacgcgcttctctggaatctgctggagggaagggtggccctagagacccagcgggacctggaggacaggtaccaggaggtccaggcggcccagaaagcactgaggacggctgtggcagaggtgctgcctgaagcggaaagcgtgttggccaccgtgcagcaagttggcgcagatacagccccgtacctggccttgctggcttccccgggagctctgcctcagaagtcccgggctgaagacctgggcctgaaggcgaaggccctggagaagacagttgcatcatggcagcacatggccactgaggctgcccgaaccctccagactgctgcccaggcgacgctacggcaaacagaacccctcacaaagctgcaccaggaggccagagccgccctgacccaggcttcctcatctgtccaggctgcgacagtgactgtcatgggagccaggactctgctggctgatctggaaggaatgaagctgcagtttccccggcccaaggaccaggcggcattgcagaggaaggcagactccgtcagtgacagactccttgcagacacgagaaagaagaccaagcaggcggagaggatgctgggaaacgcggcccctctttcctccagtgccaagaagaagggcagagaagcagaggtgttggccaagcacgtgacaaggttgccaaggccttgctgagggagcggaaacaggcgcaccgccgtgccagcaggctcaccagccagacgcaagccacgctccaacaggcgtcccagcaggtgctggcgtctgaagcacgcagacaggagctggaggaagctgagcgggtgggtgctgggctgagcgagatggagcagcagatccgggaatcgcgtatctcactggagaaggacatcgagaccttgtcagagctgcttgccaggctggggtcgctggacacccatcaagccccagcccaggccctgaacgagactcagtgggcactagaacgcctgaggctgcagctgggctccccggggtccttgcagaggaaactcagtctgctggagcaggaatcccagcagcaggagctgcagatccagggcttcgagagtgacctcgccgagatccgcgccgacaaacagaacctggaggccattctgcacagcctgcccgagaactgtgccagctggcagtgagggctgcccagatccccggcacacactcccccacctgctgtttacatgacccagggggtgcacactaccccacaggtgtgcccatacagacattccccggagccggctgctgtgaactcgaccccgtgtggatagtcacactccctgccgattctgtctgtggcttcttccctgccagcaggactgagtgtgcgtacccagttcacctggacatgagtgcacactctcacccctgcacatgcataaacgggcacaccccagtgtcaataacatacacacgtgagggtgcatgtctgtgtgtatgacccaaataaaaaaaaaaa

SEQ ID NO: 5194 - DNA, 5689 bp, Homo sapiens
  misc_feature (2420)..(2472): n is a, c, g, or t
  misc_feature (2619)..(2639): n is a, c, g, or t
tacggctgcgagaagacgacagaaggggagtgacaatctgctcaacatggatgaatcagtaagagagacagagatgaagctcttgtctggtgagtcagaaaactcagggatgagccagtgttgggagacggcagctgacaagagagtgggggggaaggacttatggagcaagaggggttcaaggaaatctgccagggtgaggcagccgggaatgaagggaaatcccaagaagccgaatgccaacctgagagaaagtacaacagaaggtacccttcatctctgctctgccaaagaatctgctgagcccccactaacccagagtgataaaagagagacttctcacaccacagcagcagcgactggtcggagttcccatgctgatgcaagagaatgtgctatttcaacccaggcagagcaagaagcaaaaacccttcaaacttcaacagactcagtctccaaagaaggcaacacaaattgcaagggagaaggcatgcaagttaatactctatttgaaacaagccaggttccagactggagtgatcctcctcaggtacaagttcaggaaacagtcagagagacaatctcttgcagccagatgccagctttctcagagcctgctggggaggagtccccattcactgggaccacaacaatttccttctcaaacttaggaggggtccacaaggaaaatgcatcattagctcaacactcggaggtcaaaccctgtacctgtggtccacagcaggaagaaaaacaagacagagatggcaacatacctgacaatttcagggaagacctaaaatatgagcagagcatctcagaagccaatgatgagactatgtccccaggtgtgttctcaaggcatctccccaaggatgctcgtgctgacttcagggagcctgtggctgtctctgttgcttcccctgaacccacagatactgccctcaccctggaaaatgtgtgtgatgagccaagggacagagaagcagtgtgtgcaatggagtgttttgaggctagtgaccaaggaacatgttttgataccatagattctcttgttgggacaccagttgataactattcgcctcaagaaatttgctctgtagatacggaactggcagaaggtcaaaacaaagtatctgatttatgttcttctaatgacaagacactggaagtcttttttcagacacaagtgtctgagacttcagtgtctacgtgcaaaagcagcaaggacggcaactcagtcatgtcccctctttttatcagtactttcaccttgaacatttcacacacagctagtgaaggtgccacaggagaaaatctagccaaggtggagaaatccacctacccactggcctccacagtacatgctggccaggagcagccaagccccagcaactcaggagggcttgatgaaacacagctcctttcttctgagaacaatcctttagtgcaatttaaagaaggaggtgacaagagccccagtcctagtgccgcagacaccacagccacaccagccagttatagttcaattgtgagttttccttgggagaagccaacaacattaactgctaataatgagtgctttcaagcgaccagagagactgttaccattgccaccgaagtccacccagccaaataccttgctgtgtcaattcctgaggacaagcatgcaggtggcactgaggagaggttccctcgtgcatcccatgaaaaggtttcccaatttccttcccaagtgcaggtggatcatattttaagtggtgctaccatcaaatctacaaaagagctactttgcagggcacccagtgtgccaggagtcccacaccatgtcctgcagctcccagagggagagggtttctgcagtaattcccctcttcaggttgataacctgtctggagataagagccagactgtggacagagcagactttaggagctatgaagagaatttccaagaaagaggaagtgaaacaaagcagggggtccagcagcagagcctgtcccagcagggttctctttctgcacctgatttccaacaaagtttgcctacgacatctgctgcacaagaggaaagaaacttggtgcccacggccccctcaccagcaagctctagggaaggagcagggcagcgctcaggttgggggacgagggtctccgtggtggctgaaactgctggggaagaagacagtcaggctctgagcaacgttccatctctctctgatatccttttggaagagtctaaagaatatagacctggaaattgggaggcaggcaacaagctgaagattataactctagaggcttccgcttctgaaatctggccaccacgacaactgacaaattctgagagcaaggcatcagacggtggtctcataattcctgacaaggtctgggctgtacctgatagtctaaaggcagatnnnnnnnnnnnnnnnnnnnnnnnnnnnnnnnnnnnnnnnnnnnnnnnnnnnnnagaggatgctgagtcagcccttgctgatagcagagaaagccataaaggcgaagagcccaccatcagtgtacactggagaagtctttcttcccggggtttcagccaaccgagactcctggagtcatccgtggaccctgtagatgaaannnnnnnnnnnnnnnnnnnnncactgtcagcggcttctgaaactggagggaaggaaaatgttaacaatgtgagtcaagaccaggaggaaaaacaactcaagatggatcacactgccttctttaaaaagtttctgacctgccctaaaatcctagagtcctctgtagatcccattgatgagataagtgtgatagagtacaccagggctggaaaaccagagccctctgaaaccacaccacagggcgccagagaaggaggtcaatcaaatgacggaaacatgggccacgaagcggaaatccagtcggccattttgcaagttccatgtctccagggaaccattctgagtgaaaatagaatcagcagaagccaagaaggcagtatgaagcaggaggcagaacaaattcaacctgaggaggcaaaaactgccatttggcaagtcctgcaacccagcgaaggcggtgaaagaattccaagtggatgtagcataggccaaatacaagaaagcagtgatgggagcttaggggaggctgagcaaagcaaaaaggacaaagcagaattgatttcccccacttcacctctttctagttgtcttccaataatgactcactcttctcttggggttgacacgcacaactccacaggccaaattcatgacgtccctgaaaatgacatagttgagcccagaaagcgtcagtatgtgtttcctgtttcacagaaaaggggaactattgagaatgagcgtgggaaacctttgccctcttctcctgatcttaccaggttcccttgtacttcatctcctgaaggaaatgtcacagactttttgataagccacaaaatggaggaacctaaaatagaggtgcttcaaattggggaaaccaaacccccaagctcatctagctcctcagcgaagaccttggcatttatttcaggagaacgtgagttagagaaagcccctaagttactgcaggatccatgtcaaaagggcaccctgggctgtgcgaaaaagtccagggagagagagaagtccctggaagcccgagcaggcaaatcgccagggaccctcacagcagtgacggggtcagaggaggtcaagaggaagccagaagccccaggcagtggacatttagctgagggagtaaagaagaaaattttgtccagggtggcagcactgaggctgaaactggaagaaaaggaaaatatcagaaagaactcagcctttcttaaaaagatgcccaaactcgaaacatcattatcacacacagaagagaaacaagacccaaaaaagccatcttgcaaaagagaaggaagagctccagtattactgaaaaaaatccaagctgagatgttccctgaacactctggaaatgtaaaattaagctgccaatttgcagaaattcatgaagattctactatctgctggacaaaagattcaaagtccatagcccaagtgcagagaagtgcaggggacaactccactgtttcctttgccatcgtgcaagccagtccgaaggaccagggactctattactgctgcatcaagaacagctacggaaaagtgactgctgaatttaacctcacagctgaagttctcaaacagctgtcaagtcgccaggatactaaaggatgtgaagagattgaattcagccaactcatcttcaaagaagacttcctccatgacagctactttgggggccgcctgcgtggtcagatcgccacggaggagctgcactttggagaaggggttcaccgcaaagccttccgcagcacagtgatgcacggcctcatgcctgtcttcaaacctggccatgcctgtgtgcttaaggtgcacaatgccattgcctatgggaccagaaataatgatgagctcatccaaaggaactacaaactcgctgcccaggaatgctatgttcaaaatactgccaggtattatgccaagatctacgctgctgaagcacagcctctggaaggctttggagaagtacctgagatcattcctatttttcttatccatcggcctgagaacaatatcccgtatgctacagtggaggaggagctgattggagaatttgtgaagtattccatcagggatgggaaagaaataaacttcttgagaagagaatcagaagctggtcagaaatgttgcaccttccagcactgggtgtaccagaaaacaagtggctgcctcctggtgacggacatgcaaggtgtaggaatgaagctaactgacgttggcatagcaacgctggctaaagggtacaagggatttaaaggcaactgttccatgaccttcattgatcagtttaaagcactacaccagtgtaacaagtattgcaaaatgctgggactgaaatcccttcaaaacaacaaccagaaacagaagcagccgagcattgggaaaagcaaagttcaaacaaactctatgacagtaaagaaggcagggcctgagaccccaggcgaaaagaaaacctaacgtccctgggtaacctaatggccactggctagcagcacacaatctcgccagggaaaatctgaggccacacaggagagaatatacagcctgcagagagtgcgtggcaatccttacccccagccgactgtgcgccaagatgcttctaaacccatcacctgctgtcttcactcaaatgatttcagaacaggatttgcgaccaggtttatggggagattgaatcaacgattggtctcaaagacagtccattctttatatacacgtttagcatttttaccaacctcacatcatgtgtatatttgtgtatttgcacatggttgtgctgtcgaggacctggtgctgagaagagtctgttcacagccaaaattcttcccactgtcattcctaacctgggatttctagacacatcctgctgtgatgtaaacagaaatcacgaattcgctcactggatcaagttgttccactggtgtctaatacgctattgttgccggaggtgggttctgtgacgtgaagccatttcccatcattcaacagccagttacaattttctgtttaattaaattcatatttaaacaaaaaaaaaaaaaaaaaaaaaaaaaaaaaaaa

SEQ ID NO: 5195 - DNA, 2264 bp, Homo sapiens
  misc_feature (283)..(284): n is a, c, g, or t
  misc_feature (327)..(328): n is a, c, g, or t
  misc_feature (331)..(331): n is a, c, g, or t
  misc_feature (336)..(338): n is a, c, g, or t
  misc_feature (439)..(439): n is a, c, g, or t
  misc_feature (469)..(470): n is a, c, g, or t
  misc_feature (473)..(473): n is a, c, g, or t
  misc_feature (1933)..(1933): n is a, c, g, or t
  misc_feature (1935)..(1935): n is a, c, g, or t
  misc_feature (1937)..(1937): n is a, c, g, or t
  misc_feature (1942)..(1942): n is a, c, g, or t
  misc_feature (1947)..(1947): n is a, c, g, or t
  misc_feature (1951)..(1951): n is a, c, g, or t
  misc_feature (1962)..(1962): n is a, c, g, or t
  misc_feature (1964)..(1964): n is a, c, g, or t
  misc_feature (1967)..(1967): n is a, c, g, or t
  misc_feature (1971)..(1971): n is a, c, g, or t
  misc_feature (1979)..(1979): n is a, c, g, or t
  misc_feature (1982)..(1983): n is a, c, g, or t
  misc_feature (1989)..(1989): n is a, c, g, or t
  misc_feature (1991)..(1991): n is a, c, g, or t
  misc_feature (1995)..(1995): n is a, c, g, or t
  misc_feature (1998)..(1998): n is a, c, g, or t
  misc_feature (2002)..(2002): n is a, c, g, or t
  misc_feature (2004)..(2004): n is a, c, g, or t
  misc_feature (2015)..(2017): n is a, c, g, or t
  misc_feature (2019)..(2019): n is a, c, g, or t
  misc_feature (2022)..(2022): n is a, c, g, or t
  misc_feature (2024)..(2024): n is a, c, g, or t
  misc_feature (2028)..(2028): n is a, c, g, or t
  misc_feature (2030)..(2030): n is a, c, g, or t
  misc_feature (2035)..(2035): n is a, c, g, or t
  misc_feature (2037)..(2037): n is a, c, g, or t
  misc_feature (2040)..(2040): n is a, c, g, or t
  misc_feature (2043)..(2044): n is a, c, g, or t
  misc_feature (2046)..(2046): n is a, c, g, or t
  misc_feature (2056)..(2057): n is a, c, g, or t
  misc_feature (2065)..(2069): n is a, c, g, or t
  misc_feature (2073)..(2073): n is a, c, g, or t
  misc_feature (2079)..(2083): n is a, c, g, or t
  misc_feature (2085)..(2085): n is a, c, g, or t
  misc_feature (2089)..(2089): n is a, c, g, or t
  misc_feature (2091)..(2093): n is a, c, g, or t
  misc_feature (2096)..(2097): n is a, c, g, or t
  misc_feature (2100)..(2100): n is a, c, g, or t
  misc_feature (2107)..(2108): n is a, c, g, or t
  misc_feature (2111)..(2113): n is a, c, g, or t
  misc_feature (2124)..(2124): n is a, c, g, or t
  misc_feature (2126)..(2129): n is a, c, g, or t
  misc_feature (2131)..(2132): n is a, c, g, or t
  misc_feature (2140)..(2142): n is a, c, g, or t
  misc_feature (2146)..(2146): n is a, c, g, or t
  misc_feature (2152)..(2153): n is a, c, g, or t
  misc_feature (2155)..(2156): n is a, c, g, or t
  misc_feature (2158)..(2158): n is a, c, g, or t
  misc_feature (2161)..(2161): n is a, c, g, or t
  misc_feature (2163)..(2163): n is a, c, g, or t
  misc_feature (2169)..(2169): n is a, c, g, or t
  misc_feature (2171)..(2171): n is a, c, g, or t
  misc_feature (2173)..(2175): n is a, c, g, or t
  misc_feature (2179)..(2180): n is a, c, g, or t
  misc_feature (2183)..(2183): n is a, c, g, or t
  misc_feature (2185)..(2186): n is a, c, g, or t
  misc_feature (2190)..(2190): n is a, c, g, or t
  misc_feature (2192)..(2193): n is a, c, g, or t
  misc_feature (2195)..(2195): n is a, c, g, or t
  misc_feature (2198)..(2198): n is a, c, g, or t
  misc_feature (2201)..(2201): n is a, c, g, or t
  misc_feature (2205)..(2206): n is a, c, g, or t
  misc_feature (2211)..(2211): n is a, c, g, or t
  misc_feature (2216)..(2217): n is a, c, g, or t
  misc_feature (2219)..(2221): n is a, c, g, or t
  misc_feature (2226)..(2226): n is a, c, g, or t
  misc_feature (2229)..(2230): n is a, c, g, or t
  misc_feature (2232)..(2232): n is a, c, g, or t
  misc_feature (2234)..(2234): n is a, c, g, or t
  misc_feature (2238)..(2238): n is a, c, g, or t
  misc_feature (2240)..(2240): n is a, c, g, or t
  misc_feature (2246)..(2246): n is a, c, g, or t
  misc_feature (2253)..(2253): n is a, c, g, or t
  misc_feature (2257)..(2257): n is a, c, g, or t
  misc_feature (2260)..(2261): n is a, c, g, or t
  misc_feature (2263)..(2263): n is a, c, g, or t
tagctgtgtaacaaaaaaaaaatgtcttgggaaagtacactctgctgtttgacaccttctttttttcgtttgtttgtttgttataatttttatttcttcctaccaagtcaaacttggatacttggatttagtttcagtagattgcagaaaattctgcgccttgttgtttgtttgtttgttgcgttcctttcttttccccctttgtgcacatttatttcctccctctaccccaatttttttgtttttgcaaaatctcccattttggaatttgcctgctgggatnngaggaataatttgggtcgcaatatccccccccctctttacggnnganatggnnnccccaccccctctctgtgctacatcacgtgtaaaaacgaggggggggcctttgtataacacccaccccccccctcctccctataatcccgggggggagacncccacaatgagtgtaagggggtggggtgcnntgnaattagactgtgattcagtgttctgtgtgctgtggaactacattactgtacagggttatctgcaagtgaggtgtgtcacaatgagattggatttcactgtctttaattctttatctgtagacggctcagtatagataccctacgctgtccagaagggtttggggcaggaaggactcctcctttttccatgccctaaacagacctgacaggtgaggtctgttccttttatataagtggacaaattttgagttgccacaggaggggaagtagggatggcatcaaaaaagatagatctatatatatatataaatatatattctattacattttcagtgagtaattttggattttgcaaggtgcatttttactattgttacattatgtggaaaacttatgctgatttatttaagggggaaaaagtgtcaactctttgttatttgaaaacatgtttatttttcttgtctttattttaacctttgatagaaccattgcaatatgggggccttttgggaacggactggtatgtaaaagaaaatccgttatcgagcagcattttatttacccctcccctatccctaggcacttaaccaagacaaaaagccacaatgaacatccctttttcaatgaattttataatctgcagctctattccgagcccttagcacccattccgaccatagtataatcatatcaaagggtgagaatcatttagcatgttgttgaaaggttttttttcagttgttctttttagaaaaaaagaaaaacaaaacaacaacaaaaaaaaaaatcacaccattgctcacagaattggcatctcatttttgggacctcccatctttctgttttgaaaagtgtacagtagtgcagtgttcctgatgtaactttatggcttacaatgttgacatgtctcaggttcatgtgtttcgattggtgttttccgtctcaggtagattgcaaagtgtaggccccacacattggaaaaaataataataaaacaaagcaaaaacaggaaattatggattttagttgtatattggtttatgtattttttcttaagtatacagtgcactgtttgaaatgtattgttgagtattactttgtacaggttgatcactttttttagagtgaagaaagaacaaacttgttttttgtgttttttaaaggaatataaaataatgaaggatgtataattgatgccaaataagcttgttctttagtcacaccgacgtcttatttttccctttaggccagttctgtttttaaggtgtacatggacaatgttacagtgtaagaaactccatatccatatgttcccattcgcattttgtattggttcatgtataccatttttacaaaaaaaaaaaagaaaaaaaagaagtactataaaatatctgtcttcttaataaaaaaaaattaatgttaaaaagaaaaaaaaaaaaagcaagtggggaggggagagngngngcggnggggnggcngggggggggtntntgnggtnggggggtnggnntggggngngggnggntgtngnggggggggggnnngnccncnggtngnggttntnccnggnntngggggggggnngttttggnnnnngttntttggnnnnntntctncnnnggnnttntttttgnnttnnntgttttgtttntnnnngnnggggagtnnngtgnttttgnngnngntgngnttttgntngnnntttnntcntnngtgngnntnggnttntggnntggtnggggnngnnnggtgncgnngngngggngngtgggntttgggngtcnttnntnt

SEQ ID NO: 5196 - DNA, 5158 bp, Homo sapiens
ctctcaagttgtatccacgccatgcaagtgcgctcaacaaccttggaacactgacgagagacacagcagaggcaaagatgtactatcagagggctctccagctccatccacagcataaccgggctcttttcaatctggggaatctcctcaagtcccaggagaaaaaggaagaagctatcaccttactgaaggattccatcaaatatggtccagagtttgcagatgcatattcaagcttagcttcgttattggctgagcaggagcggtttaaagaagctgaagaaatataccaaactggaataaagaactgtccagacagcccagtgctgaaggacttgcttttccatgaagaagacgaaaacagcaaacaagggcaagaaggtctgagagggaaggagaatgacatttacacattttacagatttttgtttggtttaactccagatttctcttgatatatctctgtgcttttgagacctggagatctaattctgtttagacattttttgtcccagaaatacagaagcttgaaatgctatgaaggcagagcttctattctttatgggatgaaatatttcaaaagaggataaatcctctgtggtaagccatttggaaaatcctaccaagaattggcttatttaattttccagaaccaggaatgagtatctaatagcttttgtagaaccttccagaatatgtggggaaaaagggctattgctaagtgagctttatctaatatcctcctaagagttttactagtgcttttttgaggaattacagggaagctcctggaattgtacatggatatctttatccctagggggaaatcaaggagctgggcacccctaattctttatggaagtgtttaaaactattttaattttattacaagtattactagagtggtggttctactctaagatttcaaaagtgcatttaaaatcatacatgttcccgcctgcaaatatattgttattttggtggagaaaaaaatagtatattctacataaaaaattaaagatattaactaagagaaatgtcctactttattatcttaatgttcagacatcatgagatttattattttttttgaaaaatatattgaaccattgaggaacctttatgatgtatcacagaaatcttcatagattctaactagatggaaaaagagctctatttatttgtgttcctaggcttaatgagaattctgggcttagaacatcaacgattaatacccagaattctttgttttgagaatattatggagaatgctctaaaaatctagggtaaagatctaaattcaaattttaaatatatatttatatttaagaaataggaaaggcaaagttgaactcacaatttgacatttatttttagtgttatttatttcataacttataaaatatttaatatatacatacacactcttcttttttctctgtacaaagtggttttaatatcagctttcaaaactgatcttataaaatgtaaatctaaattgtaaaatagttaagttttaacagtccctcccaaactttgtgttgattattcacttgctaaagagatgtggggaatcagccttcagttttttggcagtagtatattttggaagtgaagaaattggaacacctgtttctaatttggtcttcatcattagagacaaaaccaaaacactccaggcagtactgtttatagtgctgagccaggtagcacacagacatagtagcctaaaggctcacataattcgcatgctcaggccagggcagggtaaaaatagccttctgcttctttcaacccagtatcaggaagcactaccccagtgttattatttgttttgtcaaggtaagtctaaataaacaagaaaaacttcttcggaaggcatggcgaagggagtattttaaatgaaaatgattacagaatttgaattagcatgcatctctttgtgtgcaacagtaatccaagaatgtatatgttaccactacaaccatttgtttctaatagttttttcatgttatataacataaatgtatccacaaccttaattaagaactattcctcccccaaaatcatagtcctagtgtcaagaaacatactccagtgtttattgtaaaataacaaccacaccctcaaattgaaaaaagtgaatgtctaggactttattacaacttttcagaataatctgtaatgaaaactcatgcttaaaaatttaatggaaaagactgagccccaaattttgaatagtgattacgccttacttgaagtgctaataaaggtaggagagtacatttgttggaataacagaaatggtgatttcagcctaaaagtttctgagggtaaaggatcacatgaccttcaggaaactctctgcctcctgtaggtgctttcctatctcccccatccttccctaccccttttcccttttccttcctctctttttctctcactgtcactctgtctacacacactggcatcttttgaacactaaaagtaagcactgttttttaaaaaagtaattatttgttggatcagatacttttatcccaagtgaataccttcactgagatgtggccaatgcaatagtttcacagtaaaaacagtgcctataagaaaatagatcacatactatttttcaatgatattaagtgtattttgtaactattttcatttggtccttgtaacatgaaataatacatggaacttacctttataataaaaatggagtgccctggttcatcatagaggtgcatctagtttgcccttaatggaagtatacttgctgtgtggattgatagcaccttcttgaaatggaggagctcagctggcctcatggatgtgcaatttttgcagtcccacagggccttgcatacagaagcaccccgagctcagttgaatgtctgtttgattttttcttatttatttttttgagacacagttccactttgtctttttgtcacccaggatggagttcagtggcacaaacatggctcactgtagcctcgacctccctggctgaagggatcctcccacctcagcctcccaagtaaccgagactacaggcatgtgccagcatgtccagctaatttttgtattttttgtagagacagggtttcaccatgttgcccaggctggtctcaaactcctgggctcaagcgatctgcccacctctgcctcccaaagtgctgggattaaaggcataagccaccatgtccaactgaaattcttaataattaataatttttgagcaagaggtccacactttcattttgcactgggttcccaaacaggtcctgggtaggaaggatggctgaggataaaacaggagttgctttggcctggctgaacatttgaaccaatgatcagagtttcattttatgattgtgttactctgaacagatttgctatttttttccagctacatttagagttcctcatgtatatatcacccctctttttccagtccatctaacctctccttttttttgtgcctagaatcagttctccttgccttcaaaatccctgataagtgtccatttctttttgtatcctttgatgtagaagccacaagaatggctttagcagcttattttaatcttatgaattattcattcaggattttttaaatgattcagatgctttcagtctgttaacagtatttataaaacatgtttcagtgatacaacataggtgaactaaaccaaagatgcaaatgccttggaggaaaagaaattgtattatagagaatcctgagatatatccttttgggttgtttaatttaaagcctatcacaaaacaaagagaattgtcgcactttaattccaacctcctgcagtacttcacaacccttagcataagattctgaaatttgtaataggtggtacctagtttgatgcagggttttgcagcagttgtgcgaatgcctctgcgcaacggcctttcagtcagactaaatgagaaaatccaaactgtcctatcaaaactgacccacaataactgtactctgaggcgaaacagagcaaatgtgggtttcctgttttcattgtaaaacattccaggttctcagattgaagagctacattcagctgatagttgacatctgttccctcacacgtagtggctctcaacacgggctgcactttggaatcacctgaggacctttcggaatcttcggttgaatcatcctggctgtcctggtgatgcttcttatgtgcagctaggctggagaaccactacagggctgacacctggaatgggagcttgtaacttttacaaaataatagatgtttatcatcttttgcaatttttacttttaagtctatactaaaatgagccaaagaagtcttaacaatgatgtatggcacaattggttggttgaggctatcattccatgattacaaataggtggttatgtggggtggttttgcacttgtggcaattggactgcaatttggccttaaaatgacacaattcctcgttctcagatggagaggaattgccttgaaatttgcatgtaccagactaagtgccagtatatatatgactgatattttcgtgactcatagaaggtgtccatggtatagagtttatgcctacatctctatctttattttgggcacacatgagcttttgttaattatttctttgtacttgttagaatctgtttttgaaaaaaaaaaaaaaaaaaaatttgatttgtggtggattcaccttcttaaaataataaatttagaggatattaggaatgacattcaaaacaaatatagtgagaggtgattttttaaaaatttttgttcctggtttccaaattatgtttactttgatttgattatatgttggtatctcccaaatataggttaacttagctatttaaatggtatcttttgacatttaaaaagaattaagtacctgtcaaatctagcattgaggttgcagttgaataagataaaagcttaggatgtcaaaaaataatatagagaaatattataagattgtggaataatctggacgttggggtgcacaaggaaaattggttgaatatttcttcaaaatttttttccccaaatattattgggcggtttttaagagaacagaaatgtggtcacaataggtgtaaacaccagggtccaagatgagaacatgttgtacagagggtataaaagta

SEQ ID NO: 5197 - DNA, 787 bp, Homo sapiens
cgaacattctggctcttcacgtgctgcacaaggcacactgtcatcacagggaaacctgctcctagaaccacactcccctgcccacaggaggagggcttatcaccccagctaggttgagagcaccttctaagcaggggctcccacattcccaatccatgtctgcactggatgtgtccacaatgtcaactctgctaacagtaacaactactgcaaaggagcataccttgcattctcccaaagagggataatggggaagtgacagtccctttaataaagtccaggtatgaaaagtttctgaatggatcagagtgaaagggtttcgctctactatcacagaaaatgtatttctgtgagagagaggagcctccattgcatgtctcttcctgcacagctcctctgctgtgctcgctctcccatctaacctgcaacctagagacacacaaggagattctcccagcttcaggactaactttgaattgcccttaaaccaactcctttgtagatattaggctgaaccatagagaactatcatgtctgtaggtaaaaatggatgactactgccaattttatacggcttggccaagatacttaaggtggtaaccttatagatctctttctagagacacacacacccacatggtcccaacaggcattccctcagcacagagttcaatctgtaaactccaaatctagcttctatcctgtaaccaagtcaacctttagcacctaggactaaggcctaacctgtcagagcttgacagaagcgacatgttcggggagatcctct

SEQ ID NO: 5198 - DNA, 2710 bp, Homo sapiens
ctctcagccatcctcaccagctcttccctctcctcccccttcccctcttctgcgaccggctaccgcttgcccaccaccccgcccccgcacccccctcccgccctggccgcacctcactgccctgccactacccccatcctggttccccatcgcaattgcacccggctaaatcctcacaacgtctttgcacgccatggaataccccccgtggcatcccagacttttttgcccaaaagccctcccatgttatatgctaggcgggcagggctttgcaccacagttcgaacataaccggcattactatgtaattaccccgcggaaagataataaatcatcattgatcaagatgtcttcagcacctgagcctccaacattcaaaaaggaaccacccaaagagaaagagtttcaaagcccagggctcagaggggtgcgcacaacaaccttatttcgtgctgtgaatccagagctcttcattaaacctaacaaacctgtaatggctttcggattggtaactctttcactttgcgtggcatatattggttatctacatgcaatacaagagaataaaaaggacctctatgaagctattgatagtgaggggcacagttatatgaggcggaaaacatccaaatgggattagtagtgctggttagtgcagatggacctttattaaaggttctgaaatcttcaaatgaaagaccttgtgagtgtacagtatcatgtttcttgttctagaacatgctaatgaagagagaagatagcagttgcaaccagacaactgtcgtaaattttgtcctttcacagctgcagccattatctcattctttttccacagagtgagcgtcataatatttttctttccttacctcttataaaagtgccatgagaatggaagttgtttttgttaattattaaattctgtataataaaagtacccatgctgttaaatttgcatgatgttttaaatattttaagatgaattatgccggtgcagctgtcgtgaaagtttacttgtgttttgctacttgcaaaggaaatgttcatgttctccctggcatagaacctatatttttaaagaaagataaatagaaattttaaggcctgaagtcaatattaaaaatatgagatatgagaaactgagttggctctgacaagtagtttttatagtgtcacaaatggttcatatatttcagtttccattttagctatttttgggacagaattttattttaatggaaaagatccttccactcagctactaaaataaggattaagaatatcccagagtaattggagtttttctttaaaaaaaaaaaaaagtatgttttactgaggtatgatgattttgactacaactaaatgttatctattttagtgtttatgttaattaatgttaattaattttgtttatgttaatttgtgttaattaatgttactgtaatgttataaacataagaccaagtgttcttatagttatttaaaaactacaactactcaatggataaggaatagataaggtctccttattgtaccttttttttcttttgaagtttatatgccagcaggcctttttgtttttttccttttcagaatgtttcttattctctgaagcatcagcattttgaagtgtcttttatggaagtggggacagaaatgggggtaaaaatgagtgtaaacaaagcctagccctacggtcagcacccactggaggtgagaagcagaatggccttggttgtcctggcacctggcccggggcctaggacagaggtcaaggctaggcccctgtgtctggccagattctgccttatagaattcaaatctttcttacaagggttctggacccgtttcatttctagatatatacctaattctccaaatcattgtcattgggcctcagtagtaaatctcacctctgaagtcttgcttcagtcgctattaatattaccaagtaataataacagcacaggcagagtttatcataatgttatttttaatttgtcatactttattatggttttgtaaggtacatgaaaatgtaattatgtgtgatttgtaggtattaaagaacttagctaattgaatttacatggaactaaataaaatctttactactgagccccaaatatgtatttgctatgcctgtctgtataatgtacttcatatagtttaaaatgcacttcagtgatacaaaatcccttttaaagactcttttgtttttgttttccctgtgtattttggctatcacaaaactagggttcttctgtttttaacttatgcatttaatgacacattgccatcttttagaattttttactattcaacagaataagctgatgtttggtggcagaggagttattagttgcgtgaactgtcaagagattgcagtgcaggagggcaacagaaactgtacaaggtgcagacttgagtcatgtaagatctatgtgaatgaaccaaagtaactagagtcagtcaagcacaaagctgtgaaaagtagtgtgtggaaagaatcatactgaattttaggaacaagtacctgactatgatactttttacagagtggctacaagttgtaggacagtctttgtgtgtgctgagtgtcaacagctgcctgcctatgtgttgatgttttcatcctttctttgttgaatgagggtataaccatcaaaaataaaatacctttcaaatagaaaaaaaaaaaaaaaaaagattt

SEQ ID NO: 5199 - DNA, 5534 bp, Homo sapiens
  misc_feature (738)..(754): n is a, c, g, or t
  misc_feature (763)..(763): n is a, c, g, or t
ggcagaccgtcgctaatgaatcttggggccggtgtcgggccggggcggcttgatcggcaactaggaaaccccaggcgcagaggccaggagcgagggcagcgaggatcagaggccaggccttcccggctgccggcgctcctcggaggtcagggcagatgaggaacatgactctcccccttcggaggaggaaggaagtcccgctgccaccttatctctgctcctctgcctcctccctgttcccagagctttttctctagagaagattttgaaggcggcttttgtgctgacggccacccaccatcatctaaagaagataaacttggcaaatgacatgcaggttcttcaaggcagaataattgcagaaaatcttcaaaggaccctatctgcagatgttctgaatacctctgagaatagagattgattattcaaccaggatacctaattcaagaactccagaaatcaggagacggagacattttgtcagttttgcaacattggaccaaatacaatgaagtattcttgctgtgctctggttttggctgtcctgggcacagaattgctgggaagcctctgttcgactgtcagatccccgaggttcagaggacggatacagcaggaacgaaaaaacatccgacccaacattattcttgtgcttaccgatgatcaagatgtggagctggggtccctgcaagtcatgaacaaaacgagaaagattatggaacatgggggggccacctnnnnnnnnnnnnnnnnngactaacgncatgtgctgcccgtcacggtcctccatgctcaccgggaagtatgtgcacaatcacaatgtctacaccaacaacgagaactgctcttccccctcgtggcaggccatgcatgagcctcggacttttgctgtatatcttaacaacactggctacagaacagccttttttggaaaatacctcaatgaatataatggcagctacatcccccctgggtggcgagaatggcttggattaatcaagaattctcgcttctataattacactgtttgtcgcaatggcatcaaagaaaagcatggatttgattatgcaaaggactacttcacagacttaatcactaacgagagcattaattacttcaaaatgtctaagagaatgtatccccataggcccgttatgatggtgatcagccacgctgcgccccacggccccgaggactcagccccacagttttctaaactgtaccccaatgcttcccaacacataactcctagttataactatgcaccaaatatggataaacactggattatgcagtacacaggaccaatgctgcccatccacatggaatttacaaacattctacagcgcaaaaggctccagactttgatgtcagtggatgattctgtggagaggctgtataacatgctcgtggagacgggggagctggagaatacttacatcatttacaccgccgaccatggttaccatattgggcagtttggactggtcaaggggaaatccatgccatatgactttgatattcgtgtgcctttttttattcgtggtccaagtgtagaaccaggatcaatagtcccacagatcgttctcaacattgacttggcccccacgatcctggatattgctgggctcgacacacctcctgatgtggacggcaagtctgtcctcaaacttctggacccagaaaagccaggtaacaggtttcgaacaaacaagaaggccaaaatttggcgtgatacattcctagtggaaagaggcaaatttctacgtaagaaggaagaatccagcaagaatatccaacagtcaaatcacttgcccaaatatgaacgggtcaaagaactatgccagcaggccaggtaccagacagcctgtgaacaaccggggcagaagtggcaatgcattgaggatacatctggcaagcttcgaattcacaagtgtaaaggacccagtgacctgctcacagtccggcagagcacgcggaacctctacgctcgcggcttccatgacaaagacaaagagtgcagttgtagggagtctggttaccgtgccagcagaagccaaagaaagagtcaacggcaattcttgagaaaccaggggactccaaagtacaagcccagatttgtccatactcggcagacacgttccttgtccgtcgaatttgaaggtgaaatatatgacataaatctggaagaagaagaagaattgcaagtgttgcaaccaagaaacattgctaagcgtcatgatgaaggccacaaggggccaagagatctccaggcttccagtggtggcaacaggggcaggatgctggcagatagcagcaacgccgtgggcccacctaccactgtccgagtgacacacaagtgttttattcttcccaatgactctatccattgtgagagagaactgtaccaatcggccagagcgtggaaggaccataaggcatacattgacaaagagattgaagctctgcaagataaaattaagaatttaagagaagtgagaggacatctgaagagaaggaagcctgaggaatgtagctgcagtaaacaaagctattacaataaagagaaaggtgtaaaaaagcaagagaaattaaagagccatcttcacccattcaaggaggctgctcaggaagtagatagcaaactgcaacttttcaaggagaacaaccgtaggaggaagaaggagaggaaggagaagagacggcagaggaagggggaagagtgcagcctgcctggcctcacttgcttcacgcatgacaacaaccactggcagacagccccgttctggaacctgggatctttctgtgcttgcacgagttctaacaataacacctactggtgtttgcgtacagttaatgagacgcataattttcttttctgtgagtttgctactggctttttggagtattttgatatgaatacagatccttatcagctcacaaatacagtgcacacggtagaacgaggcattttgaatcagctacacgtacaactaatggagctcagaagctgtcaaggatataagcagtgcaacccaagacctaagaatcttgatgttggaaataaagatggaggaagctatgacctacacagaggacagttatgggatggatgggaaggttaatcagccccgtctcactgcagacatcaactggcaaggcctagaggagctacacagtgtgaatgaaaacatctatgagtacagacaaaactacagacttagtctggtggactggactaattacttgaaggatttagatagagtatttgcactgctgaagagtcactatgagcaaaataaaacaaataagactcaaactgctcaaagtgacgggttcttggttgtctctgctgagcacgctgtgtcaatggagatggcctctgctgactcagatgaagacccaaggcataaggttgggaaaacacctcatttgaccttgccagctgaccttcaaaccctgcatttgaaccgaccaacattaagtccagagagtaaacttgaatggaataacgacattccagaagttaatcatttgaattctgaacactggagaaaaaccgaaaaatggacggggcatgaagagactaatcatctggaaaccgatttcagtggcgatggcatgacagagctagagctcgggcccagccccaggctgcagcccattcgcaggcacccgaaagaacttccccagtatggtggtcctggaaaggacatttttgaagatcaactatatcttcctgtgcattccgatggaatttcagttcatcagatgttcaccatggccaccgcagaacaccgaagtaattccagcatagcggggaagatgttgaccaaggtggagaagaatcacgaaaaggagaagtcacagcacctagaaggcagcgcctcctcttcactctcctctgattagatgaaactgttaccttaccctaaacacagtatttctttttaacttttttatttgtaaactaataaaggtaatcacagccaccaacattccaagctaccctgggtacctttgtgcagtagaagctagtgagcatgtgagcaagcggtgtgcacacggagactcatcgttataatttactatctgccaagagtagaaagaaaggctggggatatttgggttggcttggttttgattttttgcttgtttgtttgttttgtactaaaacagtattatcttttgaatatcgtagggacataagtatatacatgttatccaatcaagatggctagaatggtgcctttctgagtgtctaaaacttgacacccctggtaaatctttcaacacacttccactgcctgcgtaatgaagttttgattcatttttaaccactggaatttttcaatgccgtcattttcagttagatgattttgcactttgagattaaaatgccatgtctatttgattagtcttatttttttatttttacaggcttatcagtctcactgttggctgtcattgtgacaaagtcaaataaacccccaaggacgacacacagtatggatcacatattgtttgacattaagcttttgccagaaaatgttgcatgtgttttacctcgacttgctaaaatcgattagcagaaaggcatggctaataatgttggtggtgaaaataaataaataagtaaacaaaatgaagattgcctgctctctctgtgcctagcctcaaagcgttcatcatacatcatacctttaagattgctatattttgggttattttcttgacaggagaaaaagatctaaagatcttttattttcatcttttttggttttcttggcatgactaagaagcttaaatgttgataaaatatgactagttttgaatttacaccaagaacttctcaataaaagaaaatcatgaatgctccacaatttcaacataccacaagagaagttaatttcttaacattgtgttctatgattatttgtaagaccttcaccaagttctgatatcttttaaagacatagttcaaaattgcttttgaaaatctgtattcttgaaaatatccttgttgtgtattaggtttttaaataccagctaaaggattacctcactgagtcatcagtaccctcctattcagctccccaagatgatgtgtttttgcttaccctaagagaggttttcttcttatttttagataattcaagtgcttagataaattatgttttctttaagtgtttatggtaaactcttttaaagaaaatttaatatgttatagctgaatctttttggtaactttaaatctttatcatagactctgtacatatgttcaaattagctgcttgcctgatgtgtgtatcatcggtgggatgacagaacaaacatatttatgatcatgaataatgtgctttgtaaaaagatttcaagttattaggaagcatactctgttttttaatcatgtataatattccatgatacttttatagaacaattctggcttcaggaaagtctagaagcaatatttcttcaaataaaaggtgtttaaactttaaaaaaaaaaaaaaaaaaaaaaaaaaaaaaaa

SEQ ID NO: 5200 - DNA, 5196 bp, Homo sapiens
gtggctttgggtccccaggattctggatcgtggttgcatctggagagaaaaaaggatcaatcgacacgttttagaagtgtccgtgggtgaataaaaaaggagggggggggtgcaaaactggggttgcggatgcttaaagcaaaaaaagagaaaaggaagcgtcttgaatcctggaacaagaattaccgggtgctcgagatttcaaaaaagcgtctagaaactggtaaatacttggaccatttcagcttgaatttgacggcgaagtgttgtagagaccgtctccttgaatcattgcaaagggaccggggaaagatgagggggctccctctgtggatttatcttgctgagggatatagacctgcagctaactggatttgatttataagagagaaatctgcagtcaatgcccactcttgccacactgctaatatggaaaacagaatgttcaataggatatggtctgataaatagtgatgattgaagatgctgctccaatacatgtgaaatcaatgggagatatctgctgtccgaagatctttcagagcttttctcgacaagctcccctgtaagaaatcggaggtatattctaccattatacagtctttctcaagtggatataaatacgtttgcctcactgtaaccagacaactagacaactaatgtgggaccatggcactgcccagatgcacgtggccaaattatgtttggagagcagtgatggcatgcttggtacaccggggattgggtgccccattgactctctgtatgttgggatgtttgcttcaggctggccatgtgctatcacaaaaattggatgatgtggacccactggtggctaccaactttggaaagataagagggattaagaaggaactcaataatgaaattttggggcctgttattcaatttcttggggttccatatgcagccccaccaacaggggaacgtcgttttcagcctccagaaccaccatctccctggtcagatatcagaaatgccactcaatttgctcctgtgtgtccccagaatatcattgatggcagattgccagaagtcatgcttcctgtgtggtttactaataacttggatgtggtttcatcatatgtgcaagaccagagcgaagactgcctatatttaaatatatatgtcccgactgaggatgatattcgggacagtgggggtcccaaaccagtgatggtgtatatccatggtggctcatatatggaaggtactggaaatttatatgatggaagtgtcttggcaagttatggcaatgtgatcgtcatcacagtcaactatcgacttggagtactcggtttcttgagtacaggcgatcaggctgcaaaggggaactatggactccttgatctcatacaagctttaagatggactagtgaaaacattggattctttggtggtgaccccttaagaatcactgtttttggatctggtgctgggggttcatgtgtcaacctgctgactttatcccattattctgaaggtaaccgttggagcaattcaaccaaaggactttttcaacgagcaatagctcaaagtggaacagccctttccagctgggctgttagttttcaacctgcaaaatatgctagaatgttggccacaaaagttggttgcaatgtttcagatacagtagagttagtggaatgcctacagaagaagccttacaaagaacttgttgaccaagatattcaaccagctcgataccacatagcctttggacctgtgattgatggtgatgtaataccagacgacccccagatattgatggagcaaggagagtttctcaactatgatataatgttaggagtgaaccaaggggaagggttaaaatttgttgaaaatatagtagatagcgatgatggtatatcagctagtgattttgactttgctgtttcaaattttgttgataatttatatggatatcctgaaggcaaagatgttttgagagaaaccattaagttcatgtatactgactgggctgaccgtcataaccctgaaaccagaagaaagacattactggctttgtttacggaccatcagtgggtggcaccagctgtagccacagcggatcttcactcaaactttggttcacctacgtacttctatgccttttaccatcattgccaaacagatcaggttccagcttgggctgatgcagcccacggagacgaggttccctatgtactgggaatccccatgattggccctacagagttatttccttgcaatttctccaaaaatgatgtgatgctgagtgcagttgtaatgacatactggacaaattttgctaaaactggtgacccaaatcaaccagtccctcaagacacgaaattcattcataccaaacccaaccgttttgaagaagtagcatggaccagatattcccagaaagaccaactttatctccatattggattaaaaccaagagttaaagaacattacagagccaataaggtgaacctctggttggagttggtacctcatctgcataatctcaatgacatttctcagtatacctctacaacaactaaagtgccatcaactgacatcactttcagacctacgagaaaaaattctgtacctgtcacgtcagcctttcccactgccaagcaggatgatcccaaacaacaaccaagtccattttcagtggatcaaagggactactcaacagagctgagtgtcactattgcagttggagcatcactgctgtttctgaacatcttggcctttgcagccctgtactacaaaaaggataagaggagacatgatgttcacaggagatgcagccctcagcgcactactaccaatgatctaacccatgcacaagaagaggaaatcatgtccctccaaatgaagcacactgatttggatcatgaatgtgagtccattcatccacatgaggtggttcttcggaccgcctgtcccccagattacacactagctatgaggaggtcacctgatgatgttcccttaatgacacccaacaccattacaatgattcccaacactataccagggattcagcccttacacacattcaatacatttactggaggacagaacaatactctgccccatccccatccccacccccattcacattcaacaaccagggtatagccagataagagaaacaaactattttttttgatggattgcagtaaacgatcactgaagattccttggctttcaacctacaagacttactatttaaataaggaggaatattatgtgaatatacatatcaagaactttgggggttttgaaaaaaatgaattgtatatatacaaatcaactttaaaaacaaatttcaattgcttgaagcaattgttctgaatgatactttttcattcacattcaagaattaattttttgaagatttaagttacataatggaattaggcatgtggaacaccaaacaggaaagaactatgtctgaaatataaaaaataaaaataaaaaaacaactatgaatatgcacaagggacacaccagtggaatgtcagataattttcaccagtttttatttggagccgttttattgtgtagaccatatttacatatttggataagtacacaaagcgtcaatgctgttaatggccttagcaaaggctcatgctgaaatttgccagtaaaacaaagaagtttaaagactggcaggtacaccattatcacataagtgctgtcagtataaagttgtggggataaaggaaactggatatttttagcacgatgtgcatgataatttatatgcttggtggctgtgctgctgattaagccgtaattaaaattcttctcatcccattggagtttttaatagaagcttcctccatcaattggcagaacctaaagaagattttaaggggcaaaagtaattacaataaaataattcacagtagtttcaatatagaaggaattagctattaaaggtatttgaagaaactataggtatagtggtgaatactcgctgatatgaatcccagaaaaaatttcctgtttttaatgttcttttcaatcccatctagataatttatagaaatataaccctaattggacatgtggtagaggatctataagttgctgtgtttttttgttactctgtattttgttccttttggtaaggtgaagtgtgtccaaagagttacttgcaacagtctttcatgatatgaggatgcccccgtattaccactctgattatagttctgagttctttgatttactcatgctgcatgacaaaatgtttactaataacaattcattataaagttatatccctctttacatcacttatctttctcactgaggttcattcactggaatttactcacgcaatctcagtagagtacaacgtagatacagaacctaggagagtcaacatctggaggattttagtctttcttacacatatgtgtgattttaaacgaatattctcagaccacaggaaactcttcatccccctgttgtttaccagtaacagtatatcacagacctttccaaatgtttgtatatgtaatcagatgtacatttatattgaaaaacaaatgagatggacttaaagagcacatcctgataaatactttctctctcacctgtactatatttctattagactaaagttatgtgattttttttttacattttttcagatgactagcaattttgatagtttataagataatgcaaagaactttctctgacaaactaactgcagtaacagaaacctttcttttcagttactctttttcaagaatgaaagattattatacaaaaaattgtatactacttgatggaaccaactttgtacatcttggccatgtcactggtcattgtgtgaaataaagataatctggataatgactattagtccaatgctaagaaacatgatctttgctcattaaagagctaaaatgtttattgctgttttgtctttcttttttctaaaaaaagaaaaaaaagaaaaaaaggaaaagaagaacaaagaaacatgactgtctcaaagagtaatttttctagattagaccagtcaggtttttgaagacatataggtaacttccacagaaaacacaaacatgtatttaaaggcaagtctcatctaagatgaaactcataaaaattatttaatgtttgttatgaatttaaaagctccagaaatccatgaaaaaaaaaaaaaaaaaa

SEQ ID NO: 5201 - DNA, 5054 bp, Homo sapiens
tttttttttttttttttggttgcataaacatgtttaatgatatagaaaatctattccaaatcaatcattaaaatctaaagcgaaaaatatattacattttaaatgaagggaaaacatctgattttattcaaggttgtggtgactctgttccgcaacttttaaatcaatttaaagttaattcaggtgccttttcaatcattgcagttacacatagggaatactgaaccgaaagatgacaaggcaattgtctgtgtccaaacttaagaaaaactatatttccctggacttttcatcccaacagatttcaaattctcctttccaaggagtatttgaccttcacatttcaggccctgtatctcttcatttcctataccaccatatgttagaaaactcaaactgggctacaagtatatatttctgttaactgactttaatgaattttggttgttttcaaaatctgcgatctgtccattgtgccaaccctgcattgcagggaagtcttagcctgtgattccagcttcgctcctgcaaagatagtcactacaggcaggtttaaattgtatttactcggagagaagagggggaagggaaccccctgccccctgccaacctgacaggccaggctgggtgacaagccccccgggtggctgcacctcccactcgccgacctgggcgctgtccttggtgctgccggcgccatagcgagcacaagcgccttaccttctgcccctgcggaagctgcggacgtcccccaaacgttaaaaacgccatatcccactttttatacaaataactaccccggcctgttctctttgtccccttcccgaagccttcaggcagaccgttcttttttttttttttttttgttttgttttgtcttctagacccagctcctcggcgctcatctccagctgctttaagacaaggggtgggggaaggggagggaggcaagaaaagatgagggtgggggaggggaaaagagggaatgcaaggggaaggagggaggagacggggagaaggaaagattggaagaaaaggatctccgaggaaggggctgagagaagggcagggtgaactggactaaaggccagagtaggaaggagaagaggggccaaaaaagaaggggatgaaattaagcacagaagatgggtaaagaaaaaagtatcagggaaagggcaaaataagagaaagccttgaggataagagggtagaaggctaaagaacaaggggaccacggggtcggggaagcgctgcctgaacggcgggacagtgacaaagaaagggcgctggcgatattcgcaccaagggtgcgaaacgcaatcgggaggtgagaaatggaaagaaggcgaatgcccggctacaagtagcctgggactgaaaggggacctgggggaggggctgggcccagggcagaaaagtccaggttcccatgcggcctgggcccacgtggagcgggcgctgaatcaccgttcagccgcccccctcccctcctccccgaccggtgcccgcagtccccgcctcctcggccgccgcctccacggggcggggccctggcccgggaccagcgccgcggctataaatgggctgcggcgaggccggcagaacgctgtgacagccacacgccccaaggcctccaagatgagctacacgttggactcgctgggcaacccgtccgcctaccggcgggtaaccgagacccgctcgagcttcagccgcgtcagcggctccccgtccagtggcttccgctcgcagtcgtggtcccgcggctcgcccagcaccgtgtcctcctcctataagcgcagcatgctcgccccgcgcctcgcttacagctcggccatgctcagctccgccgagagcagccttgacttcagccagtcctcgtccctgctcaacggcggctccggacccggcggcgactacaagctgtcccgctccaacgagaaggagcagctgcaggggctgaacgaccgctttgccggctacatagagaaggtgcactacctggagcagcagaataaggagattgaggcggagatccaggcgctgcggcagaagcaggcctcgcacgcccagctgggcgacgcgtacgaccaggagatccgcgagctgcgcgccaccctggagatggtgaaccacgagaaggctcaggtgcagctggactcggaccacctggaggaagacatccaccggctcaaggagcgctttgaggaggaggcgcggttgcgcgacgacactgaggcggccatccgcgcgctgcgcaaagacatcgaggaggcgtcgctggtcaaggtggagctggacaagaaggtgcagtcgctgcaggatgaggtggccttcctgcggagcaaccacgaggaggaggtggccgaccttctggcccagatccaggcatcgcacatcacggtggagcgcaaagactacctgaagacagacatctcgacggcgctgaaggaaatccgctcccagctcgaaagccactcagaccagaatatgcaccaggccgaagagtggttcaaatgccgctacgccaagctcaccgaggcggccgagcagaacaaggaggccatccgctccgccaaggaagagatcgccgagtaccggcgccagctgcagtccaagagcatcgagctagagtcggtgcgcggcaccaaggagtccctggagcggcagctcagcgacatcgaggagcgccacaaccacgacctcagcagctaccaggacaccatccagcagctggaaaatgagcttcggggcacaaagtgggaaatggctcgtcatttgcgcgaataccaggacctcctcaacgtcaagatggctctggatatagaaatcgctgcgtacagaaaactcctggagggtgaagagactagatttagcacatttgcaggaagcatcactgggccactgtatacacaccgacccccaatcacaatatccagtaagattcagaaaaccaaggtggaagctcccaagcttaaggtccaacacaaatttgtcgaggagatcatagaggaaaccaaagtggaggatgagaagtcagaaatggaagaggccctgacagccattacagaggaattggccgtttccatgaaggaagagaagaaagaagcagcagaagaaaaggaagaggaacccgaagctgaagaagaagaagtagctgccaaaaagtctccagtgaaagcaactgcacctgaagttaaagaagaggaaggggaaaaggaggaagaagaaggccaggaagaagaggaggaagaagatgagggagctaagtcagaccaagccgaagagggaggatccgagaaggaaggctctagtgaaaaagaggaaggtgagcaggaagaaggagaaacagaagctgaagctgaaggagaggaagccgaagctaaagaggaaaagaaagtggaggaaaagagtgaggaagtggctaccaaggaggagctggtggcagatgccaaggtggaaaagccagaaaaagccaagtctcctgtgccaaaatcaccagtggaagagaaaggcaagtctcctgtgcccaagtcaccagtggaagagaaaggcaagtctcctgtgcccaagtcaccagtggaagagaaaggcaagtctcctgtgccgaaatcaccagtggaagagaaaggcaagtctcctgtgtcaaaatcaccagtggaagagaaagccaaatctcctgtgccaaaatcaccagtggaagaggcaaagtcaaaagcagaagtggggaaaggtgaacagaaagaggaagaagaaaaggaagtcaaggaagctcccaaggaagagaaggtagagaaaaaggaagagaaaccaaaggatgtgccagagaagaagaaagctgagtcccctgtaaaggaggaagctgtggcagaggtggtcaccatcaccaaatcggtaaaggtgcacttggagaaagagaccaaagaagaggggaagccactgcagcaggagaaagagaaggagaaagcgggaggagagggaggaagtgaggaggaagggagtgataaaggtgccaagggatccaggaaggaagacatagctgtcaatggggaggtagaaggaaaagaggaggtagagcaggagaccaaggaaaaaggcagtgggagggaagaggagaaaggcgttgtcaccaatggcctagacttgagcccagcagatgaaaagaaggggggtgataaaagtgaggagaaagtggtggtgaccaaaacggtagaaaaaatcaccagtgaggggggagatggtgctaccaaatacatcactaaatctgtaaccgtcactcaaaaggttgaagagcatgaagagacctttgaggagaaactagtgtctactaaaaaggtagaaaaagtcacttcacacgccatagtaaaggaagtcacccagagtgactaagatttgagtccattgcaaaaggttaagccatatgacaatttcaaaatgcatgtgattggcagcttcaaaacagaacgggttctcccatgggggctccagacattgtattttactttgtgcaatatgaggggactgcatgcaagctcagggtgctccctcctcagtctttgggggattcaaatgcatgatattgtatgtacctgggaaatttgccgatttcctaagctgttggaagggggtcacttaaggggggatgtcttgagatgtattatgcaaagtaccaactgagccaaaaacaataaacgaaacacagaactcagccttaagaaagctatatatgaataattatgtttacctcactggtgcatttaaaatggacttttgttcatgggagaacctcgttgacatgcacagtttgcaatcttatgttgatcgatgttaaacgtcacagcagtacttgctcaataaaggtcatattggaaacataaaaaaaaaaaaaaaaaaagacagacactaagacccacaaaaagacaaaccaaactataatggaacccaaaaggcgggggtctccctttggggggttcccctcgggtgggccccaagtccccaccgggcggccccgcgctctttcttgggacacccagcggggcgccccagagaagagc

SEQ ID NO: 5202 - DNA, 1191 bp, Homo sapiens
  misc_feature (45)..(74): n is a, c, g, or t
  misc_feature (1128)..(1128): n is a, c, g, or t
agaaggtcacttggacacacatcctgtgcacagacgacaccgcgnnnnnnnnnnnnnnnnnnnnnnnnnnnnnnatcttgatcggatcctgtaacccgactgcgcgcacatggcatacttgtaccagattaagatcttttgggagttctcctattgacgatctccagtttcaatcaggggaccgattacatctcaatgctggttcgaggaagtacttctatgggaagggaacagttctggaaccaggaaacatttcggtgcagccagcatagtagcttgtatggaacttctaaccagtttgagttttttaaagcattgaggattttttcctcttaccaactcctcttcaggtttttaaagacccagcccttcccaatctcaaagagaaaaaggaaactgagttatcttgaataacataactttttaatcaaatgtttattttggcttgtggatcttggtgttatttaaaaaattgaggtgatggtcattgcaagctcatctattaagtactatatggtacacagtctatgagtcattagtcttcattttaatatgtaaaaaatcttgatgctgtattgatttgtttgcatttaagatgacagtgagaaaatgataagcataaagagaagtatcaggttatttgctttttccaaacttttcagatgaactattgtttagtacagagactgagcaaatactacaaaattcaacttaaccttcatttcattggtttaaatgcgttattaaccatcttaagtgcaaactaatcattgtaaattatattttagcatggtctgcctcaaatagtaatgtatttttctgcattcacttggatatatttagaatcacttttttcctcctgtatcaaggaagaggtatgtgctgatttgtttggatatttgacaaggcactctgatgtgacttccctgactactaccgttcatatttcatttcaaattcaaacttctgaggttgcagcatatatgaattgcattttcaaaagaagatttgtaagaattaaactatatttatgagtaaacttttgaggtttctgctgtattgtttcaaatgtaataaactttacttctgtaaaaaaaaaaaaaaaaaatcttctgaccaccaacaganttttccagcttgccatgatagtctgacctcatttaattactgctacctgaaagttcaattttg

SEQ ID NO: 5203 - DNA, 1945 bp, Homo sapiens
agcgggggggcggggcgctggcgacatggcgcgctgattggccggcgccgcgctccaaggctgttaacggcgtctgggccgggctacggctccaaaacaaagggcaggcggcccgcggggcggcggcgggaggatgcctcgcgccctgcctaggcgttaacggcctcagcgcgtcccgggccgcgccgggaacgcctgagagccgagcccgcgctgaccggggcccgggccggatgggcgctgcgggccggggcgcggaccgcggagcggccgttacgtttttctctcgtcccagctgtgtggacagtgccacacgccctcctggacaacgacggctcttgcgtgcattttccagtgttgcttttgtcagagaggccagcagagccacggttcttccagaaccagccctgagctgagtgaggagtgcccaggagagatggtgaaaatgacaaagtccaaaactttccaagcgtatctgccgaactgtcaccgaacgtacagctgtatccactgcagagcacacctggccaatcatgacgagctcatctccaagtcctttcaggggagccagggacgcgcctacctcttcaattccgtggtgaacgtgggctgcggccctgcagaggagagggtccttctcaccgggctgcatgcggttgccgacatctactgcgagaactgcaagaccacgctcgggtggaaatacgagcatgcctttgagagcagtcagaaatataaggaaggaaaattcatcattgagcttgctcatatgatcaaagacaatggctgggagtaatgtgcgaactttcccttctccttcgaatgctgttttgtgaaagaaactgtgaatgtaatggaaacgtaggagcatctggtgacagcctttcttgccctctgacctcaaaggctagctgcgcatagctcttgacactcccggccatctctgtgggtaaggtgtccctcggatctgtcctcttcgtgtacacagttgtttctgaaaattttcaatgagctttttctaacttctcaagttctagagaaagaattaaccaactgatgacttaaaaaaaaaaaaaaaaaaaaaaaaaaacctttgtcttcaatatagttgggctctgcttttttaaggttcagttgaaaaccaaactggggccgggtgcggtggctcacgcctgtaatcccagcactttgggaggccaagatgggtggatcacctgaggtcaggagttctagatcagcctggccaacatggtgaaaccccatctctactaaaaatacgaaaattagccgggcatggtggcgagtgcctgtaatcttagctactcaggaggctaaggcaggagaatcacttgaacctgggacacggaggttgcagtgagctaagatcatgccatcgcactccagcctgggggacaaaagtgagacatcgtctcaaaaaaaaaaaaaaaaaggcggggtttggggggggcatgcccttaaatcccagtatactcggagggttgagggcacgagattcatttgaacccaggaggcggaggttgctgtgacccaagatggggcctggaatctcaagccgggcaatagggggaagactccggcccatttaaacacaaaagagacccagatgggtctctgaaagaccacagggccggggtcccttagatagaggtctcaccatcccctttttagagaaagggtgtttgtggccacttccagcccgggtgttctgaaattggcgacttcaaattgctgttcttttggaattagaccttaaggtaggttttaagattcaaggggaacgaatttaagagggttggttaggggcaaacgggcgcggtgatatgatccctatgagggttggaagttagcgagactttaagggaactaaaggcgcagagataggacaggaggccaaaaatgcaggtataggaggacggaatatata

SEQ ID NO: 5204 - DNA, 1470 bp, Homo sapiens
  misc_feature (828)..(843): n is a, c, g, or t
ggtcgggggggcgtgataaagagagaaaaaaactgcggtgataaacaagtaaagccggatgtagtgtggtgtggggtgaaccagagatgcagcataagaggtgtgagagcccggggggggcgggagggacgatggcacaaagatgtggccagcccttaaggggtagtacgcgggcggggtcgcggagattggggagtccggggggccctagggtttccatgttgccgttcccagggcccattggggccggcctttaggaccatttccctggggcagacaggggcatcccgaaccccaaagcgggggctattccccccccctcgccggggggtgttcggggacggggtgcagcttcccgcccgggggataaagcaggaacccccggggggcacgttttcagcaccaccccgggaggtaccaggatcatctatgaccggaaattcctgatggagtgtcggaactcacctgtgaccaaaacacccccaagggatctgcccaccattccgggggtcaccagcccttccagtgatgagccccccatggaagccagccagagccacctgcgcaatagcccagaagataagcgggcgggcggtgaagagtcacagtttgagatggacatttaaagcaccagccatcgtgtggagcactaccaaggggcccctcagggccttcctgggaggagtcccaccagccaggccttatgaaagtgatcatactgggcaggcgttggcgtggggtcggacaccccagccctttctccctcactcagggcacctgccccctcctcttcgtgaacaccagcagatacctccttgtgcctccaannnnnnnnnnnnnnnngccaccccaaggggagtgacccctgccagcacaccctgcagccaagggccaggaagtggacaagaacgaacccttccttccgaatgatcagcagttccagcccctcgctgctgggggcgcaaccaccccttccttaggttgatgtgcttgggaaagctccctccccctccttccccaagagaggaaataaaagccaccttcgccctagggccaagaaaaaaaaaaaaaaaaaaaaaaaaaaaaaaaaaatacaaaatcaatatacacaaatacgaaaataacatctaaaataattacacaaaacacaaaacaaaaataaaataaaataaaccacagatatctataatataaaaattaacacagaaaataagaagagagaagaacaagatagagaaagagatagagaacaagggaagaaagtaaaaaggaggagaaaggaggagagagaagcagggggtaagaaaaaaaagacaataagagaaaacaatagaagaaggctacgaagtagagaaagaataagaagaccctcgaatataaagaatcgcgggaaaaaaaacaggagaaaagcaataagaatgaaaagaattaatagaagaagaaaaaaaaggaggataaaaaaaagaatac

SEQ ID NO: 5205 - DNA, 3407 bp, Homo sapiens
  misc_feature (1265)..(1282): n is a, c, g, or t
  misc_feature (1472)..(1489): n is a, c, g, or t
  misc_feature (1515)..(1546): n is a, c, g, or t
aaaggcatcttgcatcagcctgtggatgtatgcctaccaccgggctccttcaccagcaaagtggaaaaagaagcgtttcacaacaaattcttctttttgggttggggaaacgcagtggattatagctctgttttcttctttccaaaactgtgcacccctggatgaaacctccatcaagggagacctacaagttgcctggggttcagtgctctagaaagttccaaggtttgtggcttgaattattctaaagaagctgaaataattgaagagaagcagaggccagctgtttttgaggatcctgctccacagagaatgctctgcacccgttgatatgcctcccaggacccagagggagactgtagcctcatttctgtggagacctttggctggactctcctggctctcccagagactccagttccaacaccatcttctgagatgatcctgattcccagaatgctcttggtgctgttcctgctgctgcctatcttgagttctgcaaaagctcaggttaatccagctatatgccgctatcctctgggcatgtcaggaggccagattccagatgaggacatcacagcttccagtcagtggtcagagtccacagctgccaaatatggaaggctggactcagaagaaggggatggagcctggtgccctgagattccagtggaacctgatgacctgaaggagtttctgcagattgacttgcacaccctccattttatcactctggtggggacccaggggcgccatgcaggaggtcatggcatcgagtttgcccccatgtacaagatcaattacagtcgggatggcactcgctggatctcttggcggaaccgtcatgggaaacaggtgctggatggaaatagtaacccctatgacattttcctaaaggacttggagccgcccattgtagccagatttgtccggttcattccagtcaccgaccactccatgaatgtgtgtatgagagtggagctttacggctgtgtctggctagatggcttggtgtcttacaatgctccagctgggcagcagtttgtactccctggaggttccatcatttatctgaatgattctgtctatgatggagctgttggatacagcatgacagaagggctaggccaattgaccgatggtgtgtctggcctggacgatttcacccagacccatgaataccacgtgtggcccggctatgactatgtgggctggcggaacgagagtgccaccaatggctacattgagatcatgtttgaatttgnnnnnnnnnnnnnnnnnnctaccatgaaggtccactgcaacaacatgtttgctaaaggtgtgaagatctttaaggaggtacagtgctacttccgctctgaagccagtgagtgggaacctaatgccatttccttcccccttgtcctggatgacgtcaaccccagtgctcggtttgtcacggtgcctctccaccaccgaatggccagtgnnnnnnnnnnnnnnnnnnattttgcagatacctggatgatgttnnnnnnnnnnnnnnnnnnnnnnnnnnnnnnnntgtacaacaactctgaagccctgcccacctctcctatggcacccacaacctatgatccgatgcttaaagttgatgacagcaacactcggatcctgattggctgcttggtggccatcatctttatcctcctggccatcattgtcatcatcctgtggaggcagttctggcagaaaatgctggagaaggcttctcggaggatgctggatgatgaaatgacagtcagcctttccctgccaagtgattctagcatgttcaacaataaccgctcctcatcacctagtgaacaagggtccaactcgacttacgatcgcatctttccccttcgccctgactaccaggagccatccaggctgatacgaaaactcccagaatttgctccaggggaggaggagtcaggctgcagcggtgttgtgaagccagtccagcccagtggccctgagggggtgccccactatgcagaggctgacatagtgaacctccaaggagtgacaggaggcaacacatactcagtgcctgccgtcaccatggacctgctctcaggaaaagatgtggctgtggaggagttccccaggaaactcctaactttcaaagagaagctgggagaaggacagtttggggaggttcatctctgtgaagtggagggaatggaaaaattcaaagacaaagattttgccctagatgtcagtgccaaccagcctgtcctggtggctgtgaaaatgctccgagcagatgccaacaagaatgccaggaatgattttcttaaggagataaagatcatgtctcggctcaaggacccaaacatcatccatctattagctgtgtgtatcactgatgaccctctctgtatgatcactgaatacatggagaatggagatctcaatcagtttctttcccgccacgagccccctaattcttcctccagcgatgtacgcactgtcagttacaccaatctgaagtttatggctacccaaattgcctctggcatgaagtacctttcctctcttaattttgttcaccgagatctggccacacgaaactgtttagtgggtaagaactacacaatcaagatagctgactttggaatgagcaggaacctgtacagtggtgactattaccggatccagggccgggcagtgctccctatccgctggatgtcttgggagagtatcttgctgggcaagttcactacagcaagtgatgtgtgggcctttggggttactttgtgggagactttcaccttttgtcaagaacagccctattcccagctgtcagatgaacaggttattgagaatactggagagttcttccgagaccaagggaggcagacttacctccctcaaccagccatttgtcctgactctgtgtataagctgatgctcagctgctggagaagagatacgaagaaccgtccctcattccaagaaatccaccttctgctccttcaacaaggcgacgagtgatgctgtcagtgcctggccatgttcctacggctcaggtcctccctacaagacctaccactcacccatgcctatgccactccatctggacatttaatgaaactgagagacagaggcttgtttgctttgccctcttttcctggtcacccccactccctacccctgactcatatatactttttttttttttacattaaagaactaaaaaaggaaaaaaaaaagcctgggggaatccatttttaaaaaaaaacaaaaaaattgcggcgccggcccaaaattaacaatttggggcggggcatataaagtatagtccggaccgggcaaaggggttaccaaacggggggtggaaacaggttgttgtttagaacaacccgcgggggtataacaagtgatatacatacgct

SEQ ID NO: 5206 - DNA, 1191 bp, Homo sapiens
  misc_feature (347)..(361): n is a, c, g, or t
  misc_feature (955)..(971): n is a, c, g, or t
gctgggagtagagggcagagctcccaccccgccccgcccccagggggcgccccgggcccggcgcgagaggaggcagagggggcgtcaggccgcgggagaggaggccatgggcgcgcgcggggcgctgctgctggcgctgctgctggctcgggctggactcaggaagccggagtcgcaggaggcggcgccgttatcaggaccatgcggccgacgggtcatcacgtcgcgcatcgtgggtggagaggacgccgaactcgggcgttggccgtggcaggggagcctgcgcctgtgggattcccacgtatgcggagtgagcctgctcagccaccgctgggcactcacggcgnnnnnnnnnnnnnnnacctatagtgaccttagtgatccctccgggtggatggtccagtttggccagctgacttccatgccatccttctggagcctgcaggcctactacacccgttacttcgtatcgaatatctatctgagccctcgctacctggggaattcaccctatgacattgccttggtgaagctgtctgcacctgtcacctacactaaacacatccagcccatctgtctccaggcctccacatttgagtttgagaaccggacagactgctgggtgactggctgggggtacatcaaagaggatgaggcactgccatctccccacaccctccaggaagttcaggtcgccatcataaacaactctatgtgcaaccacctcttcctcaagtacagtttccgcaaggacatctttggagacatggtttgtgctggcaatgcccaaggcgggaaggatgcctgcttcggtgactcaggtggacccttggccttgtaacaagaattggactgtggtatcagattggagtcgtgagctggggagtgggctgtggtcggcccaatcggcccggtgtctacaccaatatcagccaccactttgagtggatccagnnnnnnnnnnnnnnnnntggcatgtcccagccagacccctcctggccgctactctttttccctcttctctgggctctcccactcctggggccggtctgagcctacctgagcccatgcagcctggggccactgccaagtcaggccctggttctcttctgtcttgtttggtaataaacacattccagttgatgccttgcagggcattcttcaaaaaaaaaaaaaaaaaaaaagtcgacc

SEQ ID NO: 5207 - DNA, 9823 bp, Homo sapiens
  misc_feature (2139)..(2158): n is a, c, g, or t
  misc_feature (2654)..(2669): n is a, c, g, or t
  misc_feature (4750)..(4771): n is a, c, g, or t
ggcacgaggagctgcctcacccccggccccgggaagggcatggccccggcaaactcccggccgtgactcgcgcgccccggctcggtggatgctcccggcgcaccgctcccgtgtgcggcggcttcccaaggacaggtatccgagaatcaggcaccccgacaagatgcccaagcgcgcgcactggggggccctctccgtggtgctgatcctgctttggggccatccgcgagtggcgctggcctgcccgcatccttgtgcctgctacgtccccagcgaggtccactgcacgttccgatccctggcttccgtgcccgctggcattgctagacacgtggaaagaatcaatttggggtttaatagcatacaggccctgtcagaaacctcatttgcaggactgaccaagttggagctacttatgattcacggcaatgagatcccaagcatccccgatggagctttaagagacctcagctctcttcaggttttcaagttcagctacaacaagctgagagtgatcacaggacagaccctccagggtctctctaacttaatgaggctgcacattgaccacaacaagatcgagtttatccaccctcaagctttcaacggcttaacgtctctgaggctactccatttggaaggaaatctcctccaccagctgcaccccagcaccttctccacgttcacatttttggattatttcagactctccaccataaggcacctctacttagcagagaacatggttagaactcttcctgccagcatgcttcggaacatgccgcttctggagaatctttacttgcagggaaatccgtggacctgcgattgtgagatgagatggtttttggaatgggatgcaaaatccagaggaattctgaagtgtaaaaaggacaaagcttatgaaggcggtcagttgtgtgcaatgtgcttcagtccaaagaagttgtacaaacatgagatacacaagctgaaggacatgacttgtctgaagccttcaatagagtcccctctgagacagaacaggagcaggagtattgaggaggagcaagaacaggaagaggatggtggcagccagctcatcctggagaaattccaactgccccagtggagcatctctttgaatatgaccgacgagcacgggaacatggtgaacttggtctgtgacatcaagaaaccaatggatgtgtacaagattcacttgaaccaaacggatcctccagatattgacataaatgcaacagttgccttggactttgagtgtccaatgacccgagaaaactatgaaaagctatggaaattgatagcatactacagtgaagttcccgtgaagctacacagagagctcatgctcagcaaagaccccagagtcagctaccagtacaggcaggatgctgatgaggaagctctttactacacaggtgtgagagcccagattcttgcagaaccagaatgggtcatgcagccatccatagatatccagctgaaccgacgtcagagtacggccaagaaggtgctactttcctactacacccagtattctcaaacaatatccaccaaagatacaaggcaggctcggggcagaagctgggtaatgattgagcctagtggagctgtgcaaagagatcagactgtcctggaagggggtccatgccagttgagctgcaacgtgaaagcttctgagagtccatctatcttctgggtgcttccagatggctccatcctgaaagcgcccatggatgacccagacagcaagttctccattctcagcagtggctggctgaggatcaagtccatggagccatctgactcaggcttgtaccagtgcattgctcaagtgagggatgaaatggaccgcatggtatatagggtacttgtgcagtctccctccactcagccagccgagaaagacacagtgacaattggcaagaacccaggggagtcggtgacattgccttgcaatgctttagcaatacccgaagcccaccttagctggattcttccaaacagaaggataattaatgatttggctaacacatcacatgtatacatgttgccaaatggaactctttccatcccaaaggtccaagtcagtgatagtggttactacagatgtgtggctgtcaaccagcaaggggnnnnnnnnnnnnnnnnnnnnggaatcacagtgaccaagaaagggtctggcttgccatccaaaagaggcagacgcccaggtgcaaaggctctttccagagtcagagaagacatcgtggaggatgaagggggctcgggcatgggagatgaagagaacacttcaaggagacttctgcatccaaaggaccaagaggtgttcctcaaaacaaaggatgatgccatcaatggagacaagaaagccaagaaagggagaagaaagctgaaactctggaagcattcggaaaaagaaccagagaccaatgttgcagaaggtcgcagagtgtttgaatctagacgaaggataaacatggcaaacaaacagattaatccggagcgctgggctgatattttagccaaagtccgtgggaaaaatctccctaagggcacagaagtacccccgttgattaaaaccacaagtcctccatccttgagcctagaagtcacaccaccttttcctgctgtttctcccccctcagcannnnnnnnnnnnnnnntaaccagtgctgaagaatcctcagcagatgtacctctacttggtgaagaagagcacgttttgggtaccatttcctcagccagcatggggctagaacacaaccacaatggagttattcttgttgaacctgaagtaacaagcacacctctggaggaagttgttgatgacctttctgagaagactgaggagataacttccactgaaggagacctgaaggggacagcagcccctacacttatatctgagccttatgaaccatctcctactctgcacacattagacacagtctatgaaaagcccacccatgaagagacggcaacagagggttggtctgcagcagatgttggatcgtcaccagagcccacatccagtgagtatgagcctccattggatgctgtctccttggctgagtctgagcccatgcaatactttgacccagatttggagactaagtcacaaccagatgaggataagatgaaagaagacacctttgcacaccttactccaacccccaccatctgggttaatgactccagtacatcacagttatttgaggattctactataggggaaccaggtgtcccaggccaatcacatctacaaggactgacagacaacatccaccttgtgaaaagtagtctaagcactcaagacaccttactgattaaaaagggtatgaaagagatgtctcagacactacagggaggaaatatgctagagggagaccccacacactccagaagttctgagagtgagggccaagagagcaaatccatcactttgcctgactccacactgggtataatgagcagtatgtctccagttaagaagcctgcggaaaccacagttggtaccctcctagacaaagacaccacaacagtaacaacaacaccaaggcaaaaagttgctccgtcatccaccatgagcactcacccttctcgaaggagacccaacgggagaaggagattacgccccaacaaattccgccaccggcacaagcaaaccccacccacaacttttgccccatcagagactttttctactcaaccaactcaagcacctgacattaagatttcaagtcaagtggagagttctctggttcctacagcttgggtggataacacagttaatacccccaaacagttggaaatggagaagaatgcagaacccacatccaagggaacaccacggagaaaacacgggaagaggccaaacaaacatcgatataccccttctacagtgagctcaagagcgtccggatccaagcccagcccttctccagaaaataaacatagaaacattgttactcccagttcagaaactatacttttgcctagaactgtttctctgaaaactgagggcccttatgattccttagattacatgacaaccaccagaaaaatatattcatcttaccctaaagtccaagagacacttccagtcacatataaacccacatcagatggaaaagaaattaaggatgatgttgccacaaatgttgacaaacataaaagtgacattttagtcactggtgaatcaattactaatgccataccaacttctcgctccttggtctccactatgggagaatttaaggaagaatcctctcctgtaggctttccaggaactccaacctggaatccctcaaggacggcccagcctgggaggctacagacagacatacctgttaccacttctggggaaaatcttacagaccctccccttcttaaagagcttgaggatgtggatttcacttccgagtttttgtcctctttgacagtctccacaccatttcaccaggaagaagctggttcttccacaactctctcaagcataaaagtggaggtggcttcaagtcaggcagaaaccaccacccttgatcaagatcatcttgaaaccactgtggctattctcctttctgaaactagaccacagaatcacacccctactgctgcccggatgaaggagccagcatcctcgtccccatccacaattctcatgtctttgggacaaaccaccaccactaagccagcacttcccagtccaagaatatctcaagcatctagagattccaaggaaaannnnnnnnnnnnnnnnnnnnnnaatccagaaacagaagcaaccccagtcaacaatgaaggaacacagcatatgtcagggccaaatgaattatcaacaccctcttccgaccgggatgcatttaacttgtctacaaagctggaattggaaaagcaagtatttggtagtaggagtctaccacgtggcccagatagccaacgccaggatggaagagttcatgcttctcatcaactaaccagagtccctgccaaacccatcctaccaacagcaacagtgaggctacctgaaatgtccacacaaagcgcttccagatactttgtaacttcccagtcacctcgtcactggaccaacaaaccggaaataactacatatccttctggggctttgccagagaacaaacagtttacaactccaagattatcaagtacaacaattcctctcccattgcacatgtccaaacccagcattcctagtaagtttactgaccgaagaactgaccaattcaatggttactccaaagtgtttggaaataacaacatccctgaggcaagaaacccagttggaaagcctcccagtccaagaattcctcattattccaatggaagactccctttctttaccaacaagactctttcttttccacagttgggagtcacccggagaccccagatacccacttctcctgccccagtaatgagagagagaaaagttattccaggttcctacaacaggatacattcccatagcaccttccatctggactttggccctccggcacctccgttgttgcacactccgcagaccacgggatcaccctcaactaacttacagaatatccctatggtctcttccacccagagttctatctcctttataacatcttctgtccagtcctcaggaagcttccaccagagcagctcaaagttctttgcaggaggacctcctgcatccaaattctggtctcttggggaaaagccccaaatcctcaccaagtccccacagactgtgtccgtcaccgctgagacagacactgtgttcccctgtgaggcaacaggaaaaccaaagcctttcgttacttggacaaaggtttccacaggagctcttatgactccgaataccaggatacaacggtttgaggttctcaagaacggtaccttagtgatacggaaggttcaagtacaagatcgaggccagtatatgtgcaccgccagcaacctgcacggcctggacaggatggtggtcttgctttcggtcaccgtgcagcaacctcaaatcctagcctcccactaccaggacgtcactgtctacctgggagacaccattgcaatggagtgtctggccaaagggaccccagccccccaaatttcctggatcttccctgacaggagggtgtggcaaactgtgtcccccgtggagagccgcatcaccctgcacgaaaaccggaccctttccatcaaggaggcgtccttctcagacagaggcgtctataagtgcgtggccagcaatgcagccggggcggacagcctggccatccgcctgcacgtggcggcactgccccccgttatccaccaggagaagctggagaacatctcgctgcccccggggctcagcattcacattcactgcactgccaaggctgcgcccctgcccagcgtgcgctgggtgctcggggacggtacccagatccgcccctcgcagttcctccacgggaacttgtttgttttccccaacgggacgctctacatccgcaacctcgcgcccaaggacagcgggcgctatgagtgcgtggccgccaacctggtaggctccgcgcgcaggacggtgcagctgaacgtgcagcgtgcagcagccaacgcgcgcatcacgggcacctccccgcggaggacggacgtcaggtacggaggaaccctcaagctggactgcagcgcctcgggggacccctggccgcgcatcctctggaggctgccgtccaagaggatgatcgacgcgctcttcagttttgatagcagaatcaaggtgtttgccaatgggaccctggtggtgaaatcagtgacggacaaagatgccggagattacctgtgcgtagctcgaaataaggttggtgatgactacgtggtgctcaaagtggatgtggtgatgaaaccggccaagattgaacacaaggaggagaacgaccacaaagtcttctacgggggtgacctgaaagtggactgtgtggccaccgggcttcccaatcccgagatctcctggagcctcccagacgggagtctggtgaactccttcatgcagtcggatgacagcggtggacgcaccaagcgctatgtcgtcttcaacaatgggacactctactttaacgaagtggggatgagggaggaaggagactacacctgctttgctgaaaatcaggtcgggaaggacgagatgagagtcagagtcaaggtggtgacagcgcccgccaccatccggaacaagacttacttggcggttcaggtgccctatggagacgtggtcactgtagcctgtgaggccaaaggagaacccatgcccaaggtgacttggttgtccccaaccaacaaggtgatccccacctcctctgagaagtatcagatataccaagatggcactctccttattcagaaagcccagcgttctgacagcggcaactacacctgcctggtcaggaacagcgcgggagaggataggaagacggtgtggattcacgtcaacgtccagccacccaagatcaacggtaaccccaaccccatcaccaccgtgcgggagatagcagccgggggcagtcggaaactgattgactgcaaagctgaaggcatccccaccccgagggtgttatgggcttttcccgagggtgtggttctgccagctccatactatggaaaccggatcactgtccatggcaacggttccctggacatcaggagtttgaggaagagcgactccgtccagctggtatgcatggcacgcaacgagggaggggaggcgaggttgatcgtgcagctcactgtcctggagcccatggagaaacccatcttccacgacccgatcagcgagaagatcacggccatggcgggccacaccatcagcctcaactgctctgccgcggggaccccgacacccagcctggtgtgggtccttcccaatggcaccgatctgcagagtggacagcagctgcagcgcttctaccacaaggctgacggcatgctacacattagcggtctctcctcggtggacgctggggcctaccgctgcgtggcccgcaatgccgctggccacacggagaggctggtctccctgaaggtgggactgaagccagaagcaaacaagcagtatcataacctggtcagcatcatcaatggtgagaccctgaagctcccctgcacccctcccggggctgggcagggacgtttctcctggacgctccccaatggcatgcatctggagggcccccaaaccctgggacgcgtttctcttctggacaatggcaccctcacggttcgtgaggcctcggtgtttgacaggggtacctatgtatgcaggatggagacggagtacggcccttcggtcaccagcatccccgtgattgtgatcgcctatcctccccggatcaccagcgagcccaccccggtcatctacacccggcccgggaacaccgtgaaactgaactgcatggctatggggattcccaaagctgacatcacgtgggagttaccggataagtcgcatctgaaggcaggggttcaggctcgtctgtatggaaacagatttcttcacccccagggatcactgaccatccagcatgccacacagagagatgccggcttctacaagtgcatggcaaaaaacattctcggcagtgactccaaaacaacttacatccacgtcttctgaaatgtggattccagaatgattgcttaggaactgacaacaaagcggggtttgtaagggaagccaggttggggaataggagctcttaaataatgtgtcacagtgcatggtggcctctggtgggtttcaagttgaggttgatcttgatctacaattgttgggaaaaggaagcaatgcagacacgagaaggagggctcagccttgctgagacactttcttttgtgtttacatcatgccaggggcttcattcagggtgtctgtgctctgactgcaatttttcttcttttgcaaatgccactcgactgccttcataagcgtccataggatatctgaggaacattcatcaaaaataagccatagacatgaacaacacctcactaccccattgaagacgcatcacctagttaacctgctgcagtttttacatgatagactttgttccagattgacaagtcatctttcagttatttcctctgtcacttcaaaactccagcttgcccaataaggatttagaaccagagtgactgatatatatatatatattttaattcagagttacatacatacagctaccattttatatgaaaaaagaaaaacatttcttcctggaactcactttttatataatgttttatatatatattttttcctttcaaatcagacgatgagactagaaggagaaatactttctgtcttattaaaattaataaattattggtctttacaagacttggatacattacagcagacatggaaatataattttaaaaaatttctctccaacctccttcaaattcagtcaccactgttatattaccttctccaggaaccctccagtggggaaggctgcgatattagatttccttgtatgcaaagtttttgttgaaagctgtgctcagaggaggtgagaggagaggaaggagaaaactgcatcataactttacagaattgaatctagagtcttccccgaaaagcccagaaacttctctgcagtatctggcttgtccatctggtctaaggtggctgcttcttccccagccatgagtcagtttgtgcccatgaataatacacgacctgttatttccatgactgctttactgtatttttaaggtcaatatactgtacatttgataataaaataatattctcccaaaaaaaaaaaaaaaaaaaaag

SEQ ID NO: 5208 - DNA, 3259 bp, Homo sapiens
  misc_feature (3237)..(3252): n is a, c, g, or t
gcggacgcgtgggagccggcgcagggtggccggggaggggtgagcagggtgccgctggctgctggggtctgcaggtcaccgagtccccaggagaggggactcctaagaagccacctgcctgtgtttacccggcagcgagcgcgcaggcccccgcgaactcctggcagcgctcaggaaaggccgttgcgcctcgcgaaggaaacagagccgttgaccatggttgcaactggcagtttgagcagcaagaacccggccagcatttcagaattgctggactgtggctatcacccagagagcctgctaagtgattttgactactgggattatgttgttcctgaacccaacctcaacgaggtaatatttgaggaatcaacttgccagaatttggttaaaatgctggagaactgtctgtccaaatcaaagcaaactaaacttggttgctcaaaggtccttgtccctgagaaactgacccagagaattgctcaagatgtcctgcggctttcctcaacggagccctgcggcttgcgaggttgtgttatgcacgtgaacttggaaattgaaaatgtatgtaaaaagctggataggattgtgtgtgattctagcgtcgtacctacttttgagcttacacttgtgtttaagcaggagaactgctcatggactagcttcagggactttttctttagtagaggtcgcttctcctctggtttcaggagaactctgatcctcagctcaggatttcgacttgttaagaaaaaactttactcactgattggaacaacagtgattgaagggtcctaaaaagggaaaatatataaagattatttcatgattgggtagtaaaactattcagctagtcagctaaagtcatttgtagtttgccccacctgccctaaataagaaaccccaaatgtagtctcttttctttctgtgtttcacattcatagcaactgcagctaacaggctgattttctggcctttggagaagtgattcaaaatagtgtagattttctgcatagatcccatttttgtacagaattgaatgggatggaataggtaagcaaaagtagaagcccatttgagttttacatttgattccacaatttggtttcaggtaggcttggtaatagactatataaaccagatttgcctattttgattttcatatggcttttttttctctaagttttcagaggattttttaaatcacagaatcatactaaatgatatttagcctatcaaaacttccaaaagcccacaccaccagttcctgactcaaatttgaagggtttttagacaggaaggtaggattaagtaggtgagtttaattaaagcttaaccctaggtaagagtaaatgagaaatattacggcaataatggaactgcttcactgtttcttggtgacttcctcactctaatgttttaaagaggcaacaaaagcttgtggtgccatttcagtaaccacggtgttgttttagatgcctttataagctcagtttcccctgttcttaagtgttgaatactgtctttaaactagaaaaatgcaaaatattgaactgatatttttgtgtgtagttgattactcttccattgagtgaatgatgaatacctgtgaggataggaaattagttctgagatctagtccctctctgattcacttagtaatctatcctcttttcagtattacatgtgcttaatctcagatgaaccatttcaccatggcagtgttatctcatctctgggcttttctgggaattgaagtatctctccttaaccccaattgtcaagggtagtagctgtatactaccactttgaattattgaaacgggtcaatttacgaagtctgcattggctatggagatatggtttatagtacagcctagagaatgaaactcaccgtccagataaccatgcatgcacccagattttttccaccttggatacctgtcactagggaataataaaggcctgattttttgtcttattccaactaagtagatcattatctctttccttttttatgttaatgagagaatttagcctccactcaacaatgttcaattcagcaaggctttcatatccttgctgtgggtcgtggataaggagcttattcaggtttcctgccctagctattagctccacttcacatgctggagaccggcgtagggacagatgtattcatcctggtgttactgaaaaacaggtgtgatcctgttactgatactataagtgacctaaaatgtcactgttcaaattagccagtgttctaacaaactaaactcttcaaatgcttggaaagatactacaaagccaatctttatagaattgggccaagataaatctatgttgttttgcatggctattgttaagctccaaaggttcactgtgtttctgccgctgtcctggagttgtcaccactgactgggcaaggcttcttgggcatggatgtagaactgttgtccttttcccactaacagttatctttgactctcttgcctgttatgcttacaaaatggtgatggcttatggaaggctgttaaattaatattcctgttaaaggaaattaaagtttgtctatttttgacaataaaacattatatatttttaaaaaaaaaaaaaaaaaaaaaaaaaaaaaaaaaaaaaaaaaaaaacctcacttaatcaccgccccctcatcactttttaaacttctctctctccacacccacccccacctttccccatttccctctctttttaccacaccttctcatacaccttctcttccactcctgcgggcgcggccgcctccataaacaaaccccccggcggagggacacacaactataaaagcaaccctcttctttattcttaaataagatgcgcccgccccacacgggcgcggagcctcttaaaaaatgccctcctgtagcgcccgccccctcatttcttcctatatttccatatcctgagcaccactatctccaacactcgggactactctctctagaaacgctacatttccctccctttgttggtgccgcatatatattactcgcgccgaaaacacaacccctcgccagagaatactcacgtctctccgcccacaacaaaacaacattctctctcacgtctcacatatcgatccccccacacccacgactaacgtctacgctcctcccgagaacaacacactcctctccgcgcgctcacagcttcatgtgagaaaaactcccaacctcggagacgctaagcgtctcnnnnnnnnnnnnnnnnggcgctc

SEQ ID NO: 5209 - DNA, 785 bp, Homo sapiens
  misc_feature (26)..(26): n is a, c, g, or t
  misc_feature (31)..(31): n is a, c, g, or t
  misc_feature (35)..(35): n is a, c, g, or t
aggagtttcaaaactgctccatcagnaggantgtncaccctctgtgagttgaatgcagtcatcacaggaaacattctgagaatgcttctgtctaggtttgatgtgaagatatacgcgtttcgaaggaaggccacaaagtggtccaaatatccacttgcagattctacaaaaagagtgtttgaaagctgaactatgaaagcaaggttcaactctgtgagttgaatgcaaacatcacaaagaagtttctcagaatgcttccgtgtagttctgggaagtttatcccgtttccaacgaaatcctcagagaggtccaaatatccacttgcagattctacagaaagtgtgtttggaatctgcgccatccaaaggaatgttcagctctgttagttcaatgcaatgatcactaagaattgtctgtgaatgcttccgtttggtttttagatgaagttatttcctttactacagtaggcctcaaagcagtccaagatctccaatcgcagattctacacaaagattgtttacaacctgctctatctataggaatgttcaactctgtgagtcgaatgcaatcatcacaaagtagtttctgagaatgcttccatctagtttttatgtgaagattttccttttccaccacaggcctcaaagccctccaaatgtccacttgcagattctagaaaaagagggtttcagagctgctctgtcaagaggaaagttcaattcttgaagtggaacacaaacagtcgacgcggccgcgaatttagtagtagtagtaggcggccgctc

SEQ ID NO: 5210 - DNA, 1989 bp, Homo sapiens
agcggagtaggcctcgctcgggtcctcgccctgcccgcgactggcgggatgggtgggtcggatcccagtcgggccgtgcccgaggggcgaggcggagggggtcgcggggttgcgtccggacaccgactccgaggggcgcccgttccgcccgctcccccgcgcggcccgtcgcgtacctcgaactcccgcggcgcacccggtccgaggcgtcggtcccgtcccaaggggcgccctccgagtgctcggagacggcggggggactcgagttgggaccgcggtggaggaggagtttgtggggtctagtctcttgggggaacgcagcgggcaggcagagctccgctgcggagttgccgctccggccctgggtagtgacggtcgttgtggaacttccaatcggctgagcgcctcgcgggggcggcggtttgaaacctcgccggggagcctgtcgggcgaacgcggcctggggtcctcgccagccccacggctctgacccgctgggcaccgccgcccccagcagcgatctccgcccttcgggctggccggcccgttggcttctctatgcagtcctcccatccctgttgtatgcccggcgtcccgggtttctcattctcacattctgaattgcgtaccttcccccttcgaaggagacctgatgggctagctgcgtttcgcaagcggcaacttaagagttggctgaattctctgctacccaccctttaccttgcagccccttgggtatcttgggtattatgtcctccactccatcctctgccagatgactgtgggctggggcttatggagtacctatattatcaagaacggaatacgaagtgacagagctgggcctgaacctttgttttcctaggagttgagggagaactgtaggaacaccttgggaagcctttactggttgtcctcttaagaagagctggataatgtactgagaatacctgtcctttcttggtcctggagggcagacagcagctacagcaggactggtggaaccagcttcctggcaggaattaccctcccccaaagctagggacccaggaagatgccctgtccagcatagactttaaagagagtcaaactctacggaagaggattgtaacggaccatttctgaataaagtgatgatcagccacaatgacattagtaaaatttgaagtgccgcttatctttgtgcgtgctgttataatttgatgtggttggtatatgaactctaggactaaagtacgttgtgtgcgtatgcactaacttcataaaacaactctattataaagtgtttgtcataaggtatcgtgaaaattgcaaagtgctatccaagtgtaaacggattattattattgcagaatttttttttctttgtaactgaacaggccttaaggtactcagtgtttctcataattcctttaattaccaggtgtccttgaatgcttatcatggacatgtgagatactataattaaccatatttcggtttgggaatatccactccacctgttatactagtgttctgtgtgggaattttatcagttatattgtggggaaagcacatccagttttccgtttggacattgttaataaaatctgaggtgggtttttcccatactcctcatgctaacttgtgtggtatacttttggttttaaaaaatgtaccttagtgttttttcgtaaatagctttcttttattagggactttgtgagcaagttaacaattctgcttctgaattgtttttgaatagttgggttacaaaaaaccagatattctggttctatctttgtgaatattttcccttttataagttttgattcgaataccctcctttgatgaatggtatagaataaaggtcttaaaaggagatagttgggcttacaatatgctttctaaaaaaccaaaaaaaaatttggggcggccgaaattacaattggcggccaaagagtaattagaaaggaagggttacaaaccgggggaacaaggtgttaaacc

SEQ ID NO: 5211 - DNA, 1558 bp, Homo sapiens
  misc_feature (137)..(154): n is a, c, g, or t
gacaattctgccatcatgaaccatattccaaacctaaatatgtaagaacatagaaagattattttagcaggagaattttaacacacacacacactttattctgaaaatttagcaacaaaatgaaaggtgagttgtgnnnnnnnnnnnnnnnnnnaatagaaagaagaaagcctgtaatctgtttcagaatgctatttctggggctggtaacatcaaaaataatcaaattaagtgttaacttgctgactcgtaagattttctctaatttagaattggagaacatatatactcctattaccactttccatctttctcaaatatagtttttatagttttctgttggcttcatcatcgtattgaaagattattaatcacttacatatatgtagttttctggttaagtcctgttcagtatattacaaaattttgatctgtgtatgtaatatcaattaataagatggtgttagttaaatcagattacgtgttcattcattaagtcattgttaacacttcacagaatataaatcgtgttccatgagtatgaatttctctctgaattccacataattgtcttaaaattatgcaccatttatcgttaagagtgaaagattatgtgtcatttattgtagtggtagaagaaaataaaaccaaaacagaatccaatccaaaagcttaggtttttgttgctactacagtaattacatcttcatatactaaggacagcacattattactgtccaagaatggtgcctcggacaactggttgcttacactgttttcagagatgaaataggaacataagcaggaagatttttgtctaaatatgaagcaagaaaggcttaaatgtctttattcaggggattaggcatcataagtttttttttttagagaaattggttttcatgatatttcctatcctcctttggtcactttggcttttgtcggtaaattttacaactaaatgaggattaccaggcataaaaagcagcagacaatcatgatgcaaactgaaaataatcaatcaaaactgacccagaacttaaatagatgttaaaattagcagaggaggacattaaaactgtttttatacatgtatctcatataatcaaaacattaaatagagacatgggagataaacaagaaaagccaaaatcaaactttcaaagacaaaaacatttgagatgaaaattacattggatgaactaaagcagattagaaactgcagaagaaaagattagcaaacttgaagatacaagaacagacactagctaaagtacaaaaagaaaaaaaaatcttaaaaagtgatttttaaaaagcatcagtgagcagtcaggcaacttcaaatggcctaataatatgcaggtaactggagttcccaaaggagaaaaaatagaaagagaacaaaatacttgaagaaacaacggctgaaaatgttctagccataagaagacctattaactcacggatccaagaaactcagcaaaccccaagcacaagaaacatgaagaaaattacactaagggataacataatcaaatggttcaaaatcacggaaaca

SEQ ID NO: 5212 - DNA, 900 bp, Homo sapiens
  misc_feature (122)..(122): n is a, c, g, or t
ttgggggcagcaggcgccaggctatgcggaggacagccctgctctgcagtcaggacagctcatgacacaagtcagactgcagggtgaatgttatcaagatggagatgaaagggcagccccantgcctgtgctctatctggcagaattactctggtcagttctatgaccaaaacgtgggcttcagtcagcaagacacgaaagctggttaattctctattcaagacgcaagctgcctgctacaggggaccagcgccaaaaactctgagttactttccccaggtgctaatcaggtgacaagcacagtggacagcctcgacagccatgacctggaaggggtacagattgacttcgatgccatcatagacgatggggaccactccagcctgatgtcgggggccctgagcccaagtatcattcagaacctttcccatagctcctcccgcctcaccacgcctcgggcgtccctcccattcccagcgctgtccatgagcaccaccaacatggctatcggggacatgagttctttgctgacctccctagcggaagaaagcaaattccttgcagttatgcaataggctttaggaaaaaaagactgcaaccaacggaaatcaataggagttgaagagattaaactgactttgttttggctgtttttttagttctgtatgtattttagcaatctcatctcacctaactgagatgtgtttcaattatattccttttatggaaaaggactctgaaaaaccctaaagtattctagggagaaactgtcttccatttcagttttgaatcagtattgttacactcaaaccaccctctttttaaaaaaaaaaaaaaaaaatgtaagcccggccgactttttagtaaaccgatgtaaatttgtgatgtgaaaaaaaaaaa

SEQ ID NO: 5213 - DNA, 1709 bp, Homo sapiens
aagtttaaaatttttcggccgagaccccaaaaattttttttttttttttttgttattcaaaccaaaacttatttttgtttatagaaacaagacaacacacagtaaaattgaggaaatacaatagttttttcaatatagtaccacaagccattttttctgtaaaggaccaaatattagatactatcacaaaacattttatcactcattcaaaacaagaatcattcagttgccccaggaaaaaacacactgaaattattttagatagcataataagctagaggatatagaacatttgaaaaacagttccaaaaaatggaatactaaagatgcaacattaattcttagtacatttgttatggtaatgaattaaagcattatagaatatattcaagtcagaaatcctgtagtatgaagacataccttcatatgtgaaaatattattttatattaataataattattctggtatttatatcagatttatcatcagattttctttcctgaatttattaataatttgaccatggaacacaaaaatatttcattcattttataatactttgttttaattattatttagaacataaatcaatgtaaaaatgtgggtatatacatacaaaaatacataaaactaaaaagcaaaaaaatggcatttaacatttagccataataatatataacatactacaggtcacatgtacattttcattcatgataacttagtatgcctaataattatgttaaaacaatattcttaaaatgcttatgtatacaatggaatcttaaaatgtgtgtgattcgaaccatttacactgtcttaagcactcaaaagaaagaaactgtcttctgaatagttcctaaattttggctcaaatcggctgaggtccaattctaacggagaatcattctctaatacttactgtcctatgttacttatgattccaaatgttgtcaacaatactgagtagtaccaaaagggctggatggagggggtgggcagggatacagtggctgcttctgcatttccagaactagcatcccagacggccctgtcctgggcttcctctaaataaagctattgcctccaatatgaataaccataaggctccaattaacatgggtttgtctaacctctgatatttggggtgaaggattaggtttaatttctccctggttggcatctaactaaattttaggtagagccaaactctgaagccataatttaacactctgaaagtccaattaagttacaaaaacataggctttagagtctgaaaacatcaaactttaacctaatcgggtttcttgtgtaataacagatgaaagttgtttcttaatcattagtagttgtccattctagaaactgtaataagcttggcagggtcctgtgtatcattaagactgcttagtatttttttctctaaaaccatacccttcccgaaatcatggcataagacttgtttgatgatgatagaaattctatatgtaaaacaagtatataattaacccaagaatttcactgatttccttcacaattgtgttccaaatgaaatttcaaaataaaagccaagtagttttacactttagaatacatgctccaaaattaacccattaagcacttaataatgcactctaaattgtttctttaccatcatcagttaatattcatcaaatgcccaactgattagtttctccctactggacatttt

SEQ ID NO: 5214 - DNA, 2256 bp, Homo sapiens
gtttttaggcctttgccacgcctcgggagcgccacgaactcaacagccgcccaagccgccttccggctcgcggtctgcggacgcgctcggagttgggggccttcgccaacagctgccgtaccgtgccgcgtcgcagccgcacgctagcggggtcaacggcgcggcaggcgcaggggtcctcgccaaggttcggaagaggaccttgaaaatggcttctgggcatgcgccacagcggccgttacgagacgcaaaaccgacgccttggaactgagagcctagagggacggagctcggcgcaccatgaggctcccggggcccaaggccgaccgtgagagcgcacgagctgagtcagtgctgattctctcaaatagagcttgaaggataaatcttcatttttgtttcaacaaaacttcgaaacaaaatggaagaaaataatctacagtgcagtagtgtggttgacggtaattttgaagaagttcccagggagacggcaattcagtttaaacctccactatacagacagcggtaccagttcgttaaaaatttagtggatcaacatgagcctaagaaggttgcagacctgggatgtggtgatacttcactcttaaggctgctaaaagtcaatccatgcattgaattgcttgttggagtagatattaatgaggataaattacgatggagaggggattcgttagctcctttcctgggggattttctgaaacctcgggatctgaatttgaccatcacattgtatcatggctccgttgtggagagagactctcgtttgcttggatttgacttgataacgtgtattgaattaatagaacatttggattcaggtgatctggccagatttcctgaagtggtatttgggtacctgtttccatccatgattgtcatcagcacaccaaactctgaattcaatcccctgtttccatcagtgaccttaagagattcagatcataaatttgagtggaccagaatggagtttcagacctgggctttatatgtggcaaatcgctatgattactctgtggagtttactggtgtcggggaaccaccagctggagctgagaatgttggatactgtacccagataggaatcttccggaaaaatggaggaaaggcaacagaatcatgtctttcagagcagcatgatcagcatgtttataaagctgtttttaccacctcatacccaagcttacagcaggaaaggttctttaaacttgtgttggttaatgaggtgtcccaacaagtggaaagcttaagagtgagccacctgccaaggcggaaagaacaggctggggaacggggtgataagcccaaagacattggtggctcaaaggcccctgtcccatgctttggaccagtcttcacagaggttgagaaggccaagatagagaactctcccacacccttctgtgttggagataaatttttcgtacctctgcagagactccttgcgtatcccaagttgaaccgcttatgtgctaatgaagagatgatgagatcagtcattgctgactcaattcctctgagcagtgatggttctgcagtggtggctgacctgcgtaattattttgatgaacagtttgagttttgaaccatgtttatttcctgaaatttcagggtctcagcgatagttgtgctcacttagaatttagttttttttgtgtaatcctaattcaagtaatgtttttaaagtttcactgcaaaagtctatgttccaagccattggacagacctgcttgagatatggccagactgcagtgagccctgagaaagatatgagggtttaaaacgggtgctttcctttgattttggacttttttgttttctcaagaataaagaagttggatgtggtaataaaaaaaaaaaaaaaaaaaaaaaaaaaaaaaaaaaaaaaaaaaaaaaaaaaaaaaaaacaacaaaaaaaaaaaaaaaaaaaaacaaaaacacaaaaaaaaaacacaaacaataagcagcgcgcgccggcccgcccacgcaccccccggaccggtaacctcggctaactcgccctagtgaactgcagattatttatattacataagcatccgtccacacgtcatagacattaataggtgtatatttatttattaggactcaataatgagccgcttcgtgctccatcaaaaacatcaactctatcgtcggtaaaaaccaccacaagtctcatgactgtctgatactatttttcttaagagctgcactactctactcttgattttggatgaa

SEQ ID NO: 5215 - DNA, 553 bp, Homo sapiens
  misc_feature (23)..(23): n is a, c, g, or t
tggtctcttttagagtatgtgcngtgtgtgtatgtgcgtatgtgtgtggtgtgtgtagctaaacctgatgcaggtccatagttcttcaaattaactttccattctgtgagggggcttcagcaattagtgcacccaagagtgttaaaagtgatattttcagatattactaacagatcagaatacttatgaacgagaagcacattaaaaacaggtggggaaaatctcagtagtttacctctggaaaacaataaataaattgcaagcagcatgactgtctgatattcaggtggagtaataaagagctttagtcaaatcatgggttgcttcaggaaggtggaggagggaacaacattttgaccattagaaaagttacccagctgggctcctgactcctcggcatgcaccagcagagtctaagtcgcgtgcaccacccggcaaaggcggagaattcacggcactggcggggagcagcaccacatcaaaaagcagcagctgatgtcatgaaacaaaataccctatcattttactttgataattttcaatcctcgtgccg

SEQ ID NO: 5216 - DNA, 2071 bp, Homo sapiens
  misc_feature (1574)..(1574): n is a, c, g, or t
  misc_feature (1582)..(1582): n is a, c, g, or t
  misc_feature (1586)..(1592): n is a, c, g, or t
  misc_feature (1594)..(1596): n is a, c, g, or t
  misc_feature (1600)..(1601): n is a, c, g, or t
  misc_feature (1619)..(1619): n is a, c, g, or t
  misc_feature (1627)..(1627): n is a, c, g, or t
  misc_feature (1631)..(1633): n is a, c, g, or t
  misc_feature (1642)..(1642): n is a, c, g, or t
  misc_feature (1682)..(1682): n is a, c, g, or t
  misc_feature (1797)..(1797): n is a, c, g, or t
  misc_feature (1841)..(1841): n is a, c, g, or t
  misc_feature (1915)..(1915): n is a, c, g, or t
cggacgcgtgggctcgcagaaccacctggactctgtccgtgtctgtcccccggcctccagggctcctctcccgggacccccgtcccacgcctgggccccgcgccgggggaagcgcctgctgcctatctctgtctacctcaggtctgacttttgatgccaaaatctgagcccctggggtgcctctcccccgcctcccgtgcaccagggtctgcagcagccactggggcctggctgcctgctgcatctggcggccctggacccctggggcccccgtgcacctgcccacctcggagcctggggaggggctgtgcagggtcgagggctgggtcgtctccctcgggctgcgtgtgcgtgtcgggaatcctgcgtgtcgtgtctgtgggcgatccggcctcccggcggtgggtggacctggattctaactcagaggacttgagcctgctgttaactccgatgattgtagggacaggcggggtgggtggggggtgggcgcgaggctgggtcccggcccaggagaaggaagtcgctgaaggcagtggccatgctggccgtggaaatgggaggcggttgcagggggtctatggggcccggtcctggatactcggcaggaagccgtgtctgcagaggctcctccctgcctcaggtggccccgttcaaccccagccgtgcccatctcctgccaccgcctgtcggtgggggtttaaattcggtgtggctttctggggtgcagctcagcacccccccttaatgcagactgggagggggtcgggcagtcccctcagccacgaggaccctggatgggttctagttcacttgggaccgtggggcctggctgcgtactgagtgggtgccccacagtcaaggccaacgggggctccccctgctctgagatgttgggagaaaggcggcttctggaaccttccgtgggacccgtaagtggctgtccagaaaggcgggagggtgggcacggggcacggggggcagctggggtcgtcgttaagggtcacgcatctgtacagttgaatttcctttctcttatcatgttttacccaccttgtcccttttttccccaattgtgcttttgcatttttttccttggcaaatgtaaactcagcctttcattcatgacgtgtgaaatttcagtttctctggagtttgtcagacggcgtgggaaccacgcctgaaactcaggtaataggaggaaaaaaaaaaaaacttaaaaaaatttttaaaaaacataaaactactctctacctctggctgggcccagcctgtctcgccctggccgcggcagggtggcctgtaacaatttcagttttcgcagaacattcaggtattaaaaggaaaaaaaaaaaaaaaaacaaaaagaccaaaaaaaaaaaaagtgtgattttgaaatttaaaagaacactgaaagtttacattttatagtaacattattatgcagattgtatttaaacttcagaaatatttaagacgattgtaaccctgtaaagctgatgagatattaaaaccgagaacaaaaccctttcttgaattttttacaaaaaaaaaaaaaaaaaaaaaaaaaaaanaaaaaaanaaannnnnnngnnngagnnaaaacaaaaaaaaaaaancccccaangagnnnggggggggnagggggggaaaacaacccttttttcttaggggcccccccngggggccccccccagggggcgggcgctttttataaaaaaaaaaacccccccccccccccgggggtccccaacaaaagaagcacaccccttccgagaggggggccgccccgccggnaggaaaaaaacgcgggggggggggggggacaaaaaattaacatnagacccgggggggggttttttgtgaagaaaaaaaaaaacaacccccacaccagcggtgtgggggggccgcgcgncgggggggcccccactcctttttgtgagaaaaagaaaaaattttaaccacccgctgggggcggggggcggaaacaaaaaaaaaatttatttcctccccccccccttgcgcggaggggggggaaagaatcatcgctctcggcgggaggagtatatag

SEQ ID NO: 5217 - DNA, 1134 bp, Homo sapiens
  misc_feature (29)..(29): n is a, c, g, or t
  misc_feature (44)..(44): n is a, c, g, or t
  misc_feature (58)..(58): n is a, c, g, or t
  misc_feature (69)..(69): n is a, c, g, or t
  misc_feature (93)..(93): n is a, c, g, or t
  misc_feature (127)..(127): n is a, c, g, or t
  misc_feature (142)..(142): n is a, c, g, or t
  misc_feature (214)..(214): n is a, c, g, or t
tgcttggccaacatgaatgtccctgctcnatgaatgtaaaactncctagccctccctnaaagccccaancaagatgcccagcacccatgcctncttgtgaaaccccgcagaaacaatgaagcccaanaacaaaaactccttntcctttataaaaattaacttaacctcaaaatatttcctttaatagcaacgcaagaaaggcctgaatacgccnatctttggagactagctagcacatgggccttctccatctgtagctacacttctagaacagacatggcttccaaggccactgcagcagctggaggaagagctcagggtcctgtgggatgttcctcaggctcagatctgtggttcacatcacttccgcctcacattcctattggccataatctcgctccctagcctccacttgacagcaagggaacccgagggaagggatctgctgggggccatctctgccacaaacagcaagtgaaagcaagtagacaggaagccaagactgatgcccaagtgggagaggtgctgaggagagaagttttttttttttttttgacagagttctgaatgtttcagagtagtccaagtgcacccaaaagcacaataattaaatgaggggcaggagagtggtttagaagaagattgtttttctggattcagctccaacaaagtttgtcctgcaggtcttggtgctgtgccatggtccttctcgccaataatattcagcctggataccccgctgtggctctaccagggaggaaaatattttcctgccactgccctgagcctcctgactgaccccagctgccttagacatcccagcttttgggactaccccagacctccctataaccagcaatcagaggctggcacagcaagggtgctttggaaacctgcctggtgctccagggtgacaggcagcacctgctgtcattggtcagtgtctgtgcagtatttgctagagttttgtggatctcagccttgaaatctgtgtctttgtacagtcaaagggtctgagttgggagaaggcacctagatatgctccaccatagcgttctggtgtttcctgtcacccctgaagcctccgagttcttataacaggggcttaaagactgtagcattgagatatgaagg

SEQ ID NO: 5218 - DNA, 3748 bp, Homo sapiens
  misc_feature (778)..(806): n is a, c, g, or t
ccgcctcagcctctcaaagcgttagtattataggtgtgagccaccatgcccagcctagaaaatttaaccttatcttttagccattcatctacttttatttgcttttttaaaaaaaaatctttaaattttagcctagagaagcacctcaggaactctaaacatcttaggcaaaaattaaactcaggtgagactgaaggagaaatttcagaaatacacatgtacctcatgggtaattaatagacatgcacagtttccttcaaatcaaatgtttaataaggaaattcatataattccaagaaaacaggcaaaatttggaatacataagcctagctaagataaagaactaccatttaattcttaacatcactggagcttccagcaggttttttaattgaaggacaaaaagtgtccatacatttgtgttatctcttcagagcctgagggagaagagagtggctttgcccagtggaaaggctggggatttgagaatgatacagggggaaggagtcaagcagaaatgccaggaagaaccaggcaaagacatttggcgccagaagcatccacttaatttctgtgaagagtgcccctggtgtttcatcttggcctgttttgatgagaatgttatcttttgtgtctggataacgcgtcagcttcttaaagtacatataaagatattctgtcacctccccacatgcacacacttttaaaatctatttttattctcttgctaaagttgtaattatgtcaagaattttccagctctaactgccttcttagnnnnnnnnnnnnnnnnnnnnnnnnnnnnnagtttgccaaagtcattctcccctaatgacatattgtggacttacattaagaaaatgggccgggcgcggtggctcacacctgtaatcccagcactttgggaggcccaggcgggtggattacctgaggtcaggagttcgagaccagactggtcaacatggtgaaactccatctctactaaaaatacagaaatcagcctcccgagtagctgggattacaggcaccaccaccataccaggctgattttttttgtatttttaatatagacagggcttcatcatgttggccaggctggcaggctggtctcgaactcctcacctcgtgatccgcccacctcagcttcccaaagtgctgtgattacaggcgtgagccaccgcgcctggcctgctcttaaaacccgttattcagaagatttgtaaaagaaatgggcttttttttttttttggttaattcaaacgaggggaaaattagatagcattttcccctaaagaaatgttaatgttcattttgtggctttgttttcaagtttcaggagccatgtacatctcagaagtgttacgaagtgattagaaaaggcctctggtaaaagaccttcaaggaccaaccattattattggtcacttgtttgaacttggcgcttaaaaaaaaagttggactgtgatgctttggtgctctttatcacagacatcagtgatggtctgaaacactctctagcagtttatacgaagaatggacttacatgttatcagttacactcatgatttactcgttcagcttctacaagtccatactttatgctgtctcatttaagagacagtccacttctgaaaataaaatcgatagttgatgatacatttttggctagccagctttctgtaaaaggcaagtatgttagacatgcacagtttccttcaaatcaaatgtttaataaggtacttcaagaaacgcctttttaaaaatcaaaggttttggccaggcatggtggctcacgcctgtaatcccagcactttgggaggccaaggtgggcgaatcacaaggtcaggagtttgagaccagcctggccaacatggtgaaaccccgtctctactaaaaataccaaaaattagccgggcgtggtggtgggtacctgtaatcccagctactcaggaggctgagatgagaatcacttgatcccaggaggtagaggttgcagtgagccgagattgcgccattgcacttcagcctgggcaacgagtgaaactctcaaaaaaaaattcatagtaataataaagtccctgcatgcagtttggaaataaaatttaaactcatttatgtgtaataaatatgtaataattcacagtcaccatcaaatgttggaatcattgaattgcatacttgtactcattccggccacatcatgaagtgtttaaagatttgtatttgctgttgtccctatgtagttctattgatgtttggttttgttttttggggtttgttttgagcccaggctggagtgcaatggcacaatctcaactcgctacagcctggacctccttggctcaagcagtcctcccacttcagcctcccaggtagctggtctgcaggtgctcaccaccacacctggctaatttttgtattttttgtagagacagagctctcactatgttgcctagactggtctcaaactcctgggcccaagcaatcctcccatcacagcctccgaaggtgctgggattacaggcataagccactgtgcccagcctgtttttaataatgatattaagtgggtttggttcatgtgttattaatcagtgttaataatcgtacttttttttttttttaaaagaaaccatggtattctaaaatcaggagtccaaataaaagaaagttctcggctgtgcgtggtggctaacacctgtagtcccagcactttgggaggctgaggtgggtggatcactggaggtcaggagtttgaaacaagcctggccaacatggtaaaactccctctctactaaaaatgcagaaattggccgggcatggtggtgcacacctgtaatcccagctactcgggatgttgaggcatgagatttccttgaacctggaaggcagaggttgctgtgagccgagatcgcgccactgcactccagcctgggtgacagagtaagactgtcgccaaaaaagaggaaaaaagttatccagtgcagtttctacagagataaaagaagtaatagttctggctgggtgtggtggcttatgcctgtaatcccaacactttgggaggccaaggcaggtggatcacatgaggtcaggagttcgagaccagcctggccaacatggcaaaactgtctctactaaaaatataaaaattaggtatggtggcacgtgcctgtacttacagctacttgggaggctgaggcatgagatgacaatctcttgaacccaggaggcggaggttgcagtgagctgagattgcaccactgcactccagcttgggtgatggagtgagactcaaataaaaaaggtactagttctgcatttcagagttggcttgttgaaccaggctatatgcttccaggatttaaatgtttttctgtattatactctcaattgtgttttaaaaaaatctcttacagaaatctctacctcaggcactaagtgttatgacatgggtagcatattgatattgaaaacttagctaggacttccagccttttaagataatttaaatgtaaaattaaatggttaaccagcaatctaatgtcatgtggtgtgcagtttggatattgcatgaacagctaaggaatcacctgttctagtgccaaagatcactcattgctaattttgttctgtacagcttatgtaatattttcatggtggagacggactctgtgtgctcagggccttgtctctaggaagattttgtcaattccaaatacagttttgaagattcaaaaaaaaaaaaaaa

SEQ ID NO: 5219 - DNA, 1674 bp, Homo sapiens
gagcgggtgagaggagcgggacacgcggaggaggtaaggaaggggtaggccctctccgggatctctgtcccccagtcaccttcctgcgacccttcctggaaggggcgtcctgggcggtgggggaaggtgggaggggcgggcggttacctcatcgccgcctccgggaggccccgctcgctcgcgccggcggctggggcggcgactccaggcgcggaagcgagagaaggatagaggcacagaggctccgggaggcagcgctgccccccgcgccccgcaccgctgcgggacccgcgccgcgagaggggcggacttcggcgcctcgcgcgtccgccggcgcctgggttggcgctgcggggcggaggcggtgtctgagcgccgctccggctctgctctctctcgagcttcggcacccgcccgagccgctcgcgcgcccgccacctgtctgcccactcggctgtctgtctgccctcccgccgccagctcctgcctcgggcctgccctctccggtctcggtgctccgaggggcgacgagaagcgcgacggggccgtggcgcaccgggcagggcgcgcggggcgcacggcctgggggcgcacggtgcggcgccggcccatgaggctttccagcgcggggagcggcagcgccggccggccatggggggtagcctgcgggtggccgttctaggcgccccgggcgtgggcaagacggccatcatccgccagttcctgttcggtgactaccccgagcgccaccggcccacggacgggccgcgcctctaccgacccgcggtgctgctcgacggcgccgtctacgacttgagcatccgcgacggcgacgtcgctggccccggctcgagccccgggggtccggaggagtggccagacgctaaggactggagcttgcaggacacggacgccttcgtgctcgtctacgacatctgcagcccggacagtttcgactacgtgaaggccctgcggcagcgcatcgcggagaccaggccggcgggcgcgcccgaagcgcccatcctcgtggtaggcaacaagcgggacaggcagcggctgcgcttcggaccgcggcgcgcgctggccgccctagtgcgcaggggctggcgctgcggctacctcgagtgctccgccaagtacaactggcacgtgctgcgtctcttccgcgagctgctgcgctgcgctctggtgcgcgcgcgccctgcacacccggccctgcgcctgcagggggcgctgcatcccgcgcgctgcagcctcatgtgacccgatcggacagtgccatccatgggccccaccttgtgactgggacaatcagggacctggattggacgggatcgcccaacttcactgggactggacagggaagtctccgccctgattggatgaggaaagctccaacccagtctcctaagcgactggcccccttttgaacctcattggacccaaccaggtcccaagctccattggagatgaccagtcctttctgggacctcaatgggtcacaatcccattggatggaaaggacttggctatgaacttgactggaaacacgcagcctgctcctggagcttcactggacatattctttatgccacacctaccacgggataataaaagggaaaataatttgaaaaaaaaaaacaaaaaaaaaaaaaaatagaaaaaaaagcgggg

SEQ ID NO: 5220 - DNA, 1959 bp, Homo sapiens
  misc_feature (1303)..(1320): n is a, c, g, or t
ggctcccggcccatgcggcccccgcgggctcccggccccggcttcagaactcagccctgcacctgagcgcggggcccggcggggcgtggcggcggcgatggggaaactgcagtcgaagcacgccgccgccgcccgcaagcggagagagagcccggaaggggacagcttcgtggcgtccgcgtacgcgagcggccgcaaaggcgcggaggaagcggagcggcgcgcgcgggacaagcaggagctgcccaatggggaccccaaggaggggcctttccgggaggaccagtgtcccctacaggtggcactccccgctgagaaagctgagggccgcgagcacccgggacaactcctcagcgcagatgacggagagagggcagcaaaccgcgagggcccgcgaggaccgggcgggcagcgcctcaacattgacgcactccagtgcgatgtctcggtggaggaggacgaccgccaggagtggacgttcacgctctatgactttgacaactgcgggaaggtcaccagggaggacatgtccagcctcatgcacaccatctatgaggtcgtggatgcctcggtcaaccactcctcgggcagcagcaagaccctccgtgtgaagctaaccgtcagccctgagccctccagcaagaggaaggagggtcctcctgctggccaggaccgggagcccacccgttgcaggatggagggtgaactggcagaggagccaagggtggctgacaggaggttgtctgcacacgtcaggaggcccagtactgacccccagccctgctcggagcgggggccctactgcgtggacgagaacacggagcgcagaaaccactacctggacctcgccgggattgagaactacacgtccagattcggccctgggtctcagctgtgcgagaagagaagctccgctcccaggacacacagtggggacaaggctagaggagtcggcctttgcagggagctgtggagccaggcaggtcacccacagtggccaggccccttcccttcagggctggtggccgtctgactgcagacttggctaacagactggcctcagggtcccctcctgtgcaagcaaagcaggagccccagggcagggcctcgcacctccaggcccggtcccgctcccaggagccagatacacatgccgtacaccaccgcaggtcacaggtgctggtggaacacgtcgtgccagcctcggagcctgctgcccgggccctggacacgcagccccggccgaaggggccggagaagcagttcctcaagtcccccaagggctccgggaagccgcctgggnnnnnnnnnnnnnnnnnntccgggaaagccttcagctactacctgccggccgtcctgccgccccaggcccctcaggacggccaccacctcccgcagcccccaccgccaccctacggccacaagcggtaccgccaaaagggcagggagggccactcgccactcaaggccccacacgctcagcctgccacagtggagcacgaggtggtgcgggacctgccgcccacgccagcaggagagggctacgcggtgccagtgatccagcggcacgagcaccaccaccaccaccacgagcaccaccaccaccaccaccaccaccacttccacccgtcctagcgccactgccaagcacacctcgctcccagcacaccacggcccgcgacctcagggcagggagcagagcagctgccggctgtgtgcccatggggagcccagcccccaccccccacctccgacagcaaacagcaactgactgcaggtgctggcatgatggaggtggtgcaccttggacacgtggacaaggcccaggcgccctctgctcttctgccctcgatgccacatggcggtgaacacatctgaagccactatgtttcctggctctaaggctcgtctgtgtaacccataaaacctgctttgattccaaaaaaaaaaaaaaaaaaa

SEQ ID NO: 5221 - DNA, 2855 bp, Homo sapiens
gagtcgaaggctgagcggacccggtcgagagccggcgagattcgcggccgcgtcgacggtgcgcccaccggtcccgccgggcgcccgcgggacgcgccgccagggccctctccgccgggggctcggcgctcgcccacctcttccaaatttaaccattacctaaatccgaagggaaatgagcaaacctctcggattgggtgtcaaggtctcctccgggctggggctgagcaagccctcggagtgaccgtgggtgacagcggctccagggactcttggggcgcagtggggaaagtgccggaccaccatgccgcgctcatttctcgtcaaaagcaagaaggctcacagctaccaccagccgcgctccccaggaccagactattccctccgtttagagaatgtaccggcgcctagccgagcagacagcacttcaaatgcaggcggggcgaaagcggagccccgggaccgtttgtcccccgaatcgcagctgaccgaagccccagacagagcctccgcatcccccagacagctgcgaagcagcgtctgcgaacggagctcggagtttgaggacttctggaggcccccgtcaccctccgcgtctccagcctcggagaagtcaatgtgcccatcgctggacgaagcccagcccttccccctgcctttcaaaccgtactcatggagcggcctggcgggttctgacctgcggcacctggtgcagagctaccgaccgtgtggggccctggagcgtggcgctggcctgggcctcttctgtgaacccgccccggagcctggccacccggccgcgctgtacggcccgaagcgggctgccggcggcgcgggggccggggcgccagggaactgcatcgcaggggccggtgccaccgctggccctggcctagggctctacggcgacttcgggtctgcggcagccgggctgtatgaaaagcccacggcagcggcgggcttgctgtaccccgagcgtggccaccggctgcacgcaaacaaaggcgctggcgtcaaggtggagtcggagctgctgtgcacccgcctgctgctgggcggcggctcctacaagtgcatcaagtgcagcaaggtgttttccacgccgcacgggctcgaggtgcacgtgcgcaggtcccacagcggtaccagaccctttgcctgcgagatgtgcggcaagaccttcgggcacgcggtgagcctggagcagcacaaagccgtgcactcgcaggaacggagctttgactgtaagatctgtgggaagagcttcaagaggtcatccacactgtccacacacctgcttatccactcagacactcggccctacccctgtcagtactgtggcaagaggttccaccagaagtcagacatgaagaaacacactttcatccacactggtgagaagcttcacaagtgccaggtgtgcggcaaggcattcagccagagctccaacctcatcacccacagccgcaaacacacaggcttcaagcccttcggctgcgacctctgtgggaagggtttccagaggaaggtggacctccgaaggcaccgggagacgcagcatgggctcaaatgagcaccctggctggctgcaagcagcagctacacaacactacagagggcagcctccctgcttgccaccactctgctccctgcttgcctccactcccttctgactttccagaccccaggtccagtctgcagatcctaccaggttgctcctccttcgccttacctcctggagctgccagaagaaatgaggtaccttttcaaagtgcagccgagagtgagaaccaagtgactccctaggcttcggacacaaataggctcctctacacctgaagacaaaggcaaagtcaaatggggaccagaataaatcttagaccccacagtccttcccatttccagccttaatctacagacaggaatgcccttcaggtttcttccttcccccttcttgacctaccccagatatttgtgtggaagaggaggaatcaccatttacaaggtggacaaatgctaatatttttatctagaaagaagagtgagtgttaacttttatttttttccttctggggggtctgttgactcctttcttttgggtgctgcctataaatcttggaggaatcatttctcctcctcaaaaactgattcagaaactgacttggggaaggaatttaatactttgaagtcatgagatgcaccatcgaggctacccccaagaagaagcagaagagaagttggtaatgagaggggattagaggtcctcccttcagtagggctgtgaaaacctcatcactggaggtaaaagcacaagcaatgcctgtggacaagatgtcattcattcactcagcaaatgttcatggatcaccggctaccaagtaccaggcaccatgttaggtattggggaagagagactgaagtcacaacccctgactgctcctcaaaagctaacggttgcacctccaagtggctgggtctgttcttactcttggagggaattctgagaagacagcacagaattgtaaaccttcccttttgacccttttggattttatcaggtgtaaacaaaaagctgaacagttacttcaaagatatgtgtgtatattcagttttttattgttaagctgatattttaaagatttctgagctagcaggcatgtgggaaggaaggctctgtcttcaactctttgaccctccatgtgtaccatagaggggggaaaggtggtattttcactttgatgaggttggtaaatgtttttagatcttctggtaagcattatgtttgttaatacatatttattagagtgatgttttaagttaataaagtattaagagtaaaaaaaaaaaaaaaaaaa

SEQ ID NO: 5222 - DNA, 1297 bp, Homo sapiens
acactcgacccgcagaggatggccctagaggagtctgtggcgtttggggcctgaaccagctgggaggacagcacgaggggctggtgggcagcctgggactgggtcacaccgggggcctggacaacactggctcgtggggctgaggactgaggagagcctggcccagccgtggcagttacaagaggcttaacctgaggggcagcagagtctcaggaagagattctgggataggaaaaagctacccccgttgcctggaagacagctatctgctggaaaccacccaccttcaccatgtctgacgaggaagttgaacaggtggaggagcagtacgaagaagaagaggaagcccaggaggaagaggaagttcaagaagacacagcagaggaggacgcggaagaggagaaaccgagacccaaactcactgctcctaagatcccagaaggggagaaagtggacttcgatgacatccagaagaagcgtcagaacaaagacctaatggagctccaggccctcatcgacagccactttgaagcccggaagaaggaggaggaggagctggtcgctctcaaagagagaatcgagaagcgccgtgcagagagagcggagcagcagaggattcgtgcagagaaggagagggagcgccagaacagactggcggaggaaaaggccagaagggaggaggaggatgccaagaggagggcagaggacgacctgaagaagaagaaagctctgtcttccatgggagccaactacagcagctacctggccaaggctgaccagaagagaggcaagaagcagacagcccgggaaatgaagaagaagattctggctgagagacgcaagccgctcaacatcgatcaccttggtgaagacaaactgagggacaaggccaaggagctctgggagaccctgcaccagctggagattgacaagttcgagtttggggagaagctgaaacgccagaaatatgacatcaccacgctcaggagccgcattgaccaggcccagaagcacagcaagaaggctgggaccccagccaagggcaaagtcggcgggcgctggaagtagagaggccagaaaggcccctcgaggcagagaccctccgccctcttgcacaccagggccgctcgtgggactccacatcctccagcccccacaatcctgtcaggggctccctgacagtcctgggggtggagaggccatcccggggcgtcccccgcgtctgtgtccttgctgccttcatcccctggggcctgtgaataaagctgcagaacccccttaaaaaaaaaaaaaagaa

SEQ ID NO: 5223 - DNA, 3141 bp, Homo sapiens
  misc_feature (1905)..(1931): n is a, c, g, or t
acctcgtgggcggacgcttgtgctctgtggctgcgaaagtccagcttcggcgactaggtgtgagtgagccagtatcccaggaggagcaagtggcacgtcttcggacctaggctgcccctgccgtcatgtcgcaagggatcctttctccgccagcgggcttgctgtccgatgacgatgtcgtagtttctcccatgtttgagtccacagctgcagatttggggtctgtggtacgcaagaacctgctatcagactgctctgtcgtctctacctccctagaggacaagcagcaggttccatctgaggacagtatggagaaggtgaaagtatacttgagggttaggcccttgttaccttcagagttggaacgacaggaagatcagggttgtgtccgtattgagaatgtggagacccttgttctacaagcacccaaggactcttttgccctgaagagcaatgaacggggaattggccaagccacacacaggttcaccttttcccagatctttgggccagaagtgggacaggcatccttcttcaacctaactgtgaaggagatggtaaaggatgtactcaaagggcagaactggctcatctatacatatggagtcactaactcagggaaaacccacacgattcaaggtaccatcaaggatggagggattctcccccggtccctggcgctgatcttcaatagcctccaaggccaacttcatccaacacctgatctgaagcccttgctctccaatgaggtaatctggctagacagcaagcagatccgacaggaggaaatgaagaagctgtccctgctaaatggaggcctccaagaggaggagctgtccacttccttgaagaggagtgtctacatcgaaagtcggataggtaccagcaccagcttcgacagtggcattgctgggctctcttctatcagtcagtgtaccagcagtagccagctggatgaaacaagtcatcgatgggcacagccagacactgccccactacctgtcccggcaaacattcgcttctccatctggatctcattctttgagatctacaacgaactgctttatgacctattagaaccgcctagccaacagcgcaagaggcagactttgcggctatgcgaggatcaaaatggcaatccctatgtgaaagatctcaactggattcatgtgcaagatgctgaggaggcctggaagctcctaaaagtgggtcgtaagaaccagagctttgccagcacccacctcaaccagaactccagccgcagtcacagcatcttctcaatcaggatcctacaccttcagggggaaggagatatagtccccaagatcagcgagctgtcactctgtgatctggctggctcagagcgctgcaaagatcagaagagtggtgaacggttgaaggaagcaggaaacattaacacctctctacacaccctgggccgctgtattgctgcccttcgtcaaaaccagcagaaccggtcaaagcagaacctggttcccttccgtgacagcaagttgactcgagtgttccaaggtttcttcacaggccgaggccgttcctgcatgattgtcaatgtgaatccctgtgcatctacctatgatgaaactcttcatgtggccaagttctcagccattgctagccagcttgtgcatgccccacctatgcaactgggattcccatccctgcactcgttcatcaaggaacatagtcttcaggtatcccccagcttagagaaaggggctaaggcagacacaggccttgatgatgatattgaaaatgaagctgacatctccatgtatggcaaagaggagctcctacaagttgtggaagccatgaagacactgcttttgaaggaacgacaggaaaagctacagctggagatgcatctccgagatgaaatttgcnnnnnnnnnnnnnnnnnnnnnnnnnnnacagcgggaacagtggtgcagtgaacatttggacacccaaaaggaactattggaggaaatgtatgaagaaaaactaaatatcctcaaggagtcactgacaagtttttaccaagaagagattcaggagcgggatgaaaagattgaagagctagaagctctcttgcaggaagccagacaacagtcagtggcccatcagcaatcagggtctgaattggccctacggcggtcacaaaggttggcagcttctgcctccacccagcagcttcaggaggttaaagctaaattacagcagtgcaaagcagagctaaactctaccactgaagagttgcataagtatcagaaaatgttagaaccaccaccctcagccaagcccttcaccattgatgtggacaagaagttagaagagggccagaagaatataaggctgttgcggacagagcttcagaaacttggtgagtctctccaatcagcagagagagcttgttgccacagcactggggcaggaaaacttcgtcaagccttgaccacttgtgatgacatcttaatcaaacaggaccagactctggctgaactgcagaacaacatggtgctagtgaaactggaccttcggaagaaggcagcatgtattgctgagcagtatcatactgtgttgaaactccaaggccaggtttctgccaaaaagcgccttggtaccaaccaggaaaatcagcaaccaaaccaacaaccaccagggaagaaaccattccttcgaaatttacttccccgaacaccaacctgccaaagctcaacagactgcagcccttatgcccggatcctacgctcacggcgttcccctttactcaaatctgggccttttggcaaaaagtactaaggctgtggggaaagagaagagcagtcatggccctgaggtgggtcagctactctcctgaagaaataggtctcttttatgctttaccatatatcaggaattatatccaggatgcaatactcagacactagcttttttctcacttttgtattataaccacctatgtaatctcatgttgttgtttttttttatttacttatatgatttctatgcacacaaaaacagttatattaaagatattattgttcacatttttattgaaaaaaaaaaaaaagcaaaatcattaaaacaaattataaaagggaaagaaaaaaaaaaaaaaaaaaaaaaaaaaaaaaaaaa

SEQ ID NO: 5224 - DNA, 603 bp, Homo sapiens
  misc_feature (538)..(538): n is a, c, g, or t
  misc_feature (547)..(547): n is a, c, g, or t
  misc_feature (557)..(557): n is a, c, g, or t
  misc_feature (581)..(581): n is a, c, g, or t
atattgtggacgagaacgcaaaggatgaaataacctgattataagaaagcatttaatattgcttctcctggcatcttccttgcaaaattaattaaaactagctaggatatatgagtctcatgaattgaaaactggcctcaagaccacaaggagtgattataaactgccttaaatcacactgagcaaagtgtctagtagaaatgcccagagagtattagattggttataatccagtatttccattagtgcttgagaaagtaaagagtaagttagttagtgtttagtagactttaactagaagggatttctgaaaaccggtatggcctaaactgtagaagacttagaaaaatggaaaagatatacttttttcaaaaggcaaaccctttccctttactatgaataattaatttaaagagtaattttcacctaatgatcatgaaatctccatatgcatatgggaactacataaaatagtgaaaaattaaaggtttttaaatctaggctaaggaacggcagcaaccttggggacctaattccntttagtctnttaggggttntaaactcccatagggagaagggtnttgggccctaaataatcctttt

SEQ ID NO: 5225 - DNA, 3656 bp, Homo sapiens
  misc_feature (2429)..(2447): n is a, c, g, or t
ctctgcgggccgcgggtgcgggtcgtcgctaccggctctctccgttctgtgctctcttctgctctcggctccccaccccctctcccttccctcctctccccttgcctcccctcctctgcagcgcctgcattattttctgcccgcagctcggcttgcactgctgctgcagcccggggaggtggctgggtgggtggggaggagactgtgcaagttgtaggggagggggtgccctcttcttccccgctcccttccccagccaagtggttcccctccttctccccctttcccctcccagcccacatacttcttcctccttcggaagggctggtaacttgttgcagcggacggaacggcggcggcggcggcaccatccaggcgggcaccatgggcacgtccgcgctctgggcgctctggctgctgctcgcgctgtgctgggcgccccgggagagcggcgccaccggaaccgggagaaaagccaaatgtgaaccctcccaattccagtgcacaaatggtcgctgtattacgctgttgtggaaatgtgatggggatgaagactgtgttgacggcagtgatgaaaagaactgtgtaaagaagacgtgtgctgaatctgacttcgtgtgcaacaatggccagtgtgttcccagccgatggaagtgtgatggagatcctgactgcgaagatggttcagatgaaagcccagaacagtgccatatgagaacatgccgcatacatgaaatcagctgtggcgcccattctactcagtgtatcccagtgtcctggagatgtgatggtgaaaatgattgtgacagtggagaagatgaagaaaactgtggcaatataacatgtagtcccgacgagttcacctgctccagtggccgctgcatctccaggaactttgtatgcaatggccaggatgactgcagcgatggcagtgatgagctggactgtgccccgccaacctgtggcgcccatgagttccagtgcagcacctcctcctgcatccccatcagctgggtatgcgacgatgatgcagactgctccgaccaatctgatgagtccctggagcagtgtggccgtcagccagtcatacacaccaagtgtccagccagcgaaatccagtgcggctctggcgagtgcatccataagaagtggcgatgtgatggggaccctgactgcaaggatggcagtgatgaggtcaactgtccctctcgaacttgccgacctgaccaatttgaatgtgaggatggcagctgcatccatggcagcaggcagtgtaatggtatccgagactgtgtcgatggttccgatgaagtcaactgcaaaaatgtcaatcagtgcttgggccctggaaaattcaagtgcagaagtggagaatgcatagatatcagcaaagtatgtaaccaggagcaggactgcagggactggagtgatgagcccctgaaagagtgtcatataaacgaatgcttggtaaataatggtggatgttctcatatctgcaaagacctagttataggctacgagtgtgactgtgcagctgggtttgaactgatagataggaaaacctgtggagatattgatgaatgccaaaatccaggaatctgcagtcaaatttgtatcaacttaaaaggcggttacaagtgtgaatgtagtcgtggctatcaaatggatcttgctactggcgtgtgcaaggcagtaggcaaagagccaagtctgatcttcactaatcgaagagacatcaggaagattggcttagagaggaaagaatatatccaactagttgaacagctaagaaacactgtggctctcgatgctgacattgctgcccagaaactattctgggccgatctaagccaaaaggctatcttcagtgcctcaattgatgacaaggttggtagacatgttaaaatgatcgacaatgtctataatcctgcagccattgctgttgattgggtgtacaagaccatctactggactgatgcggcttctaagactatttcagtagctaccctagatggaaccaagaggaagttcctgtttaactctgacttgcgagagcctgcctccatagctgtggacccactgtctggctttgtttactggtcagactggggtgaaccagctaaaatagaaaaagcaggaatgaatggattcgatagacgtccactggtgacagcggatatccagtggcctaacggaattacacttgaccttataaaaagtcgcctctattggcttgattctaagttgcacatgttatccagcgtggacttgaatggccaagatcgtaggatagtactaaagtctctggagttcctagctcatcctcttgcactaacaatatttgaggatcgtgtctactggatagatggggaaaatgaagcagtctatggtgccaataaattcactggatcagagctagccactctagnnnnnnnnnnnnnnnnnnnccaagacatcattgtctatcatgaacttgtacagccatcaggtaaaaattggtgtgaagaagacatggagaatggaggatgtgaatacctatgcctgccagcaccacagattaatgatcactctccaaaatatacctgttcctgtcccagtgggtacaatgtagaggaaaatggccgagactgtcaaagtactgcaactactgtgacttacagtgagacaaaagatacgaacacaacagaaatttcagcaactagtggactagttcctggagggatcaatgtgaccacagcagtatcagaggtcagtgttcccccaaaagggacttctgccgcatgggccattcttcctctcttgctcttagtgatggcagcagtaggtggctacttgatgtggcggaattggcaacacaagaacatgaaaagcatgaactttgacaatcctgtgtacttgaaaaccactgaagaggacctctccatagacattggtagacacagtgcttctgttggacacacgtacccagcaatatcagttgtaagcacagatgatgatctagcttgacttctgtgacaaatgttgacctttgaggtctaaacaaataatacccccgtcggaatggtaaccgagccagcagctgaagtctctttttcttcctctcggctggaagaacatcaagatacctttgcgtggatcaagcttgtgtacttgaccgtttttatattacttttgtaaatattcttgtccacattctacttcagctttggatgtggttaccgagtatctgtaacccttgaatttctagacagtattgccacctctggccaaatatgcactttccctagaaagccatattccagcagtgaaacttgtgctatagtgtataccacctgtacatacattgtataggccatctgtaaatatcccagagaacaatcactattcttaagcactttgaaaatatttctatgtaaattattgtaaactttttcaatggttgggacaatggcaataggacaaaacgggttactaagatgaaattgccaaaaaaatttataaactaattttgtacgtatgaatgatatctttgacctcaatggaggtttgcaaagactgagtgttcaaactactgtacattttttttcaagtgctaaaaaaattaaaccaagcagcttaaaaaaaaaaaaaaaaaaaaaaaaaaaaaaaaaaaaaaa

SEQ ID NO: 5226 - DNA, 3252 bp, Homo sapiens
  misc_feature (3079)..(3079): n is a, c, g, or t
gaccggtccggattcccgggatagctgataaaggcgcattttggaggcgccgcgggagacgtggtgccgctgcgggctcgctctgccgtgcgctaggcttggtgggaaggcctgttctcgagtccgcacttttcgtcaccgccatgtcgggaggtggtgtgattcgtggccccgcagggaacaacgattgccgcatctacgtgggtaacttacctccagacatccgaaccaaggacattgaggacgtgttctacaaatacggcgctatccgcgacatcgacctcaagaatcgccgcgggggaccgcccttcgccttcgttgagttcgaggacccgcgagacgcagaggacgcggtgtatggtcgcgacggctatgattacgatgggtaccgtctgcgggtggagtttcctcgaagcggccgtggaacaggccgaggcggcggcgggggtggaggtggcggagctccccgaggtcgctatggccccccatccaggcggtctgaaaacagagtggttgtctctggactgcctccaagtggaagttggcaggatttaaaggatcacatgcgtgaagcaggtgatgtatgttatgctgatgtttaccgagatggcactggtgtcgtggagtttgtacggaaagaagatatgacctatgcagttcgaaaactggataacactaagtttagatctcatgaggtaggttatacacgtattcttttctttgaccagaattggatacagtggtcttaacagtggaatttcaaggtaaggattcaggcaaggttgtcaagtaaattgccagatttctggttttagttacattgtattacttacgcatgtctgaagatagatgaaagcttagatctttcaatggaaagttctgtctatccaatagggagaaactgcctacatccgggttaaagttgatgggcccagaagtccaagttatggaagatctcgatctcgaagccgtagtcgtagcagaagccgtagcagaagcaacagcaggagtcgcagttactccccaaggagaagcagaggatcaccacgctattctccccgtcatagcagatctcgctctcgtacataagatgattggtgacactttttgtagaacccatgttgtatacagttttcctttattcagtacaatcttttcattttttaattcaaactgttttgttcagaatgggctaaagtgttgaattgcattcttgtaatatccccttgctcctaacatctacattcccttcgtgtctttgataaattgtattttaagtgatgtcatagacaggattgtttaaatttagttaactccatactcttcagactgtgatattgtgtaaatgtctatctgccctggtttgtgtgaactgggatgttggggtgtttgtggttatcttacctgggaagttcttagtttatcttgcttttcatgtgtctttctgtagacatatctgaagagatggattaagaatgctttggattaaggattgtggagcacatttcaatcattttaggattgtcaaaaggaggattgaggaggatcagatcaataatggaggcaatggtttggattggagagggctcactggatcccaatccttggagctggatcattggattcaaatcataatgtggataggatagggaggatgaattaccaggattcatggagcgggatcagattaccaggaacataggagtggattcctgccccaaccaaaccgcattcgtgtggatttttttattcaacttaattggctattccaaagattttttttttcctatttttgacgattggagcccttaagatgcacgatggaattgtgttttgcgttttttggtaaaaggagcaaagcgaggacctggagataaacgctggagcaatctccttggaaggattcagcacgagtagatggtaaacatttaaaggggaaagggggggtttgtttaaaatagtaaatcagtaagtcacttctaaatttaaagaaaacaaaattggagttgaagaataagtaggtttccaattggctattgccgttttctttgaaaaaataaacattttttaaaaaactaaaaaaaaaaaaaaaaaaaggaatggacgcgcacctggcgccacatgacaaacggatcatcaccccgaacacagcgggcctccggcgtcattttcccgcctgcccccccgggtgtatcgggccctctaccacccccgcaccttcgatgctcgctcaactgattgtcttaataagcccgcgtttcggcaatttgccgagttctccctattcgcgctttgctgggcccccacagcgcagtagtcaactccccctaaaccgaccccccccgcccactacctccacacacccccaatcgtgagcgcgctctccctatctcgcgcgcctcagtgcctccgcttagggcaccgataacaggcgacgtgcgccgggccccaccacgccacttaacaccgcggcggcgcatatgcaccaattcgccgttgaccgcgcgtagacacccaagcgacaatctttgggtgttgatccgcgacttcccaatttttcacacaaagcctctcgtgcgccccacggcgtcccgttctcgcggctcccttattgaaaatatcacccgtacccatagcaggtctctaataatatcaccgccctgctcatcccgcccacgcttcaagctcgtctgctgcgcgtcgggtcaccaaacaaccatctcccgccattagtaatgactagattgactgcaatgtacaattacaaaacatacgccaccaccacgagggactcaccgtccgcccacaccaactgccccaccgttaaatgtgtactcacatcgctgttaccgcatgcttataagattcgataccctagatcgcgagcagacggcctatcgacgcgcacacctatacgcgatgcgactctctatgtaataacgcagagcgccggtgacatgaccacaacagattagatcgtcttcctacgagaccattcgagctaggagccacacatagttgattcgtaagagcttgcgtattcgagagtttgattccccaagagctctaatgcacacgnggcagttactcccagcatatctcataacgtacaaggcttgtccctctcctcttccgcatgtcatatttgctcccctgcgagtaggatgctgttacacgaggacataatttaaataccaaacccgctctatccccacgacgtattatacgtcgttatagattgagcccccggac

SEQ ID NO: 5227 - DNA, 278 bp, Homo sapiens
atggtcgttcttgaggatccccgaaagcttatagtgccaacataaatactctgcatatttataatctatttgctttttctaccttctatgttatagtttctagggaatgcctgatgcacagaaccctaatctttgcaaaatacgtaccacaaataagatatcagaataattgttatctcttttgctcagtgtagtagtgggaagagtttatatagagtgctctagctttagaacgggaagagaacgatgtgctgtctgttaactaaatttctctacgc

SEQ ID NO: 5228 - DNA, 618 bp, Homo sapiens
tacatattacaactcgatctcggtaccctgtgggtagcaacaacagtattgttcaatttatatagtcagcaacaattaagggttgattagggcttagagcagaatagatgcccagtttctgaatctgagccaattttcagattcagaactttttgaatgaaggggagcctgggccataaacaggaagactccaatatcatggtgagattatttggtaataatttgcttgtgctttgtcaaaactatctatggccatttaatccagtaactcatcacaggaggacagtgaatacctaaatatttcaaggactattggacacagaatttgaattaaaattaatatttgttgatatttgtcatcatgacctcttagaataggaacagtgggagctacataataaatgaagtcctggctcaggtttggctatggtgtgttccctgagtccatgaatgcccccagtggtcattttgccagtacctgaatgtatacttggattggacagacttgggagttggcagaactcaacattgattccttggccaataagataggagccatcatagtggataaggcaagtgaaatctccgaaacagcccttaattgtgctggatctctag

SEQ ID NO: 5229 - DNA, 1400 bp, Homo sapiens
  misc_feature (10)..(11): n is a, c, g, or t
  misc_feature (16)..(17): n is a, c, g, or t
  misc_feature (1078)..(1105): n is a, c, g, or t
  misc_feature (1357)..(1357): n is a, c, g, or t
agggacaaanntggannttcaaagggtgcggcctggcacgagggagaagtcaggcacgtagctcagcggcggccgcggcgcgtgcgtctgtgcctctgcgcgggtctcctggtccttctgccatcatgccgatgttcatcgtaaacaccaacgtgccccgcgcctccgtgccggacgggttcctctccgagctcacccagcagctggcgcaggccaccggcaagcccccccagtacatcgcggtgcacgtggtcccggaccagctcatggccttcggcggctccagcgagccgtggcgctcttgcagcctgcacagcatcggcaagatcggcggcgcgcagaaccgctcctacagcaagctgctgtgcggcctgctggccgagcgcctgcgcatcagcccggacagggtctacatcaactattacgacatgaacgcggccaatgtgggctggaacaactccaccttcgcctaagagccgcagggacccacgctgtctgcgctggctccacccgggaacccgccgcacgctgtgttctaggcccgcccaccccaaccttctggtggggagaaataaacggtttagagactaaaaaaaaaaaaaaaaaaaaatgagggagataccaacggggcggccggccgctttttttttcgtggcacgacctttcgtgtgagacgcattgtttacggcccaggtgagcggagataatatggcgcccaaaatagcctctacgagagagtgtcggttggatcaggcccgcaataagacggcgagagaaaagggacgcgtaacgccagagtccacgaatctggacatggacggcgcgctgggcggggggtctagctatgtcgccaccggacgctgtgagaatatgtggcagcagaggggaccatgtgtgcggagagaaggctgcgaggccgccggcgcgccggctggaatgtcgcgtgcggcggcagcggtgacggggacgggcccactgctcacacagaaatagagaagtaatagccgcagatcgctgcgcgcacttaagagaccccaagtacgccgggagcaagcaagatgcaagccaatggcgagtnnnnnnnnnnnnnnnnnnnnnnnnnnnntgcgccacggagcgtcctgagcgaaacggcgattatagacgaatcgagggaacgcgcacgcggagggtggatagtgcacgagcagggagtacaactcacgcgcggatgaggcagtggagcgagtcaggctcgacgaggatgctgcgctgtacagcggagtgagcgggcggtgtgagtgtcaggcgaaaatactaacgtacgtgtggccctcatgagctcgtgtacgtgtatacactagccgcggtgacgagntcggaacgacggcacagtcgcacagagagatgaagcgctggac

SEQ ID NO: 5230 - DNA, 1258 bp, Homo sapiens
ttttttttttttttttttttttttttccagaatgaaaatactggtatatttgtataatgcaaagagaaatacagatataaatcctcaaaacggaaggtacattaataaaaatgtagcattataagccaaaaatattatatagtacttgcagaatttagtctttcagtttaacattataatgtctaacaaagaaatattatttaaattatagttctcattattaatttaaaacaaccatcagtagaacagcacagcttaacctagcaaacattttaaggaaatgctttgtttcctagaaggaggatatcattatattccattcatttataccataaacaacagaagaacaattttcaaagtggaaattagtttcataagacagaataaaactgggcttctcaaagcacaagccatttccataaaattaattttttattggcaaaaaatacttaaaacaattttgatgtagtactctgcttctcagagccctcccaatcctcgaaccacaatctatacacacgaacacatgcaatactgtatttttctccacatcattactaaccaaaacactttactcttttaaaacttacaacttgacagaaatgtttccattcaagattgctataatacagagagcagttgtcactgacgtggtttttagcagcagaaagtaaaccgggaaccaaatcttacttgttacttactgctttaaaaaaatgactgccttgctactgatctccatctctgctctttaagttcaatatcaacactgagactttcaaagaaccagcgcaggcacaaggaccctgcagccggcaattcagagggcatttcggacaacttccccccaccccccactttctcctgcttccaacagaagatcctcaagaaatctaacttgtgaagaagtccccctaggttcctctacttcactgcaaaatgtaatgccacttgaggttgtcaaaaaatagcttctgtagaaaactggccatggtctttaggaaacgttgcatgaagaaaattagtacagcctttatagaaaaagaaaaaaaggaaccacacatggaataaaagacgtcagtaccgctacaaaaagactgcagggcctattgtcaggaagaaagtcgagttaggaggacgaatgtgcggagctggagtgggctgagcatcctactcctcacccaccccacccccaaaggagtcagtacaatccaagtgtctgtccacttcgagtcattttgaaggcagcttagaaaat

SEQ ID NO: 5231 - DNA, 986 bp, Homo sapiens
aattcgcggccgctcgactacggctgagagatggtttcagacttgggaaggacacgggcagcagacagtggtcagtcctttcttggctctgctgacactcgagcccacattccgtcacctgctcagaatcatgcaggtctccactgctgcccttgctgtcctcctctgcaccatggctctctgcaaccagttctctgcatcacttgctgctgacacgccgaccgcctgctgcttcagctacacctcccggcagattccacagaatttcatagctgactactttgagacgagcagccagtgctccaagcccggtgtcatcttcctaaccaagcgaagccggcaggtctgtgctgaccccagtgaggagtgggtccagaaatatgtcagcgacctggagctgagtgcctgaggggtccagaagcttcgaggcccagcgacctcggtgggcccagtggggaggagcaggagcctgagccttgggaacatgcgtgtgacctccacagctacctcttctatggactggttgttgccaaacagccacactgtgggactcttcttaacttaaattttaatttatttatactatttagtttttgtaatttattttcgatttcacagtgtgtttgtgattgtttgctctgagagttcccctgtcccctcccccttccctcacaccgcgtctggtgacaaccgagtggctgtcatcagcctgtgtaggcagtcatggcaccaaagccaccagactgacaaatgtgtatcggatgcttttgttcagggctgtgatcggcctggggaaataataaagatgctcttttaaaaggtaaaaaaaaaaaaaaaaaaaaaaaaccccccccccccaaaaaaaaacccaaaaaaaaaaaaaaaaaaaaaaaaaaggaaaaaaattgaaaaaaaaaaaaaaaaaaaaaaaaatatatatttttataaaaaaaaaaaaaaaaattttttttttttttttttttttg

SEQ ID NO: 5232 - DNA, 504 bp, Homo sapiens
tcaaaggatctgagttgggagaaggcacctagatatgcaccaccatagcgttctggtgtttcctgtcatctctgaagcctctgagctcttataacgggggcttaaagatggtagcattgagatatgaaggcttgtagttgttgtccagttcaggggactttaactccaggtatctggaacttagaataaatcctcatgccctcaccatggcaacagggctcacctcctctgtctcatacctctccctcccttggccactattgctacagatatcctgacccttttacctctttatcaaataagcccactctgccccagggcctttgcatgggcttactttcctccaagaataatttactcctgatatttgcctgactaaatccttctcacctttctgattgcaaagaggcttccttgacaactcattctgaagcagcttttccctccagtctagctactttctctttcgttattctgtgttgattttatttacagcacttagcg

SEQ ID NO: 5233 - DNA, 1792 bp, Homo sapiens
ggaggacctggagctggcgggggtcaggtagcggggaggggcagggctcggggttcgggggcagggtgttcacggtgagaccaaaagtcaggtaggagcctccggggtccctgctgtgtcacccggacaggccgtcggggcgggcaggggggcggggccgggcctgaccacagcggccgagttcagtcctgctctccgcacgccaccttaggcccgcagccgtgccgggtgctcttcagcatgtccttcatcccggtggccgaggattccgacttccccatccacaacctgccctacggcgtcttctcgaccagaggcgacccaagaccgaggataggtgtggccattggcgaccagatcctggacctcagcatcatcaagcacctctttactggtcctgtcctctccaaacaccaggatgtcttcaatcagcctacactcaacagcttcatgggcctgggtcaggctgcctggaaggaggcgagagtgttcttgcagaacttgctgtctgtgagccaagccaggctcagagatgacaccgaacttcggaagtgtgcattcatctcccaggcttctgccacgatgcaccttccagccaccataggagactacacagacttctattcctctcggcagcatgctaccaacgtcggaatcatgttcagggacaaggagaatgcgttgatgccaaattggctgcacttaccagtgggctaccatggccgtgcctcctctgtcgtggtgtctggcaccccaatccgaaggcccatgggacagatgaaacctgatgactctaagcctcccgtatatggtgcctgcaagctcttggacatggagctggaaatggctttttttgtaggccctggaaacagattgggagagccgatccccatttccaaggcccatgagcacatttttggaatggtccttatgaacgactggagtgcacgagacattcagaagtgggagtatgtccctctcgggccattccttgggaagagttttgggaaccactgtctctccgtgggtggtgcccatggatgctctcatgccctttgctgtgcccaacccgaagcaggaccccaggcccctgccgtatctgtgccatgacgagccctacacatttgacatcaacctctctgttaacctgaaaggagaaggaatgagccaggcggctaccatatgcaagtccaattttaagtacatgtactggacgatggctgcagcaactcactcaccactctgtcaacggctgcaacctgcggccgggggacctcctggcttctgggaccatcagcgggccggagccagaaaacttcggctccatgttggaactgtcgtggaagggaacgaagcccatagacctggggaatggtcagaccaggaagtttctgctggacggggatgaagtcatcataacagggtactgccagggggatggttaccgcatcggctttggccagtgtgctggaaaagtgctgcctgctctcctgccatcatgagattttctctgctcttctggaaacaaagggctcaagcacccctttcaaccctgtgactggggtcctccctcgggctgtaggcctggtccgccattcagtgacaaataaagccattgtgctctgaggcctgcaaaaaaaaaaaaaaaaaaaaaaaaaaaaaaaaaaaaaacacacacaaccaccgaaccaaccacacagccagaaaccgccgcgaggcactacacggcggccacacaatagggcgccaaagcgcgcgggcaacagagaccccacacacagccgagagaccg

SEQ ID NO: 5234 - DNA, 989 bp, Homo sapiens
cccgggttcaagtggttgtcgtgtctcagcctcctgagtagctgggattacaggtgtgtgccaccatgtctggctgatttttgtatttttagtagaggtggggtttcaccatgttggccaggctggtctcgaactcctgatctcaagtgatctgcctgccttggtctcccaaagtgctgggattacaggtgtgaccaccacgccctgccttaagaattgttccaagagaatctggtgccacttgcaggtgcccattgaagtgcaatgggcactgttgatcactgaggaggtagtgggtgctgacccggtgctggggcctgtcccctagtctctgctttgcccttggctagctaggtggtgtgccaagtggggagagaagctaccttattaaggggcatggatcagcttcctgaaaggagggcctgcctctgtaagatatgggaagtcgctgagaatgttacagaacggccctagagatggggcagataacggcccccatttgtgagaagtgagttgggaggcatgtttggggcctctgatgtttgggaggctgtgggtaattaacatgagttttggggtccagcagcagaattcaggtttcctcttccactcagtaacctcagcatccgtatctgtaatgggaatgatacaaaacctatccccaagttgagggaaaaatgagattgtgtaaagcgcacttggcacatgacagtcacaagcatggggacagtgagtccagaaggattttcttatgccagcattgtaagccctaggatcacagggctctggcttgtttaaccatcgtgtctctggtccctagcctgcaaacctggtgtgtagggatgcctcagtcgcttacatgttgattgagtgaatcgtcggtttctttctggacactgacttcaaaaataaaataggatatgaataatcggaaaaaaaaaaaaaaaaaaaggggccggaccgcttctaagaaaatccccccccaaggg

SEQ ID NO: 5235 - DNA, 1657 bp, Homo sapiens
agcggggatcccatctgtccacgagaagaagctgaggctctgagcggatgcacaggtcacccatggcaggtgccgtgcagtggtgtcaggaacccgtccgggtcttcacacaaggttctctccagtccatctcgtgggcggctctgcttggtggcttcaggagtgcggccctccccaggactccacttcatcctgggcttgcaccctccttgagccaatgcactgaactgcctttgaaaggaaattgcatgttctgaccattttaggatacctttactttaaggaccacacagtcccagaggacacatccctcgggaactctgcccctctgacaatgagggccacagagaaggtggtgtttccatggtagatgctcctgttctggtgataccaaacctgcccacccctctgagtcgtctttgctcatggactagcggcaggaccacgtagtttggcattttgattcagaaagtggggagcagagacccagccaaatccaaacttttttttggttttgttttgttttgttttttacaagatataacataacccaggaaacagacccagctgaggttattctcagtggattacagtatacttttgtgtgtgtaaaagcacaaagtgcatgtgtactcacttctggccatataacatttacacagggaaatggatcattgatttttttttaatcaacgtgaatgaagaatgtttgtttatatatcactataaaatccagttgacctggacagtattatatgtacatatctattctaattaaatttaacaatcaaaggattggattacttttttcccccttgtaaagaggttcgagaatgtggtcaattgtatagatagcgtgttaaagccaaaacccagctctgagggccttacccattacttggatatttgctacgatccatctccctttgtgagtcaaatgttaagagaagaaacttgtatttgcagctagaggttactgtcacatcatagatttaacatttaccatcttcaaagtacaaatcttacatgtccttcaaaaggaggtcttaatacagttcctagttccttacttctgttttaaactttgggtaccaaaccaaaaagaagaaaaaagaaaggaaaagatcttctttgaagaaaagtatgtctctggatccctggaaaataatgatgtccaaagcaaattgtgaagatcaaatgtgtgttaagaaaaggtgtcgaggggagggacaaaaccagaaacggtggaaggaccagtgtaatagtcacagacttgcatcctggctctgcttacatttcctggtactctcgaatgtacgggcgttcacatagtcattgtgaagttgttggggtttttttggttttgtttttaatttagctcttctctgaggacgaagctgttggtggtggtggtggtgggggtggtggtgtgggatacatggtggtcaagttgtcagccctgatcagtttggactctgtaactcataggtgcattctttttttctttggtgtctcacaaattacccaattgttgaataaaactataaatatgttaataccagctttttccaataaaataacaaatgttacatcaaaaaaaaaaaaaaaaaaaaaagaatgaggttgaaaaaaaaaagggcggccgtcgcgatctaga

SEQ ID NO: 5236 - DNA, 1947 bp, Homo sapiens
  misc_feature (294)..(308): n is a, c, g, or t
ccacgcgtccgagaccaaggagtggaaagttctccggcagccctgagatctcaagagtgacatttgtgagaccagctaatttgattaaaattctcttggaatcagctttgctagtatcatacctgtgccagatttcatcatgggaaacagctgttacaacatagtagccactctgttgctggtcctcaactttgagaggacaagatcattgcaggatccttgtagtaactgcccagctggtacattctgtgataataacaggaatcagatttgcagtccctgtcctccaaatannnnnnnnnnnnnnngtggacaaaggacctgtgacatatgcaggcagtgtaaaggtgttttcaggaccaggaaggagtgttcctccaccagcaatgcagagtgtgactgcactccagggtttcactgcctgggggcaggatgcagcatgtgtgaacaggattgtaaacaaggtcaagaactgacaaaaaaaggttgtaaagactgttgctttgggacatttaacgatcagaaacgtggcatctgtcgaccctggacaaactgttctttggatggaaagtctgtgcttgtgaatgggacgaaggagagggacgtggtctgtggaccatctccagccgacctctctccgggagcatcctctgtgaccccgcctgcccctgcgagagagccaggacactctccgcagatcatctccttctttcttgcgctgacgtcgactgcgttgctcttcctgctgttcttcctcacgctccgtttctctgttgttaaacggggcagaaagaaactcctgtatatattcaaacaaccatttatgagaccagtacaaactactcaagaggaagatggctgtagctgccgatttccagaagaagaagaaggaggatgtgaactgtgaaatggaagtcaatagggctgttgggactttcttgaaaagaagcaaggaaatatgagtcatccgctatcacagctttcaaaagcaagaacaccatcctacataatacccaggattcccccaacacacgttcttttctaaatgccaatgagttggcctttaaaaatgcaccacttttttttttttttttgacagggtctcactctgtcacccaggctggagtgcagtggcaccaccatggctctctgcagccttgacctctgggagctcaagtgatcctcctgcctcagtctcctgagtagctggaactacaaggaagggccaccacacctgactaacttttttgttttttgtttggtaaagatggcatttcgccatgttgtacaggctggtctcaaactcctaggttcactttggcctcccaaagtgctgggattacagacatgaactgccaggcccggccaaaataatgcaccacttttaacagaacagacagatgaggacagagctggtgataaaaaaaaaaaaaaaaaagcattttctagataccacttaacaggtttgagctagtttttttgaaatccaaagaaaattatagtttaaattcaattacatagtccagtggtccaactataattataatcaaaatcaatgcaggtttgttttttggtgctaatatgacatatgacaataagccacgaggtgcagtaagtacccgactaaagtttccgtgggttctgtcatgtaacacgacatgctccaccgtcaggggggagtatgagcagagtgcctgagtttagggtcaaggacaaaaaacctcaggcctggaggaagttttggaaagagttcaagtgtctgtatatcctatggtcttctccatcctcacaccttctgcctttgtcctgctcccttttaagccaggttacattctaaaaattcttaacttttaacataatattttataccaaagccaataaatgaactgcatatgaaaaaaaaaaaaaaaaaaaaaaaaaaaaaaaaaaaaaaaaaaaaaaaaaaaa

SEQ ID NO: 5237 - DNA, 3414 bp, Homo sapiens
caaggctctgttcagttgttcttatctacatcctagaatcgggggtttcagctcactgctccttttcttttttttctttctctcccccgcccacccccccaaaaataattgatttgctttacaatcatccacactgtgttttgtggatctttaattatatataacaatagtagtcattttaaatatatattctgaaatctttgcaaattttaacagaagagtcgaagctctgcgagacccaatatttgccaataagaatggttatgataattagcaccatggagcctcaggtgtcaaatggtccgacatccaatacaagcaatggaccctccagcaacaacagaaactgtccttctcccatgcaaacaggggcaaccacagatgacagcaaaaccaacctcatcgtcaactatttaccccagaatatgacccaagaagaattcaggagtctcttcgggagcattggtgaaatagaatcctgcaaacttgtgagagacaaaattacaggacagagtttagggtatggatttgttaactatattgatccaaaggatgcagagaaagccatcaacactttaaatggactcagactccagaccaaaaccataaaggtctcatatgcccgtccgagctctgcctcaatcagggatgctaacctctatgttagcggccttcccaaaaccatgacccagaaggaactggagcaacttttctcgcaatacggccgtatcatcacctcacgaatcctggttgatcaagtcacaggagtgtccagaggggtgggattcatccgctttgataagaggattgaggcagaagaagccatcaaagggctgaatggccagaagcccagcggtgctacggaaccgattactgtgaagtttgccaacaaccccagccagaagtccagccaggccctgctctcccagctctaccagtcccctaaccggcgctacccaggtccacttcaccaccaggctcagaggttcaggctggacaatttgcttaatatggcctatggcgtaaagaggttctccccaattaccattgatggaatgacaagccttgtgggaatgaacatccctggtcacacaggaactgggtggtgcatctttgtctacaacctgtcccccgattccgatgagagtgtcctctggcagctctttggcccctttggagcagtgaacaacgtaaaggtgattcgtgacttcaacaccaacaagtgcaagggattcggctttgtcaccatgaccaactatgatgaggcggccatggccatcgccagcctcaacgggtaccgcctgggagacagagtgttgcaagtttcctttaaaaccaacaaagcccacaagtcctgaatttcccattcttacttactaaaatatatatagaaatatatacgaacaaaacacacgcgcgcacacacacacatacacgaaagagagagaaacaaacttttcaaggcttatattcaaccatggactttataagccagtgttgcctaagtattaaaacattggattatcctgaggtgtaccaggaaaggattttataatgcttagaaaaaaaaaaaaaaaaaaaaaacaaaaatacctttgatgcattgaatgttctttcatagctgtcgttgttgaatataatatacatagatagcgatgtgcagggatttttacccagccagctaactttactaccttccttgaaggtggatctttttaagatgaccattcgctcatttgaagaagaataacaaaatactaaaaaaataataaatataaaacaatttttacaaagtaatgggattcaaagaaaggaaaaaaagatttttcttttttgtcaaaatatcgatccaatcagattggtaaaaacccccacacaaattaaagaggaataataaaaattgcaaaaataaaaaagaacttttgcaaatttttttatttttccttctttcttttatatcatgtgaactaaaacagtcttctgttaggggatgggggcaagggggatacctgatgacattaacaatttaataacattaacattgttgccaaagaggtggtctctttgctgaaaatgggtttcaagaaaaatctatttttataaaatataaagaatttttacaagagaatctggatttgagaaaaaaatattttgactggctaatttaggggaaattgacaactttgtcgcgttcatactgcactggtaactttttagagatcaagatgtgtgttttaaactggattcgtagactgttttttgaaggatgggctataaacagatgatcttcatatcttttcatagcatgtaataataattaaaaaacaattattaattactaggggaaaggagtgttcgttctacccagggtaccacagttccccacagtcaaaacccaaaagcaaggagatgagttgaaagacagtttttctttaagtcatcagtatgggatgtcagcagaacaaaaattaaaaagattaattttccttttgatctaaaacttccttagtttgagcagtaggtgctacaaaattatttacatatcttagtatcatagttaaatgtaatgtgtttaggagaggaaaacaaaagatacatttgctttaaattcattaagaaattttcaaattcactttgtagcccatgctgatagaattgggctgtgttggtacatttgaaacactgtttatgttgcttgaaacacttatttatttaatcgccgatgtgatgatgcctatggccgagatcaaatatagctaggattgggctagactacttatttgtttacttaaactatgggaagaagcatattattgtgtcattctgttgtgtgtgtatgtgtatatacaatataaatatatatatataaagttattttttctttgggttaatttattataagttgtaacacttggctagttttgtttgtatatgtcttaaaatgttttcttatgatatttaagtgacagttaaagaggtatcaaggtaacttgtgtagaactattctttgatatattgtcatgtttgttgtgaatattttttcttactgcacagtagaaaaataaaaacaactgagtctttattttaatgtaactcagattggggaaaacaaaacagagctaagggaacaaaatgactgagggagcactctcccacgtccagtgcactgatcattttagtatgtttgtgctttgtacggttatatatttaaaacgaaaacaaaacaaaaaaatacaagggttcatgctcttccctgggtaatagaaacagttactcgctatgcataatctagttgatagttaaatttgctattgcttttcttgtcttgttatataaaatcttttcaatacaagtttagtcttaatggtaataaaacgttatggttatttataaaaaaaaaaaaaaaaaaggaaa

SEQ ID NO: 5238 - DNA, 3414 bp, Homo sapiens; identical to SEQ ID NO: 5237

SEQ ID NO: 5239 - DNA, 1671 bp, Homo sapiens
cccacccgcctgccgtcctggggcgccgccgccccgccgccggcagtggaccgctgtgcgcgaaccctgaaccctacggtcccgacccgcgggcgaggccgggtacctgggctgggatccggagcaagcgggcgagggcagcgccctaagcaggcccggagcgatggcagccttgatgaccccgggaaccggggccccacccgcgcctggtgacttctccggggaagggagccagggacttcccgacccttcgccagagcccaagcagctcccggagctgatccgcatgaagcgagacggaggccgcctgagcgaagcggacatcaggggcttcgtggccgctgtggtgaatgggagcgcgcagggcgcacagatcggggccatgctgatggccatccgacttcggggcatggatctggaggagacctcggtgctgacccaggccctggctcagtcgggacagcagctggagtggccagaggcctggcgccagcagcttgtggacaagcattccacagggggtgtgggtgacaaggtcagcctggtcctcgcacctgccctggcggcatgtggctgcaaggtgccaatgatcagcggacgtggtctggggcacacaggaggcaccttggataagctggagtctattcctggattcaatgtcatccagagcccagagcagatgcaagtgctgctggaccaggcgggctgctgtatcgtgggtcagagtgagcagctggttcctgcggacggaatcctatatgcagccagagatgtgacagccaccgtggacagcctgccactcatcacagcctccattctcagtaagaaactcgtggaggggctgtccgctctggtggtggacgttaagttcggaggggccgccgtcttccccaaccaggagcaggcccgggagctggcaaagacgctggttggcgtgggagccagcctagggcttcgggtcgcggcagcgctgaccgccatggacaagcccctgggtcgctgcgtgggccacgccctggaggtggaggaggcgctgctctgcatggacggcgcaggcccgccagacttaagggacctggtcaccacgctcgggggcgccctgctctggctcagcggacacgcggggactcaggctcagggcgctgcccgggtggccgcggcgctggacgacggctcggcccttggccgcttcgagcggatgctggcggcgcagggcgtggatcccggtctggcccgagccctgtgctcgggaagtcccgcagaacgccggcagctgctgcctcgcgcccgggagcaggaggagctgctggcgcccgcagatggcaccgtggagctggtccgggcgctgccgctggcgctggtgctgcacgagctcggggccgggcgcagccgcgctggggagccgctccgcctgggggtgggcgcagagctgctggtcgacgtgggtcagaggctgcgccgtgggaccccctggctccgcgtgcaccgggacggccccgcgctcagcggcccgcagagccgcgccctgcaggaggcgctcgtactctccgaccgcgcgccattcgccgccccctcgcccttcgcagagctcgttctgccgccgcagcaataaagctcctttgccgcgaaaaaaaaaaaaaaaaaaaaaaaaaaaaaaaaaaaaaaaaaaag

SEQ ID NO: 5240 - DNA, 1094 bp, Homo sapiens
tttattttaaatatgtgtcttttacagtcttttgtcattctgacatttctggatttttgctgttttataatttaccctttgttattcagaagcatgcttacttatagaaactaaatggtctttataaaagtaattacttaaaaagaaatcaggggaagaaagatatctatctaatctattaaatctttataaaacattacattgcagagggggagctactcctaaatattttcatgatttgcatggtttaatcagatttttttttttttttacaccatattagctaccttttcaatggagaagagacagttcacacaattccctggttagcacagatgtggactgagtgctttgtcacctgcagggtagtaacccagtgatgtttcttacagaagcacaatatgttgaaaatcctgggtgtgaccaatatggaataaagaagaaggcagaaagagagcaaatgaaaaatttcaacttgtatattcattttttacattttgctttgacttttaaatttaggaagtccgtttttacctgagaacaaatgtttaaagttcctgcgtcactctcagtactctcactgcccctcccaaaccctatagctccttacgctgggaaagctggttttttaaaaaaataataataaaatatttaatcttattaagtgttcatttaaaatgcgtaatgctttggaaataatgggtaacagatagcgagaggatatgtttataaagtgagcatgttggtcccatttataaatatatgtatgatttataagcttttttaaaacaaagctcaaattgttggtatttttctaaaatgtgcacagctgtattttacatgaaggctctttctaatgggttgttatactgtactcaacattttggacagcacatgaagtctgccaatgtacttaataaaacatgactttgtttatttaaagtttcttgctgtgaaaaagaactccctacctgtgagttcctttatttataattcttgaaaccaaaatgtataatgtacagttttcacaactgtatctgctctaataaaaaaaagttggttataaaaaaaaaaaaaaaaaaaaaaaaaaaaaa

SEQ ID NO: 5241 - DNA, 818 bp, Homo sapiens
  misc_feature (746)..(802): n is a, c, g, or t
ctggagggaaaaagaaagaggtaagcgtggcctgacctagccacccaccaacaggaataatggctgaaaaagcggggtctacattttcacaccttctggttcctattcttctcctgattggctggattgtgggctgcatcataatgatttatgttgtcttctcttagaaaggcaagaagatatcagattgacatcatttagaagaattaagaaaactatgaacatgactgattattaaatgtctcatgttaaacaatgcaatgtttgacatcactttacaaacttggatcataaactggcactttggtatgcataagaatttcttcaggacaataagaaattatgagtgaatttctctatattctgagtgagaaaaatgtttagctgtgatgaaaaatgcatgtcattaaaaaaagtttgataaatttaatcacattacaaaaaattatccccccttccctctggaaaaaactatagagaaagtgggctgaggctgtgcaaggtggctcatgcctgtaatcccagcactttgtgaggatcctttgagcccagaaattggagaccttcctaggcgacagagagagaccccatctctacaaaaaaaaaaaaaaaaaaaaaaaaaagaaagaaaatgggctagagataaaaacagacaattcagagaacatataatgtaaaagtacacttacttaatctcttgttcacaaaaagagaaatgtaattaaaactacactgaggaattgttnnnnnnnnnnnnnnnnnnnnnnnnnnnnnnnnnnnnnnnnnnnnnnnnnnnnnnnnnaaaaaaaaaaaaaaaa

SEQ ID NO: 5242 - DNA, 5606 bp, Homo sapiens
  misc_feature (102)..(186): n is a, c, g, or t
gcaggcggccgtgggagccgctggggcgaggacggcgcgaggctgctgctgctgcccccggcccgcgcggctggaaacggagaggccgagccaagcggcggnnnnnnnnnnnnnnnnnnnnnnnnnnnnnnnnnnnnnnnnnnnnnnnnnnnnnnnnnnnnnnnnnnnnnnnnnnnnnnnnnnnnnacagcccgggcaggggccggccgagccgtcccaacccagtggccccgctgtcgccagcctcgagccgccggtcaagctcaaggaactgcacttctccaacatgaagaccgtggactgtgtggagcgcaagggcaagtacatgtacttcactgtggtgatggcagagggcaaggagatcgactttcggtgcccgcaagaccagggctggaacgccgagatcacgctgcagttggtgcagtacaagaatcgtcaggccatcctggcggtcaaatccacgcggcagaagcagcagcacctggtccagcagcagccccccctcgcagccgcagccgcagccgcagctccagccccaaccccagcctcagcctcagccgcaaccccagccccaatcacaaccccagcctcagccccaacccaagcctcagccccagcagctccacccgtatccgcatccacatccacatccacactctcatcctcactcgcacccacaccctcacccgcacccgcatccgcaccaaataccgcacccacacccacagccgcactcgcagccgcacgggcaccggcttctccgcagcacctccaactctgcctgaaaggggcagctcccgggcaagacaaggttttgaggacttgaggaagtgggacgagcacatttctattgtcttcacttggatcaaaagcaaaacagtctctccgccccgcaccagatcaagtagtttggacatcaccctactgaacaacttggcgattcttcttagttttctgcatacttttcatcaccgatgcaggaaacgatttcgagtcaagaagacttttatttatgaacctttgaaaggatcgtcttgtatggtgaattttctaggagcgatgatgtactgtaattttattttaatgtattttgatttatgattatttattagttttttttaaatgcttgttctaagacatttctgaatgtagaccattttccaaaaaggaaactttattttcaaaaacctaatccgtagtaattcctaatcttggagaataaaaaagggcggtggaggggaaaacattaagaatttattcattatttctcgagtactttcagaaagtctgacactttcattgttgtgccagctggttgaaattaaaactctgatattactttttttgaggatttttatttttgtttttgcttaaacactatagtttgtctagaagtttaaaaagctaaaagttaaaaatggtgtaattatgaaaatctaacactcaagatagtttctaaaaggaaatcagtagttaaggatacctgatttcaaaatatttaaagcataacctaactgatggtaggatgattgtatcttgaatatgtggtagggccacatctattgtaggaaaaccttgcttttatcatctgtgtgtaaagggcttaataaggagaagaggccttttgactgatttgtgagtataaatgcatttgctgtttcatttcaaaaatgttgtggaggaaaagagtacatttaacttgtataagagaatatttgtactcctgtccaggctgcaggacctttcttcgagagctttgcacacttgacttgaaccacattttctgatccctttactttgttttagaagcacactgaaaaatctcgttgtttaaagtacaatttgtaaatatttcaaaggtctaggagtcataacttttgttttcatactgaaaatgatgttgatcagagaaaccaactgttttgcttttcattgctctgtgagaaattgaggattctgttttgctgttaggtaagctaactcagaaattgaaaggaaagactggataaacaccggattttcagtaagaaaacaaccccagtcttgtcttagaagccacttgttgaggagtctgttgggggaaaaaagaggatatgcttttaaaggtagaacaaaccttcttctgtgttaaatcaaaaggatgttcaaaatccaccaggacagatgctacttgggtttaaatggagccatagatgatacaaagtcctcttggggctgaaaatcacttcctatttgcatggctttactaactggtttctgttttccattatctttttcacagaaagtcttggtcagtatttttccagcatttaaattgaaacggtcagtattagaccactgctaggttatgtagtcaagaaataaaaatagaattacatgctacagatgtctttattctccttccatctagaaaggagttccaaggtcaaattactttttagtgcaatagttaaatgacattttgagatcataactcatatccaaaaagttgcagggaaaattaaaatagctttcccctattaagctaatggcaaacaaaacttaagtggacccccacttccagtggttgtttaggttgcagttgtgaaaatatgctgccaacatttaaaaacttgtttcatatgtatatatgtatacacatatatgaatatgtatgtatatatacatatatgagaacatgtgtgtacacatatatgaatatgtatatatgtgtatgtatgtatatatgtatatgaaatgagagccacatctaaagatttcttaaatcaagtttggttcagcttccttagaactgtggctgtactttttgaggagtacctcatagtactatatttttaatgcatgcaaatcataatagctccaaatgaaccacagttttttcccaatggaggatttttttttaattcttgtactaaaaaaaaaaaatccataccaaatatttttacaaattaagattgatgtaggttttaaaaaaggcatttgtatgttgttagcttacatatggggctaggtaatttcattgcttaaaaagatgcgcctaggctccctcttggtggctggatttctttttcttcgcccgtggtggccatggtttttaatagggccaccggaatcatggtttcttttttttttttttttttggagatggagtctcgccctgtgacccaggctggagtgcagtggcacgatctcggctcactgcaacctctgcctcttgggttcacgccattctcctgtgtcagcctcctgagtagctgggactacaggtgaatgccaccacgcccggctgatttttgtatttttagtagagatggggtttcaccatagtggtcaggctgttctcgaactcctgacctcaggtgatccacctgccttggcctcccaaagtgctaggattacaggtgtgagccaccacacccggccccagagtaatggtttcttgactttctgtagcccttgttccttagtctgctgtgatatttatgttgacctttatcattttctattctgaacccctcttagcatttaatgtgaaatctaagaaattagaagtagaatggcttttattgttttgacacctttgaaattattattaataatttttccagagcaaaaaagcaaacacgctcaataagactaaacaaaacaaaatataaatgtacatcatttaatgtcccagtggctctattctacctgtaagaaaatgatacaaaaccacctaagatattttgaagcctgacaaatcagcttcatggaaaaaggtaaaaaatgcatttttcaaccgaaagggcagatccaatagaagacccgctccttaaataaacataaaatgtaaaaagttggaaaattaagagtaatgttccatctggaaactgaacttttgtccttgaacttgtgttggcaccaagcctcatacacagtgagctcaataactgttgggacaaaggaaggaaggacaaaatgtgtaacttcccagcatctgggagatgctgtctcttgcctcactgagtgttccttttctttgctctcatgtcattccctgagaacaatgaattctgggacaggctaaacatcatgatgaagtttcttaaacagactttcttagtggaaatccatttagatctgggtgtgctctatggggagtgctgacgtcaaagagcaaatgtctataaggggcccttttaaaatgaacattttcctcattgagcaagctgggattctctaatgtagaaatcaagccatctttataatttcacttcagatgtttatgtttttgttttttttttgtctccaatgatggtaaaaataaaaactacgcattacttaaaggagtttccctcacatgtaaacactgttaggaagtctggattaagttgaaagtcctgttttaactttttttctctcatataccaaacactctgtatttctcttaaagaagccctttaagagaaagccctaattttatatctgacagtaaagtttgctgcaagtgtatgagttcaaacacatcccttgttttctgtccctaggggaaaagtcatgtagttttagcttggctccagtgttaatattatattcagtagcagccttagaagagtggtctaagacttgaacctggagcaattttatagcacagaatcctacgaagataggactgtgaacatttgttttctttttcgtgtgtgtcaaactaactggtttttgctttaccaataaaatgtcctcggcagagtaaattttaaacgtgaaaattatagatcttgatattgaatccatcagtgattcaagagatacacctatttgcctaaaacaacctaagatgtattggttatggaatcatgtgttggataggttcttaagacctgtttcctcaaatcttgacacagttttcaagggtggcttattgacttgcacggttgggcagataatccagatttacctaagattgggtaaaaaagtcatctgtgactttgctggcagggcatttgctaagtggagtacaggatctaaaagggttttcttagaaagggcaatattgtccaatgaagtaagcagaaggactctgggttagaagcatctgcacaaaaactggtgagacctactctccactgctctgcagctggatggctgatggcaggctgagcagtggggaagcaggttttaacaacagggagtccttccaggtcactgtatattgagaagaaacataaaactattgtctgttacattccgaggtcagccttcttcttaacgttttataatatgcaaatgccagcttctggaaagcaagtatcatcatgtaccaaatgctttatacaccatcacattcatgaattttttagcatggtcagaacttgtgtaaatatgtctcttagatgattttggggagatgtgatttatttttcatattttcaaaatgcatttcatttcaaataaagttatctattgagacaaccgaaaaaaaaaaaaaaaaaaaaaaaaaaaaaaaaacaattacgtcccttttcttaaagggctatggagttaaaagcggccgcttaagtccgtggaggttggttggagcctctgggtatgacctatgcgaaaatgtatgattttgtgtttac

SEQ ID NO: 5243 - DNA, 3812 bp, Homo sapiens
  misc_feature (868)..(882): n is a, c, g, or t
  misc_feature (3790)..(3790): n is a, c, g, or t
gattttattccactgggatagaagcggcaggagcagcgttggcaccggcgaaccatggctgggattttctatttcgccctattttcgtgtctcttcgggatttgcgacgctgtcacaggttccagggtataccccgcgaatgaagttaccttattggattccagatctgttcagggagaacttgggtggatagcaagccctctggaaggagggtgggaggaagtgagtatcatggatgaaaaaaatacaccaatccgaacctaccaagtgtgcaatgtgatggaacccagccagaataactggctacgaactgattggatcacccgagaaggggctcagagggtgtatattgagattaaattcaccttgagggactgcaatagtcttccgggcgtcatggggacttgcaaggagacgtttaacctgtactactatgaatcagacaacgacaaagagcgtttcatcagagagaaccagtttgtcaaaattgacaccattgctgctgatgagagcttcacccaagtggacattggtgacagaatcatgaagctgaacaccgagatccgggatgtagggccattaagcaaaaaggggttttacctggcttttcaggatgtgggggcctgcatcgccctggtatcagtccgtgtgttctataaaaagtgtccactcacagtccgcaatctggcccagtttcctgacaccatcacaggggctgatacgtcttccctggtggaagttcgaggctcctgtgtcaacaactcagaagagaaagatgtgccaaaaatgtactgtggggcagatggtgaatggctggtacccattggcaactgcctatgcaacgctgggcatgaggagcggagcggannnnnnnnnnnnnnnaaaattggatattacaaggctctctccacggatgccacctgtgccaagtgcccaccccacagctactctgtctgggaaggagccacctcgtgcacctgtgaccgaggctttttcagagctgacaacgatgctgcctctatgccctgcacccgtccaccatctgctcccctgaacttgatttcaaatgtcaacgagacatctgtgaacttggaatggagtagccctcagaatacaggtggccgccaggacatttcctataatgtggtatgcaagaaatgtggagctggtgaccccagcaagtgccgaccctgtggaagtggggtccactacaccccacagcagaatggcttgaagaccaccaaagtctccatcactgacctcctagctcataccaattacacctttgaaatctgggctgtgaatggagtgtccaaatataaccctaacccagaccaatcagtttctgtcactgtgaccaccaaccaagcagcaccatcatccattgctttggtccaggctaaagaagtcacaagatacagtgtggcactggcttggctggaaccagatcggcccaatggggtaatcctggaatatgaagtcaagtattatgagaaggatcagaatgagcgaagctatcgtatagttcggacagctgccaggaacacagatatcaaaggcctgaaccctctcacttcctatgttttccacgtgcgagccaggacagcagctggctatggagacttcagtgagcccttggaggttacaaccaacacagtgccttcccggatcattggagatggggctaactccacagtccttctggtctctgtctcgggcagtgtggtgctggtggtaattctcattgcagcttttgtcatcagccggagacggagtaaatacagtaaagccaaacaagaagcggatgaagagaaacatttgaatcaaggtgtaagaacatatgtggacccctttacgtacgaagatcccaaccaagcagtgcgagagtttgccaaagaaattgacgcatcctgcattaagattgaaaaagttataggagttggtgaatttggtgaggtatgcagtgggcgtctcaaagtgcctggcaagagagagatctgtgtggctatcaagactctgaaagctggttatacagacaaacagaggagagacttcctgagtgaggccagcatcatgggacagtttgaccatccgaacatcattcacttggaaggcgtggtcactaaatgtaaaccagtaatgatcataacagagtacatggagaatggctccttggatgcattcctcaggaaaaatgatggcagatttacagtcattcagctggtgggcatgcttcgtggcattgggtctgggatgaagtatttatctgatatgagctatgtgcatcgtgatctggccgcacggaacatcctggtgaacagcaacttggtctgcaaagtgtctgattttggcatgtcccgagtgcttgaggatgatccggaagcagcttacaccaccaggggtggcaagattcctatccggtggactgcgccagaagcaattgcctatcgtaaattcacatcagcaagtgatgtatggagctatggaatcgttatgtgggaagtgatgtcgtacggggagaggccctattgggatatgtccaatcaagatgtgattaaagccattgaggaaggctatcggttaccccctccaatggactgccccattgcgctccaccagctgatgctagactgctggcagaaggagaggagcgacaggcctaaatttgggcagattgtcaacatgttggacaaactcatccgcaaccccaacagcttgaagaggacagggacggagagctccagacctaacactgccttgttggatccaagctcccctgaattctctgctgtggtatcagtgggcgattggctccaggccattaaaatggaccggtataaggataacttcacagctgctggttataccacactagaggctgtggtgcacgtgaaccaggaggacctggcaagaattggtatcacagccatcacgcaccagaataagattttgagcagtgtccaggcaatgcgaacccaaatgcagcagatgcacggcagaatggttcccgtctgagccagtactgaataaactcaaaactcttgaaattagtttacctcatccatgcactttaattgaagaactgcactttttttacttcgtcttcgccctctgaaattaaagaaatgaaaaaaaaaaaaacaatatctgcagcgttgcttggtgcacagattgctgaaactgtggggcttacagaaatgactgccggtcatttgaatgagacctggaacaaatcgtttctcagaagtacttttctgttcatcaccagtctgtaaaatacatgtacctatagaaatagaacactgcctctgagttttgatgctgtatttgctgccagacactgagcttctgagacatccctgattctctctccatttggaattacaaccattgtattttgtttgtggcataaattacagtcatctgtctttcactggaatgaagaccatgcctaggaacattttttaaggactcagctgtggcttttagggcttggttcataccatgggggaaaaaaaagtcctaggagaaagcgacgtggctcattagtgttgcctcttcagtgctcaagccgcctggtggattcctatgacacagggggcctggaaagaaagggaaagtggatttaaaatatatatatacgtaacccaagccccataacccctaactggacaaatgaggtctgtttctttggggcctgaggctgtgccatataaagtcttatttttgggactttacaaacttgtcctaactatcttggtggatagtgggctgtgacaatcctggatanagaacgttcacacttcgctcct

SEQ ID NO: 5244 - DNA, 1141 bp, Homo sapiens
gaaggggcggctcagccctcgggccctcgcccgccctctccgggtctggagcgtctcctcgcgccatccctgcaccgccagggggaacgtgcccatcgcagccgaggccagagggacccccgtccagcagagactggaaccctggtctctggccaccgcccccaccaggatgtcggacaccgaggagcaggaatatgaggaggagcagccggaagaggaggctgcggacgaggaggaggaagaagaggaacgccccaaaccaagccgccccgtggtgcctcctttgatcccgccaaagatcccagaaggggagcgcgttgacttcgatgacatccaccgcaagcgcatggagaaagacctgctggagctgcagacactcatcgatgtacatttcgagcagcggaagaaggaggaagaggagctggttgccttgaaggagcgcattgagcggcgccggtcagagagagccgagcaacagcgcttcagaactgagaaggaacgcgaacgtcaggctaagctggcggaagaaaagatgaggaaggaagaggaagaggccaagaagcgggcagaggatgatgccaagaaaaagaaggtgctgtccaacatgggggcccattttggcggctacctggtcaaggcagaacagaagcgtggtaagcggcagacggggcgggagatgaaggtgcgcatcctctccgagcgtaagaagcctctggacattgactacatgggggaggaacagctccgggagaaagcccaggagctgtcggactggatccaccagctggagtctgagaagttcgacctgatggcgaactgaaacagcagaaatatgagatcaacgtgctgtacaaccgcatcagccacgcccagaagttccggaagggggcagggaagggccgcgttggaggccgctggaagtgaggatgccgccccggacagtggcacctgggaagcctgggagtgtttgtcccatcggtagcttgaaataaacgctcccctcagacaaaaaaaaaaaaaaaaaatgttattatggttgagatgcagctggtctctcctggttaattgacttcttattaccaacaagttacttgaaagagtgtcaccaataatcattaaagtacggcaggctgaaccttca

SEQ ID NO: 5245 - DNA, 1088 bp, Homo sapiens
  misc_feature (706)..(707): n is a, c, g, or t
cgactttcccgatcgccaggcaggagtttctctcggtgactactatcgctgtcatgtctggtcgtggcaagcaaggaggcaaggcccgcgccaaggccaagtcgcgctcgtcccgcgctggccttcagttcccggtagggcgagtgcatcgcttgctgcgcaaaggcaactacgcggagcgagtgggggccggcgcgcccgtctacatggctgcggtcctcgagtatctgaccgccgagatcctggagctggcgggcaacgcggctcgggacaacaagaagacgcgcatcatccctcgtcacctccagctggccatccgcaacgacgaggaactgaacaagctgctgggcaaagtcaccatcgcccagggcggcgtcttgcctaacatccaggccgtactgctccctaagaagacggagagtcaccacaaggcaaagggcaagtgaggctgacgtccggcccaagtgggcccagcccggcccgcgtctcgaaggggcacctgtgaactcaaaaggctcttttcagagccacccacgttttcaaataaaagagttgttaatgctgaaaaaaaaaaaaaaaaaaaacaaaagcaacaacaaacacaacaaaaaaaaaaaaaaaaccccaacacaaagcaccacacaaccacaacacacaaccccctccacacccaccgcctcccacaacaccactctaaatacacacnnggggggcggggcttaaaaaaacaccacttgggggcgcccaccattttaggccacactttatttttttgtgaaagagggcgccccatatggggcgcgcttataaaaagcaaaggtcgtccccccccctttccccacccctgcgggggaaaaaaatatatattcggccggattttctgggcaacgccccctctctcctttttggggggggagactctttgtccgcaccacctccctctcgcaaggttttatccgcccctcgcgcggcggcaaaacacaaattttttctctttagcacccacgacgcgggtgaaaaaccacacactccactctattccttcggctgggcgacaccacaccacttttcactcctccccgcccttc

SEQ ID NO: 5246 - DNA, 2912 bp, Homo sapiens
gatcagggagtatcggctgcgggtgcgcaaggcgtccaggagtgacctggggctgtggagagcgacccgtggccttgtgtttcaggtacggaggttccggactggacgggcgtcaggaagtcacagacttgtcctctgatgtggccccgcccgccgccgcactaatctcttcggcgtcgtacccgtcggcccagctcgacccgccgcagccccggccccgaccgtggacactgggggtccccgagggcgctgcgacctcctcccggagtttaccacctaggatgacttcagtgactagatcagagatcatagatgaaaaaggaccagtgatgtctaagactcatgatcatcaattggaatcaagtctcagtcctgtggaagtgtttgctaaaacatctgcctccctggagatgaatcaaggcgtttcagaggaaagaattcaccttggctctagccctaaaaaagggggaaattgtgatctcagccaccaggaaagacttcagtcgaagtcccttcatttgtctcctcaagaacaatctgccagttatcaagacaggaggcaatcctggcggcgagcaagtatgaaagaaacgaaccggcggaagtcgctgcatcccattcaccagggcatcacagagctcagccggtctatcagtgtcgatttagcagaaagcaaacggcttggctgtctcctgctttccagttcccagttctctattcagaaacttgaacctttcctaagggacactaagggcttcagtcttgaaagttttagagccaaagcatcttctctttctgaagaattgaaacattttgcagacggactggaaactgatggaactctacaaaaatgttttgaagattcaaatggaaaagcatcagatttttctttggaagcatctgtggctgagatgaaggaatacataacaaagttttctttagaacgtcagacttgggatcagctcttgcttcactaccagcaggaggctaaagagatattgtccagaggatcaactgaggccaaaattactgaggtcaaagtggaacctatgacatatcttgggtcttctcagaatgaagttcttaatacaaaacctgactaccagaaaatattacagaaccagagcaaagtctttgactgtatggagttggtgatggatgaactgcaaggatcagtgaaacagctgcaggcctttatggatgaaagtacccagtgcttccagaaggtgtcagtacagctcggaaagagaagcatgcaacaattagatccctcaccagctcgaaaactgttgaagcttcagctacagaacccacctgccatacatggatctggatctggatcttgtcagtgactttatgagagtttctgccacaaggtgcccaagaggagaggaatgggaagagtgccccagcacgtggtgactgcgtgatttctgctcgttgcctttgaagataactggcaggactgactgtagaacactttgacttttttcaaaaagtgatggaatttgtacatccaaatgaatattgtatagacaattttcccaggaatgtgcaaaatgcttgaaagttcaaacttcttttttgaaatgatcttcagatccagtggcccattcttttatctttatcctgtgaaggtgtttttcaggttttgaaacaatccaaaaatcatttaggaccaagtctaaggaaacattttagtggccaagttggattccgattgtaaaggaatgatactaattttctagcatggctctgaaggtgattttaggtagaagagttttgaggctgggcgcaatggctcacgcctgtaatcctagcattttgggtgactgaggcgggtggattgcttgagcccagaagttgaagaccagcctgagaaataaggtgaaaccctgtctacaaaaaatacaaaaagttagctgggtgtggtggcgtgtgcctgtagtgctagctactcagaaggctgaggtgggaggattgtttgagcccaggaggttgaggctgcagtgagttctaattgcgccactgcactccagcctgagcgacagagtgagacactgtcttaaaaaaaattaaaaattgtaagaaaatgaaaaaaaaagttttgagcattatttgcatcattgggatacatatgtcacttcacaagatgttcaatttgaaggaaataccactcattctctatgtcctgttgtctgtagtgtgcttcagtttttcatattgagttgacctaaatcctggattcatgacaagaaaggagtaagtactactattcattgttctatttgtttataatctgtattataaaattgcacataattaaaagctttcccttgtcttcaaaaaaaaagaggaaaaaaaaaaaaaaaaaaaaaaaaaaaaaaaaaaaaaaaaaaaaaaaaataaaaaaaaaaaaaaataaaaaataaaaaaaaaaaaaaaaataaacttaaacaatacacactatagagaagaatattacaatttgctggccgactttaaacaacaaaaaagaatttttttgcgctggcgtttcccaccttagtttttttgcagtaaaaccttttttcgccggctggcataatagctacatggccccaccccttctcctttagcaacatttccacactctgggggccgattgtaaataccgggccttagtatacatccaaagttcgcgcaaattttttgttaagaagacacttctttctccaccgtcccgaaatatgaaatggcctttttatcatagattcctccaatttggggtctcttgttgctccaatttaaacttgggcccttttttaaaaacaaccccccacattttggtcaaacaccttttttatactatgcccccccggcaacctcccttaacaaaataaccccccagggcttaggtttatttcaccaaa

SEQ ID NO: 5247 - DNA, 2253 bp, Homo sapiens
aataataagaattcctctctgcccagatggtaggttgatatttctggactctagccaagaaaaagctaattctggggatagaatgataaaagactcaagcactaaaaatatacattgccgaatctctttttctagctttgaaaagttgtggcctgcttgtccctctgttgactggtcatctggaccatcgtacttgctgtggctacttctaagacaatgtagagggttattaaaccttgaaactgcctttcctaagtagagaacaagactattcaacaacttctttgctgaagcactgaggagatttgtaatactcctaaaggaagggccaaactagagattttcaatcatagactttgtgacagcatttggggaactaaaagattcatgtgtttcagcctagtgggagagagtgggggagaggaagagagagagagagcatgtatacccgtatgttatcatagggcacgattctccagtggatggatacctggaatggatcattaagatgaagagagtaattcacatttactctagaacctttaacaagcactgaaaggaagaagcctgagatttgatccttgacaatttctggaaagcactggtcagtcacactgtcctggacagagtccaagttacccactaaagcttgaggtggatgttggcttcactcctgcagcacaatgctggccctagaaagcgagcattttcattcttcccatggcagctgattctttggtgccagttttcatgttttctccataggccttgtgcagaaaggttttctcattgcatccatactgtgagaataaactgcagactgaaagaaacatgcctgcagggtcaggaactgggccactgttcccagaacgggttgtgcctcagaaatctatttctcttttagatgttgaaccctgagagaactaagatgatatttcagaagagttggctgccttctctggaaacaaggaaaacccaataattccgaggaacattgggggttaaataccaagaataaaaattggttcttctttgacttcagcttaactgtattaagacagaaattaagccctctaaaaacaccacaaagagagatgattgtaatgatagaaatagaggtacagagctatgcaaaggaaacaggaagtgaaatattcctagtcccagggatctggtaatcgctcctggcttccagatgtcaaaggactgatcctttggtaagctcactagaaacttctagctctacaagagtttgggatattaatgttattcagtaagtcccaagtttttcagagaatagattactaacaatgaggaatttatattccttggttaatttaggagtctaagatgcagagttcagaaagaaattactcagacctaactttgagtgcttaagctgccaacagttagaagatgctatttatttgtgtctgtaagtttgtacatagtaatgccagccttgttgctgaattttttatttggggggagatgactttgaattttgtttgaaatgcttcagttgtcattttgtcattgcatttcaaatagctcatgacccttttcttgtggtcactttggcacaccatagtagcccacaaagtgggggcagggtattgacatttggattttttctttgatactagttcttttattcatttttatttgtgactgtagtgataactttacagatggagaaagagtgaatggatgaatgaataattggtttaatgcctagttatgcaacttgagtgcttttttttttttttgcaggataattttaagtgtatatattttaactgcactggtacattgaacatgtcagtgtcgatgccactggaccaacagagcattttgtggctatagggtgcctgataataatgtcttgatttttctttgggattcaactatatcgaaggtttttcccccagcagtatgggggcgtacaggtgatcgatcattaatgtcattgcaattgttattttttaaaataaatttataaaaataaaaaaaaaaaaaaaaaaaagatgaggaatctgcaactcctgggttctagtttgtgttttccagtgttgaaattttgatctcccccgacaagacttgtctgcatggacggtgtctctgtaaacagtatcaaacttgtaatgtctgagcctcttagctttatctccccttaatttcttcccttttggcccttccaccctgttgaggagattttttctgtcacctgcaggctgatcatacatttgatgc

SEQ ID NO: 5248 - DNA, 1856 bp, Homo sapiens
  misc_feature (1626)..(1626): n is a, c, g, or t
  misc_feature (1843)..(1855): n is a, c, g, or t
agcggggcggcctggtagggaggagctgtggggtggcaacccagaggcaaggaggtgggcagaggcccacgaacctggccctgaccctcagctcgtccccagctcacagcacagccctcccctggctgcctccaaggagtctccagctactgagtggccactccgtgccagctcagcccacccctcaccttcccagtgcctgtggaggcccaactagggtgacgctgggagaggagagggcttggaggagccacgggtcaaatgcaggaggccacacctgcctgcccaggaggactgcaggagccggatccttaacacctggaggggagcgggggggcaacaacgccggccacacggtggtggtggatgggaaagagtacgacttccacctgctgcccagcggcatcatcaacaccaaggccgtgtccttcattggcaacggggtggtcatccacttgccaggcttgtttgaggaagcagagaagaatgaaaagaaaggcctgaaggactgggagaagaggctcatcatctctgacagagcccaccttgtgtttgattttcaccaggctgtcgacggacttcaggaggtgcagcgccaggcacaagaggggaagaatataggcaccaccaagaagggaatcggaccaacctactcttccaaagctgcccggacaggcctccgcatctgcgacctcctgtcagattttgatgagttttcctccagattcaagaacctggcccaccagcaccagtcgatgttccccaccctggaaatagacattgaaggccaactcaaaaggctcaagggctttgctgagcggatcagacccatggtccgagatggtgtttactttatgtatgaggcactccacggcccccccaagaagatcctggtggagggtgccaacgccgccctcctcgacattgacttcgggacctacccctttgtgacttcatccaactgcaccgtgggcggtgtgtgcacgggcctgggcatccccccgcagaacataggtgacgtgtatggcgtggtgaaagcctataccacacgtgtgggcatcggggccttccccaccgagcagatcaacgagattggaggcctgctgcagacccgcggccacgagtggggagtgaccacaggcaggaagaggcgctgcggctggctcgacctgatgattctaagatatgctcacatggtcaacggattcactgcgctggccctgacgaagctggacatcctggacgtactgggtgaggttaaagtcggtgtctcatacaagctgaacgggaaaaggattccctatttcccagctaaccaggagatgcttcagaaggtcgaagttgagtatgaaacgctgcctgggtggaaagcagacaccacaggcgccaggaggtgggaggacctgcccccacaggcccagaactacatccgctttgtggagaatcacgtgggagtcgcagtcaaatgggttggtgttggcaagtcaagagagtcgatgatccagctgttttagtcgcagactgagctgatcccaacaggccctggcagcgtctggacttgtgtaaacagcagcagtcacgttcctcggccgccacaaccaacactaaagcaggaaaaccattttntgtacttttatatttctgttcaacctgttggtttctacaatgattttaaacattggaaagccagccttgtgtatatttttaaaaattatattcaaaatgagccaaagtgctcagagaccttctatgacacattagtgtcacatggttgcgtgtccagccgaagcagtgtaataaacatctccaatggccactgaaaaaaaaaaaaaaaaaaaaaaannnnnnnnnnnnng

SEQ ID NO: 5249 - DNA, 2041 bp, Homo sapiens
acaggggtgaaggcccagagaccagcagaacggcatcccagccacgacggccactttgctctgtctgctgtccgccacggccctgctctgttccctgggacacccccgcccccacctcctcaggctgcctgatctgcccagctttccagctttcctctggattccggcctctggtcatccctccccaccctctctccaaggccctctcctggtctcccttcttctagaaccccttcctccacctccctctctgcagaacttctcctttaccccccaccccccaccactgccccctttccttttctgacctccttttggagggctcagcgctgcccagaccataggagagatgtgggaggctcagttcctgggcttgctgtttctgcagccgctttgggtggctccagtgaagcctctccagccaggggctgaggtcccggtggtgtgggcccaggagggggctcctgcccagctcccctgcagccccacaatccccctccaggatctcagccttctgcgaagagcaggggtcacttggcagcatcagccagacagtggcccgcccgctgccgcccccggccatcccctggcccccggccctcacccggcggcgccctcctcctgggggcccaggccccgccgctacacggtgctgagcgtgggtcccggaggcctgcgcagcgggaggctgcccctgcagccccgcgtccagctggatgagcgcggccggcagcgcggggacttctcgctatggctgcgcccagcccggcgcgcggacgccggcgagtaccgcgccgcggtgcacctcagggaccgcgccctctcctgccgcctccgtctgcgcctgggccaggcctcgatgactgccagccccccaggatctctcagagcctccgactgggtcattttgaactgctccttcagccgccctgaccgcccagcctctgtgcattggttccggaaccggggccagggccgagtccctgtccgggagtccccccatcaccacttagcggaaagcttcctcttcctgccccaagtcagccccatggactctgggccctggggctgcatcctcacctacagagatggcttcaacgtctccatcatgtataacctcactgttctgggtctggagcccccaactcccttgacagtgtacgctggagcaggttccagggtggggctgccctgccgcctgcctgctggtgtggggacccggtctttcctcactgccaagtggactcctcctgggggaggccctgacctcctggtgactggagacaatggcgactttacccttcgactagaggatgtgagccaggcccaggctgggacctacacctgccatatccatctgcaggaacagaagctcaatgccactgtcacattggcaatcatcacagtgactcccaaatcctttgggtcacctggatccctggggaagctgctttgtgaggtgactccagtatctggacaagaacgctttgtgtggagctctctggacaccccatcccagaggagtttctcaggaccttggctggaggcacaggaggcccagctcctttcccagccttggcaatgccagctgtaccagggggagaggcttcttggagcagcagtgtacttcacagagctgtctagcccaggtgcccaacgctctgggagagccccaggtgccctcccagcaggccacctcctgctgtttctcacccttggtgtcctttctctgctccttttggtgactggagcctttggctttcacctttggagaagacagtggcgaccaagacgattttctgccttagagcaagggattcaccctccgcaggctcagagcaagatagaggagctggagcaagaaccggagccggagccggagccggaaccggagcccgagcccgagcccgagccggagcagctctgacctggagctgaggcagccagcagatctcagcagcccagtccaaataaacgtcctgtctagcagcaaaaaaaaaaaaaaaaaaaacggcacgagctcgtgcagaattcggcacga

SEQ ID NO: 5250 - DNA, 1427 bp, Homo sapiens
  misc_feature (638)..(657): n is a, c, g, or t
ccactgcaacctccgtctcctgggttacagagtgagaccctgcctcgaaaaataataataataatagtaatttgagtgactcaggtgaaatttagagtcatatttcccgaagcagaagttaaagaaaattttttaaacatttgctttattattgttttcttctggtaaataataaatataacagaagtgttaactattgtattcccatttttttctccttccatctcttctgcggtaattcatcacatagtatcttaaagggaacaaataatgtttcatcctatggaaatgtgaaggatgaattgagctcctggcccttctgatgctttgaaatggaaggattgttccttagagcttctctgcagaatcagtggagattttcagtttcccaccctgcctggctttctctcttggtgactcccttggtgttttggagtattctttctataggggtacctgtgaggggcagaacacgtaagccacagaacatggtgaaaactaagtgtcactaggaaaagtaatgggaaagtaaaccctgcatatatgaaaacttcctggcagcaagttttcatatatagagggacaatgggagacagcatgctgtttttatagaaaagaagttttacataatatagttnnnnnnnnnnnnnnnnnnnnggctaaatacacacacacacacacacgctcatatgtgtttactctgtaagtctaatttgattttatcactctcaaacatattttaaaggaaacttgcttacaggaaggattaaacttgaactacttatcctattctttaaggcactccattgcctggcctcaatttactaatcctgtcttatttcccacaaatcctttatactctactcgatgaaacatccttgtgcacacccttgtgcctttgctcgcattaatccttccaagagacttccctcctgttctccattaatgaacgtcctacccagtcttcaactcccgggtcagatcctgtgtcctccataaaaaattttccagacaactccaatctgtccttcttccaagttcctagaggccttaattattcattctagccactaggtgcatagaatttgagatttttgtaataatagaagtagtgtgaaccctagaaattagaaaatcaagctttgggccaggtgcggtggctcatgcctgtaatcccagcactatgggaggccagggagggaggatctccagaggtcaggagttcgagaccagcctggccaacatggtgaaaccccgtctctattaaaaatacaaaaattagctgggcatgatggcaggcacctgtaatcccagctactcgggaggctgaggcaggagaattgcttgaactggggaggcagaggttgcagtgagacaagatcacgtcactgtactccagcctgggtgacagagtgatactccatctc

SEQ ID NO: 5251 - DNA, 2176 bp, Homo sapiens
acaaaaaacagcagggttagcttgtccctcccctccctcttcagcttcccagacactgattctggaatgaaaattcacctgcctctgagttggctcctaatgggggtgggagtgttacttcggttcccaggttggaagattatctcacccggccccagctatataagctgaccggtgtggaggggcccagcagggccaactccagggattccttccacgacagaaaaacatacaagactccttcagccaacatgatggtactgaaagtagaggaactggtcactggaaagaagaatggcaatggggaggcaggggaattccttcctgaggatttcagagatggagagtatgaagctgctgttactttagagaagcaggaggatctgaagacacttctagcccaccctgtgaccctgggggagcaacagtggaaaagcgagaaacaacgagaggcagagctcaaaaagaaaaaactagaacaaagatcaaagcttgaaaatttagaagaccttgaaataatcattcaactgaagaaaaggaaaaaatacaggaaaactaaagttccagttgtaaaggaaccagaacctgaaatcattacggaacctgtggatgtgcctacgtttctgaaggctgctctggagaataaactgccagtagtagaaaaattcttgtcagacaagaacaatccagatgtttgtgatgagtataaacggacagctcttcatagagcatgcttggaaggacatttggcaattgtggagaagttaatggaagctggagcccagatcgaattccgtgatatgcttgaatccacagccatccactgggcaagccgtggaggaaacctggatgttttaaaattgttgctgaataaaggagcaaaaattagcgcccgagataagttgctcagcacagcgctgcatgtggcggtgaggactggccactatgagtgcgcggagcatcttatcgcctgtgaggcagacctcaacgccaaagacagagaaggagataccccgttgcatgatgcggtgagactgaaccgctataagatgatccgactcctgattatgtatggcgcggatctcaacatcaagaactgtgctgggaagacgccgatggatctggtgctacactggcagaatggaaccaaagcaatattcgacagcctcagagagaactcctacaagacctctcgcatagctacattctgaggcaaacgacagactcttaatcagtaaatgttcactggcattttgaaggcatggcccaggagaagagacactagccataaaatctagtttctatttatcaacgtgttgtgaagatgtacctaatgaagttttgagaaagcacagggttataggtgtttaaatttcctttagtgaaactcttatttatttttatgtattcctgtttatttatttactgccacgctactgatattcagaccttcatgatcatccatctggtgagcagagcttcatttgtatataacactttcagagccttcccacccataggtagttcttaaaccaggtgaaagagcaaagttcaagtgcctacttatgtgtcattcgctcatgtaagagtttttaagagagggctgattatcacagccctcttttctcctgaatttttaatgcagaagtttgaatgaagcaagggaaggcatgtagggacaggaaaggaaacaatggaaggaaagtgattctgtgaaaaggacagtgaagccagctattttacccccaggctggattttttttttttttttttttttttttttttttaccgagtacacagagtacccaagtgaagagaacgtcatgagtgtaagtgcaaatcagtggaaggagcggcaaactgggacatgcagaattgaatttgctcaaaaaaaaaaaaaaaaaatgcaaactgtaaatgtataaatgtatattgtattgtatgtacattttatattcataataaaggcaatcaaactcaaaaaaaaaaaaaaaaaaaaaaaaaaaaatggaaatgtcctatgtgaaaaaaaaagctatataggagggttttttttttccattgttttccaagttttgcagattagaaatgtcccgtacaacagcacttccagtatttaatatgtatacagatcacctggggatctggttaaaatgcagatttctgattcagctgg

SEQ ID NO: 5252 - DNA, 3982 bp, Homo sapiens
  misc_feature (136)..(157): n is a, c, g, or t
  misc_feature (1617)..(1644): n is a, c, g, or t
  misc_feature (2523)..(2553): n is a, c, g, or t
  misc_feature (3852)..(3852): n is a, c, g, or t
  misc_feature (3857)..(3857): n is a, c, g, or t
  misc_feature (3872)..(3872): n is a, c, g, or t
  misc_feature (3921)..(3921): n is a, c, g, or t
  misc_feature (3934)..(3934): n is a, c, g, or t
  misc_feature (3950)..(3950): n is a, c, g, or t
  misc_feature (3972)..(3972): n is a, c, g, or t
gaattcttagttgttttctttagaagaacatttctagggaataatacaagaagatttaggaatcattgaagttataaatctttggaatgagcaaactcagaatggtgctacttgaagactctggatctgctgactnnnnnnnnnnnnnnnnnnnnnngagtcccttcaccattactgtggtcttacttctcagtgcctgttttgtcaccagttctcttggaggaacagacaaggagctgaggctagtggatggtgaaaacaagtgtagcgggagagtggaagtgaaagtccaggaggagtggggaacggtgtgtaataatggctggagcatggaagcggtctctgtgatttgtaaccagctgggatgtccaactgctatcaaagcccctggatgggctaattccagtgcaggttctggacgcatttggatggatcatgtttcttgtcgtgggaatgagtcagctctttgggattgcaaacatgatggatggggaaagcatagtaactgtactcaccaacaagatgctggagtgacctgctcagatggatccaatttggaaatgaggctgacgcgtggagggaatatgtgttctggaagaatagagatcaaattccaaggacggtggggaacagtgtgtgatgataacttcaacatagatcatgcatctgtcatttgtagacaacttgaatgtggaagtgctgtcagtttctctggttcatctaattttggagaaggctctggaccaatctggtttgatgatcttatatgcaacggaaatgagtcagctctctggaactgcaaacatcaaggatggggaaagcataactgtgatcatgctgaggatgctggagtgatttgctcaaagggagcagatctgagcctgagactggtagatggagtcactgaatgttcaggaagattagaagtgagattccaaggagaatgggggacaatatgtgatgacggctgggacagttacgatgctgctgtggcatgcaagcaactgggatgtccaactgccgtcacagccattggtcgagttaacgccagtaagggatttggacacatctggcttgacagcgtttcttgccagggacatgaacctgctgtctggcaatgtaaacaccatgaatggggaaagcattattgcaatcacaatgaagatgctggcgtgacatgttctgatggatcagatctggagctaagacttagaggtggaggcagccgctgtgctgggacagttgaggtggagattcagagactgttagggaaggtgtgtgacagaggctggggactgaaagaagctgatgtggtttgcaggcagctgggatgtggatctgcactcaaaacatcttatcaagtgtactccaaaatccaggcaacaaacacatggctgtttctaagtagctgtaacggaaatgaaacttctctttgggactgcaagaactggcaatggggtggacttacctgtgatcactatgaagaagccaaaattacctgctcagcccacagggaacccagactggttggaggggacattccctgttctggacgtgttgaagtgaagcatggtgacacgtggggctccatctgtgattcggacttctctctggaannnnnnnnnnnnnnnnnnnnnnnnnnnnagtgtggcacagttgtctctatcctggggggagctcactttggagagggaaatggacagatctgggctgaagaattccagtgtgagggacatgagtcccatctttcactctgcccagtagcaccccgcccagaaggaacttgtagccacagcagggatgttggagtagtctgctcaagtaagacccagaaaacatctttaattggttcttatactgtgaaagggacagggttagggagtcatagctgtctttttctaaagccctgtctccttccaggatacacagaaattcgcttggtgaatggcaagaccccgtgtgagggcagagtggagctcaaaacgcttggtgcctggggatccctctgtaactctcactgggacatagaagatgcccatgttctttgccagcagcttaaatgtggagttgccctttctaccccaggaggagcacgttttggaaaaggaaatggtcagatctggaggcatatgtttcactgcactgggactgagcagcacatgggagattgtcctgtaactgctctaggtgcttcattatgtccttcagagcaagtggcctctgtaatctgctcaggaaaccagtcccaaacactgtcctcgtgcaattcatcgtctttgggcccaacaaggcctaccattccagaagaaagtgctgtggcctgcatagagagtggtcaacttcgcctggtaaatggaggaggtcgctgtgctgggagagtagagatctatcatgagggctcctggggcaccatctgtgatgacagctgggacctgagtgatgcccacgtggtttgcagacagctgggctgtggagaggccattaatgccactggttctgctcattttggggaaggaacagggnnnnnnnnnnnnnnnnnnnnnnnnnnnnnnntggaaaagaatcccgcatttggcagtgccattcacacggctgggggcagcaaaattgcaggcacaaggaggatgcgggagttatctgctcagaattcatgtctctgagactgaccagtgaagccagcagagaggcctgtgcagggcgtctggaagttttttacaatggagcttggggcactgttggcaagagtagcatgtctgaaaccactgtgggtgtggtgtgcaggcagctgggctgtgcagacaaagggaaaatcaaccctgcatctttagacaaggccatgtccattcccatgtgggtggacaatgttcagtgtccaaaaggacctgacacgctgtggcagtgcccatcatctccatgggagaagagactggccagcccctcggaggagacctggatcacatgtgacaacaagataagacttcaggaaggacccacttcctgttctggacgtgtggagatctggcatggaggttcctgggggacagtgtgtgatgactcttgggacttggacgatgctcaggtggtgtgtcaacaacttggctgtggtccagctttgaaagcattcaaagaagcagagtttggtcaggggactggaccgatatggctcaatgaagtgaagtgcaaagggaatgagtcttccttgtgggattgtcctgccagacgctggggccatagtgagtgtgggcacaaggaagacgctgcagtgaattgcacagatatttcagtgcagaaaaccccacaaaaagccacaacaggtcgctcatcccgtcagtcatcctttattgcagtcgggatccttggggttgttctgttggccattttcgtcgcattattcttcttgactaaaaagcgaagacagagacagcggcttgcagtttcctcaagaggagagaacttagtccaccaaattcaataccgggagatgaattcttgcctgaatgcagatgatctggacctaatgaattcctcaggaggccattctgagccacactgaaaaggaaaatgggaatttataacccagtgagttcagcctttaagataccttgatgaagacctggactattgaatggagcagaaattcacctctctcactgactattacagttgcatttttatggagttcttcttctcctaggattcctaagactgctgctgaatttataaaaattaagtttgtgaatgtgactacttagtggtgtatatgagactttcaagggaattaaataaataaataagaatgttaaagaaaaaaaaaaaaaaaaaaaaaaaaaaaaaaaaaaaaaaaaaaaaatncctgnggccgcaggcttttnccctttggtggggggttaattttgggcttggccctggccctccgttttncaccgtcgtgccnggggaaccccgggggnttcccccactttatccccctgncggcatcccc

SEQ ID NO: 5253 - DNA, 1763 bp, Homo sapiens
  misc_feature (45)..(45): n is a, c, g, or t
  misc_feature (87)..(87): n is a, c, g, or t
  misc_feature (112)..(112): n is a, c, g, or t
tcggcaggaagttggggggaaaacttttaaaagatacccctcatngtgtcaaagagtgtgccaatctatttttgtatcagcattggnaagtgcactttcccctgggggcgtntggggtgtgtgaatgtgcaaggtgtctgagagatactgcatcagccctagacccccagagccagtcccgccctttacagagcagcccttagcctggggccatgggtcaggctgaccttcaacaattatttctagatgatttctggataagaattgctctctcggtaccagacagtttgacatcctccacccttagaaaatgactgacattgttttgttactgctcctacccaccaaggggataaagaaggcgagttctgagtgttggatgagtcagtcgcgtggaaggacgtggagcgtggcgctctgtaacttcctgccgtctgccaccccgccacgtgtatttaaccctcgcactttctccactgtggagatggctggggcggcgccccacagtgtgtattcctgtcctctatgttagagtgcatcagaagcacatttactgtgctatctatatctctatataaaagtgttttataaaaacccagaataggagcacgacgcatgattggtgtttgaggcgtttgccagctgggacaaactgcgtttggagctgtggttaagctgactaaggaggcggtggctctttcttaacattcccacgtgcccagggctgttcatgcaagattttaatggtgacttgtcctggcttactgggacagtctgtatgaggcatgtcaccacactgtcgcctcatagctgcaagagagaggcaccagctgaagttcccctgactgaagagagcctgtggccatgtaaaaagagaattaaactcttgttgctttttgtataaaaaaaaaaaaaagtgtagacgtgtgtctcaccagtcacctttgccctgcattgctgatccccttgcgcacactgattctagtgaggtcacagattcggagcttcacacaccagcccagagaaagggcgatggaaccgaaccgagggtctgcagctttcgttagcagagctgtcagattcttgacagtccttggagggatgggagaaattcaagcagcaagctgggtgagggccaaaacagaatacttgggcttcttcagaatcttagattgccactggagtttagtccctaaatatttttgctaacaaattttccttggccagaaatcagttgtaagacagtgattagggtggggggggagggaggagggagaggatatgatgaaagatggcactcacggctgacacgaaaacgctaccatcaccaggctacaacacagagaacccgccagaccactcacagacaagaacagaggacaccatactccaagcgcgccaccaaacgaccaagaacgcaaaaacacaccgccaccacagcccccataaaccacaacaactggcgcgccacaggtcaccacctcatggcaattctccatgacatcacgaccacagccgacacataccacacgcggcccacagcacagccatcacacaacgcgaccgcagcgaggcccctacaccctggaagcaaaacagcaaagcggcaccccaacagagggacgactcgaggaccaaacactggagagaatagcaccgacgccgcacccacgacgatagcgcccccagacagcggcacaccgccacaagactacgccatggaccacagagactcaagacgcaaaaaccacaggagcacgacc

SEQ ID NO: 5254 - DNA, 1215 bp, Homo sapiens
gagtgctcgaactggctccagagccgtgagttcggcatgcaagagcggaagaaacgcggctggtaccccggaagcagtcgctgcaacttccgggaggtgcttgtgtgcctggtgcgggagctacggggcccagggattgtgtttaaagtagtgcttctaccaacatgtcccgtggttccagcgccggttttgaccgccacattaccattttttcacccgagggtcggctctaccaagtagaatatgcttttaaggctattaaccagggtggccttacatcagtagctgtcagagggaaagactgtgcagtaattgtcacacagaagaaagtacctgacaaattattggattccagcacagtgactcacttattcaagataactgaaaacattggttgtgtgatgaccggaatgacagctgacagcagatcccaggtacagagggcacgctatgaggcagctaactggaaatacaagtatggctatgagattcctgtggacatgctgtgtaaaagaattgccgatatttctcaggtctacacacagaatgctgaaatgaggcctcttggttgttgtatgattttaattggtatagatgaagagcaaggccctcaggtatataagtgtgatcctgcaggttactactgtgggtttaaagccactgcagcgggagttaaacaaactgagtcaaccagcttccttgaaaaaaaaagtgaagaagaaatttgattggacatttgaacagacagtggaaactgcaattacatgcctgtctactgttctatcaattgatttcaaaccttcagaaatagaagttggagtagtgacagttgaaaatcctaaattcaggattcttacagaagcagagattgatgctcaccttgttgctctagcagagagagactaaacattgtcgttagtttaccagatccgtgatgccacttacctgtgtgtttggtaacaacaaaccaacatcatggaggtccctggattgaaaaaggagcctctcccactcctcctaccaccgaagtggttaggactctatataaataaaaacaaggcttttggaaaaaaaaaaaaaaaaaaaaaaaaaaaaaaaaaaaaaaaaaaaaaaaaaaaaaaaaaaaaaaaaaaaaaaaaaaaaaaaaaaaaaaaaaaaaaaaaaaaaaaaaaaaaaaaaaaaaaaaaaaaaaaaaaaaaaaaaaaaaaaaaaaaa

SEQ ID NO: 5255 - DNA, 1578 bp, Homo sapiens
tctgcattttacttttctattcaaaatattttatctaactagggtagtagagaacaaaaaacaaatgcccagttttattttattcagttaatcctttgtgcattgaagactttagattcctctctgcggtagacgtgcacttataagtatttgatggggtggattcgtggtcggaggtctcgacacagctgggagatgagtgaatttcataattataactggatctgaagaagagtgatttttcaacacgatggcaaaagcaaagatgtccagtagtcaaaagcaaatgtagagaaaatgcatctccattttttttctgctgcttcatcgctgtagccatgggaatccgtttcattattatggtagcaatatggagtgctgtattcctaaactcattattcaaccaagaagttcaaattcccttggaccgaaagttactgtggcccatgtcctaaaaactggatatgttacaaaaataactgctaccaattttttgatgagagtaaaaactggtatgagagccaggcttcttgtatgtctcaaaatgccagccttctgaaagtatacagcaaagaggaccaggatttacttaaactggtgaagtcatatcatggatgggactagtacacattccaacaaatggatcttggcagtgggaagatggctccattctctcacccaacctactaacaataattgaaatgcagaagggagactgtgcactctatgcctcgagctttaaaggctatatagaaaactgttcaactccaaatacatacatctgcatgcaaaggactgtgtaaggttgatcaaccatctcaataaaagccaggaacggagaagagattacaccagcggtaacactgccaaccgagacttaaggaaaaaaacaaaaacaggaacaaaatgaccaaagactgtcagatttcttagactccacaggaccaaaccatagaacaatttcactgcaaacatgcatgattctccaagacaaaagaagagagatcctaaaggcaattcagatatccccaaggctgcctctcccaccacaagcccagagtggatgggctgggggaggggtgctgttttaatttctaaaggtaggaccaacacccaggggatcagtgaaggaagagaaggccagcagatcagtgagagtgcaaccccaccctccacaggaaattgcctcatgggcagggccacagcagagagacacagcatgggcagtgccttccctgcctgtgggggtcatgctgccacttttaatgggtcctccacccaacggggtcagggaggtggtgctgccccagtgggccatgattatcttaaaggcattattctccagccttaagatcttaggacgtttcctttgctatgatttgtacttgcttgagtcccatgactgtttctcttcctctctttcttccttttggaatagtaatatccatcctatgtttgtcccactattgtattttggaagcacataacttgtttggtttcacaggttcacagttaagaaggaattttgcctctgaataaatagaatcttgagtctcatgcaaaaaaaaaaaaaaaaaa

SEQ ID NO: 5256 - DNA, 3076 bp, Homo sapiens
  misc_feature (45)..(68): n is a, c, g, or t
ttttttcccaatgatgctttaaggaagttatcattgttctgcttnnnnnnnnnnnnnnnnnnnnnnnnaatctccagatgaatcctcattttactccttgttatcccagagtttcgaacaggtcgtgctgaccagaatgaacaggagatacctgtagcttgctcacttggcaaagtttgtttgttttttgctgctttcctcccatcttgtttcttggcgacagggcgtgtttgtttacggtttcccgctgtccaaaataaaaaaatatggattaatgaggcccttgataaatgagcagaattttgatgggacatcagatgaagaacatgagcaagagcttctgcctgttcagaagcattaccaacttgatgatcaagagggcatttcatttgtacaaactcttatgcaccttcttaaaggaaatattggaactggccttttaggacttccattggcaataaaaaatgcaggcatagtgcttggaccaatcagccttgtgtttataggaattatttctgttcactgtatgcacatattggtttaaaaagtcaacattaggttatagtgacactgtgagctttgctatggaagtgagtccttggagttgtcttcagaagcaagcagcatgggggcggagtgtggttgacttttttctggtgataacacagctgggattctgtagtgtttatattgtcttcttagctgaaaatgtgaaacaagttcatgaaggattcctggagagtaaagtgtttatttcaaatagtaccaattcatcaaacccttgtgagagaagaagtgttgacctaaggatatatatgctttgctttcttccatttataattcttttggtcttcattcgtgaactaaagaatctatttgtactttcattccttgccaacgtttccatggctgtcagtcttgtgataatttaccagtatgttgtcaggaacatgccagatccccacaaccttccaatagtggctggttggaagaaatacccactcttttttggtactgctgtatttgcctttgaaggcataggagtggtccttccactggaaaaccaaatgaaagaatcaaagcgtttccctcaagcgttgaatattggcatggggattgttacaactttgtatgtaacattagctactttaggatatatgtgtttccgtgatgaaatcaaaggcagcataactttaaatcttccccaagatgtatggttatatcaatcagtgaaaattctatattcctttggcatttttgtgacatattcaattcagttctatgttccagcagagatcattatccctgggatcacatccaaatttcatactaaatggaagcaaatctgtgaatttgggataagatccttcttggttagtattacttgtgccggagcaattcttattcctcgtttagacattgtgatttccttcgttggagctgtgagcagcagcacattggccctaatcctgccacctttggttgaaattcttacattttcgaaggaacattataatatatggatggtcctgaaaaatatttctatagcattcactggagttgttggcttcttattaggtacatatataactgttgaagaaattatttatcctactcccaaagttgtagctggcactccacagagtccttttctaaatttgaattcaacatgcttaacatctggtttgaaatagtaaaagcagaatcatgagtcttctatttttgtcccatttctgaaaattatcaagataactagtaaaatacattgctatatacataaaaatggtaacaaactctgttttctttggcacgatattaatattttggaagtaatcataactctttaccagtagtggtaaacctatgaaaaatccttgcttttaagtgttagcaatagttcaaaaaattaagttctgaaaattgaaaaaattaaaatgtaaaaaaattaaagaataaaaatacttctattattcttttatctcagtaagaaataccttaaccaagatatctctcttttatgctactcttttgccactcacttgagaacagaataggatttcaacaataagagaataaaataagaacatgtataacaaaaagctctctccagatcatccctgtgaatgccaaagtaaactttatgtacagtgtaaaaaaaaaaaaatctcagttatgtttttattagccaaattctaatgattggctcctggaagtatagaaaactcccattaacataatataagcatcagaaaattgcaaacactagaattaattttacactctaatggtagttgatcttcatagtcaagaggcactgttcaagatcatgacttagtgtttcaatgaaatttgaaaagggactttaaaacttatccagtgcaactcccttgtttttcgtcagaggaaaaggaggcctagaaaggttaagtaacttggtcgagaccactcagccttgagatcaagaaaacctaatcttctgactcccaggccaggatgttttatttctcacatcatgtccaagaaaaagaataaattatgttcagcttaattttagtgttgaatctatttgattatattttaatactttgaaaatgaatgtgtgatttttaatagtatatgtgacctgagcagaaaatcagggaactccaagaagcctacactgtggccatataaacctcagcaagagaaagaagctatgttcttttaaaacagaatagagaccgcttgctggtgaaactcctggctagtaagatgtgtgtctagctatactatttgtggcttgagcttttttaattattaccttcctttcctgagttttgtaggcaccacattcctgaatggcagaaaatagacacctcagaaaacggaggatttgtggactctttccagccctgtggcttttcttatcacagccttttatttattatgagcagaataaaagaatcagctaggtgtggtggtctgtgcttataatcccagctactctggaggataagttgggaggatcacttgagaggccaggagcttgagaccagcctgggcagcatagtgagacctcgactctataaaacataaa

SEQ ID NO: 5257 - DNA, 1766 bp, Homo sapiens
ggcacgaggcctggctctactgcaggcgctgggggttggggtgggggagaggcccagggcacatgatgccgcccccagcccgcccagcacatgacccaggcaggccggcggggtcctggcacacccgagccgcgtccgcgaacacagcccatggcctccccgcgcctagggaccttctgctgccccacgcgggacgcagccacgcagctcgtgctgagcttccagccgcgggccttccacgcgctctgcctgggcagcggcgggctccgcttggcgctgggccttctgcagctgctgcccggccgccggcccgcgggccccgggtcccccgcgacgtccccgccggcctcggtccgcatcctgcgcgctgccgctgcctgcgaccttctcggctgcctgggtatggtgatccggtccaccgtgtggttaggattcccaaattttgttgacagcgtctcggatatgaaccacacggaaatttggcctgctgctttctgcgtggggagtgcgatgtggatccagctgttgtacagtgcctgcttctggtggctgttttgctatgcagtggatgcttatctggtgatccggagatcggcaggactgagcaccatcctgctgtatcacatcatggcgtggggcctggccaccctgctctgtgtggagggagccgccatgctctactacccttccgtgtccaggtgtgagcggggcctggaccacgccatcccccactatgtcaccatgtacctgcccctgctgctggttctcgtggcgaaccccatcctgttccaaaagacagtgactgcagtggcctctttacttaaaggaagacaaggcatttacacggagaacgagaggaggatgggagccgtgatcaagatccgatttttcaaaatcatgctggttttaattatttgttggttgtcgaatatcatcaatgaaagccttttattctatcttgagatgcaaacagatatcaatggaggttctttgaaacctgtcagaactgcagccaagaccacatggtttattatgggaatcctgaatccagcccagggatctcttgtctttggccttctacggctggacaggatgcagcctgggttttcagtctcccaggaaggagatccagtgggaatcactgaccacctcggctgctgagggggctcacccatccccactgatgccccatgaaaaccctgcttccgggaaggtgtctcaagtgggtgggcagacttctgacgaagccctgagcatgctgtctgaaggttctgatgccagcacaattgaaattcacactgcaagtgaatcctgcaacaaaaatgagggtgaccctgctctcccaacccatggagacctatgaaggggatgtgctgggggtccagaccccatattcctcagactcaacaattcttgttctttagaactgtgttctcaccttcccaacactgcactgccgaagtgtagcggcccccaaaccttgctctcatcaccagttagagcttcttcccgaagggcctttaggataggagaaagggttcatgcacacacgtgtgagaatggaagagccccctccagaccactctacagctgctctagccttagttgccactaggaagttttctgaggctggctgtaaagtaagtgtaaggtccacatccttggggaagtagttaaataaaatagttatgactgaaaaaaaaaaaaaaaaaaaaaaaaaaaaaaaaaattctagcaaaagaaaataaatatatgtacagttaaaa

SEQ ID NO: 5258 - DNA, 2536 bp, Homo sapiens
ggcacgaggattaattaaaattgtgagaaataattcatgacatgttaggtaacttgtcatgtgttttgaatttttttaaaaacccaactgtttgacaaaatatagaacccaaattggtactttcttagaccagtgtaacctcacacctcagttttgcttttccaaccctgacttgaaaggcatatttgtatctttttattagtgatagtgaagctgtgacactaaccttttatacaaaagagtaaagaaagaaaaactacagcgattaagatgagaacagttctgcagttgttgaactagatcacagcattgtaggcagaataaaaaatgttcatatctgagaatattcctttcgccatcttttcccaaggccagacctcctggtggagcacagttaaaagtaacattctgggcctttgtaatcggagggctgtgtctccagctggcagcctttgttttaatatataatgcaggactgtggaaaacagttggcatagaatattttcacctaaaaaaagaaagaaaagacatacaaaactggattaattgcaaaaagagaatacagtaaaatcccatataactggacaaagctagaagaacctttagaagatttgtctgaaaacagatttcaagagtgagcttttatacactgctcactaatttgcttgattactaccaactcttcttaaagttaacacgtttaaataaggtatttctggacttcctagcctttcagcaagcttagaggaactagccattagctagtgatgtaaaaatattttggggactgatgcccttaaaggttatgcccttgaaagttcttaccttttctctagtgatattaaggaacgagtgggtagtgttctcagggtgaccagctgccctaaagtgcctgggattgagggtttccctggatgcgggactttccctggatacaaaacttttagcagagttttgtatatatgtggatttttctgataagtagcacatcagaggccttaaccactgcccaaaagcgattctccatttgagagtacatatcttgaacttaaagaaattcatttgctctgattttttaatcttgtaaagtttttgctaaactcaaaacaagtcccaggcacaccagaaggagctgaccaccttaggtgttcttgtgatttatccttacttccctatgttgtcatagttgcttctaaactcagctgcactatggctgtcaacatttctgatacttattgggatatgtgccatccagtcatttagtactttgaatggaacatgagatttataacacaggtaatagctgaaggtaccagtatggtggtgagactcacacttagtgatccagctaaggtaactgatgttataatggaacagagaagaggccaactagatagctaagttcttctgaacctatgtgtatatgtaagtacaaatcatgcgtccttatggggttaaacttaatctgaaatttacatttttcatagtaaaaggaaaccaattgttgcagatttcttttcttgtgaggaaatacatggcctttgatgctctggcgtctactgcatttcccagtctgttctgctcgagaagccagaatgtgttgttaacatttttccgtgaatgttgtgttaaaatgattaaatgcatcagccaatggcaagtgaaggaattgggtgtcctgatgcagactgagcagtttctctcaattgtagcctcatactcataaggtgcttaccagctagaacattgagcacgtgaggtgagattttttttctctgatggcattaactttgtaatgcaatatgatggatgcagaccctgttcttgtttccctctggaagtccttagtggctgcatccttggtgcactgtgatggagatattaaatgtgttctttgtgagctttcgttctatgattgtcaaaagtacgatgtggttccttttttatttttattaaacaatgagctgaggctttattacagctggttttcaagttaaaattgttgaatactgatgtctttctcccacctacaccaaatattttagtctatttaaagtacaaaaaaagttctgcttaagaaaacattgcttacatgtcctgtgatttctggtcaatttttatatatatttgtgtgcatcatctgtatgtgctttcactttttaccttgtttgctcttacctgtgttaacagccctgtcaccgttgaaaggtggacagttttcctagcattaaaagaaaggccatttgagaaaaagaaaaaaacacgggaagaacgaaaagcaaatatcagagagtagaatcacgacggaatggaggaggaacgataaagacaaagacaagaaagggggggggcacacaaataaaaatcaccaggggggaagccgatgataccaaccccagcttgtaacgaagagggccccaagcggaggatgataatacaagggagcgcgggcgggttaaacacggggggaggaaaaagtcccgggcactgggagagaccctttgggggcgatggacgcccacagtatgccgggaat

SEQ ID NO: 5259 - DNA, 4738 bp, Homo sapiens
  misc_feature (1297)..(1316): n is a, c, g, or t
tgggtgaacgaaatattgcatatgcttacccatcgagcatcccaaatacaaaaatggaaacttgaaatgctccaataagcattctcttagagtgtcatgtactgctcaaaaaatgctggattgatgaacacttcagattttggatcatggggttgtaatgcttaatccatagtagataaaggcactttgtcagctccatcagagcaagcttcctcagaagcactacctggtgatcactctcattccttcccaaagtctcatttctctctctctctctctgtctctggagacagtgtcttgctctgtcccccaggctggagtgcagtggcatgatcaccaccaggttcctggtggtgatagaagataaaagcagaatcttaaatgaaagcaaaatagaaattgagaggctgcagtctctcacagagaacctgaccaaggagcacttgatgttagaagaagaactgcggaacctgaggctggagtacgatgacctgaggagaggacgaagcgaagcggacagtgataaaaatgcaaccatcttggaactaaggagccagctgcagatcagcaacaaccggaccctggaactgcaggggctgattaatgatttacagagagagagggaaaatttgagacaggaaattgagaaattccaaaagcaggctttagaggcatctaataggattcaggaatcaaagaatcagtgtactcaggtggtacaggaaagagagagccttctggtgaaaatcaaagtcctggagccagacaaggcaaggctgcagaggctggaggatgagctgaatcgtgcagaatcaactctagaggcagaaaccagggtgaaacagcgcctggagtgtgagaaacagcaaattcagaatgacctgaatcagtggaagactcaatattcccgcaaggaggaggctatttaggaagatagaatcggaaagagaaaagagtgagagagagaagaacagtcttaggagtgagatcgaaagactccaagcagagatcaagagaattgaagagaggtgcaggcgtaagctggaggattctaccagggagacacagtcacagttagaaacagaacgctcccgatatcagagggagattgataaactcagacagcgcccatatgggtcccatcgagagacccagactgagtgtgagtggaccgttgacacctccaagctggtgtttgatgggctgaggaagaaggtgacagcaatgcagctctatgagtgtcagctgatcgacaaaacaaccttggacaaactattgaaggggaagaagtcagtgnnnnnnnnnnnnnnnnnnnnccagccattccttcggggtgcaggatctatcgctggagcatctgcttctcctaaggaaaaatactctttggtagaggccaagagaaagaaattaatcagcccagaatccacagtcatgcctctggaggcccaggcagctacaggtggtataattgatccccatcggaatgagaagctgactgtcgacagtgccatagctcgggacctcattgacttcgatgaccgtcagcagatatatgcagcagaaaaagctatcactggttttgatgatccattttcaggcaagacagtatctgtttcagaagccatcaagaaaaatttgattgatagagaaaccggaatgcgcctgctggaagcccagattgcttcagggggtgtagtagaccctgtgaacagtgtctttttgccaaaagatgtcgccttggcccgggggctgattgatagagatttgtatcgatccctgaatgatccccgagatagtcagaaaaactttgtggatccagtcaccaaaaagaaggtcagttacgtgcagctgaaggaacggtgcagaatcgaaccacatactggtctgctcttgctttcagtacagaagagaagcatgtccttccaaggaatcagacaacctgtgaccgtcactgagctagtagattctggtatattgagaccgtccactgtcaatgaactggaatctggtcagatttcttatgacgaggttggtgagagaattaaggacttcctccagggttcaagctgcatagcaggcatatacaatgagaccactatacagaagcttggcatttatgaggccatgaaaattggcttagtccgacctggtactgctctggagttgctggaagcccaagcagctactggctttatagtggatcctgttagcaacttgaggttaccagtggaggaagcctacaagagaggtctggtgggcattgagttcaaagagaagctcctgtctgcagaacgagctgtcactgggtataatgatcctgaaacaggaaacatcatctctttgttccaagccatgaataaggaactcatcgaaaagggccacggtattcgcttattagaagcacagatcgcaaccggggggatcattgacccaaaggagagccatcgtttaccagttgacatagcatataagaggggctatttcaatgaggaactcagtgagattctctcagatccaagtgatgataccaaaggattttttgaccccaacactgaagaaaatcttacctatctgcaactaaaagaaagatgcattaaggatgaggaaacagggctctgtcttctgcctctgaaagaaaagaagaaacaggtgcagacatcacaaaagaataccctcaggaagcgtagagtggtcatagttgacccagaaaccaataaagaaatgtctgttcaggaggcctacaagaagggcctaattgattatgaaaccttcaaagaactgtgtgagcaggaatgtgaatgggaagaaataaccatcacgggatcagatggctccaccagggtggtcctggtagatagaaagacaggcagtcagtatgatattcaagatgctattgacaagggccttgttgacaggaagttctttgatcagtaccgatccggcagcctcagcctcactcaatttgctgacatgatctccttgaaaaatggtgtcggcaccagcagcagcatgggcagtggtgtcagcgatgatgtttttagcagctcccgacatgaatcagtaagtaagatttccaccatatccagcgtcaggaatttaaccataaggagcagctctttttcagacaccctggaagaatcgagccccattgcagccatctttgacacagaaaacctggagaaaatctccattacagaaggtatagagcggggcatcgttgacagcatcacgggtcagaggcttctggaggctcaggcctgcacaggtggcatcatccacccaaccacgggccagaagctgtcacttcaggacgcagtctcccagggtgtgattgaccaagacatggccaccaggctgaagcctgctcagaaagccttcataggcttcgagggtgtgaagggaaagaagaagatgtcagcagcagaggcagtgaaagaaaaatggctcccgtatgaggctggccagcgcttcctggagttccagtacctcacgggaggtcttgttgacccggaagtgcatgggaggataagcaccgaagaagccatccggaaggggttcatagatggccgcgccgcacagaggctgcaagacaccagcagctatgccaaaatcctgacctgccccaaaaccaaattaaaaatatcctataaggatgccataaatcgctccatggtagaagatatcactgggctgcgccttctggaagccgcctccgtgtcgtccaagggcttacccagcccttacaacatgtcttcggctccgggctcccgctccggctcccgctcgggatctcgctccggatctcgctccgggtcccgcagtgggtcccggagaggaagctttgacgccacagggaattcttcctactcttattcctactcatttagcagtagttctattgggcactagtagtcagttgggagtggttgctataccttgacttcatttatatgaatttccactttattaaataatagaaaagaaaatcccggtgcttgcagtagagtgataggacattctatgcttacagaaaatatagccatgattgaaatcaaatagtaaaggctgttctggctttttatcttcttagctcatcttaaataagcagtacacttggatgcagtgcgtctgaagtgctaatcagttgtaacaatagcacaaatcgaacttaggatttgtttcttctcttctgtgtttcgatttttgatcaattctttaattttggaagcctataatacagttttctattcttggagataaaaattaaatggatcactgatattttagtcattctgcttctcatctaaatatttccatattctgtattaggagaaaattaccctcccagcaccagcccccctctcaaacccccaacccaaaaccaagcattttggaatgagtctcctttagtttcagagtgtggattgtataacccatatactcttcgatgtacttgtttggtttggtattaatttgactgtgcatgacagcggcaatcttttctttggtcaaagttttctgtttattttgcttgtcatattcgatgtactttaaggtgtctttatgaagtttgctattctggcaataaacttttagacttttgaaaaaaaaaaaaaaaaaaaaaaaatgtttataagcatgtataaacatttagcatatttttatcataggtctaaaaatatttgtttactaaatacctgtgaagaaataccattaaaaaactatttggttctgaaaa

SEQ ID NO: 5260 - DNA, 2904 bp, Homo sapiens
  misc_feature (1554)..(1643): n is a, c, g, or t
agcttccctggtggtctagtgttttttattcggcgctctcaccgccgcggcccgggttcgtttcccggtcagggaatgaggtttcggcacgaggctccggcgcagtgttgggactgtctgggtatcggaaagcaagcctacgttgctcactattacgtataatccttttcttttcaagatgcctgaggaagtgcaccatggagaggaggaggtggagacttttgcctttcaggcagaaattgcccaactcatgtccctcatcatcaataccttctattccaacaaggagattttccttcgggagttgatctctaatgcttctgatgccttggacaagattcgctatgagagcctgacagacccttcgaagttggacagtggtaaagagctgaaaattgacatcatccccaaccctcaggaacgtaccctgactttggtagacacaggcattggcatgaccaaagctgatctcataaataatttgggaaccattgccaagtctggtactaaagcattcatggaggctcttcaggctggtgcagacatctccatgattgggcagtttggtgttggcttttattctgcctacttggtggcagagaaagtggttgtgatcacaaagcacaacgatgatgaacagtatgcttgggagtcttctgctggaggttccttcactgtgcgtgctgaccatggtgagcccattggcaggggtaccaaagtgatcctccatcttaaagaagatcagacagagtacctagaagagaggcgggtcaaagaagtagtgaagaagcattctcagttcataggctatcccatcaccctttatttggagaaggaacgagagaaggaaattagtgatgatgaggcagaggaagagaaaggtgagaaagaagaggaagataaagatgatgaagaaaaacccaagatcgaagatgtgggttcagatgaggaggatgacagcggtaaggataagaagaagaaaactaagaagatcaaagagaaatacattgatcaggaagaactaaacaagaccaagcctatttggaccagaaaccctgatgacatcacccaagaggagtatggagaattctacaagagcctcactaatgactgggaagaccacttggcagtcaagcacttttctgtagaaggtcagttggaattcagggcattgctatttattcctcgtcgggctccctttgacctttttgagaaaaaaaaaaaaaaaaaaccacctttcaaactcttttgtcccgcccggggggttcattcatgggacaacctggggaatgaatttgataaccaaaagtatcctcaatttttatccccggggggtgggttgaactctgagagggatcttgccccctggaaaattctcccgaagaaatggctcccaccaaacgcaaaacttgtaagaatgcttgagcctttctgacgggaaacagggatccaaaatttgaggttctaaattcagggaccaaaacaaacgggccgggaggggcaaccccgagagaaaacgcaattcggcaaactaacggaaaggccagggccgannnnnnnnnnnnnnnnnnnnnnnnnnnnnnnnnnnnnnnnnnnnnnnnnnnnnnnnnnnnnnnnnnnnnnnnnnnnnnnnnnnnnnnnnnaaacgtctaagagtcgcacagaacccagccgttagacacagggccagacgccaatagctcgtgccagccaaccgcgttcgaggggaatagagcgggactgtgtgcagcagctcaaggaatttgatgggaagagcctggtctcagttaccaaggagggtctggagctgcctgaggatgaggaggagaagaagaagatggaagagagcaaggcaaagtttgagaacctctgcaagctcatgaaagaaatcttagataagaaggttgagaaggtgacaatctccaatagacttgtgtcttcaccttgctgcattgtgaccagcacctacggctggacagccaatatggagcggatcatgaaagcccaggcacttcgggacaactccaccatgggctatatgatggccaaaaagcacctggagatcaaccctgaccaccccattgtggagacgctgcggcagaaggctgaggccgacaagaatgataaggcagttaaggacctggtggtgctgctgtttgaaaccgccctgctatcttctggcttttcccttgaggatccccagacccactccaaccgcatctatcgcatgatcaagctaggtctaggtattgatgaagatgaagtggcagcagaggaacccaatgctgcagttcctgatgagatcccccctctcgagggcgatgaggatgcgtctcgcatggaagaagtcgattaggttaggagttcatagttggaaaacttgtgcccttgtatagtgtccccatgggctcccactgcagcctcgagtgcccctgtcccacctggctccccctgctggtgtctagtgtttttttccctctcctgtccttgtgttgaaggcagtaaactaagggtgtcaagccccattccctctctacttcttgacagcaggattggatgttgtgtattgtggtttattttattttcttcattttgttctgaaattaaagtatgcaaaataaagaatatgccgtttttatacaaaaaaaaaaaaaaaaaaaaaaaaaaaaaaaaaaaaaaaaaaatcctcgggggcaattatattctcgggtttgcggcaacaaaagaggggctcagacaaaagcggcgcaagcatggctcaaaggccgttgatccgaggaaccccagagtatcgtgggaacaacagcggggaaacaacccggcggggcacccccataatagggagggccggaaacaagttcgcaagaagcccgggtaaacgcgcaaaagacgcgcggaacacaa

SEQ ID NO: 5261 - DNA, 5941 bp, Homo sapiens
  misc_feature (3535)..(3552): n is a, c, g, or t
ggagacctagatctttccagttaatcacacaacaaacttagctcatcgcaataaaaagcagctcagagccgactggctcttttaggcactgactccgaacaggattctttcacccaggcatctcctccagagggatccgccagcccgtccagcagcaccatgtgggtgaccaaactcctgccagccctgctgctgcagcatgtcctcctgcatctcctcctgctccccatcgccatcccctatgcagagggacaaaggaaaagaagaaatacaattcatgaattcaaaaaatcagcaaagactaccctaatcaaaatagatccagcactgaagataaaaaccaaaaaagtgaatactgcagaccaatgtgctaatagatgtactaggaataaaggacttccattcacttgcaaggcttttgtttttgataaagcaagaaaacaatgcctctggttccccttcaatagcatgtcaagtggagtgaaaaaagaatttggccatgaatttgacctctatgaaaacaaagactacattagaaactgcatcattggtaaaggacgcagctacaagggaacagtatctatcactaagagtggcatcaaatgtcagccctggagttccatgataccacacgaacacagctttttgccttcgagctatcggggtaaagacctacaggaaaactactgtcgaaatcctcgaggggaagaagggggaccctggtgtttcacaagcaatccagaggtacgctacgaagtctgtgacattcctcagtgttcagaagttgaatgcatgacctgcaatggggagagttatcgaggtctcatggatcatacagaatcaggcaagatttgtcagcgctgggatcatcagacaccacaccggcacaaattcttgcctgaaagatatcccgacaagggctttgatgataattattgccgcaatcccgatggccagccgaggccatggtgctatactcttgaccctcacacccgctgggagtactgtgcaattaaaacatgcgctgacaatactatgaatgacactgatgttcctttggaaacaactgaatgcatccaaggtcaaggagaaggctacaggggcactgtcaataccatttggaatggaattccatgtcagcgttgggattctcagtatcctcacgagcatgacatgactcctgaaaatttcaagtgcaaggacctacgagaaaattactgccgaaatccagatgggtctgaatcaccctggtgttttaccactgatccaaacatccgagttggctactgctcccaaattccaaactgtgatatgtcacatggacaagattgttatcgtgggaatggcaaaaattatatgggcaacttatcccaaacaagatctggactaacatgttcaatgtgggacaagaacatggaagacttacatcgtcatatcttctgggaaccagatgcaagtaagctgaatgagaattactgccgaaatccagatgatgatgctcatggaccctggtgctacacgggaaatccactcattccttgggattattgccctatttctcgttgtgaaggtgataccacacctacaatagtcaatttagaccatcccgtaatatcttgtgccaaaacgaaacaattgcgagttgtaaatgggattccaacacgaacaaacataggatggatggttagtttgagatacagaaataaacatatctgcggaggatcattgataaaggagagttgggttcttactgcacgacagtgtttcccttctcgagacttgaaagattatgaagcttggcttggaattcatgatgtccacggaagaggagatgagaaatgcaaacaggttctcaatgtttcccagctggtatatggccctgaaggatcagatctggttttaatgaagcttgccaggcctgctgtcctggatgattttgttagtacgattgatttacctaattatggatgcacaattcctgaaaagaccagttgcagtgtttatggctggggctacactggattgatcaactatgatggcctattacgagtggcacatctctatataatgggaaatgagaaatgcagccagcatcatcgagggaaggtgactctgaatgagtctgaaatatgtgctggggctgaaaagattggatcaggaccatgtgagggggattatggtggcccacttgtttgtgagcaacataaaatgagaatggttcttggtgtcattgttcctggtcgtggatgtgccattccaaatcgtcctggtatttttgtccgagtagcatattatgcaaaatggatacacaaaattattttaacatataaggtaccacagtcatagctgaagtaagtgtgtctgaagcacccaccaatacaactgtcttttacatgaagatttcagagaatgtggaatttaaaatgtcacttacaacaatcctaagacaactactggagagtcatgtttgttgaaattctcattaatgtttatgggtgttttctgttgttttgtttgtcagtgttattttgtcaatgttgaagtgaattaaggtacatgcaagtgtaataacatatctcctgaagatacttgaatggattaaaaaaacacacaggtatatttgctggatgataaagatttcatgggaaaaaaaatcaattaatctgtctaagctgctttctgatgttggtttcttaataatgagtaaaccacaaattaaatgttattttaacctcaccaaaacaatttataccttgtgtccctaaattgtagccctatattaaattatattacatttcatattctatatattatagttcattcatttctcttcaccatgtatcctgcaatactggtacacgaacacactttttacaaaaccacatacccatgtacacatgcctaggtacacatgtacatgcactacagtttaaattatgatgtacttaatgtaacctctaaatattttagaagtatgtacctatagttttacctcaaaaaaatagaaatctctaaagaccagtagaaatattaaaaaatgatgcaaaatcaaaatgagtggctaattctccatacgtaatctgcagatgatcttctctggttgacattttacgtgtggccatcaccccgggttaaataacacctaatctaggtgtttacatgtattcaatatcctagtttgtttcatgtagtttctaattcttaaaggaaagagggtaataattctatttgtgtaatttgtttcctccaaacttaaggccacttatttacacaagatatttgtatgtctactttcctaaagcatttcttcagtgctcagatcagtgtctaattgaagaagattaaaactgctttggtcattaaaaacgtatttaaataggttaattctaagacttgctgctgtgattgacttctagctcactgcctttaaattttaaaaaatttaagaggaaaattttcatgtctccaaagttttataaatacccttcatcaagtcatgcattaaagtatatattagagaaaaaaaaatactttnnnnnnnnnnnnnnnnnntagcctaataaagtttttttgaagtaaaagaaaacttgtaaagggaaagaaactagtttgtctaaactctgtattcattttttttttttttgaagtacagtggaatctgttgaatcagatattttatcaagatatctttattttttcttatttcatttttacaaagatcactcccaatgccatatgtaatagacatttaaatttcgtgttctgtatgacagccaaatgatcatatttatcattgtatttgtcatgtttagctaaaaatcatgtattgttgagaaatagaataacaaaaagtaataggataggctttgaatttttgcaaaaaatcttcctgtacaaaacatctttaaaaataattttttgagtggtgtgaatctagtattcccatttctctgatttagttttcttgagtgatttttatcaaggctaagtccccaaatgattccctaacagctctttagaataccgtttaatctggactaaaatggttttaagtttatggagagtttagtccacagaactaactggacttctggcggcaagtccagaaatgcttatacaaatttttttttcataataagatatgtgctggtatcaaggaacttaaagtggaagcaaaaagacatccaagtagttgctagtctccatcatcttatctgattgtatttctcttttccttatataatacaccattttcataagaacacctagaaatttcaagagtatattgccaaaatataaagtatatttcctagtttcttctggctgaaccagtgaaattttattgttgcatattaatgatatttttaaaacttttataaaaattgtcatacttttaaatactcacattttaaaaatacttcttttatgactcttcctctaaatttcctggaaatacagataaagattagctagatacaagatgcagctaagtatttagacattttgagcccagtatttttcattttattaaaggctaaaaacaataccaccaataaatcatcaaacaaactgtacaaaataattctgtctttgggaggctccttttgtgatagagggacatgggtggaattgacaatgaaagttagatgaacaaggtccgtgttattttaggtagtagaacagggtagagtcatgtcattatttgcgggcggaagatactatttaccacgtgttctttgctgaatcaattattaaacatttttaaaaatccaattatccactttattttgtgtcattgacaaaaggatcttttaagtcagaggtttcaatgtgatttttggcttggctgtttgaataatggttatgtactgttataattgtagacattttctcatgtctaccaggaattgaagtgtaaaactaaaatatttttcataatgcctctgccgtgcggaaggaatgataatccttttgtatacttctttaattttattgtaaaatgtgtaatgacttttacctatatgctgtgggcaggtcctcagtaaaatctattgagtcaatttctagtattaataggcttttgcttgctatctaagtgtttcaaattatgggaagtgtgagacactggaaggcaagaaaattaacaataatggcatgtgatagcaaaattgtatttcacttattcctgtgaatatttcttgttggtaccaatggtactgtacaaagtgaatgttatagccacaacattctcttgaaaagaacactgtcaagaagtgggaaattgctgtcaggcatttcgttgttgtttttaaactttttaaaaaagaaatactggttttgcaagatagagatcatgaggtaaataattttaataagctcttatactaaaaagccttaaatcgatttactgagattcaaaacatactattataatcaattatatcccatatatgtaggcaaactcatttaaaaaataaaattaattttggtaaaagtacatagtgtttgtttttaaaatacataattttaaaataaatcgcttgtcatgataaagtccaaaaagaagttatctttcaatattcaactaagtttggagctaagaatttactaatacaaaaaaaagttaaaatgttttggaccatatatatcttgacagtgtaacttttaagtaggttcatttccatttgcacagaaagtttctgtctttaggaaactgaaaatgaaatactgtggatgttatgactgtttgtcttgtatgtaaataggaaattaataagctgcctattgagtggtatagctgtatgcttacccaaaaaagggaacactgtggttatgacttgtattataaactttctgtagttaataaagttgttatttttataaccatgattatatattattattaataaaatattttatcgaaatgcttaaaaaaaaaaaa

SEQ ID NO: 5262 - DNA, 1394 bp, Homo sapiens
ttgttctccgctgtgatcctgtggcctgttattttgcgcgcgcggttctcgcgtgtacaccaagttgaaagtttgccgcttgtgaacattggcgtggcttttctcaagatgctcctcagcccccccgtgggataactagcgtggcctttttacagtagagtgtttcgcaggtccgaggcaatgtgtataagggcgtaattgtgggatttaccagaagcagattaacctcagaaatcctgtctggctggcagatttcaagtgtaaaaaaaaaaaaaaggtgggttggggggacctttttctttctagttgtctttaaggaaaattaattttacttttttttttgttctggccgaaatttttatgagatatctctcacttgtcttccactttgaaccggttaaagctcatagctgtcagctctgaatgaggaggggagaagcccctgggtctttctttgaaaggaatccgctgcttgagggctgcctccctcatggtgtgcgtgtcgtttctcttcctgacgcatcttgtgatatcagaggtaactatgcaaagcatccaggcggttctgaatgtgaagcactacacccagcagagtcccggtgccctctgtccccactgccggcccatgttctctctccggaggtcaccaaggaatgcacaggtttcgactaccagaaaggggagtccttgggttctttcaaaaaattcgtgaggagagctgtctacagtggaatagggggtctccctggggaatgcaggccaagtccttttattttaacatgatgtccatgaagaggtttgccgtctgggcagccctgtcggcaaggagcgtgcatactgcgtttgtgtaattgtttgctgtatctcccttccctctgagctgtattgttctttaatggctgtcttgcccttccaaaaaaaattgaaaaaaaaaaaaaaaaaaaaaaacccgaaaagtaaaaaaaaaaaaaaaaagttttgtttagtttactgtgaaatgaactgtatggcttatttacagtatttttaattcttaataaacacttgagctttgttatgagaaacaacaaaaaagaagaaacaacaaaaaaaacaaaacaaaagaaaaaaaaagaaaaacaagacaaaagaagaaaaaaaacaaacaacagaaaaaagaagcaacaagacaacaacgaaagacaagaaacaaagaaaagacaaagagaggacaacgaacagagacaacacaaacagacacacaagacaaaaagagaaagagcaagaacagagaggagcgacaagagacagaggacgaagaacacgaaggggaagaggaggggggcggagagagaaccgcgaggcggcgagagaaggagcaacctacgcgaaaagaaaaggagagcaaacaagag

SEQ ID NO: 5263 - DNA, 2205 bp, Homo sapiens
ttttttttttttttttttttttttttttttttttttttttttttctcccaaaaggtttatttgtcacatttaaagtacaaaatcaaatacacagatccagatatgtgaaccatatatacatatctatacaaccattatttagactttcacaaacctatctatacattctaatttatctatcaacactatcccttaagtaaaaagcaacatatctcttaagtaggtttgttatcagtaacactatcgaatgtaaattattttcacttcatcacttgaaacggtagaaataggtacctcctagaaactggagaattaccaagcatatatccaatttgtatagatttcttaaaatacattctataggaataattaaccgaagaaactgccaatcaaagtttttgggcatatttaacaaaacttgagtcatgggaagacataaagttaattaattgcattacaagagttttgttttgactttggttttaaatgcaaagaggggctttattttgtttagtacacagagcacttccaagtcatatttcctgtggagttatagtgataaatttctcaggggctacctatcgctattaaaatttgaactggtcactaaaggaggtatctgatttttaacactgtgtaggttatttcaaccaaaatgcaagaacacattctttaggagaaaggcagaaattttagacttctagatacagaatgtatgatgtcactgaacacacagatatcctgctgatcagggggattaagttaaaacagcttctttgttctaggatgtcatctatcttacatgcagaccacaggacactaagcctcaggtacctaaatatctccattccaggcacaggatttcattagtgcctgctcccacaactgggaacacatacatatagagatatgggtcattaccaaagatttatattaatggcttcacaacagcaacacaaaatgtactcaatgtcacatttccataggaaaggttatatatacactatacacttcagccttgaaatgtggacccaaaaaacattcaattttcagtaatcaatgaattcggtgagggtcccacaccctcaaatcctaatttagcacagcaaaagcccctccttggctgccaagcgctggcggggaactttgtcttgctggcagcctcttcatgatttggatgccagagtttcgtgatgatcctttcaatgttaagagcatagacagtatgtgtagggatgacttccctgtgcacctgcaaagcttcaaaaagatcgtacatgttcaccggaggcaaagatgcaggtagagtgtctccggagcatgccagcaggagtgcagcctgctgctcagcatcatcagggggtgggtgagaagctggattctgaccagcacagggagcagtaaaagctggagggctttctattaagttgttgtaagctactacactattcttcaggtatggctgcggggtcacgttactgccaaaggcatatttaaaatgaccatctcgtaaccgataagctttccttcttgacacaactgacgtcagtatatctttaaggtgattctccacagcatagacaacagctgaaacagcctcctcggtgacattgtccagcccatgctcataagcagtcactatcattctcccttcaagctggcctcgagtgggaagcatcattgtgtgggaacaaagtttcaagtcgtcatcatcttggggatcctttgccacaaattgctgggctcctgagagaggattttgaggctggaatctatgatcaaatttctgacgaacagaagaaagctttttctttcccttgggttttccaggttttgctgcggaaccccctggccaaggcaaagatccagcaccatctggtgtagaaaccaaaatctgacaacgcgtgagaatggccaggaggaaatcattgtgagaaaggtcgccattgctcgtgagaagtctgtgagcttcaaggtcaaactcctctttgctgatcttctgcttgaaccacagctttaggttagcccagtattgtttcacgttgtcccccagggcctcgcttaagttcttcttggccgcctccagctcgctcacaaaggtcgccattgctccgcgcccacgcgtccgcagaccgcgccggccaccagcgatcaaacagctcaacaaccaactcgacggaaggccttgctctggaagctaagccg

SEQ ID NO: 5264 - DNA, 992 bp, Homo sapiens
actggttgaacagcaaagagaaacccgggtctccagaatcacagtttagtccttctatattactgcaagtgacctgttttttctgaaggctccccgcaaatgaagtcctggaatggaaaaaatccataagtccataaattaacttgataaatattttagaacagacaaaagaaaatattgagtgatgtagttctaatcctcctaatatggaacctggcaagactgaatcattttactgtgaaatatataaacacaatagaatgagccaacatgatggtttctctccagtaagagtttttcttttggaaatgaggttaacctagccccaaatctagcaattctcataaaatccgattttagaattagcctcccagattaatctgaatgattgacttattttttcttaggcaagtcagtaagccacccactagacagccatatccagcaaaataagagaagtttccagatgccaaatgataagccaccatcaacccagcggggaagccttctggttggtttggctgtatgagattcaggaaggccagaatacccaaaattattcacacgacgttaacttattggtactggctaagcaatacatgtatttcctaaaggaggagatggtcttttggttgatttatggacacacttgtttcatctgactgtaaatatattgcatgctttattctgatggtgcactatttcatccagcaagcttttcatctgagaatgtttaatgttgaccttattcttagagcaagtagatctaaatatttttcagctgagttattagggagtcattattctgtggtacaatgctgcaaaaagcatcatgtggaagaatgggaactatgcttactttatgaagtgatgtataacacaatgaaatctgttttacaactacaaaaaaaaaaaaaaaaaaaaaaacttcgaggccatcctatgtccggggtgccggagaaaaagaaggttaattggaaaatgggcccccc

SEQ ID NO: 5265 - DNA, 2995 bp, Homo sapiens
  misc_feature (2746)..(2992): n is a, c, g, or t
gcgcgggggagccattaggaggcgaggagagaggagggcgcagctcccgcccagcccagccctgcccagccctgcccggaggcagacgcgccggcacgaggggacgcgataaatatgcagagcggaggcttcgcgcagcagagcccgcgcgccgcccgctccgggtgctgaatccaggcgtggggacacgagccaggcgccgccgccggagccagcggagccggggccagagccggagcgcgtccgcgtccacgcagccgccggccggccagcacccagggccctgcatgccaggtcgttggaggtggcagcgagacatgcacccggcccggaagctcctcagcctcctcttcctcatcctgatgggcactgaactcactcaagtgctgcccaccaaccctgaggagagctggcaggtgtacagctctgcccaggacagcgagggcaggtgtatctgcacagtggtcgccccacagcagaccatgtgttcacgggatgcccgcacaaaacagctgaggcagctactggagaaggtgcagaacatgtctcaatccatagaggtcttggacaggcggacccagagagacttgcagtacgtggagaagatggagaaccaaatgaaaggactggagtccaagttcaaacaggtggaggagagtcataagcaacacctggccaggcagtttaaggcgataaaagcgaaaatggatgaacttaggcctttgatacctgtgttggaagagtacaaggccgatgccaaattggtattgcagtttaaagaggaggtccagaatctgacgtcagtgcttaacgagctgcaagaggaaattggcgcctatgactacgatgaacttcagagcagagtgtccaatcttgaagaaaggctccgtgcatgcatgcaaaaactagcttgcgggaagttgacgggcatcagtgaccccgtgactgtcaagacctccggctcgaggttcggatcctggatgacagaccctctcgcccctgaaggcgataaccgggtgtggtacatggacggctatcacaacaaccgcttcgtacgtgagtacaagtccatggttgacttcatgaacacggacaatttcacctcccaccgtctcccccacccctggtcgggcacggggcaggtggtctacaacggttctatctacttcaacaagttccagagccacatcatcatcaggtttgacctgaagacagagaccatcctcaagacccgcagcctggactatgccggttacaacaacatgtaccactacgcctggggtggccactcggacatcgacctcatggtggacgagagcgggctgtgggccgtgtacgccaccaaccagaacgctggcaacatcgtggtcagtaggctggaccccgtgtccctgcagaccctgcagacctggaacacgagctaccccaagcgcagcgccggggaggccttcatcatctgcggcgacgtggttacgtcaccaacggctactcagggggtaccaaggttcactatgcataccagaccaatgcttccacctatgaatacatcgacatcccattccagaacaaatactcccacatctccatgctggactacaaccccaaggaccgggccctgtatgcctggaacaacggccaccagatcctctacaacgtgaccctcttccacgtcatccgctccgacgagttgtagctccctcctcctggaagccaagggcccacgtcctcaccacaaagggactcctgtgaaactgctgccaaaaagataccaataacactaacaataccgatcttgaaaaatcatcagcagtgcggattctgacatcgagggatggcattacctccgtgtttctccctttcgagccggcgggccacagacgtcggaagaaactcccgtatttgcagctggaactgcagcccacggcgccccggttttcctccccgccctgtccctctctggtcaaacaacatactaaagaggcgaggcaatgactgttggccagttctcaccggggaaaaacccactgttaggatggcatgaacatttccttagatcgtggtcagctccgaggaatgtggcgtccaggctctttgagagccatgggctgcacccggccgtaggctagtgtaactcgcatcccattgcagtgccgtttcttgactgtgttgctgtctcttagattaaccgtgctgaggctccacatagctcctggacctgtgtctagtacatactgaagcgatggtcagagtgtgtagagtgaagttgctgtgcccacattgtttgaactcgcgtaccccgtagatacattgtgcaacgttcttctgttattcccttgaggtggtaacttcgtatgttcagtttatgcgatgattgttgtaaatgcaatgccgtagtttggattaataagtggatggtttttgtttctaaaaagaaaaaaaaaatcagtgttcacccttatagagacatagtcaagttcatgttgataataatcaaaggaattactctcttcttgttaaattagctaaatcatgtaaccgcagataggaagggctcacctggggaaactctggtttccgatgggacaggaaagtcatacgggcaacagtatgcggaaagtacgtttttttaagtaaaaaacaaaggcaaactttgtactatccagttatctaaggaacaataaaaacattaggagaaaaaaaaaaaaaaaaaaaaaaaaaaaaaaaaaaaaaaaaaaaaaaaaaaaannnnnnnnnnnnnnnnnnnnnnnnnnnnnnnnnnnnnnnnnnnnnnnnnnnnnnnnnnnnnnnnnnnnnnnnnnnnnnnnnnnnnnnnnnnnnnnnnnnnnnnnnnnnnnnnnnnnnnnnnnnnnnnnnnnnnnnnnnnnnnnnnnnnnnnnnnnnnnnnnnnnnnnnnnnnnnnnnnnnnnnnnnnnnnnnnnnnnnnnnnnnnnnnnnnnnnnnnnnnnnnnnnnnnnnnnnnnnnnnnnnnnnncct

SEQ ID NO: 5266 - DNA, 6848 bp, Homo sapiens
  misc_feature (2325)..(2369): n is a, c, g, or t
  misc_feature (2509)..(2540): n is a, c, g, or t
  misc_feature (3163)..(3179): n is a, c, g, or t
  misc_feature (6568)..(6582): n is a, c, g, or t
  misc_feature (6812)..(6812): n is a, c, g, or t
  misc_feature (6829)..(6829): n is a, c, g, or t
cccacgcgtccgggaggagccggagcgggagtgacaccgagccggacccagcgcgacctgcggcggctccgggtgactcgggccagtgtagaggtcctcaggccgccggcaggagcagctgggccaattccctggccgggagcggaaggggatggcgtcgggcctgggctccccgtccccctgctcggcgggcagtgaggaggaggatatggatgcacttttgaacaacagcctgcccccaccccacccagaaaatgaagaggacccagaagaggatttgtcagaaacagagactccaaagctcaagaagaagaaaaagcctaagaaacctcgggaccctaaaatccctaagagcaagcgccaaaaaaaggagcgtatgctcttatgccggcagctgggggacagctctggggaggggccagagtttgtggaggaggaggaagaggtggctctgcgctcagacagtgagggcagcgactatactcctggcaagaagaagaagaagaagcttggacctaagaaagagaagaagagcaaatccaagcggaaggaggaggaggaggaggaggatgatgatgatgattcaaaggagcctaaatcatctgctcagctcctggaagactggggcatggaagacattgaccacgtgttctcagaggaggattatcgaaccctcaccaactacaaggccttcagccagtttgtcagacccctcattgctgccaaaaatcccaagattgctgtctccaagatgatgatggttttgggtgcaaaatggcgggagttcagtaccaataaccccttcaaaggcagttctggggcatcagtggcagctgcggcagcagcagcggtagctgtggtggagagcatggtgacagccactgaggttgcaccaccacctccccctgtggaggtgcctatccgcaaggccaagaccaaggagggcaaaggtcccaatgctcggaggaagcccaagggcagccctcgtgtacctgatgccaagaagcctaaacccaagaaagtagctcccctgaaaatcaagctgggaggttttggttccaagcgtaagagatcctcgagtgaggatgatgacttagatgtggaatctgacttcgatgatgccagtatcaatagctattctgtttctgatggttccaccagccgtagtagccgcagccgcaagaaactccgaaccactaaaaagaaaaagaaaggcgaggaggaggtgactgctgtggatggttatgagacagaccaccaggactattgcgaggtgtgccagcaaggcggtgagatcatcctgtgtgatacctgtccccgtgcttaccacatggtctgcctggatcccgacatggagaaggctcccgagggcaagtggagctgcccacactgcgagaaggaaggcatccagtgggaagctaaagaggacaattcggagggtgaggagatcctggaagaggttgggggagacctcgaagaggaggatgaccaccatatggaattctgtcgggtctgcaaggatggtggggaactgctctgctgtgatacctgtccttcttcctaccacatccactgcctgaatcccccacttccagagatccccaacggtgaatggctctgtccccgttgtacgtgtccagctctgaagggcaaagtgcagaagatcctaatctggaagtggggtcagccaccatctcccacaccagtgcctcggcctccagatgctgatcccaacacgccctccccaaagcccttggaggggcggccagagcggcagttctttgtgaaatggcaaggcatgtcttactggcactgctcctgggtttctgaactgcagctggagctgcactgtcaggtgatgttccgaaactatcagcggaagaatgatatggatgagccaccttctggggacttgtggtggtgatgaagagaaaggcgaagcgaaagaacaaggaccctaaatttgcagagatggaggaacgcttctatcgctatgggataaaacccgagtggatgatgatccaccgaatcctcaaccacagtgtggacaagaagggccacgtccactacttgatcaagtggcgggacttaccttacgatcaggcttcttgggagagtgaggagaccggtacgacgtccacagcttggatccgggtttgcggggggaggcacagggagttaatgaggggtgaggaaggccgaccaggcaagaagctcaagaaggtgaagcttcggaagttggagaggcctccagaaacgccaacagttgatccaacagtgaagtatgagcgacagccagagtacctggatgctacaggtggaacnnnnnnnnnnnnnnnnnnnnnnnnnnnnnnnnnnnnnnnnnnnnncgcttctcctgggctcagggcactgacaccatcttggctgatgagatgggccttgggaaaactgtacagacagcagtcttcctgtattccctttacaaggagggtcattccaaaggccccttcctagtgagcgcccctcnnnnnnnnnnnnnnnnnnnnnnnnnnnnnnnntttgaaatgtgggctccagacatgtatgtcgtaacctatgtgggtgacaaggacagccgtgccatcatccgagagaatgagttctcctttgaagacaatgccattcgtggtggcaagaaggcctcccgcatgaagaaagaggcatctgtgaaattccatgtgctgctgacatcctatgaattgatcaccattgacatggctattttgggctctattgattgggcctgcctcatcgtggatgaagcccatcggctgaagaacaatcagtctaagttcttccgggtattgaatggttactcactccagcacaagctgttgctgactgggacaccattacaaaacaatctggaagagttgtttcatctgctcaactttctcacccccgagaggttccacaatttggaaggttttttggaggagtttgctgacattgccaaggaggaccagataaaaaaactgcatgacatgctggggccgcacatgttgcggcggctcaaagccgatgtgttcaagaacatgccctccaagacagaactaattgtgcgtgtggagctgagccctatgcagaagaaatactacaagtacatcctcactcgaaattttgaagcactcaatgcccgagnnnnnnnnnnnnnnnnntgtctctgctgaatgtggtgatggatcttaagaagtgctgcaaccatccatacctcttccctgtggctgcaatggaagctcctaagatgcctaatggcatgtatgatggcagtgccctaatcagagcatctgggaaattattgctgctgcagaaaatgctcaagaaccttaaggagggtgggcatcgtgtactcatcttttcccagatgaccaagatgctagacctgctagaggatttcttggaacatgaaggttataaatacgaacgcatcgatggtggaatcactgggaacatgcggcaagaggccattgaccgcttcaatgcaccgggtgctcagcagttctgcttcttgctttccactcgagctgggggccttggaatcaatctggccactgctgacacagttattatctatgactctgactggaacccccataatgacattcaggcctttagcagagctcaccggattgggcaaaataaaaaggtaatgatctaccggtttgtgacccgtgcgtcagtggaggagcgcatcacgcaggtggcaaagaagaaaatgatgctgacgcatctagtggtgcggcctgggctgggctccaagactggatctatgtccaaacaggagcttgatgatatcctcaaatttggcactgaggaactattcaaggatgaagccactgatggaggaggagacaacaaagagggagaagatagcagtgttatccactacgatgataaggccattgaacggctgctagaccgtaaccaggatgagactgaagacacagaattgcagggcatgaatgaatatttgagctcattcaaagtggcccagtatgtggtacgggaagaagaaatgggggaggaagaggaggtagaacgggaaatcattaaacaggaagaaagtgtggatcctgactactgggagaaattgctgcggcaccattatgagcagcagcaagaagatctagcccgaaatctgggcaaaggaaaaagaatccgtaaacaggtcaactacaatgatggctcccaggaggaccgagattggcaggacgaccagtccgacaaccagtccgattactcagtggcttcagaggaaggtgatgaagactttgatgaacgttcagaagctccccgtaggcccagtcgtaagggcctgcggaatgataaagataagccattgcctcctctgttggcccgtgttggtgggaatattgaagtacttggttttaatgctcgtcagcgaaaagcctttcttaatgcaattatgcgatatggtatgccacctcaggatgcttttactacccagtggcttgtaagagacctgcgaggcaaatcagagaaagagttcaaggcatatgtctctcttttcatgcggcatttatgtgagccgggggcagatggggctgagacctttgctgatggtgtcccccgagaaggcctgtctcgccagcatgtccttactagaattggtgttatgtctttgattcgcaagaaggttcaggagtttgaacatgttaatgggcgctggagcatgcctgaactggctgaggtggaggaaaacaagaagatgtcccagccagggtcaccctccccaaaaactcctacaccctccactccaggggacacgcagcccaacactcctgcacctgttcccactgctggaagatgggataaaaatagaggaaaatagcctcaaagaagaagagagcatagaaggagaaaaggaggttaaatctacagcccctgagactgccattgagtgtacacaggcccctgcccctgcctcagaggatgaaaaggtcgttgttgaaccccctgagggagaggagaaagtggaaaaggcagaggtgaaggagagaacagaggaacctatggagacagagcccaaaggtgctgctgatgtagagaaggtggaggaaaagtcagcaatagatctgacccctattgtggtagaagacaaagaagagaagaaagaagaagaagagaaaaaagaggtgatgcttcagaatggagagacccccaaggacctgaatgatgagaaacagaagaaaaatattaaacaacgtttcatgtttaacattgcagatggtggttttactgagttgcactccctttggcagaatgaagagcgggcagccacagttaccaagaagacttatgagatctggcatcgacggcatgactactggctgctagccggcattataaaccatggctatgcccggtggcaagacatccagaatgacccacgctatgccatcctcaatgagcctttcaagggtgaaatgaaccgtggcaatttcttagagatcaagaataaatttctagctcgaaggtttaagctcttagaacaagctctggtgattgaggaacagctgcgccgggctgcttacttgaacatgtcagaagacccttctcacccttccatggccctcaacacccgctttgctgaggtggagtgtttggcggaaagtcatcagcacctgtccaaggagtcaatggcaggaaacaagccagccaatgcagtcctgcacaaagttctgaaacagctggaagaactgctgagtgacatgaaagctgatgtgactcgactcccagctaccattgcccgaattcccccagttgctgtgaggttacagatgtcagagcgtaacattctcagcgcctggcaaaccgggcacccgaacctaccccacagcaggtagcccagcagcagtaaagatccagacatataccacctccaccgctgagcagtgaccttcctcactttctcttgtcccagcttctcccctgggggcttgagagaccctcaccttccttctgcccatcttccatgttgtaaaggaacagccccagtgcactgggggaggggagggagtgaggggcagtggtgcccttcctgcagaagagacatgcagcagtagcgctggcgccatctgcaggagctggcgggctggccttctggaccctggcttctccccactgtaacgcctgttacacacaaactgttgtgggttcctgccaggcttgaagaaaatgatctgaattttttcctccttttggttttattttgttggtttattttgtgttttcttttctcctttttggggggtattcagagtgggctgggcccctgggcgagacacagctacctctgttggcatctttttaataccaggaacccagcggctctagccactgagcggctaaatgaaataaagtggaaaaaaaaaaaaaggaaaaaaccaaaagcataaaaaaccacagcaaatttcttgatgaaaattgaaaataaaagtttccttgtattttaaaaaaaaaaaaaaaaaacggggcgggcccgcctctaaaattatccctctcgcagggggccccctagctttannnnnnnnnnnnnnntttttatttgggacaaaaggggggcccctctatagtggggggttcttaattaataaagccttaggcgacctggtgccccgttgtttttatataaacacgtctcgtccgacctggggaaaaacactcgcgtagacctctggcgggatacttttggggggacagaggaacactctatactctctttgggggctggtggcccactaaattgcggaatacacttaccccctccncgaaatatctctacacncctctccagggcgcaaatc

SEQ ID NO: 5267 - DNA, 2306 bp, Homo sapiens
atgaaaaatgtcaagttgaattcatctaataagtgaaaataatatattttgtaaacagattacatttgaacacctaaataagtatttgtttcataatcattacatgcttgtttatgatttacaaagatttggtagagaaaagtacagtccttaaggcatatatatgccaatgcattaaactactcagcttttgtgccagctcaggtgttcataggaacaggaatgtggaataccagctttttactttaattatacttttatgctgaatttttcttccagttaaacctttaattacactagtatgtaaagtagttactgagaaaaataagtttttgatttcccttctgttgatctgtaacatttttaaatgaagctatttaacacatgacatgctaatgttacttaatggattcctatgtatttcattaaaaaaaagtctcccacctgtgttaagacagctaaatatttcttgatgttggcttgaggaccgagtgagccatcttgccagttaagcaagttttatatcagaggaccaaatggttaagaagagaatttgtacatttcttgagcttccccatgtgaagcttgggttcagtactatcctattactatccatcttcataatgagtgaagcaaactgaaagggaattcataatcttttttcttatctgaacagaaaaactaatgaaaatcaacaataaatctttattttaattttcattcaacagctgaaaaaccatgtctgttgaccacattggaccattgcctagttaaaatccataaaattccctataaaccaatgaaaagaaacttgtctggcaataatttccaacattttaaattctaatttttagttacaaagaaaaaggatagaatgaggcttttcaaggaattcttgctcatcccttcaattatttggcaggtaaaacagtcctagaattcagcttcctttttggttttattactattaaatagatactttcatataaatggaaacacttttcctcaaaacattaattcaaaacatactccttatattaaggattatagcaccatattttttgtatattccctatgtgtaactttttcctgttggtatgtgatatttttcatttaatatgactatctgctggtgttggggccaatagatttgtgaatattctgtggatgtgtctatgtataggtgtatatatatatatatatatatttttttttttttcccagctaattacctcaaatgtgtgattgtttaatatataccacactatgtttgcacagagcagggcttccattagcagtggatatttttatgtctgactttgaaaatcagtcaacacaatttcattggtgtgaattatttgttgctctttttcatattttaatggagagattcctattataaggcccatgcttcaaacataattatatctttctatatccagccatctggaaatacataggggtaagaagtatttcttgaaatgtccttgtttagtaagttagtaaaaactgggatgactagttgccaagatgtcttgtaactgcatagcagatgacacctggcatggcaagtctcattcacttcagcacaacactctgtacatttcagtctgatattctactttgccatttaaggacaccattaaaatcatagagattttcagtgacattggagtattgtaattattactttcaaaaaattatttttaataggatgattaaaccaatgagaagaaacacacataaatgatattttgcagtttatctgtattaagaaatgcttcttgccaatttctagttttagtttttggattgctacataagactttctttccatttactttatgtgtttttaaaagctgcaggtaatttttaaggtttgatggaattataatggaagccttgtataagttaaatgaaattggtaaaggagagcttactttgtctataatgcattcaggattaaaaattagatttcaaaatgaaatgtctgatttgtaaaatatttaatgttatatcagacttacataaaattttctgtgagaactcaaatgcatttgatttttaatgaatgttctgaatgaaatatgaatttttgtctttcagtctctgtagtttatctcaatatattaataaaaaggtctgttctcactgtaaaaaaaaaaaaaaaaaaaaaaggggggcaaataccggggaatacgacaacttgtaaaggcaaggggaaaaaagagggggaaaggggagaagcgtgtggacggggtgaccacaagagaaaaaatggcgggtgaaaaaaattggtgaagaga

SEQ ID NO: 5268 - DNA, 2188 bp, Homo sapiens
ggcggcggcggcacatctaacgcgcgggcacccgggccgccgcggcccccgcaaataagcccagcctcggcccccgccgctcattggcgcgggccgcagccagcgcacccagaccctgcgctgccctcggacggccgggcgcggagccccagctgcggaggccgacggcacccggccccgagcgcctcaaggccgcccgctccccgcaggtggacgcggccatgggccgaggggtgcgcgtgctgctgctgctgagcctgctgcactgcgccgggggaagcgagggcaggaagacctggcggcgccggggtcagcagccgcctcctcccccgcggaccgaggcggcgccggcggccggacagcccgtggagagcttcccgctggacttcacggccgtggagggtaacatggacagcttcatggcgcaagttaagagcctggcgcagtccctgtacccctgctccgcgcagcagctcaacgaggacctgcgcctgcacctcctactcaacacctcggtgacctgcaacgacggcagccccgccggctactacctgaaggagtccaggggcagccggcggtggctcctcttcctggaaggcggctggtactgcttcaaccgcgagaactgcgactccagatacgacaccatgcggcgcctcatgagctcccgggactggccgcgcactcgcacaggcacagggatcctgtcctcacagccggaggagaacccctactggtggaacgcaaacatggtcttcatcccctactgctccagtgatgtttggagcggggcttcatccaagtctgagaagaacgagtacgccttcatgggcgccctcatcatccaggaggtggtgcgggagcttctgggcagagggctgagcggggccaaggtgctgctgctggccgggagcagcgcggggggcaccggggtgctcctgaatgtggaccgtgtggctgagcagctggagaagctgggctacccagccatccaggtgcgaggcctggctgactccggctggttcctggacaacaagcagtatcgccacacagactgcgtcgacacgatcacgtgcgcgcccacggaggccatccgccgtggcatcaggtactggaacggggtggtcccggagcgctgccgacgccagttccaggagggcgaggagtggaactgcttctttggctacaaggtctacccgaccctgcgctgccctgtgttcgtggtgcagtggctgtttgacgaggcacagctgacggtggacaacgtgcacctgacggggcagccggtgcaggagggcctgcggctgtacatccagaacctcggccgcgagctgcgccacacactcaaggacgtgccggccagctttgcccccgcctgcctctcccatgagatcatcatccggagccactggacggatgtccaggtgaaggggacgtcgctgccccgagcactgcactgctgggacaggagcctccatgacagccacaaggccagcaagacccccctcaagggctgccccgtccacctggtggacagctgcccctggccccactgcaacccctcatgccccaccgtccgagaccagttcacggggcaagagatgaacgtggcccagttcctcatgcacatgggcttcgacatgcagacggtggcccagccgcagggactggagcccagtgagctgctggggatgctgagcaacggaagctaggcagactgtctggaggaggagccggcactgaggggcccagacacccgctgccccagtgccacctcaccccccaccagcaggccctcccgtctcttcgggacagggccccagccgtcccccctgtctgggtctgcccactgccctcctgccccggctttccctgcccctctcccacagcccagccagagacaagggacctgctgtcatccccatctgtggcctgggggtccttcctgacaacgagggggtagccagaagagaagcactggattcctcagtccaccagctcagacagcacccaccggccccacccatcaagcccttttatattattttataaagtgacttttttattactttaattttttaaaaaaaggaaaataagaatatatgatgaatgatattgttttgtaactttttaaaaatgattttaaagagacaaaaaagaaaaaaaaaaaaaaaaaaaaaaaaaaaaa

SEQ ID NO: 5269 - DNA, 3916 bp, Homo sapiens
gcgagtggcacaggcagggccccttcctttcctagttgggttctgacagctccgaggcagtggtttacacaaccaacacgaaacatttctacgatccacccgattcctcccctcattgatattcaggaagcagctctccttcccctgccttcagctcaagtttgctgagcttttgtttcatttgtgaatacttcttgctggaagtccctcacccagagaccagtgctcccaacggcagagcagcgggggagataaagaactggtgacacgtggctgtacattcagcacagctgtggtgtccccaagtgccatgacccaggagccattcagagaggagctggcctatgaccggatgcccacgctggagcggggccggcaagaccccgccagctatgccccagacgcgaagccgagcgacctgcagctgtcgaagagactgcccccctgcttcagccacaagacgtgggtcttctctgtgctgatggggagctgcctcctggtgacctcggggttttcgctgtacctggggaacgtgttcccggctgagatggattacttgcgctgtgctgcaggctcttgcatcccctcggcaattgtgagcttcaccgtctccaggaggaacgccaatgtgattcccaactttcagatattgtttgtttccacgtttgctgtgaccactacgtgtttaatttggtttggatgcaaactagtcctgaacccatcagcaataaacatcaacttcaacctcatcctgctgctcctgctggagctgctcatggcggccacggtgatcatcgctgcacggtccagcgaggaggactgcaagaaaaagaagggctccatgtctgacagcgccaacattctggacgaagtgccatttcctgctcgggtcctgaaatcttactcagtcgtcgaggtaatcgcaggcatctctgccgtcctcggggggatcattgccctgaacgtggatgactcagtttcaggcccacacctctcagtgacgttcttttggatcctagtggcctgctttccaagtgccattgccagtcatgtggcagcagagtgtcccagcaagtgtctggtggaggtcctgattgccataagcagcctcacgtctccgctgctgttcacagcctctggatatctgtcattcagcatcatgagaatcgtggagatgtttaaggattacccgccagccatagtgcgggtgcggggggtccgtgggcgcgcacgggccgccggggggtcgtgggggggggtccgccgccgctgtggggcccgaaagcgcgtgcgcttcaaggtcagtgcaaggctgcagggtgcatcctgggacacccagaacggcccgcaggagcgcctggctggggaggtggccaggagccccctgaaggagttcgacaaggagaaagcctggagagccgtcgtggtgcaaatggcccagtgacccccagacgcggaaaccgggtggcagcgcccagcctggccccaagcatggaaacgcacaacccctaatcgccctgagctactgcttctaacacctcttttcccttgtgtgagggcaaaccaggctgcaggtggggttttcacttcctagggtagtttaattttaaaataggccaatgttggctagtctgtgcctcagtgagatcagtcagctccgagtggctcccgtgtcgtaacagcaggagcatggccgcaacttcccaggccgaggaagggcccccggctcggcctcttgagagccccacccctgaactggccccagctcctcttcctgcctctctcatggcttgggctggagtgggctctctggacctgaccagactgtgggtccctgcgtctcctgcccactctgaccgggcttcctccctccacgcttagggtctgtcccgggtactcagtcagcccagtgggatcttacccacttccctgcaaggtgcacctgccccaggctcaggctgcccagcggctcttcctggacagtgagagcagggcttggcgcctctgtcctggcccgggagccgcaggggcccctcctccagagcctgggcgcaagcgacacaggctgccgctgctctcccaggtgaaatccacaccagtccacgccgggtcgcctgccctgtctccctacttagacccagtcattctagagggatccaccgccacactggccggcccacgtcctgggtgctgtcatgcccagcttggagtgccacgtggccgctgcccacgtcccgggcactgtcatgcccagcttggagtgccacatggccgctgcccacgtcccgggcactgtcatgcccagcttggagtgccacgtggccgctgctgtgacaggcagtgttcttgggggtggggctgcatccaaggctttgtaaaccggctggaccacgtctccctggccccagtgaccgggggaagctgagcccctccctcctgtgtttgctcccattactcaaaatgcaggacagatcaggtcagagcccaggaattctcacaggttcacccagcgccctctacctcctagcaagtactttgtcttgatcctcactgagaaggccccagggcagcggtcttctccatctccgctgttttggggtcttagggtacagcccaggcggtcactgcccacctgccaggctgcagggacagttgggtgtgagaataacactggctttgggtagtgccatggccaggagtgggtttccctgcgtctcctcgtcccgagggcgcctgggtcctcccagctgacggcagtaaatccacagtgagttggggcgactgtgaaactggaatgctgttactttgataattactttccagcaggtgttttccttcacaatggttttgtttctttccttctgatctgagaagacatgaacgttttctcttcaccgccgtggggtgtattgactggtcccccatgggctgctggaaaggcccggagatgcatctgtggcctggggccatcaagatcaaagaaccaggaggcctgggagatgcagctggatggggcggcctgcagaccctgccagggggtttgaggaccctcccaggtttcccactgcggaacaggagtgactctggctgccaagataccttcatggtgttcatgacaagtggaatcattattttcaaccattgaagggggatgcaggcaagacaccttcccagctgctcctagaggggacaagccaggccctctctgcagtcctcggcagctccggaaggacacagtcaggggccgggcaaacactttggccacagccccaaacaagcgccaccgtgggagaggagaggctgctgtcactggtaccggatgcagaccccaccctgtctgcaggccacccccacctccctgcagctttgaggctggcggggtctgctcctgggaatggggtgggagccacagggacgacccggggcgggctgatgtcttcttgggggcagaccagagagctcaagtttcagagtcagaattaggcacttggagcgtttttgctggcttgcactttcttattttcttattttagagcgcttaaaaaatccggaaaaatggggtttaaaagaactgtctctttcagtctacatttttgtttaatacgcttgagcaataaacgctgacttgcagacgtgaaaaaaaaaaaaaaaaaaacgaaaaaaacgaaaaaagagggggggcgccgccatcaaaaaattatcccctgggggggccccatattaaacgggttacccacgctttatgttggtgccacaaggggggccccataagggcgagcggatataagcagacgaggacatgcgccgacgtgtttaaaaacaggtgtgtaacgtgaaaaacgcgctacatggggaacacgtggagaaagacacccaaatcccggggagaggcacacaaagggcgaaaaacacccag

SEQ ID NO: 5270 - DNA, 3101 bp, Homo sapiens
tattaacttgttcaaaaagtatcaggagttgtcaaggcagagaagagagtgtttgcaaaagggggaaagtagtttgctgcctctttaagactaggactgagagaaagaagaggagagagaaagaaagggagagaagtttgagccccaggcttaagcctttccaaaaaataataataacaatcatcggcggcggcaggatcggccagaggaggagggaagcgctttttttgatcctgattccagtttgcctctctctttttttcccccaaattattcttcgcctgattttcctcgcggagccctgcgctcccgacacccccgcccgcctcccctcctcctcggcacgaggcccgggccccccaaagtcccggccgggccgagggtcggcggccgccggcgggccgggcccgcgcacagcgcccgcatgtacaacatgatggagacggagctgaagccgccgggcccgcagcaaacttcggggggcggcggcggcaactccaccgcggcggcggccggcggcaaccagaaaaacagcccggaccgcgtcaagcggcccatgaatgccttcatggtgtggtcccgcgggcagcggcgcaagatggcccaggagaaccccaagatgcacaactcggagatcagcaagcgcctgggcgccgagtggaaacttttgtcggagacggagaagcggccgttcatcgacgaggctaagcggctgcgagcgctgcacatgaaggagcacccggattataaataccggccccggcggaaaaccaagacgctcatgaagaaggataagtacacgctgcccggcgggctgctggcccccggcggcaatagcatggcgagcggggtcggggtgggcgccggcctgggcgcgggcgtgaaccagcgcatggacagttacgcgcacatgaacggctggagcaacggcagctacagcatgatgcaggaccagctgggctacccgcagcacccgggcctcaatgcgcacggcgcagcgcagatgcagcccatgcaccgctacgacgtgagcgccctgcagtacaactccatgaccagctcgcagacctacatgaacggctcgcccacctacagcatgtcctactcgcagcagggcacccctggcatggctcttggctccatgggttcggtggtcaagtccgaggccagctccagcccccctgtggttacctcttcctcccactccagggcgccctgccaggccggggacctccgggacatgatcagcatgtatctccccggcgccgaggtgccggaacccgccgcccccagcagacttcacatgtcccagcactaccagagcggcccggtgcccggcacggccattaacggcacactgcccctctcacacatgtgagggccggacagcgaactggaggggggagaaattttcaaagaaaaacgagggaaatgggaggggtgcaaaagaggagagtaagaaacagcatggagaaaacccggtacgctcaaaaaaaaaaaaaaaaaaaaaaaaaaaaaaaaacccacagcaaatgacagctgcaaaagagaacaccaatcccatccacactcacgcaaaaaccgcgatgccgacaagaaaacttttatgagagagatcctggacttctttttgggggactatttttgtacagagaaaacctggggagggtggggagggcgggggaatggaccttgtatagatctggaggaaagaaagctacgaaaaactttttaaaagttctagtggtacggtaggagctttgcaggaagtttgcaaaagtctttaccaataatatttagagctagtctccaagcgacgaaaaaaatgttttaatatttgcaagcaacttttgtacagtatttatcgagataaacatggcaatcaaaatgtccattgtttataagctgagaatttgccaatatttttcaaggagaggcttcttgctgaattttgattctgcagctgaaatttaggacagttgcaaacgtgaaaagaagaaaattattcaaatttggacattttaattgtttaaaaattgtacaaaaggaaaaaattagaataagtactggcgaaccatctctgtggtcttgtttaaaaagggcaaaagttttagactgtactaaattttataacttactgttaaaagcaaaaatggccatgcaggttgacaccgttggtaatttataatagcttttgttcgatcccaactttccattttgttcagataaaaaaaaccatgaaattactgtgtttgaaatattttcttatggtttgtaatatttctgtaaatttattgtgatattttaaggttttcccccctttattttccgtagttgtattttaaaagattcggctctgtattatttgaatcagtctgccgagaatccatgtatatatttgaactaatatcatccttataacaggtacattttcaacttaagtttttactccattatgcacagtttgagataaataaatttttgaaatatggacactgaaaaaaaaaaaaaaaaaaacaacaaaacaaaaaaacaaaaaacaaaaacagaaaaaacaaaaaaaaaaacaaaaccacaacacaaaaacaaaaaaaaaaaaaagaaacaaacacacaacacaacacaacacaaaaccacaacacaaacaacaacacacagaggggcggccgccgcactaaacacacacccgccgggcgggacgcaaaacaagaaagagaacacacccaaccacagaactagttatcatagaaagaaagaggagcgaccccacacaagaggagaggagtagattaataaaaagagagaaaaggggagcgagaggggtcgtgtataaacacacagagcagcagctgacaagagaaaaaaacaaactggtatacggatttgctgttagttcgaaaaaacaacccacaacatatgtgggggggggaaacagagataaataggagacaaccaccaccagcaaaaaaaaatagacgacgcagcgagaagaaataataacacaaatggtggtgagagtgtgtgatgtaggaccacagaacactattcggtcgcgggagagaaaagggcgtgcggcgatagcgatatgagaaaaaatacag

SEQ ID NO: 5271 - DNA, 979 bp, Homo sapiens
  misc_feature (92)..(92): n is a, c, g, or t
aattgtaaccagtagggtttgacacacagtttgaattaagctccagtactttttaatacccaccgttcagaaaagaaagaaagagaccaaanaattataaagaaatggaggaaaagcagcaaaggaactggagaaaggatacttgcaagaaaaagcaaaagaaaaatatcaagaatgttaaagaaaaaaaatgctgaagaatgtgagaggaagaagaaagaaaaggaaaaagaaaatacaacagcaagctgaaatacaggagaaaaaggaaatagcagaaaaaaagtttcaagaatggttggaaaatgcgaaacataaacctcgtccagctgcaaagagctatggttatgccaatggaaaacttacaggtttttacagtggaaattcctatccagaaccagccttttataatccaattccgtggaaaccaattcatatgccacctcccaaagaagctaaggatctatcaggaaggaagagtaaaagacctgtgataagtcagccacacaagtcatcatctctggtaattcataaagccaggagcaatctttgccttggaactctgtgcagaatacaaagatagcgtatgtggaaaataacatgcttttatctggagctatttaatttaaaaatcagaaattgttttttactgctcagtcaataactcaacacttaatgtgattattgacaaatagcaatttttgcatttgtatatggagtccttagagttgaggaagatattttctggattttggtttttataaacttttcaaggttgatcttggcatgttgttttgcagaataagtggctgaatatgtaagaattgtgtttgtatttagcttgtattaaaagtacactgtaataccaataaaactaacaatttttcttgaaaaaaaaaaaaaccttgttcggccgccctccggccctcgaagaagcttttccaagaccatttcgctttggggccgcgggccccagtag

SEQ ID NO: 5272 - DNA, 1694 bp, Homo sapiens
agcggaagtccggaggcttagggcgtccgaacgggagaggcgagagcctcgtgtccgcgcatcaccccgtggctgggggttagctaggggagggcgggaagggcagaggacgcggtggctgaggtcgtgtctttgtggctccggaaaggcgtttgggatgccaacgatgaggctgctgtcatttgtggtgttggctctatttgctgtcactcaagcagaggaaggagccaggcttttggcttccaaatcactgctgaacagatacgccgtggagggacgagacctgaccttgcagtacaacatctacaatgttggctcaagtgctgcattagacgtggaactatctgatgattccttccctccagaagactttggcattgtgtctggaatgctcaatgtcaaatgggaccggattgcccctgctagcaatgtctcccacactgtggtcctgcgccctctcaaggctggttatttcaacttcacctcggcaacaattacttacctggcccaggaggatgggcccgttgtgattggctctaccagtgcacctggacagggaggaatcctggctcagcgggagtttgacaggcgattctcccctcattttctggactgggcagcctttggggtcatgacccttccctccatcggcatccccctgctattgtggtactccagcaagaggaaatatgacactcccaaaacgaagaagaactgattggggcttccacagccctcctctcccaagaaatccaggctcctctcccaagaaatccaggtgctttccagactccaaagggtatcttaaatgcaatctcttctctcttagcccttggccactttctcctggatcctgccctgctctcagccatagtgaaggaccagccctaggagtctgcgagagcctccttggttccatcgtgaagccataaacaggaatgcctttggcaatagccttgagcctagagggccctctgatgccccactgaggtgctgttggtttattgctggcaacgtgaattctctcaggggtctaggaggggcattttggagactgcctgacaccacccctatcccctgcctccccctctcagaagagggtggaagatgaaatgaaagctatgggactcttggaggatacccagtgtctattctgggttagagaagtgcttactaaggggttttctaataaaaacaaatgccacattgaaaaaaaaaaaaaaaaaaaaaaaaaaaatatatgggacgcggcacttgggcacccttgaaaaagagttcttctaaacacccatttgcgcgttgtgggcgcgcgcgcgggggcccccaagttggtgttattgtgtgaacacgtgtggtgtcaatacgagggtgtgtcttcccatagaggaagacaccgtgtggccaagtgagacatacgtcgtgctgtgtgggttatatcttccaccaaatttaaaaaagaggagcgggggcccgcgcgcgggaacacaccgcgagagcgcgtttccgtggaaaccaatttcgcccagagaggggagagttgcccgagagagggatcgcataacaagcggcggagctcctacatacacacagggagcgaagattccccacaaggggagagccggcgacatattcacacatatagagcccccgcagctgcgcggggggggggggcccaagcaaggaggaagagacac

SEQ ID NO: 5273 - DNA, 2707 bp, Homo sapiens
agcgggggggctgggagcggggcgcagcccgggggcggcgggaggaggaggtggcggcggtggcgctgggagctcctgtcaccgctggggccgggccgggcgggagtgcaggggacgtgagggcgcaagggccgggacatggggcccgccagccccgctgctcgcggtctaagtcgccgcccgggccagccgccgctgccgctgctgctgccactattgctgctgcttctgcgcgcgcagcccgccatcgggagcctggccggtgggagccccggcgcggccgaggccccggggtcggcccaggtggctggactatgcgggcgcctaacccttcaccgggacctgcgcaccggccgctgggaaccagacccacagcgctctcgacgctgtctccgggacccgcagcgcgtgctggagtactgcagacagatgtacccggagctgcagattgcacgtgtggagcaggctacgcaggccatccccatggagcgctggtgcgggggttcccggagcggcagctgcgcccacccccaccaccaggttgtgcccttccgctgcctgcctggtgaatttgtgagtgaggccctgctggtgcctgaaggctgccggttcttgcaccaggagcgcatggaccaatgtgagagttcaacccggaggcatcaggaggcacaggaggcctgcagctcccagggcctcatcctgcacggctcgggcatgctcttaccctgtggctcggatcggttccgtggtgtggagtatgtgtgctgtccccctccagggacccccgacccatctgggacagcagttggtgacccctccacccggtcctggcccccggggagcagagtagagggggctgaggacgaggaagaggaggaatccttcccacagccagtagatgattacttcgtggagcctccgcaggctgaagaggaagaggaaacggtcccacccccaagctcccatacacttgcagtggtcggcaaagtcactcccaccccgaggcccacagacggtgtggatatttactttggcatgcctggggaaatcagtgagcacgaggggttcctgagggccaagatggacctggaggagcgtaggatgcgccagattaatgaggtgatgcgtgaatgggccatggcagacaaccagtccaagaacctgcctaaagccgacagacaggccctgaatgagcacttccagtccattctgcagactctggaggagcaggtgtctggtgagcgacagcgcctggtggaaacccacgccacccgcgtcatcgcccttatcaacgaccagcgccgggctgccttggagggcttcctggcagccctgcaggcagatccgcctcaggcggagcgtgtcctgttggccctgcggcgctacctgcgtgcggagcagaaggaacagaggcacacgctgcgccactaccagcatgtggccgccgtggatcccgagaaggcacagcagatgcgcttccaggtgcatacccaccttcaagtgattgaggagagggtgaatcagagcctgggcctgcttgaccagaacccccacctggctcaggagctgcggccccaaatccaggaactcctccactctgaacacctgggtcccagtgaattggaagcccctgcccctgggggcagcagcgaggacaagggtgggctgcagcctccagattccaaggatgacacccccatgacccttccaaaagggtccacagaacaagatgctgcatcccctgagaaagagaagatgaacccgctggaacagtatgagcgaaaggtgaatgcgtctgttccaaggggtttccctttccactcatcggagattcagagggatgagctggcaccagctgggacaggggtgtcccgtgaggctgtgtcgggtctgctgatcatgggagcgggcggaggctccctcatcgtcctctccatgctgctcctgcgcaggaagaagccctacggggctatcagccatggcgtggtggaggtggaccccatgctgaccctggaggagcagcagctccgcgaactgcagcggcacggctatgagaaccccacttaccgcttcctggaggaacgaccctgacccggcccccttcaccccttcagccgagcccagacctcccctcttcctggagccccagaaccccaactcccagcctagggcagcagggagtcttgaagtgatcatttcacacccttttgtgagacggctggaaattcttatttcccctttccaattccaaaattccatccctaagaattcccagatagtcccagcagcctccccacgtggcacctcctcaccttaatttattttttaagtttatttatggctctttaaggtgaccgccaccttggtcctagtgtctattccctggaattcaccctctcatgtttccctactaacatcccaataaagtcctcttccctaaaaaaaaaaaaaaaaaaaaaaaagcgtgcacccccgctgatccagtacccagctaaccggggcggccccctcctaaatattcccctcgggagggccccaaggcttttcgcggaacccccgcttttcctttgaacacaagggggcccccctatacgggagccccgattattaagcgtagcgggcctgggcccggcccgttttttacaaacggcccttgaacggggggaaaaacgtgcggtcaccttgtggcgaactttgtgtgcagagg

SEQ ID NO: 5274 - DNA, 1006 bp, Homo sapiens
ttggtcatgcagtgtctgcctccctatgcagagtatctgcaggtggtgaactatggcatcggaggacactatgagcctcactttgaccatgctacgtcaccaagcagccccctctacagaatgaagtcaggaaaccgagttgcaacatttatgatctatctgagctcggtggaagctggaggagccacagccttcatctatgccaacctcagcgtgcctgtggttaggaatgcagcactgttttggtggaacctgcacaggagtggtgaaggggacagtgacacacttcatgctggctgtcctgtcctggtgggagataagtgggtggccaacaagtggatacatgagtatggacaggaattccgcagaccctgcagctccagccctgaagactgaactgttggcagagagaagctggtggagtcctgtggctttccagagaagccaggagccaaaagctggggtaggagaggagaaagcagagcagcctcctggaagaaggccttgtcagctttgtctgtgcctcgcaaatcagaggcaagggagaggttgttaccaggggacactgagaatgtacatttgatctgccccagccacggaagtcagagtaggatgcacagtacaaaggaggggggagtggaggcctgagagggaagtttctggagttcagatactctctgttgggaacaggacatctcaacagtctcaggttcgatcagtgggtcttttggcactttgaaccttgaccacagggaccaagaagtggcaatgaggacacctgcaggaggggctagcctgactcccagaactttaagactttctccccactgccttctgctgcagcccaagcagggagtgtccccctcccagaagcatatcccagatgagtggtacattatataaggattttttttaagttgaaaacaactttcttttctttttgtatgatggttttttaacacagtcattaaaaatgtttataaatcaaaaaaaaaaaaaaaaaaaa

SEQ ID NO: 5275 - DNA, 1647 bp, Homo sapiens
gctcggacccactttccgagtagatttagatgcatggaaaaggcaaaagatatatagccaatgctttgtcttccaaagagatctttagactacaggcaatatctgcagataaagaaaaattacaatatggatgggcctggaaactgcttttttttttctagttctttgtctaggccttcaatatttaaacaaaatgcaaaactgaacgttacctcaaaatgaaacagtgtgtgtactggctgttagaagttgatggcggtctactgtttgatattcactgccatcttcctctgccccactctacctcaactcgggaccgcctcacctaatggtgggctttgccgctttatgccatgtagaggagacactgggtaaccacagcaaatcaacacgagatcctgtactgcctactctgggaatataaatggctctgaggccaggggataaaaccaaaagatctaggagtagctgaatgccaagagacgagttagaacaagttttagttccaaagatgattagactggaaagaaaactgatccaaggagggtcatttctgtgtagatctaaagacaaaagcatgatttagattttcaggaagacagatttatcaaagagcaggcttgcttctgacatggagaaagcttacacactgctaagaaagtgagctaaacactctggacagaatactaactgaactcgagggatcatttatcagcatataaaagaactgactaatagttctcccaactggaccctcaattctctttatgaacttgcaattacacaaactgccagcccatactgtctttgactacagtaatttattcactgaatgatgtctaattaccgtgaagaacacagtaattacagagagtatttaggacctcaggtgaagaggaaaagggaaggaaaggaggaaagagatgttacattcccaaagccacaggcacaagaaaagaaccacatcatcgggaggcagcaatgcagggaaggtgccatcaacaagaggctgggccaccgtggacattatccccactccttaaagggcaaaggaaaaaaccactgctgaaaatataacctaatattcctcatgttcaaatgaagacacccatataagctgaaattaattcactgggaagaaaaactgaacagataaatccttactgtctattttgtgcatttaaatagcatgtgaacgaagcttcctaaaagctttccggtattctggccagaaagtcatcctggaaacaaatgttcttcccttcccattaagtagaaagactcatgacctacatcagaacacatacctggcaccaaggcaactgactcccacagactattttctggggagggcatggaatgtatttaaaggcctctatctcaaatcggtcattatgtaattaggataatcaaaacatcttaatagcttcaatgttcctatagaaacagtgctttggagtgaccagtgttagctgctagtatcaaacatgcctgtaatagtgtagcaacagtacttttcctcccacttatctaccaaacaaccaataccatcacacacaataaagaacatcccataagctgcttggcctcagtaaggctgccatacaacccatggcccatgacagaacaccgtcgaagtgcaatcct

SEQ ID NO: 5276 - DNA, 2408 bp, Homo sapiens
cagcctggaaggtgcgtgtggggctgggtctcggtcagtgggggacgtggagtgcaggtaatgcatgtccatggtacacaaattcacaaggtttgtaaatgagaaaagacgtgaggttccttttgttctttacctgtggcctccctgccctacacggggactctctttataatttagtttccatagaagttatatgtgcatttaaaaaaattcaatgctggagcgaccgtgtctggggagccgagccccgcttctcgctgcggtgagcccggactggggcacgcactgcgcagactccccgctgcagtgggcggagtcccacaggccccgcccctcctcccaccctcgttcagcctgtccagacagaagctggggcccagcggaggtagcagcagacgcctgagagcgaggccgaggccctcagggtttggagaccctgacacacccaccttctcacctgggctctgcgtatcccccagccttgagggaagatgaagcctaaactgatgtaccaggagctgaaggtgcctgcagaggagcccgccaatgagctgcccatgaatgagattgaggcgtggaaggctgcggaaaagaaagcccgctgggtcctgctggtcctcattctggcggttgtgggcttcggagccctgatgactcagctgtttctatgggaatacggcgacttgcatctctttgggcccaaccagcgcccagccccctgctatgacccttgcgaagcagtgctggtggaaagcattcctgagggcctggacttccccaatgcctccacggggaacccttccaccagccaggcctggctgggcctgctcgccggtgcgcacagcagcctggacatcgcctccttctactggaccctcaccaacaatgacacccacacgcaggagccctctgcccagcagggtgaggaggtcctccggcagctgcagaccctggcaccaaagggcgtgaacgtccgcatcgctgtgagcaagcccagcgggccccagccacaggcggacctgcaggctctgctgcagagcggtgcccaggtccgcatggtggacatgcagaagctgacccatggcgtcctgcataccaagttctgggtggtggaccagacccacttctacctgggcagtgcaacatggactggcgttcactgacccaggtcaaggagctgggcgtggtcatgtacaactgcagctgcctggctcgagacctgaccaagatctttgaggcctactggttcctgggccaggcaggcagctccatcccatcaacttggccccggttctatgacacccgctacaaccaagagacaccaatggagatctgcctcaatggaacccctgctctggcctacctggcgagtgcgcccccacccctgtgtccaagtggccgcactccagacctgaaggctctactcaacgtggtggacaatgcccggagtttcatctacgtcgctgtcatgaactacctgcccactctggagttctcccaccctcacaggttctggcctgccattgacgatgggctgcggcgggccacctacgagcgtggcgtcaaggtgcgcctgctcatcagctgctggggacactcggagccatccatgcgggccttcctgctctctctggctgccctgcgtgacaaccatacccactctgacatccaggtgaaactctttgtggtccccgcggatgaggcccaggctcgaatcccatatgcccgtgtcaaccacaacaagtacatggtgactgaacgcgccacctacatcggaacctccaactggtctggcaactacttcacggagacggcgggcacctcgctgctggtgacgcagaatgggaggggcggcctgcggagccagctggaggccattttcctgagggactgggactccccttacagccatgaccttgacacctcagctgacagcgtgggcaacgcctgccgcctgctctgaggcccgatccagtgggcaggccaaggcctgctgggcccccgcggacccaggtgctctgggtcacggtccctgtccccgcacccccgcttctgtctgccccattgtggctcctcaggctctctcccctgctctcccacctctacctccacccccaccggcctgacgctgtggccccgggacccagcagagctgggggagggatcagcccccaaagaaatgggggtgcatgctgggcctggccccctggcccacccccactttccagggcaaaaagggcccagggttataataagtaaataacttgtctgtaaaaaaaaaaaaaaaaaaaaaaaaaaaaaaaaaggggcgaacaaaacaatggggcccaacaacacccgccaaggaaaacgcacaccagaagagataacagaccccaacacaaccggaagccgcgcccgaagacacc

SEQ ID NO: 5277 - DNA, 7322 bp, Homo sapiens
  misc_feature (6153)..(6153): n is a, c, g, or t
  misc_feature (6949)..(6952): n is a, c, g, or t
  misc_feature (6956)..(6956): n is a, c, g, or t
gacagatcgttgtttgtatgggagggattggcggcggaggagaaggaggagcgcggccggggcgatgcggcgctacctgcgcgtcgtggtgctgtgtgtggcctgcggcttctgctcgctcctttacgctttcagccagctcgccgtgtccctggaagaaggaacgggcggcggtggcgggaagccgcaggccgcggtggcttcctggtctcgcgggcggcggacgcggcgccgtgagaggcgccggcgtcgcgggccccgcagcgcatcccggcgtgtcggacaggtacagtctgaaaatacagcctgttgagaaaatgcatctagctgtagttgcctgtggggtgaaaggactgggaagaaactatgaccatgttgaagtcagctatcattttcagcatcaaacctcttcaattccatatttttgctgaagatcagctacatcatagctttaaaggcagacttgacaactggtcatttctacaaacatttaattatacgttataccccataacctttccaagtgagaatgcagcagagtggaaaaaactctttaaaccatgtgcttcgcagagattgttcttgccgttaatcctgaaagaagttgactcactattgtatgtcgacactgatatcctttttttacgaccagttgatgatatttggtctttactaaagaaatttaattccacacaaattgctgcaatggcaccagaacatgaggaacctcgaataggatggtataatcgctttgctaggcatccatattatggaaaaactggagtaaactctggagttatgttgatgaacatgactcgaatgagaaggaagtatttcaagaatgatatgacaactgtacgactacaatggggagatatacttatgccattgcttaaaaaatacaaactaaacatcacatggggtgatcaagatctattgaatatcgtgttttttcataatccagaaagcctttttgtttttccgtgtcaatggaattatcgaccagatcattgtatatatggaagcaattgccaagaagcagaagaaggaggaatctttattcttcatgggaacagaggtgtttaccatgacgataagcaaccagcatttagagctgtttatgaagcactgagaaattgttcttttgaagatgacaacatccgttccttattaaaacctttagaactggaactacaaaaaacagtgcatacatactgtggaaaaatttacaaaatatttatcaaacaactagcaaaaagtgtaagagatcgttatgccagatcaccaaaggaaaagtgattcttggtgactgcttaatcaaatggatgaaaacaaagaatcggaagataagtgtgaaggaatcgtcttggatgaagtattcaggaaggaattactcatctccagaataattttttttttcctaaagaagttaagtaagcagtattttcaggtaatgaagaataagttaaaatcttgggcctcaacattgaacattttttatctctgatgttttgtaatgttacttgctatcattccagtattgatgaaaatactattgaatgggtttaacctgcagacttctgttgactcatactctcaagagtggtaggggtgtgtagatggagaaaatgtacctcaaacagtgccaacactcaagactgtgagtagagcaataattttatgtcagcactaacctcactttaaaagtgtgagaaaaaagtttgtttacaggagcagaaacaggtctgttgtttctgaagaaatgtgatgtaactgatgtaaccattgacaatctatgtgtgcctttatacatttcatctctgttttaaaatatttttatgacaatcatgtttaaaattatttttagattacaagtaagctgcatgttaaaaattgagctgtgtaaggtagaggaaaaatagtgaaaactttgggattttaatctgtgtgtgcgtgtttgtgtgtgagagagagtgagaaatgtagtgtttcattttgtatgcattaaactgtcttgccaaaactcagatctaagattgttaaatagatatttggggaatttttttttaatcactttaaatgaaaaacgtcagctttactgggcattctggaagcaaaatatattatgctgatggtaaagtgagaaccttaagagtatactcatgatggtggaaagtgtgatggaccaaaatgcataagctatatacttcctgtgagtagtaattttagttacaatggagtagaaaaatatggtccatttaaacttgtcttctacctcataacggccttgcaagatacttttgaagaagcaaatgtctagagccttactttaagtaagttaaacaacttaagtggatgatttggaataagattgttacatccagctgtagaaaatgtggttttaattgggttgatgtgcatttttgaatatcacctaagacagttaatttttttaaatcttgagaaattacttctttggcattcttgacctgttagctaatataactatagattctgaatacttagcatatactatgctggggcacatatcttattttaccaacaatatgattatctatatggttatcttctttttctccctgatattttaatgctcaagtagaaaatggaaaatcatgaaggaaaaatacaacctgtgaaaattgtggcagttagctttgtgaagacacagtgacctctgtggagacatggaatatgcagaaagagatggttagtacagttgttctgtcgtctgcagttcagtcagggacaaattgagagaggaaagtttaagcagggtgcattagaagttgataaccagtccagcattcttagaacagatgggtttagagaacacgagttgtagttccttggcagaatgccatggtgaatataagaaactgtgaaattgagcttactgagtagaaaatgagaatactaaaaatgtgaagtttggagggtatgtattagatcatttctaatggtcctcagataatgatcattgcctgcctgactatgtaagattcttgttgggagcttaagaatagattcctgagctaggcctttggagactctggcatgctgtgtctaggagggagtctgtaaaacaatttttaatgaagaaatttaaaaattacacaaaactagaatagtgcattggtactcaacatccagatctgacacttatcactatcttaccatgtttgcttcatttgtcatttttttgtttgcttaagtatcttaaaatcccatacattgtgttatttcactgctgtgaacactttgggtagataccacgatatcacacctaacagaggcagcagcagtccttcggcttcatctcatagccagtccttaagcaaatttccctgattatctcaaaaatcatcttctagttggtttgttagaatcaacagaatataagtcacatgatgatttcgtttttaacaatcacctcagatgactttgatgttagctactttgagaaccactggaaattattttgccaacttgaaagttcaagttaggataccacaattcttggcacgtttggtggattataaatgtgattttgaaatattagaggaagcatttggggttaatgacaggatatgaatttatattagtaagtttgataagataaaatttcctcagtgaacggagaatctcagccccatgggctctaattgattgggacttgtgtagagcgtggtcacagtttaatccaactggactgtatgctgtggtctcactcatgttgtggcttatttacactgtcacacacactacattgtggatcagttggaaggttcttcatctggtttatttagacctgacctaattgatcattttaccataaattgaattatagtgaaaactgtcttttgggtactgtttctacctaaaattaaaggtatcacaaaatatgtataataatttttaaatgaattttctgaatttatctttagacaaggtaattcttttgaattctaaagaaatgcagttcttggagttgatgagaggttaaattatagatggacaacttagagaacgtattccatcttcatataaatggtctttcataaaacatagtgtatctatgcagtttatataaactacatgatttattatttgagtctatgtattctgacctcagaactatctctgggctacagtattaccaaagtgggatgcctttaaaatgcagtcaaacttcatttgtatgaagtagaaaagaacttgggaaacctttaaaaatatatattgtgatttatgctttaagaaaatgcatacttttttctaatgaagagtagttcataatatataagggttttaaggccctgaaataacattagtgcttactcattgctctctcatcttgcctccagtcagatgttattggtatagtgaaaagaagaccagattttgaactagatctggattctctttttagtaactcaggcatgttatttaaccttctctgtgccttaggtttttaagtacaatcagtgtacccttcaaacctcacaagatgaaactcagaagagataatggatttggaagcattttgcgtggcttatattatgccacgccagtgttactgttgaagttctgttttgttctgttgttttctgtacagagcgttcagtttactcaggctgaatgttttctgacatatatctccagtatgaatttgtttatgtaaggaagagtttttcaggaagagaaagtagagaagaaaagaatgatgtaactaaatcaaaaaagaaggaaaagagaggaagtgagaaaaggggtgaggaaagagaaaggagtaagaatggggatggcaaagggcagagtaagagaaaagatggaatgagtgtatggaaaattgagaagtagagatggagagaaatggtgtggaaacatttactttttgagttgtagccctcacactacatcagtttgcttgcctgggctctctggggtcaggaaaggtgctgacttccatggaatggggcagcagggcctgctgtatttggtttgttagtactagagttgtttcccaatcaccctactcactgatcatttagtgccaattcaacattttatgcctttttttttagtggatcccagtttgtgagctaggacctgtggaaatacaagtatcttcctttttaactttattgttttagccatcccaagtgttagactgcaagactaactacatattccccagtggaggttggaagtggaggggactgcttcattaggtctgaagggggccaaggaatgttttgcagcagttttccgcagattatactgacgagaggccaggtttgggaatcactgccctgccttggatggcaaattaagcaataaattacacctatttattcctcagttgggatactttcagttgaaccattctgagtagatttaagagaacaaaagacagcagaaataccttaaaagatattattggctgtcttatttttcagatatttgtatttaataaataccttagtagtagtcagaacctctttgagatgtttttagaaagaccactgatttgttttttaaaataatttttttggttccttagggtagagaagaaaagtaggggtgcaatatgtcaggtgtggggccagttatccatttattaaatgcaatttcaagtgtcttaaaaacaataattgccttattgcattttaatatttaataaagtagattaaataaagatttgtattataacagttattcttttatccattgccaaagcaacccttttttgcctattaaaatctggctaaactgttctgatgttgtttcttaattcattaaacatgaaactaggttttacaaactaaattatataaagacagaagtctaaaaatggtaccagaaaattttttttttaaaaattaatgtgttattcaaatatccagcaattaaagactcatgagaaaaacagaatagcatattagatgtaacagtttaaaatggattgcaaatcaatgtcagacttaaatagaaaatatttattatcacctcatttctaccaataatttcagatgtttaatgggactttgaaaagataggaaaaaatagaaatgaaaatttatctcacctttaatactgtgaatactatttggagggtccctggtccgncatttgactatcaaacttaagaactgacatggagcctttgattagtttatatacaggatctgaatatttacacacatagcacactatagcaacctcttgtaaaaaatcatgaagatagaatgcaacagtgtatattctattaaaaagtaaattggctgggtgtggtggctcatgcatgtaatcccagcactttgggaggccgaggcaggaggatcgcttgagcccaagagtttgagaccagcctaggtgacaaagtgagaccccatctctacaaaaaaattaaaaaattatccagatgtggtggtgtttgcctgcggtcctagctacacaggaagttgaggcaggaggattgcttgagtgcaagagtttgaggctgcagagagccaagattgcaccattgcactccagcctgggtgacagagcgagaccctgtctcaaaaaacaaaggaaattggctttgactatgaaaaacagccattttcaacctttttataaaacctcttcagggaatattggaatattatttttgtcaggcaaaaataatccagggcttgagcattgctgtagaatatgttatctgttcaaaacttagcagagcacgcatgcatcacatgcattgtcatcagtatttgagagctgaaccaatggtttttgatggttgccgtaacagaagatctgtgaagaggatggtggtttgcacctgttcctgaagtcaaactggaaaaggttgcaggtatttcaattttctcaatcattttgcataaatgtattaatattttgagtagtaatagttctnnnnctgncagaaggcatcattgtatactgtggtatgtagagaatactacttttacactgctctttatcttaaaatgttttggtatactgtgaatattttcctctaagtatttggtgtattttgacagttattaaaggagaatataaaattaaagattctggtctaaactaagaataatggaaagttgcttcgtcctgccttagaggagttttcagttcatcctcttcttgagaaactatgtgttgctgttactaaataaacatttactcaataaacgttttatttcctcaaaaaaaaaaaaaaaaaaaaaaaaaaaaaaaaaaaaaaaaaaaaaaaaaaaaaaaaaaaaaaaaaaaaaaaaaaaaaaaaaaaa

SEQ ID NO: 5278 - DNA, 625 bp, Homo sapiens
tttttttttttttttaagtagtcttgaacatccacaagaaagtactgttcaaaccatcccttaaggagaggaagattcatctgggcttttctgtttgcttgctagtacactggaaacttggctcatttatttcccctgagagggtttgggcacaattttctgtagagcagcaagggtttcattatgaggtcacctgaagtattggcaaaaaatggaaatgtcagcttctctgattttgttgacctcagcatcagtgggcgcttgctcttcagaagtattcaaagggtttcaaagcttgacactctcgatagcactaaagatttgtgcaggcatgtaatccccttcttcagccacttcctgaatttgtggtgaatacaacatgagagctgcaggaactgtttgttctttggcataactgtcaaataagacctggtctccacattatggtacaccctaaattcctcaaaccatcccttactcccaacaaatttttttctggattcatttcagtgtctaaagacatgtctctgaaaattcctcttgcatagtcacaaatctcttgcatggaatgtggttcattattcttcagtttatcttcaatccagagatttaacttcatttccat

SEQ ID NO: 5279 - DNA, 356 bp, Homo sapiens
ttatggatgtaaattcaaacagtcatgctgagctattccggcgcgtgggacagtcacgttaaagacactaggtcgggcgccacagtgccacccaaggagaagaaggtaacgtggcaactgcacatttgccacacggttggaagtccttccttccttgctctgacactaacacggctcttatactcgacctttgtcccctctgtcttttttctctctcttttttttaactaatggagacacaggcataggttaaaatcagagatatcttgctcaggttttcagagcaaacactgtgttccagcccacagcatacaatagtatatgcagaatttagacactatcttcccaaactaaag

SEQ ID NO: 5280 - DNA, 3933 bp, Homo sapiens
  misc_feature (2022)..(2041): n is a, c, g, or t
  misc_feature (2043)..(2069): n is a, c, g, or t
ttctgcccttcccccgcttaggggggcgggggggggggaaaggaaaataatacaatttcaggggaagtcgccttcaggtctgctgcttttttatttttttttttttaattaaaaaaaaaaaggacatagaaaacatcagtcttgaacttctcttcaagaacccgggctgcaaaggaaatctcctttgtttttgttatttatgtgctgtcaagttttgaagtggtgatctttagacagtgactgagtatggatcatttgaacgaggcaactcaggggaaagaacattcagaaatgtctaacaatgtgagtgatccgaagggtccaccagccaagattgcccgcctggagcagaacgggagcccgctaggaagaggaaggcttgggagtacaggtgcaaaaatgcagggagtgcctttaaaacactcgggccatctgatgaaaaccaaccttaggaaaggaaccatgctgccagttttctgtgtggtggaacattatgaaaacgccattgaatatgattgcaaggaggagcatgcagaatttgtgctggtgaaaaaagatatgcttttcaaccagctgatccaaatggcattgctgtctctaggttattcacatagctctgctgcccaggccaaagggctaatccaggttggaaagtggaatccagttccactgtcttacgtgacagatgcccctgatgctacagtagcagatatgcttcaagatgtgtatcatgtggtcacattgaaaattcagttacacagttgccccaaactagaagacttgcctcccgaacaatggtcgcacaccacagtgaggaatgctctgaaggacttactgaaagatatgaatcagagttcattggccaaggagtgccccctttcacagagtatgatttcttccattgtgaacagtacttactatgcaaatgtctcagcagcaaaatgtcaagaatttggaaggtggtacaaacatttcaagaagacaaaagatatgatggttgaaatggatagtctttctgagctatcccagcaaggcgccaatcatgtcaattttggccagcaaccagttccagggaacacagccgagcagcctccatcccctgcgcagctctcccatggcagccagccctctgtccggacacctcttccaaacctgcaccctgggctcgtatcaacacctatcagtcctcaattggtcaaccagcagctggtgatggctcagctgctgaaccagcagtatgcagtgaatagacttttagcccagcagtccttaaaccaacaatacttgaaccaccctccccctgtcagtagatctatgaataagcctttggagcaacaggtttcgaccaacacagaggtgtcttccgaaatctaccagtgggtacgcgatgaactgaaacgagcaggaatctcccaggcggtatttgcacgtgtggcttttaacagaactcagggcttgctttcagaaatcctccgaaaggaagaggaccccaagactgcatcccagtctttgctggtaaaccttcgggctatgcagaatttcttgcagttaccggaagctgaaagagaccgaatataccaggacgaaagggaaaggagcttgaatgctgcctcggccatgggtcctgcccccctcatcagcacaccacccagccgtcctccccaggtgaaaacagctactattgccactgaaaggaatgggaaaccagagaacaataccatgaacattaatgcttccatttatgatgagattcagcaggaaatgaagcgtgctaaagtgtctcaagcactgtttgcaaaggttgcagcaaccaaaagccagggatggttgtgcgagctgttacgctggaaagaagatccttctccagaaaacagaaccctgtgggagaacctctccatgatccgaaggttcctcagtcttcctcagccagttagtacgccatttatgaacaggagagcaacgcggtgcatcaccatggcgacaggccgccccacattatccatgttccagcagagcagattnnnnnnnnnnnnnnnnnnnngnnnnnnnnnnnnnnnnnnnnnnnnnnnccgccgcctccacagccacagcagcagccacagacaggccctcggctccccccacggcaacccacggtggcctctccagcagagtcagatgaggaaaaccgacagaagacccggccacgaacaaaaatttcagtggaagccttgggaatcctccagagtttcatacaagacgtgggcctgtaccctgacgaagaggccatccagactctgtctgcccagctcgaccttcccaagtacaccatcatcaagttctttcagaaccagcggtactatctcaagcaccacggcaaactgaaggacaattccggtttagaggtcgatgtggcagaatataaagaagaggagctgctgaaggatttggaagagagtgtccaagataaaaatactaacacccttttttcagtgaaactagaagaagagctgtcagtggaaggaaacacagacattaatactgatttgaaagactgagataaaagtatttgtttcgttcaacagtgccactggtatttactaacaaaatgaaaagtccaccttgtcttctctcagaaaacctttgttgttcattgtttggccaatgaatcttcaaaaacttgcacaaacagaaaagttggaaaaggataatacagactgcactaaatgttttcctctgttttacaaactgcttggcagccccaggtgaagcatcaaggattgtttggtattaaaatttgtgttcacgggatgcaccaaagtgtgtaccccgtaagcatgaaaccagtgttttttgttttttttttagttcttattccggagcctcaaacaagcattataccttctgtgattatgatttcctctcctataattatttctgtagcactccacactgatctttggaaacttgccccttatttaaaaaaaaaaaagaaaaaaaagagtttgttactctattgtatgttacaaaagaactatagactgtggaatgcagtttaaagatgacatatgccaacaaatgccttgtattatatggcactgccgtaattcaaatttgtttttattttggaaataaaagttcactgtacttttttttcattctcattgttacatgattttttaaaaaaaggaaaagaaaatgtgaaacacaatttagtcctcattatttatttgtagatcctgcagcatcatgttgtaattaattttttggaagtttccgttaaatgtaatattgcttctcttgttaccatactgattcttttctatttataaatgtattttgatgggcagtaaaacaaagtgtcttaaaagttttaaatagagaaaatgtgctttacacagttgcctataaaaagtgctctatgttatccaagcaattcatactataagcttcactcttattgttgtatgcaatttttactatcatgcaaataagcttaggtaaataaaactaatagatcaccttagaaaattatgcaattaatgtgaaaataattgatgtttgcaatgtgtcttcctttggtttacaatcaattttaaagctacatctgtataaaatttctgtataaaggtgtatttcttttttatgagtttatggctatgaaaacagctattttgttacagctggctgtttttataagtgtatcacaattttctttatgcagaaatgttctgactaggagtggttattgactgtaactacacaattaaaattgtttgtatcgtatgacatggtagggtttgtctgcttatgtgaagtaactaaaggagtcaaaggatggccctctcatttaggtgcatgttaataacttgttatttcactgattttaaaaagagcaattgacaagttacttgaaacactgtaaatttaaatcacaaacacatgctcattttt

SEQ ID NO: 5281 - DNA, 1358 bp, Homo sapiens
  misc_feature (897)..(897): n is a, c, g, or t
acccaccccccaaggaaagccagggggggattttctttatttcaaattaaagggcccccaaaattacccctcccaccccaagggaaaaaaccccagggccaagcccaagcggtgggaggggctgtttaaaggatgctggatgagatctcctgccagctgagcgcctcagtgcccgtggacgtgatgccaggcgagtttgatccacccaattacacgctcccccagcagccctccacccctgcatgttcccgctggccactgcctactccacgctccagctggtcaccaacccctaccaggccaccattgatggagtcagatttttggggacatcaggacagaacgtgagtgacattttccgatacagcagcatggaggatcacttggagatcctggagtggaccctgcgggtccgtcacatcagccccacagcccctgacactctaggttgttaccccttctacaaaactgacccgttcatcttcccagagtgcccgcatgtctacttttgtggcaacacccccagctttggctccaaaatcatccgaggtcctgaggaccagacagtgctgttggtgactgtccctgacttcagtgccacgcagaccgcctgccttgtgaacctgcgcagcctggcctgccagcccatcagcttctcgggcttcggggcagaggacgatgacctgggaggcctggggctgggcccctgactcaaaaaagtggttttgaccagagaggcccagatggaggctgttcattccctgcagtgtcggcattgtaaataaagcctgagcacttgctgatgcgaaaaaaaaaagtgccttcccctcccgggccaggctccccgtgcgcgggccctgccctttcctcccgagccccaccggatccgacgcgcanacccgctcagcagtcacagaagcagggccagccacctgggtcttaacgaggagtccagggagtagggagaatgttcttcccggcaacatacctacgctaatactggtctggaaagggaatcttccatactggacaagttccaataatttccaaccgtggttcaaaagtggaatttggtcccattccaaccttcaacaaggagaagccttcccagcgccataagatcgggaaccgcgggaaaacccgcttcgtagaaccccagtattgaataccccgggaagaagcgcggtcaccgcaaacgaccacagactacatatcaggaagtggagacaccccacaagcaacgcgtgtgacatgacgaacgactacacagtatcacaattagacgacagcgcggatgacacaatcggcaagacaacaccactgatcacacagcttctaaccaagaagacgttacatcc

SEQ ID NO: 5282 - DNA, 1713 bp, Homo sapiens
acccttataaattgtgccctcaaacggctcataccagtcttctctaccggcgtgactggtcattcggttccctatcatggatgtcctacacagccccgtctcctgagatggaatgcccgctagacgggattgacgaatttccctgtgtttcttctctacactttatgtggttctatccatgctacactgccatgatgctgcacaattcttcagtttctctactcccttttgtcagtgctagaacacaggtcatcattatgctggtgtatgggttatcaaagagcacttgagcttgtctgaagcccaaagcctgaggacagtatagaccctgatgcaggtcagcccatggaggcagatgcccttgctgggcctggtggttttccaagccctcaggctggtcctgaccaggatggagcaagcttcttcccttgtctcatgagctcctgatccagagggcatttgagcagctgaataacctgcacaggcttgctgtatgacccctggccacagccttccctctgcattgacctggaggggagaggtcagccttgacctaatgaggtagctatagttgcagcccaaggacagttcagagatcaggatcagctttgaaggctggattctatctacataagtcctttcaattccaccagggccagagcagctccaccactgtgcacttagccatgatggcaacagaaaccaagagacacaattacgcaggtatttagaagcagagggacaaccagaaggcccttaactatcaccagtgcatcacatctgcacactctcttctccattccctagcaggaacttctagctcatttaacagataaagaaactgaggcccacggtttcagctagacaatgatttggccaggcctagtaaccaaggccctgtctctggctactccctggaccacgaggctgattcctctcatttccagcttctcagtttctgcctgggcaatggccaggggccaggagtggggagagttgtgatggaggggagaggggtcacacccaccccctgcctggttctaggctgctgcacaccaaggccctgcatctgtctgctctgcatatatgtctctttggagttggaatttcattatatgttaagaaaataaaggaaaatgacttgtaaggtcaaaaaaaaaaaaaaaaaaaaaaaaaaaaaaaaaaagaaaataaaaaaacagaaaagcaaaacacaaacgccaagaacaacgacaacaatgaacgagcaacacacgagacaacatcaccaccgccaacgcaagacacacagacacataaaaaaacaacggcgacgcggatcctcagcgcggctgtcgcgcagcggcgcggttacatagtcagacacaaaacaagcaaactcatcgcgtaacccacgtacacccacacgccatgggccgcacccgacgacgctgctgccgccagtcactataaaactaaggtcgtcgaggacagaaatcgtagcataaacaactcatacggtcggcgcaggcgaagaccagatatccccgtagtgcggtgcatagtgcatgttaggtagccgctaagaagagaagcatacatagtcacagtagggcggtggaaccggtcgcacaacagagaggactccacacaaccatagtcagtatactagctgacatcctccatgtagatgagacgacccgtcgctctcaccctcgggtaacgaacaacgag

SEQ ID NO: 5283 - DNA, 1514 bp, Homo sapiens
tctccgccaaatgtctacacagtatacacaggacatcgttgctgccgccgtgactggttttctgtccccaagaacgtgacgttcgtgatgtcctgcccgccgggagtctttccccacaccccagccatcgccgcccgctcccaggaggccagggcaggctgcgtgggctggaggcgggcgaggccggcccaccccctcgctggcactgactttgccttgaacagaccccccgaccctcccccacaagcctttaattgagagccgctctctgtaagtgtttgcttgtgcaaaagggaatagtgccgtggaggtgtgtgtgtccatggcatccggagcgaggcgactgtcctgcgtgggtagccctcggccggggagtgaggccaccaaccaaagtcagttccttcccacctgtgtttctgtttcgtttttttttttcttttttttctatatatattttttgttgaattctattttatttttaattctctcttctcctccagacacaatggcactgcttatctccgaaatggtgtgatcgtctcctcattgagcagcggctgccaccgcgctgtgggtagtgtgtgaccgtggctgtactgtatagtgaacatagttggcatatctttgtttgaagtttgttggtgactccaccaaactggtgtgaaaaaagaaaaaagctcaaaaaaatccacaaaaagacaaaacacacaaaaaaaatcctgcctatattttactcagtttcaaactttattagtctatttttaattataaaaccagaaagctacaatttcttttctttccccttcacccccccccccccccacccatttgttggcttttttgttttttaatgtcagatctgttgagttggtttttttggttttggtttttgtttttgtttttgttttttactgagaaaggaagggccaagggatgaggtgggaaccgggccctgggggcgccacagactaaggcagagactcccctacctggcgcccagccccaaccagctggccgctcctgcccatgcttttttttttttttttttttaatttttataattggagcccctggtgaggttacgcgtgccatgagaacccactctacaccacgacgctggtgcctcagtgttggccaaactctggagtcactgactggtttgactttcatacggtgaatatgcatttggtctgtactgatcatggaataaacacatctctctttttttaaaaaaaaaaaaaaaaaaaaatatctttgtgacccaactgttccctagcttaggcccaaggggacccctggacccaggacaccctctgaccaggaatacgccaggagataccttagccctctctgtgacctgtcctgtctgcctggcgggcaccagaattcaatgcacaccccaaggtgaactgtgacaagagcccggtaccaatctggtgacctggttaagttgaagggtgtcttctaccaggaaaccactgccagacctccagccagtattttcccgtccacct

SEQ ID NO: 5284 - DNA, 408 bp, Homo sapiens
cacttttgcctcctgcctcccaccatcagcatgccagcaaatttcctttctcatttgtagctacttttaaagtaaatgttgaagtcagtctttcatgttgactaatttctcatcttcattctcatcatttttctttctgtcggtcctaaggatcagcgttctctctctgaacacccttcagtgctgctggccatcctcattatggtcttgttcaaactagtgtttcttgagtccctcctgtaagtctgttaatcctggatttcaacctctggggcaaagagggcctgtttgaagtttccttaagttcataataatggcatctggagcaaataataagcccttgtgtgtgtttttggcagaaaagccatgaggacaagcagatgctaataaaagaatctgattcttaaa

SEQ ID NO: 5285 - DNA, 7067 bp, Homo sapiens
  misc_feature (1721)..(1735): n is a, c, g, or t
  misc_feature (3584)..(3584): n is a, c, g, or t
ttctccccgccccccagttgttgtcgaagtctgggggttgggactggaccccctgattgcgtaagagcaaaaagcgaaggcgcaatctggacactgggagattcggagcgcagggagtttgagagaaacttttattttgaagagaccaaggttgagggggggcttatttcctgacagctatttacttagagcaaatgattagttttagaaggatggactataacattgaatcaattacaaaacgcggtttttgagcccattactgttggagctacagggagagaaacaggaggagactgcaagagatcatttgggaaggccgtgggcacgctctttactccatgtgtgggacattcattgcggaataacatcggaggagaagtttcccagagctatggggacttcccatccggcgttcctggtcttaggctgtcttctcacagggctgagcctaatcctctgccagctttcattaccctctatccttccaaatgaaaatgaaaaggttgtgcagctgaattcatccttttctctgagatgctttggggagagtgaagtgagctggcagtaccccatgtctgaagaagagagctccgatgtggaaatcagaaatgaagaaaacaacagcggcctttttgtgacggtcttggaagtgagcagtgcctcggcggcccacacagggttgtacacttgctattacaaccacactcagacagaagagaatgagcttgaaggcaggcacatttacatctatgtgccagacccagatgtagcctttgtacctctaggaatgacggattatttagtcatcgtggaggatgatgattctgccattataccttgtcgcacaactgatcccgagactcctgtaaccttacacaacagtgagggggtggtacctgcctcctacgacagcagacagggctttaatgggaccttcactgtagggccctatatctgtgaggccaccgtcaaaggaaagaagttccagaccatcccatttaatgtttatgctttaaaagcaacatcagagctggatctagaaatggaagctcttaaaaccgtgtataagtcaggggaaacgattgtggtcacctgtgctgtttttaacaatgaggtggttgaccttcaatggacttaccctggagaagtgaaaggcaaaggcatcacaatgctggaagaaatcaaagtcccatccatcaaattggtgtacactttgacggtccccgaggccacggtgaaagacagtggagattacgaatgtgctgcccgccaggctaccagggaggtcaaagaaatgaagaaagtcactatttctgtccatgagaaaggtttcattgaaatcaaacccaccttcagccagttggaagctgtcaacctgcatgaagtcaaacattttgttgtagaggtgcgggcctacccacctcccaggatatcctggctgaaaaacaatctgactctgattgaaaatctcactgagatcaccactgatgtggaaaagattcaggaaataaggtatcgaagcaaattaaagctgatccgtgctaaggaagaagacagtggccattatactattgtagctcaaaatgaagatgctgtgaagagctatacttttgaactgttaactcaagttccttcatccattctggacttggtcgatgatcaccatggctcaactgggggacagacggtgaggtgcacagctgaaggcacgccgcttnnnnnnnnnnnnnnnatgatatgcaaagatattaagaaatgtaataatgaaacttcctggactattttggccaacaatgtctcaaacatcatcacggagatccactcccgagacaggagtaccgtggagggccgtgtgactttcgccaaagtggaggagaccatcgccgtgcgatgcctggctaagaatctccttggagctgagaaccgagagctgaagctggtggctcccaccctgcgttctgaactcacggtggctgctgcagtcctggtgctgttggtgattgtgatcatctcacttattgtcctggttgtcatttggaaacagaaaccgaggtatgaaattcgctggagggtcattgaatcaatcagcccggatggacatgaatatatttatgtggacccgatgcagctgccttatgactcaagatgggagtttccaagagatggactagtgcttggtcgggtcttggggtctggagcgtttgggaaggtggttgaaggaacagcctatggattaagccggtcccaacctgtcatgaaagttgcagtgaagatgctaaaacccacggccagatccagtgaaaaacaagctctcatgtctgaactgaagataatgactcacctggggccacatttgaacattgtaaacttgctgggagcctgcaccaagtcaggccccatttacatcatcacagagtattgcttctatggagatttggtcaactatttgcataagaatagggatagcttcctgagccaccacccagagaagccaaagaaagagctggatatctttggattgaaccctgctgatgaaagcacacggagctatgttattttatcttttgaaaacaatggtgactacatggacatgaagcaggctgatactacacagtatgtccccatgctagaaaggaaagaggtttctaaatattccgacatccagagatcactctatgatcgtccagcctcatataagaagaaatctatgttagactcagaagtcaaaaacctcctttcagatgataactcagaaggccttactttattggatttgttgagcttcacctatcaagttgcccgaggaatggagtttttggcttcaaaaaattgtgtccaccgtgatctggctgctcgcaacgtcctcctggcacaaggaaaaattgtgaagatctgtgactttggcctggccagagacatcatgcatgattcgaactatgtgtcgaaaggcagtacctttctgcccgtgaagtggatggctcctgagagcatctttgacaacctctacaccacactgagtgatgtctggtcttatggcattctgctctgggagatcttttcccttggtggcaccccttaccccggcatgatggtggattctactttctacaataagatcaagagtgggtaccggatggccaagcctgaccacgctaccagtgaagtctacgagatcatggtgaaatgctggaacagtgagccggagaagagaccctccttttaccacctgagtgagattgtggagaatctgctgcctggacaatataaaaagagttatgaaaaaattcacctggacttcctgaagagtgaccatcctgctgtggcacgcatgcgtgtggactcagacaatgcatacattggtgtcacctacaaaaacgaggaagacaagctgaaggactgggagggtggtctggatgagcagagactgagcgctgacagtggctacatcattcctctgcctgacattgaccctgtccctgaggaggaggacctgggcaagaggaacagacacagctcgcagacctctgaagagagtgccattgagacgggttccagcagttccaccttcatcaagagagagngtacccggctataacatgatcaacatgtggacgacatcggcatagactcttcagacctggtggaagacagcttcctgtaactggcggattcgaggggttccttccacttctggggccacctctggatcccgttcagaaaaccactttattgcaatgcggaggttgagaggaggacttggttgatgtttaaagagaagttcccagccaagggcctcggggagcgttctaaatatgaatgaatgggatattttgaaatgaactttgtcagtgttgcctctcgcaatgcctcagtagcatctcagtggtgtgtgaagtttggagatagatggataagggaataataggccacagaaggtgaactttgtgcttcaaggacattggtgagagtccaacagacacaatttatactgcgacagaacttcagcattgtaattatgtaaataactctaaccaaggctgtgtttagattgtattaactatcttctttggacttctgaagagaccactcaatccatccatgtacttccctcttgaaacctgatgtcagctgctgttgaactttttaaagaagtgcatgaaaaaccatttttgaaccttaaaaggtactggtactatagcattttgctatcttttttagtgttaagagataaagaataataattaaccaaccttgtttaatagatttgggtcatttagaagcctgacaactcattttcatattgtaatctatgtttataatactactactgttatcagtaatgctaaatgtgtaataatgtaacatgatttccctccagagaaagcacaatttaaaacaatccttactaagtaggtgatgagtttgacagtttttgacatttatattaaataacatgtttctctataaagtatggtaatagctttagtgaattaaatttagttgagcatagagaacaaagtaaaagtagtgttgtccaggaagtcagaatttttaactgtactgaataggttccccaatccatcgtattaaaaaacaattaactgccctctgaaataatgggattagaaacaaacaaaactcttaagtcctaaaagttctcaatgtagaggcataaacctgtgctgaacataacttctcatgtatattacccaatggaaaatataatgatcagcaaaaagactggatttgcagaagttttttttttttttcttcatgcctgatgaaagctttggcaaccccaatatatgtattttttgaatctatgaacctgaaaagggtcagaaggatgcccagacatcagcctccttctttcaccccttaccccaaagagaaagagtttgaaactcgagaccataaagatattctttagtggaggctggatgtgcattagcctggatcctcagttctcaaatgtgtgtggcagccaggatgactagatcctgggtttccatccttgagattctgaagtatgaagtctgagggaaaccagagtctgtatttttctaaactccctggctgttctgatcggccagttttcggaaacactgacttaggtttcaggaagttgccatgggaaacaaataatttgaactttggaacagggttggaattcaaccacgcaggaagcctactatttaaatccttggctttaggttaggtgacgtttaatgccatctagctagcaattgcgaccttaatttaactttccagtcttagctgaggctgagaaagctaaagtttggttttgacaggttttccaaaagtaaagatgctacttcccactgtatgggggagattgaactttccccgtctcccgtcttctgcctcccactccataccccgccaaggaaaggcatgtacaaaaattatgcaattcagtgttccaagtctctgtgtaaccagctcagtgttttggtggaaaaaacattttaagttttactgataatttgaggttagatgggaggatgaattgtcacatctatccacactgtcaaacaggttggtgtgggttcattggcattctttgcaatactgcttaattgctgataccatatgaatgaaacatgggctgtgattactgcaatcactgtgctatcggcagatgatgctttggaagatgcagaagcaataataaagtacttgactacctactggtgtaatctcaatgcaagccccaactttcttatccaactttttcatagtaagtgcgaagactgagccagattggccaattaaaaacgaaaacctgactaggttctgtagagccaattagacttgaaatacgtttgtgtttctagaatcacagctcaagcattctgtttatcgctcactctcccttgtacagccttattttgttggtgctttgcattttgatattgctgtgagccttgcatgacatcatgaggccggatgaaacttctcagtccagcagtttccagtcctaacaaatgctcccacctgaatttgtatatgactgcatttgtgggtgtgtgtgtgttttcagcaaattccagatttgtttccttttggcctcctgcaaagtctccagaagaaaatttgccaatctttcctactttctatttttatgatgacaatcaaagccggcctgagaaacactatttgtgactttttaaacgattagtgatgtccttaaaatgtggtctgccaatctgtacaaaatggtcctatttttgtgaagagggacataagataaaatgatgttatacatcaatatgtatatatgtatttctatatagacttggagaatactgccaaaacatttatgacaagctgtatcactgccttcgtttatatttttttaactgtgataatccccacaggcacattaactgttgcacttttgaatgtccaaaatttatattttagaaataataaaaagaaagatacttacatgttcccaaaacaatggtgtggtgaatgtgtgagaaaaactaacttgatagggtctaccaatacaaaatgtattacgaatgcccctgttcatgtttttgttttaaaacgtgtaaatgaagatctttatatttcaataaatgatatataatttaaagttaaaaaaaaaaaaaaaaaaaacaaaacaaacaaacaaaacacaaaaaacaaaaaaacaaacaaaacaacacacaaaaacacaacaaaaaaccaaaaaaacaaaccacaaccacacaccaacaaaaaaaacacagaaagaaaagaaagagacggaagaggaagagagggggaggcgccgggcggcgaaaagacagagagaggcacgggggggaggagcggaggcgagaggagagaggggaagggcaaagagaccgagacagagggaaaaacacaaagaacacaagacagaaaaaggaaaagaagaacagaagggaagaaggaaacaagagcgaaaagaaagagagagaaagaaagaaccgaggagaagagagagagaaaggagcagcagagaagcaaagagaagagaaaagagaggagaaaagaacaagcgcacg

SEQ ID NO: 5286 - DNA, 763 bp, Homo sapiens
cccgtccagtctggcctgggcgccgcgggaacgagggtcctagctgccgccacccgaacagcctgtcctggtgccccggctccctgccccgcgcccagtcatgaccctgcgcccctcactcctcccgctccatccgctgctgctgctgctgctcagtgcggcggtgtgccgggctgaggctgggctcgaaaccgaaagtcccgtccggaccctccaagtggagaccctggtggagcccccagaaccatgtgccgagcccgctgcttttggagacacgcttcacatacactacacgggaagcttggtagatggacgtattattgacacctccctgaccagagaccctctggttatagaacttggccaaaagcaggtgattccaggtctggagcagagtcttctcgacatgtgtgtgggagagaagcgaagggcaatcattccttctcacttggcctatggaaaacggggatttccaccatctgtcccagcggatgcagtggtgcagtatgacgtggagctgattgcactaatccgagccaactactggctaaagctggtgaagggcattttgcctctggtagggatggccatggtgccagccctcctgggcctcattgggtatcacctatacagaaaggccaatagacccaaagtctccaaaaagaagctcaaggaagagaaacgaaacaagagcaaaaagaaataataaataataaattttaaaaaacttaaaaaaaaaaaaaaaaaaaaaaaaaaaaaaaaa

SEQ ID NO: 5287 - DNA, 2115 bp, Homo sapiens
agcggagagaatacggctaggtacgaggctttttatagcggccgcgggcggcggcggcagcggttggaggttgtaggaccggcgaggaataggaatcatggcggctgcgctgttcgtgctgctgggattcgcgctgctgggcacccacggagcctccggggctgccggcacagtcttcactaccgtagaagaccttggctccaagatactcctcacctgctccttgaatgacagcgccacagaggtcacagggcaccgctggctgaaggggggcgtggtgctgaaggaggacgcgctgcccggccagaaaacggagttcaaggtggactccgacgaccagtggggagagtactcctgcgtcttcctccccgagcccatgggcacggccaacatccagctccacgggcctcccagagtgaaggctgtgaagtcgtcagaacacatcaacgagggggagacggccatgctggtctgcaagtcagagtccgtgccacctgtcactgactgggcctggtacaagatcactgactctgaggacaaggccctcatgaacggctccgagagcaggttcttcgtgagttcctcgcagggccggtcagagctacacattgagaacctgaacatggaggccgaccccggccagtaccggtgcaacggcaccagctccaagggctccgaccaggccatcatcacgctccgcgtgcgcagccacctggccgccctctggcccttcctgggcatcgtggctgaggtgctggtgctggtcaccatcatcttcatctacgagaagcgccggaagcccgaggacgtcctggatgatgacgacgccggctctgcacccctgaagagcagcgggcagcaccagaatgacaaaggcaagaacgtccgccagaggaactcttcctgaggcaggtggcccgaggacgctccctgctccgcgtctgcgccgccgccggagtccactcccagtgcttgcaagattccaagttctcacctcttaaagaaaacccaccccgtagattcccatcatacacttccttcttttttaaaaaagttgggttttctccattcaggattctgttccttaggattttttccttctgaagtgtttcacgagagcccgggagctgctgccctgcggccccgtctgtggctttcagcctctgggtctgagtcatggccgggtgggcggcacagccttctccactggccggagtcagtgccaggtccttgccctttgtggaaagtcacaggtcacacgaggggccccgtgtcctgcctgtctgaagccaatgctgtctggttgcgccatttttgtgcttttatgtttaattttatgagggccacgggtctgtgttcgactcagcctcagggacgactctgacctcttggccacagaggactcacttgcccacaccgagggcgaccccgtcacagcctcaagtcactcccaagccccctccttgtctgtgcatccgggggcagctctggagggggtttgctggggaactggcgccatcgccgggactccagaaccgcagaagcctccccagctcacccctggaggacggccggctctctatagcaccagggctcacgtgggaacccccctcccacccaccgccacaataaagatcgcccccacctccacggtcaaaaaaaaaaaaaaaaaaaaaaaaaaaaacaaacaaagcaacaccaagacagacagaaaagcagaaacaggagcacacgaagaagagcggccataaccagcagaactacaagacaacgcagaacgacgaacaatacacaaacaaaacagagaacaaaggacaggaccaggcaagacagagaggagaaaaacaagagagaccgcataaatgaaagccagcgcaaagagcggacacacactcatcaaagcgaccacagggaacacaagcacaacaggcgcaagagacaaggaaagcgacacacaagaagagaggaaacaaagagaacacaagaaagaacaaaaaacaagggaaacacagcagagaaaaggagaaacacaggaggacaacagagcaacaaagaacaaccacgcagcagaacacagacagggcaaacgcagcgcaagcacaggacgtccaaaaa

SEQ ID NO: 5288 - DNA, 1330 bp, Homo sapiens
tgaggcttgcctgcttctctggcccctggtcctgtcctgttctccagcatggtgtgtctgaagctccctggaggctcctgcatgacagcgctgacagtgacactgatggtgctgagctccccactggctttggctggggacacccgaccacgtttcttgtggcagcttaagtttgaatgtcatttcttcaatgggacggagcgggtgcggttgctggaaagatgcatctataaccaagaggagtccgtgcgcttcgacagcgacgtgggggagtaccgggcggtgacggagctggggcggcctgatgccgagtactggaacagccagaaggacctcctggagcagaggcgggccgcggtggacacctactgcagacacaactacggggttggtgagagcttcacagtgcagcggcgagttgagcctaaggtgactgtgtatccttcaaagacccagcccctgcagcaccacaacctcctggtctgctctgtgagtggtttctatccaggcagcattgaagtcaggtggttccggaacggccaggaagagaaggctggggtggtgtccacaggcctgatccagaatggagattggaccttccagaccctggtgatgctggaaacagttcctcggagtggagaggtttacacctgccaagtggagcacccaagtgtgacgagccctctcacagtggaatggagagcacggtctgaatctgcacagagcaagatgctgagtggagtcgggggcttcgtgctgggcctgctcttccttgggggccgggctgttcatctacttcaggaatcagaaaggacactctgggacttcagccaacagggattcctgagctgaaatgcagaatgaccacatttcaagggaagaacctttctgtccccagctttttgcagaaatgaaaaagctttccctggcttgggcagttattcttcccccaagaaaaagggctttctccaggaacctgggttgcctacttggtttcgggcaactggcagaaaaattgtcctccctttggggcttcctcagctcctgcccttggcctgaagtcccagcattggtggcagcgcctcatcttcaacttttgtgctcccctttgcctaaaccctatggcctcctgtgcatctgtactcaccctgtaccacaaacacattacattattaaatgtttcttcaaaacgattgggagtttaaaaaaaaagacaaaagacacacaaaaacaaacaaaacaacacaaacaaacaccacaacaacccaaaaaacaaaaaagacaaaaccagcgggggggcgcgcgccgtcctgaagagatcccccccccg

SEQ ID NO: 5289 - DNA, 776 bp, Homo sapiens
ggaatcgagctcggtaccatataggttggacgaggttgtggctgtgacagcccggaaggaagaggtggcttcctcatgagaagagagaggacacttgctcttccaaggaccctcttgtttgcaatgaggacagggtcctggaagtggcttgtaacctggcggtttggaacattctctactccagtgtcctggatttctgcagcaatgacaggcccccattctgttagtagtgtagggatgagccttggggttattagatgaagaaaaagaatgtgccaaggctgttgccatgtaattagcttagtgatggcattcttcctcctccaattcagccttttttatttttgatgttttctcctggttattgaaaacctcaaaggctgtatttaataaaataggaaagggagtttgtgggccttgctctaatttttggagtttttgtcttatgtctgggtaagcctgacttacaaaatgtacagcgagaatggattggccttcagggctttcagggtctaaatttacatatttacgcatggcctccaccaatctagcttggaaaagggtgaggttctcagacggctcctgggtgacttcttgtaatttagaaaatttaacaggtcttagtacaggctttttcattccttcccacaagcaagttatcatataatctcatccggccctgcctctgtttgggccgacatcagcagcctgatacagccaattgtttctgtgtcagggacagctttcgtccaaccaatatggtaccggctcgattc

SEQ ID NO: 5290 - DNA, 1255 bp, Homo sapiens
  misc_feature (7)..(10): n is a, c, g, or t
tgagcgnnnnctttccttcaagagaaatcggaaggagggtggggtgattcttctgcctcctcacccacagaggaagagcaggagcagggggagatcggtgcctgcagcgacgagggcactgctcaggaagggaaggccgcagccacccctgagagccaggaaccccaggccaagggggcagaggctagtgcagcctcagaagaagaggcagggccccaggctacagagccatccactccctcggggccggagagtggccctacaccagccagcgctgagcagaatgagtagctaggtaggggcaggtgggtgatctctaagctgcaaaaactgtgctgtccttgtgaggtcactgcctggacctggtgccctggctgccttcctgtgcccagaaaggaaggggctattgcctcctcccagccacgttccctttcctcctctccctcctgtggattctcccatcagccatctggttctcctcttaaggccagttgaagatggtcccttacagcttcccaagttaggttagtgatgtgaaatgctcctgtccctggccctacctccttccctgtccccacccctgcataaggcagttgttggttttcttccccaattcttttccaagtaggttttgtttaccctactccccaaatccctgagccagaagtggggtgcttatactcccaaaccttgagtgtccagccttcccctgttgtttttagtctcttgtgctgtgcctagtggcacctgggctggggaggacactgccccgtctaggtttttataaatgtcttactcaagttcaaacctccagcctgtgaatcaactgtgtctcttttttgacttggtaagcaagtattaggctttggggtggggggaggtctgtaatgtgaaacaacttcttgtctttttttctcccactgttgtaaataacttttaatggccaaaccccagatttgtactttttttttttttctaactgctaaaaccattctcttccacctggttttactgtaacatttggaaaaggaataaatgtcgtccctttaaaaaaaaaaaaaaaaaaagatctcagagggcctcaatatgatcgggggcggaacaaccagggtattcaattgcgcacattggtctaacgtgttccctgacccccagtttctcgtgtcaacgtgggagacttggagggacccctatggagtcgattaatcgattgccgtacctgttagtgctgcaacgtacgacgtcacagcctatg

SEQ ID NO: 5291 - DNA, 2375 bp, Homo sapiens
  misc_feature (2184)..(2374): n is a, c, g, or t
ctctcccatcgcagtgccccttgccttctcctgccctagtaactgcctgcggggatccaggagcccccaggccgcgccgaactgcagtggataggggggaggggggcggtaaggatgagggctacggggaggcagaaatgggttgggggaaggggtggtggaagggaaaagaaaaaaccggaggcatgcaagcggctccccagccagctgttccagctgctgcttcctccggcgcgggccaggcggtgcaatattcccccccgctccatctttctcaccactacctgtccccccaacccaccacacgcactcatccctcccacccacacccctagtagcggatctccggcctgtaagggggtagtagggaggagctggggggagggggaggcctgcgagtttctaaccttgttcttataaacaaacccacatgtgcagctgccgctgctgcaactcaccccacaatcccggatataagtcctgcccctttaagaggaaaaaaaagattcccccgcctgcctcccaccccacccatccacaagagagaggaagcttgaagccaatatggagtccgtcagttgctccgctgctgctgtcaggaccggagacatggagtcccagcgggacctgagcctggtgcctgagcggcttcagagacgcgaacaagaacggcagctggaagttgaaaggcggaaacaaaagcggcagaaccaggaggtagagaaggagaacagccactttttcgtcgccacctttgctcgggagcgagcggccgtggaagagcttctggagcgcgcggagtcggtcgagcggctggaggaggcggcctctcggctccaggggctgcagaaactaatcaacgactcagtttttttcctagccgcttacgacctgcggcagggacaagaggcgctggcgcggctgcaggcggccttggccgagcggcgccgggggctgcagcccaagaagcgtttcgctttcaagacccggggaaaggatgctgcttcgtctaccaaagtagacgcggctcctggcatccccccggcagttgaaagcatacaggactccccgctgcccaagaaggcggaaggagacctcggccccagctgggtctgcggtttctccaacctggagtcccaagtcttggagaagagagccagcgagttgcaccagcgcgacgttcttttgaccgaactgagcaactgcacggtcagactgtatggaaatcccaacaccctgcggctaaccaaggcccacagctgcaagctgctctgcggtccggtgtctacctctgttttcctggaggactgcagtgactgcgtgctggcagtggcctgccaacagctccgcatacacagtacgaaagacacccgcatcttcctgcaggtgaccagcagggccatcgtggaggactgcagtgggatccagttcgccccttacacctggagctacccggagatcgacaaggacttcgagagctctggtttagataggagcaaaaataactggaacgatgttgacgattttaactggctggcccgggatatggcctccccaaactggagtattcttcctgaagaggagcgaaatatccagtgggactaagcagttgtcactctgttcttcactcctaccaaatactttccacgttggactttcccccttattgggtctcgaagtttacttattgtcacactgtgtatgttttcagcattttaaggctagagattgtaatgggctcctacttgtaatttccattaaattcgtaacaggtataacactaaagcatttttgctattttcgtcatgcctttgagactgagtcttactccgtcccccagcgtggtggcgcgctgggattacaggcgcgcgccaccacgcgaacttgtatttttagtagagacggggtttcgccatgttgtccgggctgctctcgaactcctgacctcaggtgatccacccgcttcagcttcccaaagtgctggcattacaggcgtgagccaccacgccagggctttatttatttatttttaccacaatagtttgaagcagtaagggggaaggagggtgattatattgctttgtaatggtttgtgatacttgaaacatcacggtgcataataaagtaggtctgcagtaaataaaaaaaaaaaaaaaaaaaaaaaaaaaaaaaaaaaaaaaaaannnnnnnnnnnnnnnnnnnnnnnnnnnnnnnnnnnnnnnnnnnnnnnnnnnnnnnnnnnnnnnnnnnnnnnnnnnnnnnnnnnnnnnnnnnnnnnnnnnnnnnnnnnnnnnnnnnnnnnnnnnnnnnnnnnnnnnnnnnnnnnnnnnnnnnnnnnnnnnnnnnnnnnnnnnnnnnnnnnnnnnnnnnnnnnt

SEQ ID NO: 5292 - DNA, 3666 bp, Homo sapiens
gattctggctgatgcgttctccgagatcggacgcgtgggcggacgcgtggacgagcttgctgccctagaccagagttggtggctggacctcctgcgacttccgagttgcgatgctgtacttctctttgttttgggcggctcggcctctgcagagatgtgggcagctggtcaggatggccattcgggctcagcacagcaacgcagcccagactcagactggggaagcaaacaggggctggacaggccaggagagcctgtcggacagtgatcctgagatgtgggagttgctgcagagggagaaggacaggcagtgtcgtggcctggagctcattgcctcagagaacttctgcagccgagctgcgctggaggccctggggtcctgtctgaacaacaagtactcggagggttatcctggcaagagatactatgggggagcagaggtggtggatgaaattgagctgctgtgccagcgccgggccttggaagcctttgacctggatcctgcacagtggggagtcaatgtccagccctactccgggtccccagccaacctggccgtctacacagcccttctgcaacctcacgaccggatcatggggctggacctgcccgatgggggccatctcacccacggctacatgtctgacgtcaagcggatatcagccacgtccatcttcttcgagtctatgccctataagctcaaccccaaaactggcctcattgactacaaccagctggcactgactgctcgacttttccggccacggctcatcatagctggcaccagcgcctatgctcgcctcattgactacgcccgcatgagagaggtgtgtgatgaagtcaaagcacacctgctggcagacatgggcccacatcagtggcctggtggctgccaaggtgattccctcgcctttcaagcacgcggacatcgtcaccaccactactcacaagactcttcgaggggccaggtcagggctcatcttctaccggaaaggggtgaaggctgtggaccccaagactggccgggagatcccttacacatttgaggaccgaatcaactttgccgtgttcccatccctgcaggggggcccccacaatcatgccattgctgcagtagctgtggccctaaagcaggcctgcacccccatgttccgggagtactccctgcaggttctgaagaatgctcgggccatggcagatgccctgctagagcgaggctactcactggtatcaggtggtactgacaaccacctggtgctggtggacctgcggcccaagggcctggatggagctcgggctgagcgggtgctagagcttgtatccatcactgccaacaagaacacctgtcctggagaccgaagtgccatcacaccgggcggcctgcggcttggggccccagccttaacttctcgacagttccgtgaggatgacttccggagagttgtggactttatagatgaaggggtcaacattggcttagaggtgaagagcaagactgccaagctccaggatttcaaatccttcctgcttaaggactcagaaacaagtcagcgtctggccaacctcaggcaacgggtggagcagtttgccagggccttccccatgcctggttttgatgagcattgaaggcacctgggaaatgaggcccacagactcaaagttactctccttccccctacctgggccagtgaaatagaaagcctttctattttttggtgcgggagggaagacctctcacttagggcaagagccaggtatagtctcccttcccagaatttgtaactgagaagatcttttctttttcctttttttggtaacaagacttagaaggagggcccaggcactttctgtttgaacccctgtcatgatcacagtgtcagagacgcgtcctctttcttggggaagttgaggagtgcccttcagagccagtagcaggcaggggtgggtaggcaccctccttcctgtttttatctaataaaatgctaacctgcaaaaaaaaaaaaaaaaaaaaaaaaaatcagactaggtggactctgcctgcctacctggtctgggaagatgttctaccatatctccctagagcacgaaatcctgctgcacccgcgctacttcggccccaacttgctcaacacggtgaagcagaagctcttcaccgaggtggaggggacctgcacagggaagtgagtgtcgagctcaccgcaccgccagatcgttcgatgcgcacacggggcgctatacctgcaacccctccccaactcctactcgtcctgccacccactctggggacccctctcctctctcaggcagccagttgcttcctgctttgggttcccagggcgccctctgcaatgctggacaataagacttccttctctcagctgagatgggtcattcattgactcctcaaacattttaaaaacccttggtgtgtgccaggacccgtgttgggctcagaacaaggtagaatgggaacaagatagaatgaggacagcccctgtggagctcacagtgtaatcattgttcctgtgtctgctctccctctgtcattctgctggttttctcttatcccctgtgcccagggaccacacaccatgggcctctatatatcttctgaatgaatgaccagaaaaagcagatcgagagtttgggggaggaaggaagtagcctgggatttgaccatctctgggctttgcacagaggggcctctctgatattaatgagctgggacccagctcagggcagtggagtacttgggcctccagcatcagaaaaacctgcaggaacatgcagattcctgagcctccttattccctacagaatcaagactgtctggggcagacctgagaatctgcattttaagaagatgattctcaggcatcccgaagattgagatctgttgcctcaaggactccagccttcttggacatttattgtgaaattaccagaacagcatttggtcttacacatactgatctctgttctgtcttcttttggtcattaagctctctgggagcagaggtgctatctacttgtccttttgctctccccgaccctacccccaagagctcagcgacttttattgcagatgtctttagaggctcttggacacacagtgtcttcctgtttctcatcctccttgcaggttggactcttcacagaaattgggcccatgtcttgcttcatctctcgacattccatcccttcagagatggagtttgatcctaactccaacccaccatgttacaagacaatggatgaggatattgtgattcagcaggacgatgagatccgcttaaagattgtggggacccgtgtggacaagaatgacatttttgctattggctccctgatggacgattacttggggcttgtaagctgagcctggtggcctcctacccttggtcctactctaggaagtgtgattgtcacacttatcatgttgtccagaggtccagtctggctgctgttgtggaggcaaggaaggcaactcatcccagaaggcatctggtgcttcttgtagcttaactactgcctcctcatttttcagtatgtgttctaagtataaaaagtccttggttctcaaaaaaaaaaaaaaaaaaaaaaaaaaaaaaaaaaaaaaaaaaaaaaaaaaaaaaaaaaaaaaaaaaaaaaaaaaaaaaaaggcga

SEQ ID NO: 5293 - DNA, 1356 bp, Homo sapiens
gagtggggccagatttttgtggccctagggattcggtcccatttagggggggcccgagggggccaggccaaggggtttccagagggggaagagggcccccttgtttggggccttagggaaaccttttctcccttttcttggggtcgtgcccttccccaatacttgagccctgccaaaaggtgccgtgggaaaggccccacccaggattttaaaacagggcctttggtggcctgtctctattagctggggttcccgggagggcagagagggattgacccggggcactgggcactggcgatcagggaagactgggaccccccagccccccaggggcccccctccccccccacttagtgctggtcctaggtcctctgaggcactcatctactgaatgacctctctacttccccttcttgccattattaacccatttttgtttattttccttaaatttttagccatttctccatgggccaccgcccagctcatgtaggtgagcctgggcagcttctgttggcagagcttttgcatttcctgtgtttgtcctgggttctggggcatcagccagctaccccttgtgggcaaaggcagggccacttttgaagtcttccctcagatttccattgtgtggcctggtgggtcagggggagtctttgcaccaaagatgtcctgactttgcccccttgcccatcagccatttgccatcaccccaaacaactcagcttcggggccggtgaggggaggggcctcccccagcacagatgaggagcagctggggtaggctgtctgtgccatggccccccactcccccttcccttggagggagaggtggcaggaatacttcacctttcctctccctcaggggcaggtggtggaggggcgcccagggtcgtctttgtgtatgggggaaggcgctgggtgcctgcagcgcctcccttgtctcagatggtgtgtccagcactcgattgttgtaaactgttgttttgtatgagcgaaattgtctttactaaacagatttaatagttaaaaaaaaaaaaaaaaaaaaaaaacgggggcttttgttggggggggggaaaagaggtttgaaaggacctggtcaaagtgtgtttctggacccctttttttgtgcacaggggggaaacgggcgggaccccaaaaggggggcgtaaatcgcgaaaccggtactagctgttttcatgaattcacacaacaggcaggctcaaggaacaacgaaggcgcgccgcgacgacactagaaacgagagccagagagcaagtcaccaccgacagaggggagcgatcgatagcaatctcaccgcagaaagccagtcgaaagcatacacacacagaaccacga

SEQ ID NO: 5294 - DNA, 3291 bp, Homo sapiens
ccaccatatcggtcccgtatttcacattgataaggtcctgtttcatttctcgtgacattgggtagaatgaggatcctgttttcaatgggtcgctttaccctgggactgacagggaggctctgaccatttagccaccaaatgtaggtgtagttctcactcttaggttcaccccgcggccgatcgtcccccatacctcggccatgcggcccctgctgctactggccctgctgggctggctgctgctggccgaagcgaagggcgacgccaagccggaggacaaccttttagtcctcacggtggccactaaggagaccgagggattccgtcgcttcaagcgctcagctcagttcttcaactacaagatccaggcgcttggcctaggggaggactggaatgtggagaaggggacgtcggcaggtggagggcagaaggtccggctgctgaagaaagctctggagaagcacgcagacaaggaggatctggtcattctcttcacagacagctatgacgtgctgtttgcatcggggccccgggagctcctgaagaagttccggcaggccaggagccaggtggtcttctctgctgaggagctcatctacccagaccgcaggctggagaccaagtatccggtggtgtccgatggcaagaggttcctgggctctggaggcttcatcggttatgcccccaacctcagcaaactggtggccgagtgggagggccaggacagcgacagcgatcagctgttttacaccaagatcttcttggacccggagaagagggagcagatcaatatcaccctggaccaccgctgccgtatcttccagaacctggatggagccttggatgaggtcgtgctcaagtttgaaatgggccatgtgagagcgaggaacctggcctatgacaccctcccggtcctgatccatggcaacgggccaaccaagctgcagttgaactacctgggcaactacatcccgcgcttctggaccttcgaaacaggctgcaccgtgtgtgacgaaggcttgcgcagcctcaagggcattggggatgaagctctgcccacggtcctggtcggcgtgttcatcgaacagcccacgccgtttgtgtccctgttcttccagcggctcctgcggctccactacccccagaaacacatgcgacttttcatccacaaccacgagcagcaccacaaggctcaggtggaagagttcctggcacagcatggcagcgagtaccagtctgtgaagctggtgggccctgaggtgcggatggcgaatgcagatgccaggaacatgggcgcagacctgtgccggcaggaccgcagctgcacctactacttcagcgtggatgctgacgtggccctgaccgagcccaacagcctgcggctgctgatccaacagaacaagaacgtcattgccccgctgatgacccggcatgggaggctgtggtcgaacttctggggggctctcagtgcagatggctactatgcccgttccgaggactacgtggacattgtgcaggggcggcgtgttggtgtctggaatgtgccctatatttcaaacatctacttgatcaagggcagtgccctgcggggtgagctgcagtcctcagatctcttccaccacagcaagctggaccccgacatggccttctgtgccaacatccggcagcaggatgtgttcatgttcctgaccaaccggcacacccttggccatctgctctccctagacagctaccgcaccacccacctgcacaacgacctctgggaggtgttcagcaaccccgaggactggaaggagaagtacatccaccagaactacaccaaagccctggcagggaagctggtggagacgccctgcccggatgtctattggttccccatcttcacggaggtggcctgtgatgagctggtggaggagatggagcactttggccagtggtctctgggcaacaacaaggacaaccgcatccagggtggctacgagaacgtgccgactattgacatccacatgaaccagatcggctttgagcgggagtggcacaaattcctgctggagtacattgcgcccatgacggagaagctctaccccggctactacaccagggcccagtttgacctggcctttgtcgtccgctacaagcctgatgagcagccctcactgatgccacaccatgatgcctccaccttcaccatcaacatcgccctgaaccgagtcggggtggattacgagggcgggggctgtcggttcctgcgctacaactgttccatccgagccccaaggaagggctggaccctcatgcaccctggacgactcacgcattaccatgaggggctccccaccaccaggggcacccgctacatcgcagtctccttcgtcgatccctaattggccaggcctgaccctcttggacctttcttctttgccgacaaccactgcccagcagcctctgggacctcggggtcccagggaacccagtccagcctcctggctgttgacttcccattgctcttggagccaccaatcaaagagattcaaagagattcctgcaggccagaggcgggaacacacctttatggctggggctctccgtggtgttctggacccagcccctggagacaccattcacttttactgctttgtagtgactcgtgctctccaacctgtcttcctgaaaaaccaaggcccccttcccccacctcttccatggggtgagacttgagcagaacaggggcttccccaagttgcccagaaagactgtctgggtgagaagccatggccagagcttctcccaggcacaggtgttgcccagggacttctgcttcaagttttggggtaaagacacctggatcagactccaagggctgccctgagtctgggacttctgcctccatggctggtcatgagagcaaaccgtagtcccctggagacagcgactccagagaacctcttgggagacagaagaggcatctgtgcacagctcgatcttctacttgcctgtggggaggggagtgacaggtccacacaccacactgggtcaccctgtcctggatgcctctgaagagagggacagaccgtcagaaactggagagtttctattaaaggtcatttaaaccacaaaaaaaaaaaaaaaaaaaaaaaaaaaaaaaaggggcggcccgctctagaagtatcccctcggagggggccccaagccttacggcgtaccccaggctttcctttggtaacaaaggggggcccctaataaggggaaggtcggtatttattaagcctaagggaccctctgggccgttca

SEQ ID NO: 5295 - DNA, 2767 bp, Homo sapiens
  misc_feature (168)..(187): n is a, c, g, or t
  misc_feature (2561)..(2577): n is a, c, g, or t
agcggggattcttattggcccaacccgccgtcggtcggcggcgagtccgccccctcagaaccttacatttacagtgtagcaaaagagaaagtaactatgttgctgctggagatcaatgaagccgagtgaatgggggctgaatgtgcgagtccatagctgagaggagcnnnnnnnnnnnnnnnnnnnncacttatttatgaaactgtcttgagttcttcttgaattgccagttttcagcctcctcatgcctccgtctcctttagacgacagggtagtagtggcactatctaggcccgtccgacctcaggatctcaacctttgtttagactctagttaccttggctctgccaacccaggcagtaacagccaccctcctgtcatcgccaccaccgttgtgtccctcaaggctgcgaatctgacgtatatgccctcatccagcggctctgcccgctcgctgaattgtggatgcagcagtgccagctgctgcactgtggcaacctacgacaaggacaatcaggcccaaacccaagccattgccgctggcaccaccaccactgccatcggaacctctaccacctgccctgctaaccagatggtcaacaataatgagaatacaggctctctaagtccatcaagtggggtgggcagccctgtgtcagggacccccaagcagctagccagcatcaaaataatctaccccaatgacttggcaaagaagatgaccaaatgcagcaagagtcacctgccgagtcagggccctgtcatcattgactgcaggcccttcatggagtacaacaagagtcacatccaaggagctgtccacattaactgtgccgataagatcagccggcggagactgcagcagggcaagatcactgtcctagacttgatttcctgtagggaaggcaaggactctttcaagaggatcttttccaaagaaattatagtttatgatgagaataccaatgaaccaagccgagtgatgccctcccagccacttcacatagtcctcgagtccctgaagagagaaggcaaagaacctctggtgttgaaaggtggacttagtagttttaagcagaaccatgaaaacctctgtgacaactccctccagctccaagagtgccgggaggtggggggcggcgcatccgcggcctcgagcttgctacctcagcccatccccaccacccctgacatcgagaacgctgagctcacccccatcttgcccttcctgttccttggcaatgagcaggatgctcaggacctggacaccatgcagcggctgaacatcggctacgtcatcaacgtcaccactcatcttcccctctaccactatgagaaaggcctgttcaactacaagcggctgccagccactgacagcaacaagcagaacctgcggcagtactttgaagaggcttttgagttcattgaggaagctcaccagtgtgggaaggggcttctcatccactgccaggctggggtgtcccgctccgccaccatcgtcatcgcttacttgatgaagcacactcggatgaccatgactgatgcttataaatttgtcaaaggcaaacgaccaattatctccccaaaccttaacttcatggggcagttgctagagttcgaggaagacctaaacaacggtgtgacaccgagaatccttacaccaaagctgatgggcgtggagacggttgtgtgacaatggtctggatggaaaggattgctgctctccattaggagacaatgaggaaggaggatggattctggttttttttctttctttttttttttgtagttgggagtaagtttgtgaatggaaacaaacttgtttaaacactttatttttaacaagtgtaagaagactataacttttgatgccattgagattcacctcccacaaactgacaaattaaggaggttaaagaagtaatttttttaagccaacaataaaaatataatacaacttgtttctcccccttttccttttaagctatttgtagagtttatgactaaatagtctgtgcaggttcatagaccgaagatactacacactttaaaccaattaaaaagaaccaaaagtaaatagaaaagacattgaatcaccaaggcctgggatcaacctgggctgtccacacagaaaacaaaaacccaaccaaaccaagccctgttgtgctcactggtgcaaagagaagatcagggcagcttaagtggtctaagaatccttcaggcattctttaaggagaaaaaggatacctttgattttgtgtgtttcatgctctggattttttttttttttccttctctgggtttaagagattttttttgaaatagtgaggaactgaccattatatgccttcactggcttcttgtgcaataatatgatgttttaagtgtgcaaacaagttagagctggcagctgaatgatagacaaatagtgcaaatttgccagcttggagatagaaaggaattcaacaatatatcaaatactttccttcccacctttttccttttttttttttttttctgatttgattctggttacagtgccataaaccttgttacatatnnnnnnnnnnnnnnnnnaaaaaaaaaatttatttaaaaatatttttcgcaaaaaaaaaaaaaaatcttggtgtgtttctgttgattgtgtaaaaatttattttcattatataaatgaaactggaaaaaaaaaaaaaaaaaaaaaaaaaaaaaaaaaaaaaaaaaaaaaaaaaaaaaaaaaaaaaaaaaaaaaaaaaaaaaaaaaaaa

SEQ ID NO: 5296 - DNA, 1264 bp, Homo sapiens
  misc_feature (32)..(32): n is a, c, g, or t
  misc_feature (52)..(53): n is a, c, g, or t
cacagctcttgtatgtattttagatgctagangtttttttagcatgtgatgnngtgattcttgtttgaattctaggtaccttgtgaattccagaaaaagagactgtgcttcacgattgttagtcccatgaacttgcactatctatctttcatggtgatgttttgaaaatacaatcaggaaaaaacccaacacctttggaatttaaaatagaatcatatcatgaaatttaaaaagaatctcttctgttgcatttcctcacccctaagtaacagctacatttaagtaaaatgcaggtggtaggggaaaaaaaaccatggcgagatggtggtttagtggaataaactgattactggtttttttgtttttttttttttttttaaagaaagaagcttcatcacagatactttccagtttctcttttatacttttttgaaagattactttttaggaacatttggtatgatatgcataaaattatttatccatttatgggcaaaatgatacaagtagcatcttgattgaacatcatttacctcagatattcaaccagcagtacgttttttatgcagtctcaacccatatcccatttgttacctctcagaatattggtaagcagttattttcgctttactctgtatttcttgtgttttgggcacaggttattgtactactgtcaaatcgtacttgctattttttctgcaagtatttaacagaaagcttaaaatccccataaaaccccaccttggataagtgattgttaaatattgtacaaataaaatgtatgctatccccattccatccccaagttaaataaaaaaatgaatacggtatgatttgcatatgcagtttttctttagctatgtttttttttttttttatactttaagttttagggtacatgtgcacattgtgcaggttagttacataggtatacatgtgccatgctggtgcgctgcacccactaactcgtcatctagcattaggtatatctcctaatgctaatccctcccccattcccccaacccaaaaaagtcccccagagtggggatattcccccttccctgggtccctggggatcctcttgggtccaattccccacccatggagtggaaaccattcccgggctttggggcttttccccccctgggcacaagttcacatgaaaaaggtcggattttcccacttttttctcagggcccccttctacaggccatgagaccccccccccttttttattgggccccgcagtgccatcccccgcggg

SEQ ID NO: 5297 - DNA, 1227 bp, Homo sapiens
gaccattggctcgctccgtaaggcaagagaacccactaggggatgagcccgaactagggatgtgacagagcgcgagacccagcctaaagagagcccggagccagcgtgggaggccgctgccgtcgcgcgccttggtttttctgttccttttttttttttttttttaacttcctgcctatacacacgcagccatcagcccacaaagacatgactaccaacgcgggccccttgcacccatactggcctcagcacctaagactggacaactttgtacctaatgaccgccccacctggcatatactggctggcctcttctctgtcacaggggtcttagtcgtgaccacatggctgttgtcaggtcgtgctgcggttgtcccattggggacttggcggcgactgtccctgtgctggtttgcagtgtgtgggttcattcacctggtgatcgagggctggttcgttctctactacgaagacctgcttggagaccaagccttcttatctcaactctggaaagagtatgccaagggagacagccgatacatcctgggtgacaacttcacagtgtgcatggaaaccatcacagcttgcctgtggggaccactcagcctgtgggtggtgatcgcctttctccgccagcatcccctccgcttcattctacagcttgtggtctctgtgggccagatctatggggatgtgctctacttcctgacagagcaccgcgacggattccagcacggagagctgggccaccctctctacttctggttttactttgtcttcatgaatgccctgtggctggtgctgcctggagtccttgtgcttgatgctgtgaagcacctcactcatgcccagagcacgctggatgccaaggccacaaaagccaagagcaagaagaactgaggagtggtggaccaggctcgaacactggccgaggaggagctctctgcctgccagaagagtctagtcctgctcccacagtttggagggacaaagctaattgatctgtcacactcaggctcatgggcaggcacaagaaggggaataaaggggctgtgtgaaggcactgctgggagccattagaacacagatacaagagaagccaggaggtctatgatggtgacgatttttaaaatcaggaaataaaagatcttgactctaaaaaaaaaaaaaaaaaaaaaaaaaaaaaaaaaaaacgatgtgaaggaaaaaaaaagtcgtatcgatgtc

SEQ ID NO: 5298 - DNA, 1736 bp, Homo sapiens
ttttaaagttttaaaaataatatcagttttattaaatattcgagaacggacccagaggttggatttatacaggagggtaacacgaagggatttatttatttatttattttctcctactggctaaacaaacgtcattcactttttttctctctttttgtaattttccctcttttttttccttttttgaaattggataggaacactgacggtgctaaacataaatataaatacagagaccacaaatacagctaaaaatcttcacacagaaacggtcacagtttgtaaaatgccataatgacccccaggattctttaaatacaatttgcctgggctgggcatttgctggggcagaggggctaggcagggactgcggggaggccctgggggttggtgtggggccaaggcgcgccctccttgggcctccggccctccccggctgccaggccgggccctgaggccctggagcagaggccccagcaggcccaggagccggctctctgcacggggggcgggggtgggggcgtcgaaggagtgggggagccaagtcctcacttggagggcaatctgtagagtctgagttcagggtccgagcccccaaggcctggacggggaaaagggcctgtagacaagccgagaacgagctagcaagggagcgaggaggaggaggcgcgtggtgaaagagagttgtgcggtgagggagggggtccagagctgactttcaggtccacgtttgactccctaattttgttttagggaatcaaaacacatcaattgtgccagtgataaatacagagtgtgtgattaggggagagttggtggggagcgagggagaaagggagagaggggtggcagggacagtcctggtcactctttctgcttctcctcttctgtctcttcccgcttttcctcttttccgcccaggctgtcggcggtggcccctccgccgccccccgagagagtggatgtgagattagattcttttttccacttcatccggcggttctggaaccagattttgatctgtcgctcggtcaggcaaagcgcgttggcgatctcgatgcgccggcgccgcgttaggtagcgattgaagtgaaattccttctccagttccagggtctggtaccgcgagtagatctggcggccgcgcctccggtccgctccgtagccgaccccactgtgcgaattcattcgctgcatccaggggtaaatctggatactggctttctggtcctggggcgcagtcctgccctgctcagaactaaaatcctgagcgattgaggtctgtgtgttatgtcctaaggtgttttgtctgcagtttgagagcatgtctttctcctggtaaaaggaattagatccatagtcatacggcccccggctggaactgaacacgacattctcctgtggcgaataaaagggagtcgagtagatccggttctgggcaacggccgctccataggtcgagaaatgcctcactggatcataggcggtggaattgagggcgacgttggggaggacgtcctggcccccggcgaggtggcaggataaggaagggttagtgaagtaggaattcatccctttgcctttacctggtcggtctatgatttctttaatatttatttctgtctccagtttgtactcggaactagatggttatagggacggctccaatccaggacagacaaaaaaacaaagtcagctgaccctctcccagccaatcgcaagccagatgtcaggaa

SEQ ID NO: 5299 - DNA, 2212 bp, Homo sapiens
  misc_feature (674)..(695): n is a, c, g, or t
  misc_feature (2128)..(2211): n is a, c, g, or t
actcgcacccgctgcccccgaggccctcctgcactctccccggcgccgctctccggccctcgccctgtccgccgccaccgccgccgccgccagagtcgccatgcagatcccgcgcgccgctcttctcccgctgctgctgctgctgctggaggcgcccgtgtcggcgcaggtgctgcagtgcgtggtgctcttcgggtttggcagcctggtgccacggtgcggcggcgcgcgcaggccggcctctgtgtgtgcgccagcagcgagccggtgtgcggcagcgacgccaacacctacgccaacctgtgccagctgcgcgccgccagccgccgctccgagaggctgcaccggccgccggtcatcgtcctgcagcgcggagcctgcggccaagggcaggaagatcccaacagtttgcgccataaatataactttatcgcggacgtggtggagaagatcgcccctgccgtggttcatatcgaattgtttcgcaagcttccgttttctaaacgagaggtgccggtggctagtgggtctgggtttattgtgtcggaagatggactgatcgtgacaaatgcccacgtggtgaccaacaagcaccgggtcaaagttgagctgaagaacggtgccacttacgaagccaaaatcaaggatgtggatgagaaagcagacatcgcacnnnnnnnnnnnnnnnnnnnnnngcaagctgcctgtcctgctgcttggccgctcctcagagctgcggccgggagagttcgtggtcgccatcggaagcccgttttcccttcaaaacacagtcaccaccgggatcgtgagcaccacccagcgaggcggcaaagagctggggctccgcaactcagacatggactacatccagaccgacgccatcatcaactatggaaactcgggaggcccgttagtaaacctggacggtgaagtgattggaattaacactttgaaagtgacagctggaatctcctttgcaatcccatctgataagattaaaaagttcctcacggagtcccatgaccgacaggccaaaggaaaagccatcaccaagaagaagtatattggtatccgaatgatgtcactcacgtccagcaaagccaaagagctgaaggaccggcaccgggacttcccagacgtgatctcaggagcgtatataattgaagtaattcctgataccccagcagaagctggtggtctcaaggaaaacgacgtcataatcagcatcaatggacagtccgtggtctccgccaatgatgtcagcgacgtcattaaaagggaaagcaccctgaacatggtggtccgcaggggtaatgaagatatcatgatcacagtgattcccgaagaaattgacccataggcagaggcatgagctggacttcatgtttccctcaaagactctcccgtggatgacggatgaggactctgggctgctggaataggacactcaagacttttgactgccattttgtttgttcagtggagactccctggccaacagaatccttcttgatagtttgcaggcaaaacaaatgtaatgttgcagatccgcaggcagaagctctgcccttctgtatcctatgtatgcagtgtgctttttcttgccagcttgggccattcttgcttagacagtcagcatttgtctcctcctttaactgagtcatcatcttagtccaactaatgcagtcgatacaatgcgtagatagaagaagccccacgggagccaggatgggactggtcgtgtttgtgcttttctccaagtcagcacccaaaggtcaatgcacagagaccccgggtgggtgagcgctggcttctcaaacggccgaagttgcctcttttaggaatctctttggaattgggagcacgatgactctgagtttgagctattaaagtacttcttacacattgaaaaaaaaaaaaaaaaaaaaaaaaaaaaaaaaaaaaaaacacaaaaacaaaacaccaccacaccacaacacaacaaaccaaaaacaaaacactcaaacgtagcaaaaaactaatacaaacagaacaaacagcaaaacaaccaacaaaacacaaacatacgccacagatacacaaaccgcacacgcaccatcaaccacgactaacccaccaagcacacacnnnnnnnnnnnnnnnnnnnnnnnnnnnnnnnnnnnnnnnnnnnnnnnnnnnnnnnnnnnnnnnnnnnnnnnnnnnnnnnnnnnnc

SEQ ID NO: 5300 - DNA, 1574 bp, Homo sapiens
  misc_feature (3)..(5): n is a, c, g, or t
gcnnncaaataatgacgaactctgaaagtgctatgcaactcgtgttatgatcgatgttctgtcgtatttcttttattccggaatgtgtacctgacgcttcggttactgtctgcattgtctgtatattcttggtgactgtgtgtttagtctactgccaccattttgaaggtctgatgctgttgattcaagatttcggggcttcagcatcaaagccttggttcgagataatgctctcagtcacagttaagtctatcagattactgaaggacttgaggattcgttttcctggcttgagcgcctcacaccctggatcttgacctactaggccattatgctgtgatgaacaaccccaccagacagcctttggcctaaacgttgcatacaggcgctgcttgagaattctggctgcaggactgttcctgccaggttcagtgggtatcactgacccctgtgagagtggcaactttagagtacacacagtcatgaccctagaacagcaggacatggtctgctatacagctcagactctcgtccgaatcctctcacatggtggctttaggaagatccttggccaggagggtgatgccagctatcttgcttctgaaatatctacctgggatggagtgatagtaacaccttcagaaaaggcttatgagaagccaccagagaagaaggaaggagaggaagaagaggagaatacagaagaaccacctcaaggagaggaagaagaaagcatggaaactcaggagtgacattcccttcactccttttcctacccaagggggaagactggagcctaagctgcctgctactgggctttacatggtgacagacatttccgtgggatagggaagatagcaggaagaaaagtaaactccatagaagtgtcattccactgggttttgatattggcttagctgccagtctcccatttgtgacctatgccatccatctataatggaggataccaacatttcttcctaatattctataatctccaactcctgaaaacccctctctcaactaatactttgctgttgaaatgttgtgaaatgttaagtgtctggaaatttttttttctaagaaaaactattaaagtacttcctagtaggaaaaaaaaaaaaaaaaaaaaaaaaaaaaaaaaaaaacaaaaaaaacagaaaaaaaacgagaacaacaaccaaaagagaggggggcgggcgcgcccaagaaaaatatcaccacgggggggggggcccacgaagggaggccagcccacaagtttggggacaaagggagggggcgccccaaccaaaaggggagggaccgcgataataaatacaacaaagcggaagagcgcgagcgggggcagcggcgttgaataaacaaaaacgaacgggcgaggggacggaggagaaaaaaaagctcgtgatcgcagcggggaggaccactcttgttggggagaagagcgaccaccacctacactgagcgggggggagggacagaaacaacaagaggggggagaaacacaacaacccaccccagacagaagaagtattaaggagaagccgcgccggggggggcgaacagacaaa

SEQ ID NO: 5301 - DNA, 3870 bp, Homo sapiens
agcatagtgcctcgctagtggcgggcatgataacacacgccggagggtcgcacgcgggttccagttgtgattgctggagttgtgtattgccaggaggctctccgagattggggtcgggtcactgcctcatccaccggagcgatggcgtttctccgaagcatgtggggcgtgctgagtgccctgggaaggtctggagcagagctgtgcaccggctgtggaagtcgactgcgctcccccttcagttttgtgtatttaccgaggtggttttcatctgtcttggcaagttgtccaaagaaacctgtaagttcttaccttcgattttctaaagaacaactacccatatttaaagctcagaacccagatgcaaaaactacagaactaattagaagaattgcccagcgttggagggaacttcctgattcaaagaaaaaaatatatcaagatgcttatagggcggagtggcaggtatataaagaagagataagcagatttaaagaacagctaactccaagtcagattatgtctttggaaaaagaaatcatggacaaacatttaaaaaggaaagctatgacaaaaaaaaaagagttaacactgcttggaaaaccaaaaagacctcgttcagcttataacgtttatgtagctgaaagattccaagaagctaagggtgattcaccgcaggaaaagctgaagactgtaaaggaaaactggaaaaatctgtctgactctgaaaaggaattatatattcagcatgctaaagaggacgaaactcgttatcataatgaaatgaagtcttgggaagaacaaatgattgaagttggacgaaaggatcttctacgtcgcacaataaagaaacaacgaaaatatggtgctgaggagtgttaaaagtagaagattgagatgtgttcacaatggataggcacaggaaaccagttaggtctcaatacctgaagctatcgtaaaattaagaaaggataaagttggtaaaccttttatatttagtatctttttattcagctcatggacttctgccagcataatacttgctttggaaaacccagataaaggttcatgcaaactttattttgtgtttaggaactactgaggatcagagtaatccaagcaaatgtgaatcattttacctttgacaaaggtaaatcagactatgaagttttttttatacaggatgatgactatggaaagagtactcttgtttccttatattatggaggcaggagtttcgttttcaaaattgttacaaattgtagaagccacggtgttctgtgatataagtgtgtgtttttcataaagcaggcagaactcatctaggtaaattacagttcctaggtataattcacattgtattcagagttgatggttgtacatataagtgattgctggttttagttgcaactttgtataaaagggactgagaaatttataaacttttttcttactgtcttttttctaaagtaaaaacaaagaaattatgtgccagatttatgcatattattttatgttgcatagaataaaatttttaatctttaattttacatttcctaaatatattttaagacgaaacatttgttctatagcttttccctttttttaagtaaggaattttatttttttctgaattattttctctcgtgagtatattgatccagaaagaaaacttgtattatgtgtgttttaaaatgagaaatctaaaaaacgaaaagtctccaaagtctctggaatttgaaacactttgcataacgtataaaagcctgtttaagagacagccaactatggcctgtggatcaaatccagcctgctgcctgctttttatggcctgtgagctaggaattgtgtttataattttaaatgtttttttttaaagacttttatgatacttgaaaattaacatgaatatttagtgttcataaataaagtttgttgaaacacaaaaaaaaaaaaaaatttacttgtctatggctgcttttctgtggcagagtagctgccacagaaactatagcccacaaagcctgatatttactgtctgtctgtttatggaaaaaatttatcaacccatggtctatagtatagtgtgatatgactactgttccaatgtattgaagtgttgggatagttttttcaaatgttttcagatgttcttgttttagaatcattgtcacctttaagaggaaaaaggtcatcactagataatctaaacaaattgttgcttctcagtgttagcaaggaaaataatctagtttcaaattacattgcagtataatgaaaaagatccatatactgtggaatgatattcttttaaaattatttgctatggcttggtaaaaatgtactttttccagtagcacatatcacaagaacctcactgtagttgaaagccatctttctttagtatttgtttatccttttaggagagtcaagcaaaggttttcaccacctgtttgagcagaataattctcatcagttcacagatataggataactcaatttatatgcactttatgcgttatgcaaaatatttagaaattgtagattctagatctccagaaagactttgaagactttgatgtcacaaaaagatgacttgttatatgctgagcttgacaaaggtaggaatgggagagaaaaatagtagcttatgaggaaatatgaggctttaaatatataaagttggatattttaaaataacttttccctgtgggagcttctcactctgggtgcagacaggacagtgttggccattggtgaaatagataggatgggtttgaggccagagcagtctgggagtagggggaaagagaaggaggtgtgctagtgtctatcacaggctttctcaattaggtttgcaggagaaaaagccctaagtccctgtgtcatctagaatggtactaattatgtacagtccctaggagaatggagaaaatcataactcaaatcatcgactcaattctgttctcttcagatgagctcagagagcacataggagtgtttgtaatgaggggtatgtaatgattgagatagaggaatgagttacataaacatctcgggacaaatgcagcatagaaaacatctttgtagttaccctgcggggaaatttcctctgagttcttttaacattaactacccgtattattttatacttaacattcatatcataccttcccaaatatattgggaagttcagtgttaagtacgtttctcaagtacttaacaacttaatatagggaggaaaggtgtaaacagtgaaaaaagagcaaaactattttatggtaattttatggtagtatcagcttgtatttggttctctgtttctaaaataatgtaatttttaatatttgaaataactaggataacctggtttccaagcctttttttcccccgagatccagaatacacacgtggatccaagcctttcttaaacattagtacatgtgggaagaactggatggccatattaccaatggccattcaagtgtaaccgtttacacagaatttctcttataaggaatacgaacttctaacaatggacatcacataaagcacaaagggagagcagattcgtttgttccacttgtgtgtggtaaaaagcactaaacatgcacacacagaaaaattggtgaactgaacaagtgactgagctacccggagaaacaacgaccctcaagaggtcggataacaagtgtaaccactcagagtgagtatggaatatgtataaaagaagctaatattacgagagatcccaacggaaaagatactggtgacatggagactgtagaacgccagaaaacatagttgatgacaaagagacgaaggaaagagaagacattggacgcgctctcttcctacatctacgttggg

SEQ ID NO: 5302 - DNA, 2826 bp, Homo sapiens
tctctccacaaatcggcacgaggggagtgagtagctgctttcggtccgccggacacaccggacagatagacgtgcggacggcccaccaccccagccctccaactagtcagcctgcgcctggcgcctcccctctccaggtccatccgccatgtggcccctgtggcgcctcgtgtctctgctggccctgagccaggccctgccctttgagcagagaggcttctgggacttcaccctggacgatgggccattcatgatgaacgatgaggaagcttcgggcgctgacacctcaggcgtcctggacccggactctgtcacacccacctacagcgccatgtgtcctttcggctgccactgccacctgcgggtggttcagtgctccgacctgggtctgaagtctgtgcccaaagagatctcccctgacaccacgctgctggacctgcagaacaacgacatctccgagctccgcaaggatgacttcaagggtctccagcacctctacgccctcgtcctggtgaacaacaagatctccaagatccatgagaaggccttcagcccactgcggaagctgcagaagctctacatctccaagaaccacctggtggagatcccgcccaacctacccagctccctggtggagctccgcatccacgacaaccgcatccgcaaggtgcccaagggagtgttcagcgggctccggaacatgaactgcatcgagatgggcgggaacccactggagaacagtggctttgaacctggagccttcgatggcctgaagctcaactacctgcgcatctcagaggccaagctgactggcatccccaaagacctccctgagaccctgaattgaactccacctagaccacaacaaaatccaggccatcgaactggaggacctgcttcgctactccaagctgtacaggctgggcctaggccacaaccagatcaggatgatcgagaacgggagcctgagcttcctgcccaccctccgggagctccacttggacaacaacaagttggccagggtgccctcagggctcccagacctcaagctcctccaggtggtctatctgcactccaacaacatcaccaaagtgggtgtcaacgacttctgtcccatgggcttcggggtgaagcgggcctactacaacggcatcagcctcttcaacaaccccgtgccctactgggaggtgcagccggccactttccgctgcgtcactgaccgcctggccatccagtttggcaactacaaaaagtagaggcagctgcagccaccgcggggcctcagtgggggtctctggggaacacagccagacatcctgatggggaggcagagccaggaagctaagccagggcccagctgcgtccaacccagccccccacctcgggtccctgaccccagctcgatgccccatcaccgcctctccctggctcccaagggtgcaggtgggcgcaaggcccggcccccatcacatgttcccttggcctcagagctgcccctgctctcccaccacagccacccagaggcaccccatgaagcttttttctcgttcactcccaaacccaagtgtccaaggctccagtcctaggagaacagtccctgggtcagcagccaggaggcggtccataagaatggggacagtgggctctgccagggctgccgcacctgtccagacacacatgttctgttcctcctcctcatgcatttccagcctttcaaccctccccgactctgcggctcccctcagcccccttgcaagttcatggcctgtccctcccagacccctgctccactggcccttcgaccagtcctcccttctgttctctctttccccgtccttcctctctctctctctctctctctctctctctttgtgtgtgtgtgtgtgtgtgtgtgtgtgtgtgtgtgtgtgtcttgtgcttcctcagacctttctcgcttctgagcttggtggcctgttccctccatctctccgaacctggcttcgcctgtccctttcactccacaccctctggccttctgccttgagctgggactgctttctgtctgtccggcctgcacccagcccctgcccacaaaaccccagggacagcggtctccccagcctgccctgctcaggccttgcccccaaacctgtactgtcccggaggaggttgggaggtggaggcccagcatcccgcgcagatgacaccatcaaccgccagagtcccagacaccggttttcctagaagcccctcacccccactggcccactggtggctaggtctccccttatccttctggtccagcgcaaggaggggctgcttctgaggtcggtggctgtctttccattaaagaaacaccgtgcaacgtgaaaaaaaaaaaaaaaaaaaaaaaaaaaaaaaaaaaaaaaaaaaaaaaaaaaaaaaaaaaaaaaaaaaaaaaaaccctcgggggccccaatttaagcgtcacccagtttttttgaaaaaaggggccccccatagaggagctgctttataaacagcacacagaccggccccgcgctttaaaaaacaggcgctctaattgggaaagaacctgcgtacctgcaggtcgaactcttgtggagaaggaaccccccacaacctccggggggggacacaataatggtgggcaccaaccacccatcaggagaaattaaaagcccccggggcaaattaacaacttggaggtgtctaatggtggtgtcacccaacggcgcaattcttgcggcgtgaaacaacttcgcaccagagctatatgattgtacgagcacatttttctcgcgggacattcattgtaatacgagcactatcatcatactagct

SEQ ID NO: 5303 - DNA, 837 bp, Homo sapiens
  misc_feature (19)..(19): n is a, c, g, or t
  misc_feature (32)..(32): n is a, c, g, or t
aaggggttgcccctatcgnccaggccgcctcnaaagctgtccatggtgggttgccatagttatctgtgccagtgactgtctgaacagcaagtgttccactgtggaactgcaggctttatccagcctcagaatcccttatctgtgcccaagcctagtgccctaactcatagtaggccctcttaaaaaattgagcaggcatgaatgagtggaaaccatgcttgttaatagcattatgtggcgataagaccatcattccttgacttgctccccaaaagtacaaagtttcaagcagacaaatgaacagatcattcttaaaattgaactaatctgggcaagcaaagagagttcaaagataaaagagggggacgcagtagtgcacaagggaaacattaaagcaaatattttcttttccacagaatcttttagaattcttgagggttacagttccagatatcattgctttaagtgtataaagtgtatttttaaaaagtgaaacccatacccatttaaaaattgaaaaatatgtaatcaagttgtatcagaacaaaaatgtgctttttgtgtaaaaagctaattaaatggagtcatcctatttagtgatttaaaaggatttgattaaaataatatccacttcaactactctcaaagggctgaggagagaggtttggtttccgtgcatcctggatggcctttgtctggtgtgattaaaggtatttcagtgcctgccatgagagaggcccctgccatttctgcagtttcagtgagaccgagaattcctgcagtgtcattccaactgtttgcagggtttagacagctgcgttcaagccacaaatatgg

SEQ ID NO: 5304 - DNA, 1297 bp, Homo sapiens
  misc_feature (14)..(14): n is a, c, g, or t
ccttgtgattcacncacctcggcctcgccaagtgttgggattacaggcgtgagccactgtgcccagcccatagtctctagttcttaacaatgcagtttggtgacacagcactcaatactatctgcacaacctgtgaccgcatcaagcagtcagcagctggcaccaagcgtcgggtgtttatcattgagactatgggtggctactgtggctacctggctaccatggctggactggcagctggggccgatgctgcctacatttttgaggagcccttcaccattcgagacctgcaggcaaatgttgaacatctggtgcaaaagatgaaaacaactgtgaaaaggggcttggtgttaaggaatgaaaagtgcaatgagaactataccactgacttcattttcaacctgtactctgaggaggggaagggcatcttcgacagcaggaagaatgtgcttggtcacatgcagcagggtgggagcccaaccccatttgataggaattttgccactaagatgggcgccaaggctatgaactggatgtctgggaaaatcaaagagagttaccgtaatgggcggatctttgccaatactccagattcgggctgtgttctggggatgcgtaagagggctctggtcttccaaccagtggctgagctgaaggaccagacagattttgagcatcgaatccccaaggaacagtggtggctgaaactgaggcccatcctcaaaatcctagccaagtacgagattgacttggacacttcagaccatgcccacctggagcacatcacccggaagcggtccggggaagctgccgtctaaacctctctggagtgaggggaatagattacctgatcatggtcagctcacaccctaataagtccacatcttctcagtgttttagctgtttttttcattaggtttccttttattctgtaccttgcagccatgaccagttctggccaggagctggaggagcaggcagtgggtgggagctccttttaggtagaatttaacatgacttctgccccagctttatctgtcacacaaggctgggcacctctagtgctactgctagatatcacttactcagttagaattttcctaaaaataagctttatttatttctttgtgataacaaagagtcttggttcctctactacttttactacagtgacaaattgtaactacactaataaatgccaactggtcactgtgaaaaaaaaaaaaaaaaaacgacagacaaagcgaacaagaagaaacgagaaaaaaacagaaaaaaaagggagaggaaaaaagca

SEQ ID NO: 5305 - DNA, 5215 bp, Homo sapiens
  misc_feature (3157)..(3173): n is a, c, g, or t
  misc_feature (4322)..(4351): n is a, c, g, or t
cccattcgcgcagctccgggaacttggattaggtggagaggcagttggggggcctcgttgttttgcgtcttagttccgccctcctgtccatcaggagaaggaaaggataaaccctgggccatgaggctacccctgctcctggtttttgcctctgtcattccgggtgctgttctcctactggacaccaggcaatttttaatctataatgaagatcacaagcgctgcgtggatgcagtgagtcccagtgccgtccaaaccgcagcttgcaaccaggatgccgaatcacagaaattccgatgggtgtccgaatctcagattatgagtgttgcatttaaattatgcctgggagtgccatcaaaaacagactgggttgctatcactctctatgcctgtgactcaaaaagtgaatttcagaaatgggagtgcaaaaatgacacacttttggggatcaaaggagaagatttattttttaactacggcaacagacaagaaaagaatattatgctctacaagggatcgggtttatggagcaggtggaagatctatggaaccacagacaatctgtgctccagaggttatgaagccatgtatacgctactaggcaatgccaatggagcaacctgtgcattcccgttcaagtttgaaaacaagtggtacgcagattgcacgagtgctgggcggtcggatggatggctctggtgcggaaccactactgactatgacacagacaagctatttggatattgtccattgaaatttgagggcagtgaaagcttatggaataaagacccgctgaccagcgtttcctaccagataaactccaaatccgctttaacgtggcaccaagcgaggaaaagctgccaacaacagaacgctgagctcctgagcatcacagagatacatgagcaaacatacctgacaggattaaccagttccttgacctcaggactctggattggacttaacagtctgagcttcaacagcggttggcagtggagtgaccgcagtcctttccgatatttgaactggttaccaggaagtccatcagctgaacctggaaaaagctgtgtgtcactaaatcctggaaaaaatgctaaatgggaaaatctggaatgtgttcagaaactgggctatatttgcaaaaagggcaacaccactttaaattcttttgttattccctcagaaagtgatgtgcctactcactgtcctagtcagtggtggccgtatgccggtcactgttacaagattcacagagatgagaaaaaaatccagagggatgctctgaccacctgcaggaaggaaggcggtgacctcacaagtatccacaccatcgaggaattggactttattatctcccagctaggatatgagccaaatgacgaattgtggatcggcttaaatgacattaagattcaaatgtactttgagtggagtgatgggacccctgtaacgtttaccaaatggcttcgtggagaaccaagccatgaaaacaacagacaggaggattgtgtggtgatgaaaggcaaggatgggtactgggcagatcggggctgtgagtggcctcttggctacatctgcaagatgaaatcacgaagccaaggtccagaaatagtggaagtcgaaaaaggctgcaggaaaggctggaaaaaacatcacttttactgctatatgattggacatacgctttcaacatttgcagaagcaaaccaaacctgtaataatgagaatgcttatttaacaactattgaagacagatatgaacaagccttcctgactagtttcgttggcttaaggcctgaaaaatatttctggacaggactttcagatatacaaaccaaagggacttttcagtggaccatcgaggaagaggttcggttcacccactggaattcagatatgccagggcgaaagccagggtgtgttgccatgagaaccgggattgcagggggcttatgggatgttttgaaatgtgatgaaaaggcaaaatttgtgtgcaagcactgggcagaaggagtaacccacccaccgaagcccacgacgactcccgaacccaaatgtccggaggattggggcgccagcagtagaacaagcttgtgtttcaagctgtatgcaaaaggaaaacatgagaagaaaacgtggtttgaatctcgagatttttgtcgagctctgggtggagacttagctagcatcaataacaaagaggaacagcaaacaatatggcgattaataacagctagtggaagctaccacaaactgttttggttgggattgacatatggaagcccttcagaaggttttacttggagtgatggttctcctgtttcatatgaaaactgggcttatggagaacctaataattatcaaaatgttgaatactgtggtgagctgaaaggtgaccctactatgtcttggaatgatattaattgtgaacaccttaacaactggatttgccagatacaaaaaggacaaacaccaaaacctgagccaacaccagctcctcaagacaatccaccagttactgaagatgggtgggttatttacaaagactaccagtattatttcagcaaagagaaggaaaccatggacaatgcgcgagcgttttgcaagaggaattttggtgatcttgtttctattcaaagtgaaagtgaaaagaagtttctatggaaatatgtaaacagaaatgatgcacagtctgcatattttattggtttattgatcagcttggataaaaagtttgcttggatggatggaagcaaagtggattacgtgtcttgggccacaggtgaacccaattttgcaaatgaagatgaaaactgtgtgaccatgtattcaaattcagggttttggaatgacattaactgtggctatccaaacgccttcatttgccagcgacataacagtagtatcaatgctaccacagttatgcctaccatgccctcggtcccatcagggtgcaaggaaggttggaatttctacagcaacaagtgtttcaaaatctttggatttatggaagaagaaagaaaaaattggcaagaggcacgaaaagcttgtataggctttggagggaatctggtctccatacaaaatgaaaaagagcaagcatttcttacctatcacatgaaggactccactttcagtgcctggactgggctgaatnnnnnnnnnnnnnnnnncacgttcctttggacggatggacgaggagtccattacacaaactgggggaaaggttaccctggtggaagaagaagcagtctttcttatgaagatgctgactgtgttgttattattggaggtgcatcaaatgaagcaggaaaatggatggatgatacctgcgacagtaaacgaggctacatatgccagacacgatccgacccttccttgactaatcctccagcaacgattcaaacagatggctttgttaaatatggcaaaagcagctattcactcatgagacaaaaatttcaatggcatgaagcggagacatactgcaagcttcacaattcccttatagccagcattctggatccctacagtaatgcatttgcgtggctgcagatggaaacatctaatgaacgtgtgtggatcgccctgaacgggaacttgactgataatcaatacacttggactgataagtggagggtgaggtacactaactgggctgctgatgagcccaaattgaaatcagcatgtgtttatctggatcttgatggctactggaagacagcacattgcaatgaaagtttttactttctctgtaaaagatcagatgaaatccctgctactgaacccccacaactgcctggcagatgcccggagtcagatcacacagcatggattcctttccatggtcactgttactatattgagtcctcatatacaagaaactggggccaagcttctctggaatgtcttcgaatgggttcctctctggtttccattgaaagtgctgcagaatccagttttctgtcatatcgggttgagccacttaaaagtaaaaccaatttttggataggattgttcagaaatgttgaagggacgtggctgtggataaataacagtccggtctcctttgtcaactggaacacaggagatccctctggtgaacggaatgattgtgtagctttacatgcgtcttctgggttttggagtaatattcactgttcttcctacaaaggatatatttgtaaaagaccaaaaattattgatgctaaacctactcatgaattacttacaacaaaagctgacacaaggaagatggacccttctaaaccgtcttccaacgtggccggagtagtcatcattgtgatcctcctgattttaannnnnnnnnnnnnnnnnnnnnnnnnnnnnntttataagaaaagacgtgtgcacctacctcaagagggcgcctttgaaaacactctgtattttaacagtcagtcaagcccaggaactagtgatatgaaagatctcgtgggcaatattgaacagaatgaacactcggtcatctagtacctcaatgcgattctgagatatttgaatttcataaaattgtaactgaaatttaaaatttttagttcaatgtgattgttttctttaaaatgagtactgaattgtactggtctgtccttttttcctttgcctaattgaagaaataattgcttgttttctagcctggcaagatattttcataaaagagggataacaatgctgattactaccttttaaaatattttagataaatgcacagcaccacagcaccacatctaagcattagtgatgggtagctgatgtcagcttcatgtggattttaagcactctagaaacaatgaagcttcttggcatattttaaggagctcccaaaatgtgttacctattaaattgtaactcagcaagtagaagaccatttgaaaagtcaggtacaaatttcctcaagtggcataaaaatgtagtcagttttctcttttaccagtttttatttccactccaattatttagaactttatttgtacatgtgcagaagaataaggcagctgagaatcttgtttcccccaagagagttttacaggctgagtgttgcaaatgtgttctttgtcctgttatatgtatatcaggaatacaaggatgtgaaataaaactgtaaatttgcataactggatgtacttagataatgtgaaataaacattaaagacaaggtctatttttaataaaaaaaaaaaaaaaaaaaaaaaaa

SEQ ID NO: 5306 - DNA, 2489 bp, Homo sapiens
  misc_feature (234)..(249): n is a, c, g, or t
  misc_feature (633)..(685): n is a, c, g, or t
ggcacgaggtgatgatgatagcaaatatgtagtgttttctgtgtcaagttttggtgtgtattaactcttaatcttcacaataatcttattagatactattattatccccttttacaaacgaggacactgatgcacaaagatttgaaaacttacccaaggttacttagccagtaagtgatggagtcaagatttaggattcaaatctagatgttttggtttcagagcacttgcccnnnnnnnnnnnnnnnnagtaagacaaatggtgtcagacaagtgccacattctagatttaatcaaggcacagagaagacagatgttgatcctgcctgaaggttttagggaaggttcctggagcaccctgctcttcagggccacccatcacctggccctccatccctttctgggactctttggagccctttctcccacacagtggcaggccatctccctgacggtcatcgagaaggtccagattgctgccatagttctgggctcgctcttcctggttgccagcatctcctggctcatctggtcctcactcagcccttcagccaagtggcaacgacaggatctgctctttcagatctgctacggcatgtatggcttcatggatgtcgtctgcataggcctcannnnnnnnnnnnnnnnnnnnnnnnnnnnnnnnnnnnnnnnnnnnnnnnnnnnngaaccatcagtggaaggtcctaaattatgacaagaccaaggacataggaggagatgcagggggagggacggcagggaagtcaggccccaggaactcacggacgggccccacctctggggccacgagccgccccccagctgcccagcgcatgcggccgctcttgcctcagcgctgcggttatacaatcttgcacctccttgggcagctgcggccaccagatgcccgttccagctcccattctggccgagaggttgtcatgagggtcactacagtctgaactggactccaggagcagggatcttgagtcaatgcatcagtcagagaagaactctcatggctgctggaggtaccagctggacaaggtgtttggggcatgctgcccccgtcaccgaggatctgtgtgggtagcctcaagctggagacattgtctggcctcactgcccactgggtagagacacctggatgacatttcagtacccgctggcagctcctcccactcatccagagacggccggtgggcaggcggggagagcagctttccttccctggagagaaccgtctttacctcagctcctagggcctccagccccccagctccaccacggtgacttggtgaagggggaccaatgccagaagaaaggggctgtagacccctattccccaccccatggccacagggcatctggcaataagactagtatacattgacctcccgttccctgcatgagggcggggagttccccctgctccatcccccattgcatgggggaagggcataaagaatcatttatatgcaaaaaaaaaaaaaaaaaaaaaaaaaaaaatttctggagggttgggagatgtggggaggtttctctgcacaggttgcaaatcccaaatgcagcagtgggttctgagttgtaggtgtgactcccacttgctggtgaataattcatgttggctgctaggtggcagcactccgaggtatctaaagggtagacctggacctgccacctatgagttgtgtgatatagaaaaaaatctcttagctctggttttcctgtctacttcatagggttggaataaggataaatgagggacaggttggatgccgttgcagagaaaatcagcaatgacataaagagatttctagaatagttgatggtccatttatttcaaatagtagctggtgtaacaaattctaaaatgtgtttttcatctggagttgcacagaatcatggaattttgtgttgagtgacataataggtatggaaatatgaggggaaatagacattgcaaatgtgaagcatggtggttatttgttaagaatgagaactcctctgactctaaatatttgggcctgtgggctggggaaggctggagccatctgccttgttctggagatcatctgggttctatcagtccttctcaagtactgtgctcacccagaaaagcagtgtgaagtgaatttggactcatttggagtgagatggagggaatccccccactcagtgttatgagtctccaaccccagtttaagctatttccatggcagtttagggtcacaggtttgatcccggtgtgcccagccagtggtattaatggatggcattatgtttggaggcagcagcatagaggactgttgtttatagagaaaagatttgggaaggactgtttacaatgtgggtcagcctgaagcctgggcactttcttctgtgaccttggggttgtgtattatatgaatgatgctgtttttaagtaaaccattcaacagcaattaaataattccttcattcacggctaaagtcaaaaaaaaaaaaaa

SEQ ID NO: 5307 - DNA, 874 bp, Homo sapiens
gtggatcatgaagtcaggagttggagaacatcctgccaggcatggtgaaaccgcgcctctactaaaaatacaaaaattagctgggcgtggtggtgtgtgcctgtaatcccagctactcaggagcctgaggcaggagaatcgtttcgatctggggaggcggacgttgcagtgagtcgagatcacgccatttcactttagcccaggcaacagtgggaaactccatcaaaaaaaaagaaagaaaagaaggtgactttagtatttattcatttattcctgctttgtgttcttgcattttaggaagcactgttaggtactgtgatatgagtgtacagatcaaaaatcactttcctgaagtagtttacagtcaagagatgtccatgaattgtcattatcagaatgggtacagagtttacagagttgaaccttggagaattaaagaatgtttaatggttaacccatttatgcctgaaattgtaattttttgaatttgaaaaatcagaccttggtgatgaccttgagcagtaggacattaataactcccacatgcttagtgttcaaataatggaacactaggcataaatggattaaataatgcaggaatggaaagtgtgaacagatgtacaactgctgtagagcttgtatcagttgtcagaaaccttccaacaaagaaaagcgtaggaccagatgggttcattgattaattcaatgaaatgttaaaagaaattaatgccagtccttctcatagccttccaaaaaaactgaagaggaaggaatatttccaaattcattagtaggccagcattaccccagtatcaaagcaagacagggcacaaaaaagaaaactatagcccaatatccttgatgaatatagatg

SEQ ID NO: 5308 - DNA, 1231 bp, Homo sapiens
  misc_feature (223)..(223): n is a, c, g, or t
  misc_feature (262)..(262): n is a, c, g, or t
acgattttcatggagcctggcgtgggaccacaggccatcacagtcccctgttccgaggtcaggaggatgcaagtcctgacagattcagcaacactgactatgctgtggggtacatgttgaggctgggggctcctgccagtaagctggtgatgggcatccccaccttcgggaggagcttcactctggcttcttctgagactggtgttggagccccaatctcagngaccgggaattccaggccggttcaccaaggacggcaggngacccttgcctactatgagatctgtgacttcctccgcggagccacagtccatagaatcctcggccagcaggtcccctatgccaccaagggcaaccagtgggtaggatacgacgaccaggaaagcgtcaaaagcaaggtgcagtacctgaaggacaggcagctggcgggcgccatggtatgggccctggacctggatgacttccagggctccttctgcggccaggatctgcgcttccctctcaccaatgccatcaaggatgcactcgctgcaacgtagccctctgttctgcacacagcacgggggccaaggatgccccgtccccctctggctccagctggccgggagcctgatcacctgccctgctgagtcccaggctgagcctcagtctccctcccttggggcctatgcagaggtccacaacacacagatttgagctcagccctggtgggcagagaggtagggatggggctgtggggatagtgaggcatcgcaatgtaagactcgggattagtacacacttgttgattaatggaaatgtttacagatccccaagcctggcaagggaatttcttcaactccctgccccccagccctccttatcaaaggacaccattttggcaagctctatcaccaaggagccaaacatcctacaagacacagtgaccatactaattataccccctgcaaagcccagcttgaaaccttcacttaggaacgtaatcgtgtcccctatcctacttccccttcctaattccacagctgctcaataaagtacaagagcttaacagtgaaaaaaaaaaaaaaaaaaaaaaaaaaaaaaaaaaaaaaaaaaaaaaaaaaaaaaaaaaaaaaaaaaaaaaaaaaaaggaaaaaaaaaaaaaaaaaaaaaaaaaaaggggcgcccgttttaaaggatccaagtttacgtacccgggcatgcaacgtcaaagctttttaatagggtcccc

SEQ ID NO: 5309 - DNA, 593 bp, Homo sapiens
tataacaaaatgatttgtgcaaaaacgctgcaaattgtattcgacggcttcatgctaatattatttgcatctttgctttaaaatcatgcttcaacggaactttctttaaggtaaggataagtataacatgattaccattgcttttctcttcttcaagagaaacccaaacatttaaaaggtcatgagtgatgcaacagaaccagtttttgaatcctcttaccgggtaaaaagggggctcttctgtaatctacaatttcaaatacatgtgcatgtcatgaaaggagtgtttaccatttccagtagccatcatcttagaaagtaagactggaaaaacggagtcagaactgggaatgctgtcccatcagagcttgttggggggcactcacgtgctctgttttgcctgtggagactgctggtaggaatgatgatttctggaagggaagggaggttggtgctggcctactgaaaattaagctcttcttttaccttcttgcctcttaatttggtgactgtgagattaccagtcacaggtagtcactgactactgcaagttaaagttccgttgaagccgtcgggttcctgctagagtcacc

SEQ ID NO: 5310 - DNA, 4694 bp, Homo sapiens
  misc_feature (57)..(76): n is a, c, g, or t
  misc_feature (4273)..(4274): n is a, c, g, or t
  misc_feature (4277)..(4282): n is a, c, g, or t
  misc_feature (4284)..(4284): n is a, c, g, or t
  misc_feature (4286)..(4287): n is a, c, g, or t
  misc_feature (4300)..(4300): n is a, c, g, or t
  misc_feature (4350)..(4351): n is a, c, g, or t
  misc_feature (4378)..(4378): n is a, c, g, or t
aaaattgcgtttgagtttgccgcgagccgggccaatcggttttgccaacgcatgccnnnnnnnnnnnnnnnnnnnntaaacacggagatcgtgtgccgggcacttggtttcgtggtgggcaactgtgctgctgtttcttttggccgcggacaaggtcggcagaggtggacccctgcttgggagagctcttctcgctgtgctgacacccgcccctaacagtcacccaccccggggaaataatggggctcggaggcctcctcccagccagtgtccagcctaagcacatcggctcccgcagttcagaaaggtcccgaggcccgagtcaccatttccggctcagacctcgacccggaacgtggctgcccactgccacgcccactacgccccagtggctcgccccaggggacgaggggcaagaagcggcctccgagggcagcggccgaaggccattcggtccctggctcttcccagctcgcagagacccggaagcgctgcccggccgcctgcccctcttcagatcccccagcaccggaggagcagcgagggggctgcgtccaggccggctttcgggtcggcttaggcgaatccagctctcttttgcccctcccagaaggcccagccccgtccgggcggtgttcgggcggcgccgggccgggccccccgccgccccaggctcgctcataggcccggaacaccacagcccgcccagacttggctggcgccgagccgggggtggagccagcgggttcccgccaaaatcgcgtagctggtccttcccccgcgggctacgtcgcgccctcctttttttttcaaacccggagctgcactgggattggtggactgggcactcacgtggttaacggtcgcgggaagccgcggagcccgaacctgagactggacctgaggagacctcagcctcggtgctcgggccgccccgcctctgccggaaagtccgcgccgccgctgccgccaccgtccgcagcccgagcgccccggagccgcaggccgccgccgcgcagagacgccgcggctgcgactaggcgcgcccagccgcacgtggcggacccgcccccaggcccgcagtgtcctggaccccgcaggcctccgctctcctgtcctcggccccgtccccagggccgcgatgagcttcctgagccgacagcagccgccgccaccccgccgcgccggggcggcctgcaccttgcggcagaagctgatcttctcgccctgcagcgactgtgaggaggaggaagaagaggaggaggaggagggcagcggccacagcaccggggaggactcggcctttcaagagcccgactcgccgctgccgcccgcgcggagccccacggagcccgggcccgagcgccgccgctcgcccgggccggcccccggcagccccggcgagctggaggaggacctgttgctgcccggcgcctgcccgggcgcggacgaggcgggcggtggggcggagggcgactcgtgggaggaggagggcttcggctcctcgtcgccggtcaagtcgccggcggccccctacttcctgggtagctctttctcgccggtgcgctgcggcggcccaggagatgcgtcgccgcggggttgcggggcgcgccgggcgggcgaaggccgccgctcgccgcggccggaccacccgggcaccccgccacacaagaccttccgcaagctgcgactcttcgacaccccgcacacgcccaagagtttgctctccaaagctcggggaattgattccagctctgttaaactccggggtagttctctcttcatggatacagaaaaatcaggaaaaagggaatttgatgtgcgacagactcctcaagtgaatattaatccttttactccggattctttgttgcttcattcctcaggacagtgtcgtcgtagaaagagaacgtattggaatgattcctgtggtgaagacatggaagccagtgattatgagcttgaagatgaaacaagacctgctaagagaattacaattactgaaagcaatatgaagtcccggtatacaacagaatttcatgagctagagaaaatcggctctggagaatttggttctgtatttaagtgtgtgaagaggctggatggatgcatttatgccattaagcgatcaaaaaagccattggcgggctctgttgatgagcagaacgctttgagagaagtatatgctcatgcagtgcttggacagcattctcatgtagttcgatatttctctgcgtgggcagaagatgatcatatgcttatacagaatgaatattgtaatggtggaagtttagctgatgctataagtgaaaactacagaatcatgagttactttaaagaagcagagttgaaggatctccttttgcaagttggccgaggcttgaggtatattcattcaatgtctttggttcacatggatataaaacctagtaatattttcatatctcgaacctcaatcccaaatgctgcctctgaagaaggagacgaagatgattgggcatccaacaaagttatgtttaaaataggtgatcttgggcatgtaacaaggatctccagtccacaagttgaagagggcgatagtcgttttcttgcaaatgaagttttacaggagaattatacccatctaccaaaagcagatatttttgcgcttgccctcacagtggtatgtgctgctggtgctgaacctcttccgagaaatggagatcaatggcatgaaatcagacagggtagattacctcggataccacaagtgctttcccaagaatttacagagttgctaaaagttatgattcatccagatccagagagaagaccttcagcaatggcactggtaaagcattcagtattgctgtccgcttctagaaagagtgcagaacaattacgaatagaattgaatgccgaaaagttcaaaaattcacttttacaaaaagaactcaaggaagcacagatggcaacacgctgcagcctgagcgacagcactcttcactgaccggatggccactaggtccaccacccagagtaatagaacatctcgacttattggaaagaaaatgaaccgctctgtcagccttactatatactgagctactcctttcccacctccccctgaacactgtgacaagaggaagctaggttgaaatcactgatagaatccagtttgcaattactttctcgattggtgtcagtagttttactgattaggacttttattgtgaattacagttgaaagctgtattttgatgattgctatgtcaggctttcatctaatcttaccagtctgtcttctgtaggatgtgtcactgttggatgttacaccagcctttccagggttaaccactgtggtggtgtgctgcttatagtttgctgttgcattgtaataaaaggtgtctttccctgtagtgacctgtaaaaagtactcaagggctttattacagacataccctccctttgaaaagggacatgctaaaagactcattactactcagccttcaatgtacctgtgtgtccatcttatatttcttttttttttttaattgtgaattagacttgtatatcccactgggagcactttgtaggcattgcatgaaccatgggatgatgattctgtggaggtattgccttgtgaatttgctgctattttagttttgtctttgctgtaaacttgtagcattaaacaatcattgttgttaataggtcttctttttgaaacaattatgtgaaatgtatagctgcttttgatgaaaagcagctatttgccttttttttttttcctttgaactttgaagctagtgcattggaaaaatgcaccctttccctcctttggaatgctgtattaatgtagtataataattactggttttgtaacttgttctggtaatgtccttcccggactctttttaaatgtctccccctaagttttatacttgattgtattattagtctgtttttaaatgttttgcccggtttttctcttcaatatttgtgtatataaaccgatcttcgtgatactgtacatagctgtttgaaatgccagaatgacttctgacattccaagtttttcacaaaatatattttatctgtgattagccatttgactaataatactggctaacagatgttgaaaaaaattgtctgtttgttttctcattaattttggtctaaaacatgtttgcacttgtctttgacttgtgttttattaacattgattggcatattaaaagtcactctgagcttaccttaaaagaaaaaaaaaaaaaaaaaaagcatcgtgccnnaannnnnnanannacccccccccccnacaaaaaacaaccccaacaccacaacaaaacccccccagccccccaaacnnccacaccaacccccacaaaaaaaaccnaggggggccccccctctaaaaaccccccccgggggggccccattttttccccccccccctttttttttgtaaaagaggggccctctataggggggcgcctttaaaaaaaaaaggccctgggcccccttttttaaacaccctccggtcggggaaaaaagcccccctcttggaacctctttggagaagacaccctcctttttgggggggggcacaaaatttgtggcacacccccccccccagaagtatttcgcccccccgggggaaaaaaaaaaattttttagggggaaaaggggggtaaaaacccccgccccacttc

SEQ ID NO: 5311 - DNA, 3466 bp, Homo sapiens
  misc_feature (2831)..(2851): n is a, c, g, or t
gactgtggcggcggcggcctcgaggtgacaactgtctccgtcgcaggctccggcgggggcgcaggaggtcgcccggcgcgtcactgtcgggtcggcgagccacgggggccgccgcagcaccatggcgaccaccgtcagcactcagcgcgggccggtgtacatcggtgagctcccgcaggacttcctccgcatcacgcccacacagcagcagcggcaggtccagctggacgcccaggcggcccagcagctgcagtacggaggcgcagtgggcaccgtgggccgactgaacatcacggtggtacagagagccttctccatggacgaccgcattgcctggacccacatcaccatcccagagtccctgaggcagggcaaggtggaggacaagtggtacagcctgagcgggaggcaggggggcgacaaggagggcatgatcaacctcgtcatgtcctacgcgctgcttccagctgccatggtgatgccaccccagcccgtggtcctgatgccaacagtgtaccagcagggcgttggctatgtgcccatcacagggatgcccgctgtctgtagccccggcatggtgcccgtggccctgcccccggccgccgtgaacgcccagccccgctgtagcgaggaggacctgaaagccatccaggacatgttccccaacatggaccaggaggtgatccgctccgtgctggaagcccagcgagggaacaaggatgccgccatcaactccctgctgcagatgggggaggagccatagagcctctgcctcgatgccgttttgcccccgctctttggacacgccgacccggcgctccccaaggaatgctgtcccaacaagattcccgtgaaagagcacccgtgtcgccccctcccgtggacttctgtgccgccccgtccacacctgttcttgggtgcatgtgggttttcggttcctggcggtccaggacggggcgggggctcccctcccatctcgtgctgggaggtctcagcgcgctctcctgtccctgggacgtgcgtctctccttctcatgccgttctggaaaatgctcttgctgtagagagcagctgcttctgccagggtgttggaggtggtggagcgccttccgattccattcatggcattttgtgatgtgatgtaattggaatagagctgttgatttaaggcacacacaatccctcacactgtgggtttttttttagaacttcccagacgaaaactcacgcccttgccctaacgcgctttgctgtgagcctggcccctgcccagggcttgggtctggtgagctgagcagcttcctgtggatggtgtggggccggcctctggcctggctcacctggccactgtccagccagccttgtgacagactccggcctgaaggcagaatgaacccacacctggagtgaggaagggggcctggcacggttggccaggctctgcctgattgccagccagcgggcatctgaagccgggtccttcgcccgccggaggctgccgtccgtctctcctgctgcgctcgtgccagctccgtgggtgtcctcccagggagcttctcttctcaacaggccttgcgaggctggggtgagaggtgatagaggcagcactgtgcatgattccgagagggtgtggtggcactgccagccgactgctgacagcttgggagctgctgtgcccaggacgtgggttcagcgtgggcgaggaaagcctggcgagcgtggccctgtaaaagctttctgaggcgggaggcgctcacttacctctgactgcctgggcgctgcgtgtagcatcttggcctacaggacagattttaggtgacacctggttatgacagtcagaaatttgagaagcttctcacaagtgatgcactttaaataatctgcatgccattgagacacctgcatgtctggtgtttgtggttcaagtgtcttgccgccggccttcggatgtaaacccactgataacggacagaaagagaatgcccacaagtgggtcttctgtggaagatgcagaaggaggaagttagtgcttacattttagtctttttctccctcaaaaaaataggttaagtttcagtgccagctagaaaatactgctttctgccatcgattgggggtggtttttgtcaaatatactgttgataaatatttatttttgtaaacttgaagtgtgtggtggccgtgggggagggacatgctggcagcaggcgccttcttcagctgtgggtcctaaaggcctttgatcctttgaagaagaaagacatggtatttgttcagcagacgccgaccactcagacggaggggcccctgggattccctgtctcagatggcctggtcttacgcctgtgtagatttcttctccattgggaatgaaggtgtcaggtgggactggaacgttctagatggtatgttccgtgatattaacaactctaacccaggacagaccacaagccacactcagaggcctcactgtgctgggggcttcggtgtccaggcgcccaggtgtggccaccagcaccggtttctgccttcgcgttgctggggtgcagtgagactgccacacgcgtgcacatgtggctctgtgggtgtctcctagagaggacgtggcccctgctgccagcccttgagcagcccgtgtgggggcccgagggacccacacagtgggggccagcctcgctggagggagagcaaccctttgccgatgaccacgcttgccgccatctcttagttttctttttcacaagcgctttatttttttaatagacaaatcacattttgcaaggcctttaattaaataagattcttctttccttcattttatgctttatttnnnnnnnnnnnnnnnnnnnnntagaagtggcttactgtagaggcagcttgctgagcccctccgagcggtccccagaattagctggttcacaacccccaccctcccccgcccccgcctgtgtcaggtgtggatgaggtcgtcacactcagaaggacaggcttgtctgccagctcacaaggggaggctgcagtgggtttgggagctgggtttaggcccctggtgtctgagggcccaggccttgccagcctctgctgctcctgctcctgggtttgaagatgcaggccgatcgccagctccgtggcagcggtcactaaggacagcctgactgtgccatcttggagcctcaggcggggctccggagatagaagacaggtcgccggaggctccccctcctctcctctcccctctgcagatgctccctgggcgctaccctgcagggtgccaggcaggagtggtctcagaacgtgcgcttctgattattttactggggtccattgtccagatttttctttgattgtaaaatatatttttactttttagtcttctaatttaataaatgatccatataaaaatagagaaataaagtcctttaagggaaggtttaaaaaaaaaaaaaaaaaaaaaaaaaaaaaaaaa

SEQ ID NO: 5312 - DNA, 4253 bp, Homo sapiens
  misc_feature (4219)..(4219): n is a, c, g, or t
gcaagcggcgatggcggcggcggcgggagctgcagcggcggcggccgccgagggggaggcccccgctgagatgggggcgctgctgctggagaaggaaaccagaggagccaccgagagagttcatggctctttgggggacacccctcgtagtgaagaaaccctgcccaaggccaaccccgactccctggagcctgctggcccctcatctccagcctctgtcactgtcactgttggtgatgagggggctgacacccctgtaggggctacaccactcattggggatgaatctgagaatcttgagggagatggggacctccgtgggggccggatcctgctgggccatgccacaaagtcattcccctcttcccccagcaaggggggttcctgtcctagccgggccaagatgtcaatgacaggggcgggaaaatcacctccatctgtccagagtttggctatgaggctactgagtatgccaggagcccagggagctgcagcagcagggtctgaaccccctccagccaccacgagcccagagggacagcccaaggtccaccgagcccgcaaaaccatgtccaaaccaggaaatggacagcccccggtccctgagaagcggccccctgaaatacagcatttccgcatgagtgatgatgtccactcactgggaaaggtgacctcagatctggccaaaaggaggaagctgaactcaggaggtggcctgtcggaggagttaggttctgcccggcgttcaggagaagtgaccctgacgaaaggggaccccgggtccctggaggagtgggagacggtggtgggtgatgacttcagtctctactatgattcctactctgtggatgagcgcgtggactccgacagcaagtctgaagttgaagctctaactgaacaactaagtgaagaggaggaggaggaagaggaggaagaagaagaagaggaagaggaggaggaagaggaagaagaagaggaagatgaggagtcagggaatcagtcagataggagtggttccagtggccggcgcaaggccaagaagaaatggcgaaaagacagcccatgggtgaagccgtctcggaaacggcgcaagcgggagcctccgcgggccaaggagccacgaggagtgaatggtgtgggctcctcaggccccagtgagtacatggaggtccctctggggtccctggagctgcccagcgaggggaccctctcccccaaccacgctggggtgtccaatgacacatcttcgctggagacagagcgagggtttgaggagttgcccctgtgcagctgccgcatggaggcacccaagattgaccgcatcagcgagagggcggggcacaagtgcatggccactgagagtgtggacggagagctgtcaggctgcaatgccgccatcctcaagcgggagaccatgaggccatccagccgtgtggccctgatggtgctctgtgagacccaccgcgcccgcatggtcaaacaccactgctgcccgggctgcggctacttctgcacggcgggcaccttcctggagtgccaccctgacttccgtgtggcccaccgcttccacaaggcctgtgtgtctcagctgaatgggatggtcttctgtccccactgtggggaggatgcttctgaagctcaagaggtgaccatcccccggggtgacggggtgaccccaccggccggcactgcagctcctgcacccccacccctgtcccaggatgtccccgggagagcagacacttctcagcccagtgcccggatgcgagggcatggggaaccccggcgcccgccctgcgatcccctggctgacaccattgacagctcagggccctccctgaccctgcccaatgggggctgcctttcagccgtggggctgccactggggccaggccgggaggccctggaaaaggccctggtcatccaggagtcagagaggcggaagaagctccgtttccaccctcggcagttgtacctgtccgtgaagcagggcgagctgcagaaggtgatcctgatgctgttggacaacctggaccccaacttccagagcgaccagcagagcaagcgcacgcccctgcatgcagccgcccagaagggctccgtggagatctgccatgtgctgctgcaggctggagccaacataaatgcagtggacaaacagcagcggacgccactgatggaggccgtggtgaacaaccacctggaggtagcccgttacatggtgcagcgtggtggctgtgtctatagcaaggaggaggacggttccacctgcctccaccacgcagccaaaatcgggaacttggagatggtcagcctgctgctgagcacaggacaggtggacgtcaacgcccaggacagtggggggtggacgcccatcatctgggctgcagagcacaagcacatcgaggtgatccgcatgctactgacgcggggcgccgacgtcaccctcactgacaacgaggagaacatctgcctgcactgggcctccttcacgggcagcgccgccatcgccgaagtccttctgaatgcgcgctgtgacctccatgctgtcaactaccatggggacacccccctgcacatcgcagctcgggagagctaccatgactgcgtgctgttattcctgtcacgtggggccaaccctgagctgcggaacaaagagggggacacagcatgggacctgactcccgagcgctccgacgtgtggtttgcgcttcaactcaaccgcaagctccgacttggggtgggaaatcgggccatccgcacagagaagatcatctgccgggacgtggctcggggctatgagaacgtgcccattccctgtgtcaacggtgtggatggggagccctgccctgaggattacaagtacatctcagagaactgcgagacgtccaccatgaacatcgatcgcaacatcacccacctgcagcactgcacgtgtgtggacgactgctctagctccaactgcctgtgcggccagctcagcatccggtgctggtatgacaaggatgggcgattgctccaggaatttaacaagattgagcctccgctgatttcgagtgtatccaggcgtgctcatgctggagttactgtcatagaaccgggtcgtacagagtggcatcaaggtgcggctacagctctaccgaacagccaagatgggctggggggtccgcgccctgcagaccatcccacaggggaccttcatctgcgagtatgtcggggagctgatctctgatgctgaggctgatgtgagagaggatgattcttacctcttcgacttagacaacaaggatggagaggtgtactgcatagatgcccgttactatggcaacatcagccgcttcatcaaccacctgtgtgaccccaacatcattcccgtccgggtcttcatgctgcaccaagacctgcgatttccacgcatcgccttcttcagttcccgagacatccggactggggaggagctagggtttgactatggcgaccgcttctgggacatcaaaagcaaatatttcacctgccaatgtggctctgagaagtgcaagcactcagccgaagccattgccctggagcagagccgtctggcccgcctggacccacaccctgagctgctgcccgagctcggctccctgccccctgtcaacacatgagaacggaccacaccctctctccccagcatggatggccacagctcagccgcctcctctgccaccagctgctcgcagcccatgcctgggggtgctgccatcttctctccccaccaccctttcacacattcctgaccagagatcccagccaggccctggaggtctgacagcccctccctcccagagctggttcctccctgggagggcaacttcagggctggccaccccccgtgttccccatcctcagttgaagtttgatgaattgaagtcgggcctctatgccaactggttccttttgttctcaataaatgttgggtttggtaaaaaaaaaaaaaaaaaaaaaaaaaaaaaaaaaaaaaaaaccgaaccgataaggggggggcccgcctcataaattaatccctcaaaagggggccccaggttttacgggggaaccccaggcttttcctgtggataaaaggggggtccccctataagggggaaggccgggattttataaaaagctaacgggcgccttgggtccccggtgcggatttttttatcaaaccggttttcgttgacaccttggggggaaaaanaacctgggcgcgctaagccctcctgggggggaaa

SEQ ID NO: 5313 - DNA, 2615 bp, Homo sapiens
gcactgttggcagcggattcctagttaaggcggcacagggccgaggcgtagtgtgggtgactcctccgttccttgggtcccgtcgtctgtgatactgcagcgcagccatggcagaaccgcagcccccgtccggcggcctcacggacgaggccgccctcagttgctgctccgacgcggaccccagtaccaaggattttctattgcagcagaccatgctacgagtgaaggatcctaagaagtcactggatttttatactagagttcttggaatgacgctaatccaaaaatgtgattttcccattatgaagttttcactctacttcttggcttatgaggataaaaatgacatccctaaagaaaaagatgaaaaaatagcctgggcgctctccagaaaagctacacttgagctgacacacaattggggcactgaagatgatgagacccagagttaccacaatggcaattcagaccctcgaggattcggtcatattggaattgctgttcctgatgtatacagtgcttgtaaaaggtttgaagaactgggagtcaaatttgtgaagaaacctgatgatggtaaaatgaaaggcctggcatttattcaagatcctgatggctactggattgaaattttgaatcctaacaaaatggcaaccttaatgtagtgctgtgagaattctcctttgagatttcagaagaaaggaaacaatgtgattcaagatatttacataccagaagcatctaggactgatggatcactgtcccgattcaaattattcttcagtccatttccccttcctatttcagctgttccttttcacctaactgttcagtcattctggttttcaagcagtgctttatctcatgtccttgaatatagttgtgtaactttattttttaggtaataattagaacagttcccttcagaggctgcatttgccttcttctgccacctaaatattacttcccttcaaatctgcctttgaatcatcatttttaaaaaaaaattaacatgtttttgttgtagttatcttctggggtttcaattcctcagaaacaacttttttcacaacggaaaggaaagaacactagtgttctttcagtaaagtacaaagtgtttattttacaaaagagtaggtactcttgagagcaattcaaatcatgctgacaaggatactgatagaaaaagtgatttcttcttattataaagtacatttaaagttcaaggactaaccttatttatttgggaaaggggaggaggaaggaaatgatatggtacccagacactgggctaggctgcaactttatctcatttaatactcccagctgtcatgtgagaaagaaagcaggctaggcatgtgaaatcactttcatggattattaatggatttaagagggcatcaatcagctcaactcaagatttcataatcatttttagtatttagattgtgcctcaaagttgtagtacctcacaatacctccactggtttcctgttgtaaaaaccttcagtgagtttgaccattgtgctcttggctcttgggctggagtaccgtggtgagggagtaaacactagaagtctttagtacaaaactgctctagggacacctggtgattcctacacaagtgatgtttatatttctcataaagagtcttccctatcccaaggtcttcatgatgccagtagccatatatgataaattatgttcagtgataacttagttatcagaaatcagctcagtggtcttccccgccatgattcacatttgatgagtttttaaaaatcaaagtgattttgaaaatctctaatggctcagaaaataaaaacatccagtttgtggatgactatatttagatttctctagactctagtggaagacctttggaaaggccatgccaaccgtgcttgtactgctagaagcactttatgtttcctttttgggtgaaatggatttatgtgagtgctttaaacaaatagcaatacttatagactgaaataaaatgaaacttcaaataagaaaaaaaaaaaaaaaaaaaaaaaaaaaaaaaagaggggggggcgcgccccaaaaattcccccgcggggggccccaatttcgcggttccccggttttttgtggttccaagggggccccctatataggaggagcgcgcgcgatttatatataaccgctagagggcgccactggggccgcgccgtttttaaaccaaacgccttcgtgagcctggggggagacaacccgtcgtgatcccgcttcggggacgactcttcggggagaaggagagccctttatacctccctggggcgggggcgacattatcttgggggaccaaattatcacactatcgccagagagaatatttttataagcgcgcccctaaagggcggcgacacctttttatcaaccacccttctctatcaacacgggcggtgtatctagcggggggtggtgtcacccaccccataaccgccgcgcgatatattattgccttaggcgcgcggttttgtgacaaacagcgcttttggcggcgccacacaccgggggagggctactagcgcattcttatggagacacacatttttttttatccccccgagggagcgcatgcgtagtaccta

SEQ ID NO: 5314 - DNA, 2244 bp, Homo sapiens
  misc_feature (2164)..(2164): n is a, c, g, or t
  misc_feature (2191)..(2191): n is a, c, g, or t
  misc_feature (2202)..(2202): n is a, c, g, or t
  misc_feature (2214)..(2214): n is a, c, g, or t
  misc_feature (2241)..(2241): n is a, c, g, or t
gaattccgcgctttgcagagaaagcccccctggctcttctctctcaatccataatccagcgatgctgcagctgtaaaagcattaatagaaaatcaatccacaacctcgcggggcagcgatcgtcgagcgccgtttccaggctgccttccctggggtcgggagcggccccgctccccccgtggctggcgcgaaatgtggtgatccgtcccggggcggggatgacttcatgcagccggagctccgcggcgggagcggaggctgctgctggcaggtggggcgcgggccggcgcgagctgaccgagcactcggcgggcgcggcgggactgcggcccgtggcggcgtgcgcgggacctgcgctgactaggtccggggaagtttcctgactttctgagaagccctggtttccccaaagaagtgacttttctgatagaaatctgaaggtcatctccaagaaaaaagagatctagtatagtcaatgaattaaagacaagaaggtttccaatcagtccctgctatgtggatatttggtagcaatgactgatgtggaaactacatatgcagattttattgcttcaggaagaacaggtagaagaaatgcaatacatgatatcctggtttcctctgcaagtggcaacagcaatgaattagccttgaaattagcaggtcttgatatcaacaagacagaaggtgaagaagatgcacaacgaagttctacagaacaaagtggggaagcccagggagaagcagcaaaatctgaaagctaacaccccactttgaccctcgaccacacctgaaaatgtctcaaatctccaggagtatctggaatgcatttgtttccatgagtgaaaagaggaaaaagaaaatggctgtgctgcattgcaggaacctgctcattatcatgttaaaaatgagggcagaggctgtggctgcaggcagacttttccctacctctgtcattagcaatggttgaaatcatgtggcttgtgtttgggcgtcatttttgtatggatcctttcacttgatcatatgacgaaatgcttatagagagtagctccgacctagatgatgattcttcctgtagcatctggcccctcacaatgtcagaggatttaattgtgtctaattgcgaagggttgattgaaccccagagtttaaatatctctggctcaagtgttcacccagtaaaagaaagatccagaaagcactgtttttagcattacgtatctgtgtgttactgctgtgttatttacactgttttgtattgtacaatatatatgctcagcactgccccctctctgattgcttatgaaaacaaaatgatgtacattactgtgaatttttataccactcatttttaaaagggctgtcttttcattttagttttccatactgtggtggtgtacacaggatagaacacccttttttaaaacacagtctttccccttgctcattgtatgttgatgagttgattaagtctaacagattcatcaagactccattgctttattatagagacatttgaaaatatccattaatgtgaatatcacctggaattcaatctgtcaaatttgttttattctcaagtggagaacttctcccacataatatatatatatatatatattttaatttatgagaattttggacaattggaaaggtagaaaagaaaagccaagatcatactaaggactggaaatattttgttctatggaatcaaatttctcacaatgctgtatgatactatttaaatttggaggacaacttatcttcactaagctgaatcaggtggagaaagtaatctccttgcaatcatgtggacaccaatcacaaaagtaaagccctggtgttgtgttttcatgtcttttttcagccctctcagatccaaatgttattatgcactttttaatgtttgtaaacttttactaataattagtgtgaattgcattctgatacaataatgattatcattagaagctaacaaaattctcattaatactgtgtttgatggcctctgctgtgttttaacatcgtgcttcttatatggaaagtttttgtgagctgtgtaatccctctggtcagtattatgaaatcatttgtcagtggtaataaataaggaaccagtaaaaaaaaaaaaaaaaaaaggaattcctgggacaaatagcanacaatgggaattccctttacaataacnaacccccttanctttccttgaanggcttaaaatacctggccccgtgaaantta

SEQ ID NO: 5315 - DNA, 1519 bp, Homo sapiens
  misc_feature (244)..(244): n is a, c, g, or t
  misc_feature (341)..(341): n is a, c, g, or t
taagtgtgggaattgaacgaatacaattccccaggaacaagaaggcatgattcggatttattcgcctccctttaggaatttgggcctcagggccagaattggcacgagggcttattagaagccagttaagtgcgtaagtttggttttcattaattagctaatttctgctcccctgttcaaagatgcattttgagtgttaatagatcactgcccttttttgaaatcacctgtaatattttttctnactggaaaagttagtaataaaatctacagaacctacatatttgtgcctccttgggtaaatacaccacatctaattaaatgtagccagatatttcaancatcagctgaattcacttaagtttttccaaaacctcagttaaactgtgaagctattggaattttttttttctggaatttttcccctttgattcacagtggtcccatttatatctgcttctagcttagtgctatgtgtgagatatgtgtgtgtttggtgtttttgtttttttgtttttttttttttaaggtttgcaaattaaaaagggccagaaaaatttggcaccaggcaaacgaataaagataggattgggaaagaagttgctaagtgtgcttagttttaataagtaattccttctcttttttcagagaaggccttacagaaaattgttgtgcttagaattgctggatgcatttttaccctccacacaaacctaaaaattttgtgacccctttcacttacctgaaaagtagagaaatggattcagtataaggataaggagggaaggtggaccagaatgaaaactgtaaatatttttttaacctaatatcacttaaatcgaggcagaaagatatagacattcaatgaattatattcaatgcatttaaaataccactgtaattgacagagtaaaagtatagatacaaaaccttgtgtaagaggctgacttttccaaataaacattttttaagaaaacatttcttctcccaaatgtctattttcttgaggaaaatattgctgtgtcttcattttcattaccaggtttcattttgggccttgctaaattgattgaattaaatcctccagcttttgaaccttgatatttgtgtatatgatttattttcatttgaatttctcctttcctcttctttgctgtaaggcaaggaggaggggaattttaaaaccatcttatttgaactgagagcatccagagcagttaaccttaaggaaacaatgaaaaactccctttgtatgcctgggcatcatggcagatagaggaagagtgttagaggagaaaactgctgctgagagtattggcaggcttggcctcagtttggactctgtaattttctttggacccaagtctgtaacctctgcgtacttcttctctcttaccttctataaaaatgaggattactgttggtgagggaataaggaatgtaagtaaaggaaatctgaaaaaataaaagtaaagcaagtataaaaaaaaaaaaaaaaaaaagatacgcgggcggccgc

SEQ ID NO: 5316 - DNA, 1217 bp, Homo sapiens
ggaaggcatgactgcagccaccgcgaagatgttagcattgcctgctaccctggcggcgagggacacaggccctctctgggttttcctgtcagactgatggatggagaaaataagaaagaaggacgagtggaggtttttatcaatggccagtggggaacaaacctgatacaatccaatcttaaaatatactagtcaaaatgctttcctggcctacacattgaaaagttctaatacatacagcagttataacatatgccaggcactgcattaggcagctttgcacatcactgacaatttgcaaaaggccagtaaatcttatggtagtagcccttgttttcaaatgggggaaaacaggcttgcctcaaagtgagaccagttggtgaaactgattccaaactccagaaaaaatgctgatttttttccccatggttctcctacctaaatgattggtttccctatggctatttctccaagagttaagggatagctgcttaactatgcacctttacagaacattcttagcagtaatgctcaaatttaaaaggcacactcaagatacttccatgtcatggatccttccccaggtcccagtagtataaatatagggaagaggttagcatgaacttacaaattgttttaagtaatcctcttgaatgccagtcattaaaggactttgcccttctacatcaaattacatccttttcacaaatccccatttctgtaataactggtgcaaacctaaaggtgctttatagttttactactttgcagatttgcaatgctgcatataatgcagaagagcattaaaaacttttgtaaaaactcatgattttgataaacttttaaagtagcgtttatatgtaaatagaactacacatggcacacacacttgcacaagggcttcagaaaaacgtgcaatataggtgagaaaaatgtctattgaaactttctcacaggctgcccttataattaaactagtgttggggcaagcaacatctgtttcaagtagatcagggactagcaaacctaaaaggcagcaagcagcctgcagtttgctcaatccttaagaatacatggttcatacaacatgcttttactatgtcttaagtgtgacttttgaaagatacaagtgttctgtgcatatttgtgtaaataaatacataattttccaccttgtaaaaaaaaaaaaaaaaaaaaaaaaaaaaaaaaaaaaaaaa

SEQ ID NO: 5317 - DNA, 2100 bp, Homo sapiens
tagaatcgggggtttcagctcactgctccttttcttttttttctttctctcccccgcccacccccccaaaaataattgatttgctttacaatcatccacactgtgttttgtggatctttaattatatataacaatagtagtcattttaaatatatattctgaaatctttgcaaattttaacagaagagtcgaagctctgcgagacccaatatttgccaataagaatggttatgataattagcaccatggagcctcaggtgtcaaatggtccgacatccaatacaagcaatggaccctccagcaacaacagaaactgtccttctcccatgcaaacaggggcaaccacagatgacagcaaaaccaacctcatcgtcaactatttaccccagaatatgacccaagaagaattcaggagtctcttcgggagcattggtgaaatagaatcctgcaaacttgtgagagacaaaattacaggacagagtttagggtatggatttgttaactatattgatccaaaggatgcagagaaagccatcaacactttaaatggactcagactccagaccaaaaccataaaggtctcatatgcccgtccgagctctgcctcaatcagggatgctaacctctatgttagcggccttcccaaaaccatgacccagaaggaactggagcaacttttctcgcaatacggccgtatcatcacctcacgaatcctggttgatcaagtcacaggagtgtccagaggggtgggattcatccgctttgataagaggattgaggcagaagaagccatcaaagggctgaatggccagaagcccagcggtgctacggaaccgattactgtgaagtttgccaacaaccccagccagaagtccagccaggccctgctctcccagctctaccagtcccctaaccggcgctacccaggtccacttcaccaccaggctcagaggttcaggctggacaatttgcttaatatggcctatggcgtaaagagactgatgtctggaccagtccccccttctgcttgttcccccaggttctccccaattaccattgatggaatgacaagccttgtgggaatgaacatccctggtcacacaggaactgggtggtgcatctttgtctacaacctgtcccccgattccgatgagagtgtcctctggcagctctttggcccctttggagcagtgaacaacgtaaaggtgattcgtgacttcaacaccaacaagtgcaagggattcggctttgtcaccatgaccaactatgatgaggcggccatggccatcgccagcctcaacgggtaccgcctgggagacagagtgttgcaagtttcctttaaaaccaacaaagcccacaagtcctgaatttcccattcttacttactaaaatatatatagaaatatatacgaacaaaacacacgcgcgcacacacacacatacacgaaagagagagaaacaaacttttcaaggcttatattcaaccatggactttataagccagtgttgcctaagtattaaaacattggattatcctgaggtgtaccaggaaaggattttataatgcttagaaaaaaaaaaaaaaaaaaaacaaaaaatacctttgatgcattgaatgttctttcatagctgtcgttgttgaatataatatacatagatagcgatgtgcagggatttttacccagccagctaactttactaccttccttgaaggtggatctttttaagatgaccattcgctcatttgaagaagaaaaacaaaaaacaaaaaaaataataaaaataaaacaatttttacaaagtaatgggattcaaagaaaggaaaaaaagatttttcttttttgtcaaaatatcgatccaatcagattggtaaaaacccccacacaaattaaagaggaataataaaaattgcaaaaataaaaaaaaacttttgcaaatttttttatttttccttctttcttttatatcatgtgaactaaaacagtcttctggtttaggggatggggggcaaagggggaataactggatgacataaacaattttataacattaacattgttggcccaagaaggggtctctttgcctgaaaaagggggttta

SEQ ID NO: 5318 - DNA, 2479 bp, Homo sapiens
  misc_feature (970)..(1018): n is a, c, g, or t
  misc_feature (1261)..(1275): n is a, c, g, or t
ggcacgaggcacacccgcactcctcccgggtttctgctctccgcccgtgtggagtggtgggggcctgggtgggaatgggcgtgtgccagcgcacgcgcgctccctggaaggagaagtctcagctagaacgagcggccctaggttttcggaagggaggatcagggatgtttgcgagcggctggaaccagacggtgccgatagaggaagcgggctccatggctgccctcctgctgctgcccctgctgctgttgctaccgctgctgctgctgaagctacacctctggccgcagttgcgctggcttccggcggacttggcctttgcggtgcgagctctgtgctgcaaaagggctcttcgagctcgcgccctggccgcggctgccgccgacccggaaggtcccgaggggggctgcagcctggcctggcgcctcgcggaactggcccagcagcgcgccgcgcacacctttctcattcacggctcgcggcgctttagctactcagaggcggagcgcgagagtaacagggctgcacgcgccttcctacgtgcgctaggctgggactggggacccgacggcggcgacagcggcgaggggagcgctggagaaggcgagcgggcagcgccgggagccggagatgcagcggccggaagcggcgcggagtttgccggaggggacggtgccgccagaggtggaggagccgccgcccctctgtcacctggagcaactgtggcgctgctcctccccgctggcccagagtttctgtggctctggttcgggctggccaaggccggcctgcgcactgcctttgtgcccaccgccctgcgccggggccccctgctgcactgcctccgcagctgcggcgcgcgcgcgctggtgctggcgccagagtttctggagtccctggagccggacctgcccgccctgagagccatggggctccacctgtgggctgcaggcccaggaacccaccctgnnnnnnnnnnnnnnnnnnnnnnnnnnnnnnnnnnnnnnnnnnnnnnnnngggccagtgccaggatacctctcttccccccagagcataacagacacgtgcctgtacatcttcacctctggcaccacgggcctccccaaggctgctcggatcagtcatctgaagatcctgcaatgccagggcttctatcagctgtgtggtgtccaccaggaagatgtgatctacctcgccctcccactctaccacatgtccggttccctgctgggcatcgtgggctgcatgggcattggggcnnnnnnnnnnnnnnnatccaagttctcggctggtcagttctgggaagattgccagcagcacagggtgacggtgttccagtacattggggagctgtgccgataccttgtcaaccagcccccgagcaaggcagaacgtggccataaggtccggctggcagtgggcagcgggctgcgcccagatacctgggagcgttttgtgcggcgcttcgggcccctgcaggtgctggagacatatggactgacagagggcaacgtggccaccatcaactacacaggacagcggggcgctgtggggcgtgcttcctggctttacaagcatatcttccccttctccttgattcgctatgatgtcaccacaggagagccaattcgggacccccaggggcactgtatggccacatctccaggtgagccagggctgctggtggccccggtaagccagcagtccccattcctgggctatgctggcgggccagagctggcccaggggaagttgctaaaggatgtcttccggcctggggatgttttcttcaacactggggacctgctggtctgcgatgaccaaggttttctccgcttccatgatcgtactggagacaccttcaggtggaagggggagaatgtggccacaaccgaggtggcagaggtcttcgaggccctagattttcttcaggaggtgaacgtctatggagtcactgtgccagggcatgaaggcagggctggaatggcagccctagttctgcgtcccccccacgctttggaccttatgcagctctacacccacgtgtctgagaacttgccaccttatgcccggccccgattcctcaggctccaggagtctttggccaccacagagaccttcaaacagcagaaagttcggatggcaaatgagggcttcgaccccagcaccctgtctgacccactgtacgttctggaccaggctgtaggtgcctacctgcccctcacaactgcccggtacagcgccctcctggcaggaaaccttcgaatctgagaacttccacacctgaggcacctgagagaggaactctgtggggtgggggccgttgcaggtgtactgggctgtcagggatcttttctataccagaactgcggtcactattttgtaataaatgtggctggagctgatccagctgtctctgacctacaaaaaaaaaaaaaaaaaaaaaaaaaaaaaaaaaaaaaaaaaaaaaaaaaaaaa

SEQ ID NO: 5319 - DNA, 3074 bp, Homo sapiens
gatgagcggctggcgggcgtgggcctgtcggggggcgcgggggcgccggctggtgcatcttcgtgtacaacctgtcaccggaggcagacgagagcgtgctgtggcagctgttcacaaaaaaagacaaaaaaaaaaaaagaaaatattttggcaggttatgtttaccaactggggcgggggtggggggggcccagggagcagggcttaggggctagcagcccacggggccacacagagaaacaaccacgcagacagtcacaccacggggacacacggacagacgcagacggacacagcgacatgccccagacacgttaagggactggttggccaaactcagacacgtggacagggatagacagaaagagacagaagctggggctacgtccatgtggacacagaccacagatgtgggcacacgaatccatccacctgtccacgtgcacacgtgaatgtagcgatagatatttggacatcaaatttggacaccaggtcacggagaaacacaaacaccacccaggaacacgcagacatatgcccatagcatcccacaggcccaggcaggaggtcccaccccagaccctgccccagacgctccctcaccctctcggccccctcgccctggcccccaggttctctgcagagatctctcctggacccccagcggtctccttggcgcccacgaacacaggcgtgcacacgcagcgcacatgcattgagacacacgatacctcgttccaccttggcgtcacggtgggctggaggcagcccccccccccacaacacttgaggccaaaggacacccctgtccccggggctcagcctccccctgggccgaggccttggcccacacagctgagggagaggcccagccctgagcctcccccaccaggactgggcctccccggcagcaagaccccggcactccccgccaggcccagggtggggtggatgggcccaaaggcccagccccacactcctttcccgtccacttgtcacctacctatcccctttcggtttgttgggtttttcgtctttccagattgcagtggacacagcccccgatctcgagccccggcccccggcttctgtctggacattgcatcgccctagttttctttctttaaaaaaaaaaaaattccaacagaagccacaggccggagcccctgggagccctcgcaccgctccccaccccactcagcggccccatcggaactgagaattgcaaaacccccgactttagctatagttaagttgccttcccccggtgtccccacgtttggtgtctggctatggcgcccccatctgactgtccagctctctctcccccacccctcccggtgttgttattaaacgtctgtggagcttctgctgcaaggaacaaaaaagaaaaaaatcaaaaaagcgacaaaaaaacacaaacagaagaggaaaaaaaagcaacaaaaaaagaaaacacacagaagagatttaaaaaaaaaaaaggaaaaaaaaaaaaaagacataaactggcaccagttaactttcttgtacttttttgctgaatttagcttcttgtagttttaacttattgctatgttaactatttattctcctcgttgccctgtaaggacatccgtgtatatttctgttacttcatccggtttgcaagttaaaggaacgacaatgttctctttgtttctttaagttttgccgagacatggttatgcctaatttatttataaaaggggaagtggaatcattaaagtaataataattattaataacagtaatggtagccgagtggcacgcgggggcgtgtgctctgcgggacagtccccacggccagcgacgtccaggtcaccaatgggattctttttgctcttgtcttgagaattttttcagtcctatttagctggtgaaatccctagcttgttcttgatacacgaacctatttattctcgtggttttaagtcctccctgccctctctcctctcccctgcagcagggcagggacccctctcccctgctgtctcttggggctctctcccctccgccctctgcattcgggaacacgcacgtccgcgtgggaagcttgcagcagggcgtccgagcaataagggctgggtttgtcccccaccctggggggggccaggctccagagagggggcacctccccacacaccccccccccaccgaggcctaggcccctgccacccccaagactgggaggggacttctttttctaaaacacaaaactcagcccagccaggccccctccctggaggccagcccctccccgcagggggccaggccggggctcccaggcgagggggacttggggcttccacgtccctggggggcaggggccaggccaggggggagggggctcagcccctccacccctcccttcatcctgttatttattcggaaggtttcaaatcacgacagagtccatgttggaggtgataaaaaactgtaaaaaaaaaaaaaaaaaaaaaagacaaaacaaaagacaaaaaaaaaaaaaaaaagccaacaagaacacttcgcgttgcgtttagactatttattaccgggatcacaggcctggccgcggtaacagacttttacatggaattggtttaatttatttgggtccttttcacaagtgtgccaaaaacatctaaagcggttccaaaatctctttaaacagaaacaagaaacaaacaaaagaaacaaaacaaaccaacaaaaaaaggcgtgggcggcgcgcgccgcctacaaagacgatctcccccctgagggggggccacacaagatatcccgcgagacgacgccgcggtcttattgtgtgcggcacaagaggtggcgcgccccaaaaaatgaggaggagcgcgcgcgctcattcttatataacagagcgagaggcgagcgacggcggggcgcgcgacgcgcgcggtcgtaaagacaccgacgagggcgcgggacgagcgacgtgggagcagcaacaacgagcgtggttccccggcgtgggcgcacctaaccggggggagggagcgggcgcgaccacagctcaaccacaaggagggggggtggagggaagacaaaacaag

SEQ ID NO: 5320 - DNA, 1665 bp, Homo sapiens
  misc_feature (44)..(59): n is a, c, g, or t
gggcgggggtcgcggtccccccctcaacatggcggcagcggtgnnnnnnnnnnnnnnnngggggcgtgaatcggtgcgaccgcgcgcgtgcgcagtaccgggtccgcgcctgtccccgaaacttcgcaccccgtcgaactctcgcgagagcggtatctgcgtgtcgggacgtgcggaggctctcactttccgtcatggcgctgaaggtagcgaccgtcgccggcagcgccgcgaaggcggtgctcgggccagcccttctctgccgtccctgggaggttctaggcgcccacgaggtcccctcgaggaacatcttttcagaacaaacaattcctccgtccgctaagtatggcgggcggcacacggtgaccatgatcccaggggatggcatcgggccagagctcatgctgcatgtcaagtccgtcttcaggcacgcatgtgtaccagtggactttgaagaggtgcacgtgagttccaatgctgatgaagaggacattcgcaatgccatcatggccatccgccggaaccgcgtggccctgaagggcaacatcgaaaccaaccataacctgccaccgtcgcacaaatctcgaaacaacatccttcgcaccagcctggacctctatgccaacgtcatccactgtaagagccttccaggcgtggtgacccggcacaaggacatagacatcctcattgtccgggagaacacagagggcgagtacagcagcctggagcatgagagtgtggcgggagtggtggagagcctgaagatcatcaccaaggccaagtccctgcgcattgccgagtatgccttcaagctggcgcaggagagcgggcgcaagaaagtgacggccgtgcacaaggccaacatcatgaaactgggcgatgggcttttcctccagtgctgcagggaggtggcagcccgctaccctcagatcaccttcgagaacatgattgtggataacaccaccatgcagctggtgtcccggccccagcagtttgatgtcatggtgatgcccaatctctatggcaacatcgtcaacaatgtctgcgcgggactggtcgggggcccaggccttgtggctggggccaactatggccatgtgtacgcggtgtttgaaacagctacgaggaacaccggcaagagtatcgccaataagaacatcgccaaccccacggccaccctgctggccagctgcatgatgctggaccacctcaagctgcactcctatgccacctccatccgtaaggctgtcctggcatccatggacaatgagaatatgcacactccggacatcgggggccagggcacaacatctgaagccatccaggacgtcatccgccacatccgcgtcatcaacggccgggccgtggaggcctaggctggccctaggaccttcttggtttgctccttggattccccttcccactccagcaccccagccagcctggtacgcagatcccagaataaagcaccttctccctagaaaaaaaaaaaaaaaaaaaaaaaaaaaaaaaaccggggggcggaaaaagaagggaatggaaagggccccatgggcctaaacgggttccctgaacccaaactttctttggaacgaggggggaaaaatctggccgggacctcccatttagggggggcccagtaataaggtttccacaaaggaacac

SEQ ID NO: 5321 - DNA, 1496 bp, Homo sapiens
  misc_feature (12)..(15): n is a, c, g, or t
gagtaggaaacnnnnttttgtgtttaagcccccccccccggcttccccccccaatattaaagttggggttcgccccccactgggtgggtgctttttgtctccccaaaaaggggtttacaaaacccccctttcccttaaaaaaaccgcccccccccctcctccggtttttttgtttttccgccccccccagggcaaccaggccaggaggggggttggttttttggaggtttttcctaacccttgaggagacttctcagccatgagctaactgccccctggcggccaggaagagaaacagctcctccccgactaggtggaaggctggccaggcaccaagcatgtgtgtgcacttgtacgtggttgtttctttgttagcagccattagctcatgctgaattatttttgccttactttcttaagaaacattaattttatgtatagtgagtatattttgcatgttttaaattgtaaatggagctaagtccaagaaagtacttgaagctctcttccagcgagcttaattgcgtaatccctgttgtcctccagggtaagctgacacgtctacataactggttttccacaggcatcttcagttattgcttgtcaggtggactgttttggatttaaccatgtaatccatgggaccaattgagagtcagctacttttataggcatcaaagtattctcagacacctttaatatctttatggaaacttaatttttggccttttatcaatatgtcataacagcattctgaagtcagacattgttaaattgagctattaaactaatgagttttatgtaagttatatggtcttaatttggtacttgtaaatagcactagttagactctttagaatactccaagagttagggcagcagagtggagcgatttagaaagaacattttaaaacaatcagttaatttaccatgtaaaattgctgtaaatgataatgtgtacagattttctgttcaaatattcaattgtaaacttcttgttaagactgttacgtttctattgcttttgtatgggatattgcaaaaataaaaaggaaagaaccctcaaaaaaaaaaaaaaaaaaaaaaaaaaaaaaaaaaaacaaaaaaaaaaaaaaaaaaaaaaacaagggggaccacaagtagaagcataccacaagagaaccacacaaagggcgaacacaaacacaagaaagcgtacaacaaaagggagaccatataaaagacaacaaaagcaaaaactgcaacacgcgaaacaggaaaagaggaaagcacctaaggaagaaacacaaacacggccaagaaccggggcacaaagcaaaaaagagaaccaccgagaagggagcgctcaaacacggaacaccagaacccgcgcgagaaccaacgcaacaccagcgggacacaacagcagacaaaaacaataggcagagatcaaacaggcaccagacgaacacagaacaaccaccacgcaggcgagcggcggcggcaccagccaccgg

SEQ ID NO: 5322 - DNA, 1389 bp, Homo sapiens
ttgcccacagccacagcccacagcatgggctgggactgacggtgaagatcttgcgggcaaccgaatttcaggtgtccctgagcagctccatgtcggtgtcagagctgaaggcgcagatcacccagaagaaatgcgtgcacgccttccagcagcgtctggctgtccacccgagcggtgtggcgctgcaggacagggtcccccttgccagccagggcctgggccccggcagcacggtcctgctggtggtggacaaatgcgacgaacctctgaacatcctggtgaggaataacaagggccgcagcagcacctacgaggtgcgctgacgcagaccgtggcccacctgaagcagcaagtgagcgggctggagggtgtgcaggacgacctgttctggctgaccttcgaggggaagcccctggaggaacagctccgctgggggagtacggcctcaagcccctgagcaccgtgttcatgaatctgcgcctgcggggaggcggcacagagcctggcgggcggagctaagggcctccaccagcatccgagcaggatcaagggccggaaataaaggctgttgtaaagagaaaaaaaaaaaaaaaaaaaaaaaaaaaaaaaaaaaaaaaaaaaaaaaaaaaaaaaaaaaaaaaaaaaaaaaaaaaaaaaaaaaaaaaaaaaaaaaaaaaaaaaaaaaaaaaaaaaaaaaaaaaaaaaaaaaagggggggggccccttaaaaattcccccgggggggcccaagttttaacgaacccctttttttttgaaaaagggggccccaatggggggggattttaaaattaggggggggggcccctttttaaaaacccgggagcggggaaaaaaagcccatttggggaatttttgagaaagacaccatcttttgggggggggggacaatttgggaaaaaccccccaaccaaaaattttaagccccttcggggaaaaaaaaaaatatttttagggggtaaaaggggggtaaaaccaaacccaaaaattttctggccgccttagaaaattttttcttctgcgtggatttggttttgtgaaaaattatttctccggggggcgccgagggggtcccaagtttgggtgggggaatttttaaaaatacaaagccccaaggggttttttttgggccccaaaagccctaaaaaggggggaagggaaaaaaaaacccccacaaacccttttggaaaaagttttttttttgtttaaaaaaaaaccccccacaccccccccccgaaagggaaaaaaaaaaaaaaaaaaagcgcctgagggtgtggaaaaaaactttgtttatgcggccccttaataggggggcaacaaaaaaaagaaaaaagccccccccaaaattttctcaaaaaaaaaaaaatttttt

SEQ ID NO: 5323 - DNA, 2745 bp, Homo sapiens
tgggcggactccccatggccagaggctgagctccactcccgccggccgctccctaggggaaggggaaggagaggggagagcagcgacaggcctccagcaagcaagcgcgggcggcatccgcagtctccagaagtttgagacttggccgtaagcggactcgtgcgccccaactctttgccgcgccagcgcctggagcggagagcagaggcggcccggccgcggcgcgccggctttgtcatgatggccagctaccccgagcccgaggacgcggcgggggccctgctggccccagagaccggtcgcacagtcaaggagccagaagggccgccgccgagcccaggcaagggcggtgggggtggcggcgggacagccccggagaagccggacccggcgcagaagcccccgtactcgtacgtggcgctcatcgccatggcgatccgcgagagcgcggagaagaggctcacgctgtccggcatctaccagtacatcatcgcgaagttcccgttctacgagaagaataagaagggctggcaaaatagcatccgccacaacctcagcctcaacgagtgcttcatcaaggtgccgcgcgagggcggcggcgagcgcaagggcaactactggacgctggacccggcctgcgaagacatgttcgagaagggcaactaccggcgccgccgccgcatgaagaggcccttccggccgccgcccgcgcacttccagcccggcaaggggctcttcggggccggaggcgccgcaggcgggtgcggcgtggcgggcgccggggccgacggctacggctacctggcgccccccaagtacctgcagtctggcttcctcaacaactcgtggccgctaccgcagcctccctcacccatgccctatgcctcctgccagatggcggcagccgcagcggctgcagcagctgcggctgcagccgcgggccccggtagccctggcgcggccgctgtggtcaaggggctggcgggcccggccgcctcgtacgggccgtacacacgcgtgcagagcatggcgctgccccccggcgtagtgaactcgtacaatggcctgggaggcccgccggccgcacccccgcctccgccgcacccccacccgcatccgcacgcacaccatctgcacgcggccgccgcaccgccgcctgccccaccgcaccacggggccgccgcgccgccgccgggccagctcagccctgccagcccagccaccgccgcgcccccggcgcccgcgcccaccagtgcgccgggcctgcagttcgcttgtgcccggcagcccgagctcgccatgatgcattgctcttactgggaccacgacagcaagaccggcgcgctgcattcgcgcctcgatctctgagagcccaccgcatgccggtgcagacggatgcgaggatgcagggacgcgcgacgccggccccggtcgcagccgacgacgccgccgccagcctgacctcacaccctctgggcccgcctctggagccagcgcccagggtccctctgtgctttttcgctttcctaagctcctgtcgctcctctttgtcccctcagtttatgtcctcctgtgctcacctccctgacctctgtgaccttgcactcccctggcctgaagctgcctctctgcgcgctttctactgggctcgtctctttccggagccccagcgtctcctgcccaaattcaccgcggaaagggcccggggcggaggtgcgaccgggcgtcggcagcgcagacctcttggccttctctcacaggtcggtgcgctcgctctccgcgttccccgcccgactgccgtgcagtccatggctagacgcgccggacaggactgatggcgggaccgcgctgcccgagaaagggacggaccaatacgtgtgtttgctccgcgaaccctcttgaagctgttcagaagccgcttgccgcggggcccactaggcggggcgggggttgggacccagcgggagccggggcagcctggctccacggcctgtactcggtttacaccgcgggcggcgcgagggaggctgcgtttcctccgctatcagtcccgtcgcttcgggcacctccggccccggcggctggctaatgttttgtttgaaagatcggtggaactttttaagagagtatttaaaaaaaaaaaaaaaaaacaaaaaaaattcaccgggcaaccggggaagtattgtggccttggagtttgctaaatccaaatatgaaaatcaaaagctttagtattcctcatcttctcttctggaagatttgcgttagagtttttgttgggccttcaaaaagctgtgttcagagttaggagaatatatccaataaaagatggtttcgtctaccaattggggaagtttcaccctctccctatctgaagaaaaaaatcaaaaacaaatgtccccggatctttcgatgcaagtcctggaggcagggagatcactgcctgcctggcccacgctgctgggacggctcgtcctccctgctttttgtttttcaaacctcctgcttctcccaccttgggaaggagaaatgtgaaacccggcagcggccgacctaggcggtcttgtggcccggagccggcccggcccgaaaaccatagacctggttgtactgtagcttgttgtttgggggaccaaattttctagagagaactagagcacttttgttgtgtttttttgttttgtttttgttttttgccttgtcgttcccgaataaattttgtgttccttcttttaaaaaaaaaaa

SEQ ID NO: 5324 - DNA, 9670 bp, Homo sapiens
  misc_feature (2788)..(2802): n is a, c, g, or t
  misc_feature (4189)..(4246): n is a, c, g, or t
  misc_feature (6089)..(6108): n is a, c, g, or t
  misc_feature (6578)..(6594): n is a, c, g, or t
cagcgactcctctggctcccgagaagtggatccggtcgcggccactacgatgccgggagccgccggggtcctcctccttctgctgctctccggaggcctcgggggcgtacaggcgcagcggccgcagcagcagcggcagtcacaggcacatcagcaaagaggtttattccctgctgtcctgaatcttgcttctaatgctcttatcacgaccaatgcaacatgtggagaaaaaggacctgaaatgtactgcaaattggtagaacatgtccctgggcagcctgtgaggaacccgcagtgtcgaatctgcaatcaaaacagcagcaatccaaaccagagacacccgattacaaatgctattgatggaaagaacacttggtggcagagtcccagtattaagaatggaatcgaataccattatgtgacaattacactggatttacagcaggtgttccagatcgcgtatgtgattgtgaaggcagctaactccccccggcctggaaactggattttggaacgctctcttgatgatgttgaatacaagccctggcagtatcatgctgtgacagacacggagtgcctaacgctttacaatatttatccccgcactgggccaccgtcatatgccaaagatgatgaggtcatctgcacttcattttactccaagatacaccccttagaaaatggagagattcacatctctttaatcaatgggagaccaagtgccgatgatccttctccagaactgctagaatttacctccgctcgctatattcgcctgagatttcagaggatccgcacactgaatgctgacttgatgatgtttgctcacaaagacccaagagaaattgaccccattgtcaccagaagatattactactcggtcaaggatatttcagttggagggatgtgcatctgctatggtcatgccagggcttgtccacttgatccagcgacaaataaatctcgctgtgagtgtgagcataacacatgtggcgatagctgtgatcagtgctgtccaggattccatcagaaaccctggagagctggaacttttctaactaaaactgaatgtgaagcatgcaattgtcatggaaaagctgaagaatgctattatgatgaaaatgttgccagaagaaatctgagtttgaatatacgtggaaagtacattggagggggtgtctgcattaattgtacccaaaacactgctggtataaactgcgagacatgtacagatggcttcttcagacccaaaggggtatctccaaattatccaaggccatgccagccatgtcattgcgatccaattggttccttaaatgaagtctgtgtcaaggatgagaaacatgctcgacgaggtttggcacctggatcctgtcattgcaaaactggttttggaggtgtgagctgtgatcggtgtgccaggggctacactggctacccggactgcaaagcctgtaactgcagtgggttagggagcaaaaatgaggatccttgttttggcccctgtatctgcaaggaaaatgttgaaggaggagactgtagtcgttgcaaatccggcttcttcaatttgcaagaggataattggaaaggctgcgatgagtgtttctgttcaggggtttcaaacagatgtcagagttcctactggacctatggcaaaatacaagatatgagtggctggtatctgactgaccttcctggccgcattcgagtggctccccagcaggacgacttggactcacctcagcagatcagcatcagtaacgcggaggcccggcaagccctgccgcacagctactactggagcgcgccggctccctatctgggaaacaaactcccagcagtaggaggacagttgacatttaccatatcatatgaccttgaagaagaggaagaagatacagaacgtgttctccagcttatgattatcttagagggtaatgacttgagcatcagcacagcccaagatgaggtgtacctgcacccatctgaagaacatactaatgtattgttacttaaagaagaatcatttaccatacatggcacacattttccagtccgtagaaaggaatttatgacagtgcttgcgaatttgaagagagtcctcctacaaatcacatacagctttgggatggatgccatcttcaggttgagctctgttaaccttgaatccgctgtctcctatcctactgatggaagcattgcagcagctgtagaagtgtgtcagtgcccaccagggtatactggctcctcttgtgaatcttgttggcctaggcacaggcgagttaacggcactatttttggtggcatctgtgagccatgtcagtgctttggtcatgcggagtcctgtgatgacgtcactggagaatgcctgaactgtaaggatcacacaggtggcccatattgtgataaatgtcttcctggtttctatggcgagcctactaaaggaacctctgaagactgtcaaccctgtgcctgtccactcaatatcccatccaataactttagcccaacgtgccatttagaccggagtcttggattgatctgtgatggatgccctgtcgggtacacaggaccacgctgtgagaggtgtgcagaaggctattttggacaaccctctgtacctggaggatcatgtcagccatgccaatgcaatgacaaccttgacttctccatccctggcagctgtgacagcttgtctggctcctgtctgatatgtaaaccaggtacaacaggccggtactgtgagctctgtgctgatggatattttggagatgcagttgatgcgaannnnnnnnnnnnnnntcgctgtaatgccggtggctctttctctgaggtttgccacagtcaaactggacagtgtgagtgcagagccaacgttcagggtcagagatgtgacaaatgcaaggctgggacctttggcctacaatcagcaaggggctgtgttccctgcaactgcaattcttttgggtctaagtcattcgactgtgaagagagtggacaatgttggtgccaacctggagtcacagggaagaaatgtgaccgctgtgcccacggctatttcaacttccaagaaggaggctgcacagcttgtgaatgttctcatctgggtaataattgtgacccaaagactgggcgatgcatttgcccacccaataccattggagagaaatgttctaaatgtgcacccaatacctggggccacagcattaccactggttgtaaggcttgtaactgcagcacagtgggatccttggatttccaatgcaatgtaaatacaggccaatgcaactgtcatccaaaattctctggtgcaaaatgtacagagtgcagtcgaggtcactggaactaccctcgctgcaatctctgtgactgcttcctccctgggacagatgccacaacctgtgattcagagactaaaaaatgctcctgtagtgatcaaactgggcagtgcacttgtaaggtgaatgtggaaggcatccactgtgacagatgccggcctggcaaattcggactcgatgccaagaatccacttggctgcagcagctgctattgcttcggcactactacccagtgctctgaagcaaaaggactgatccggacgtgggtgactctgaaggctgagcagaccattctacccctggtagatgaggctctgcagcacacgaccaccaagggcattgtttttcaacatccagagattgttgcccacatggacctgatgagagaagatctccatttggaacctttttattggaaacttccagaacaatttgaaggaaagaagttgatggcctatgggggcaaactcaagtatgcaatctatttcgaggctcgggaagaaacaggtttctctacatataatcctcaagtgatcattcgaggtgggacacctactcatgctagaattatcgtcaggcatatggctgctcctctgattggccaattgacaaggcatgaaattgaaatgacagagaaagaatggaaatattatggggatgatcctcgagtccatagaactgtgacccgagaagacttcttggatatactatatgatattcattacattcttatcaaagctacttatggaaatttcatgcgacaaagcaggatttctgaaatctcaatggaggtagctgaacaaggacgtggaacaacaatgactcctccagctgacttgattgaaaaatgnnnnnnnnnnnnnnnnnnnnnnnnnnnnnnnnnnnnnnnnnnnnnnnnnnnnnnnnnncgactgcgttctcaaccaggtggccgcacccctggaccaaccctgggcacctgtgttccatgtcaatgtaatggacacagcagcctgtgtgaccctgaaacatcgatatgccagaattgtcaacatcacactgctggtgacttctgtgaacgatgtgctcttggatactatggaattgtcaagggattgccaaatgactgtcagcaatgtgcctgccctctgatttcttccagtaacaatttcagcccctcttgtgtcgcagaaggacttgacgactaccgctgcacggcttgtccacggggatatgaaggccagtactgtgaaaggtgtgcccctggctatactggcagtccaggcaaccctggaggctcctgccaagaatgtgagtgtgatccctatggctcactgcctgtgccctgtgaccctgtcacaggattctgcacgtgccgacctggagccacgggaaggaagtgtgacggctgcaagcactggcatgcacgcgagggctgggagtgtgttttttgtggagatgagtgcactggccttcttctcggtgacttggctcgcctggagcagatggtcatgagcatcaacctcactggtccgctgcctgcgccatataaaatgctgtatggtcttgaaaatatgactcaggagctaaagcacttgctgtcacctcagcgggccccagagaggcttattcagctggcagagggcaatctgaatacactcgtgaccgaaatgaacgagctgctgaccagggctaccaaagtgacagcagatggcgagcagaccggacaggatgctgagaggaccaacacaagagcaaagtccctgggagaattcattaaggagcttgcccgggatgcagaagctgtaaatgaaaaagctataaaactaaatgaaactctaggaactcgagacgaggcctttgagagaaatttggaagggcttcagaaagagattgaccagatgattaaagaactgaggaggaaaaatctagagacacaaaaggaaattgctgaagatgagttggtagctgcagaagcccttctgaaaaaagtgaagaagctgtttggagagtcccggggggaaaatgaagaaatggagaaggatctccgggaaaaactggctgactacaaaaacaaagttgatgatgcttgggaccttttgagagaagccacagataaaatcagagaagctaatcgcctatttgcagtaaatcagaaaaacatgactgcattggagaaaaagaaggaggctgttgagagcggcaaacgacaaattgagaacactttaaaagaaggcaatgacatactcgatgaagccaaccgtcttgcagatgaaatcaactccatcatagactatgttgaagacatccaaactaaattgccacctatgtctgaggagcttaatgataaaatagatgacctctcccaagaaataaaggacaggaagcttgctgagaaggtgtcccaggctgagagccacgcagctcagttgaatgactcatctgctgtccttgatggaatccttgatgaggctaaaaacatctccttcaatgccactgcagccttcaaagcttacagcaatattaaggactatattgatgaagctgagaaagttgccaaagaagccaaagatcttgcacatgaagctacaaaactggcaacaggtcctcggggtttattaaaggaagatgccaaaggctgtcttcagaaaagcttcaggattcttaacgaagccaagaagttagcaaatgatgtaaaagaaaatgaagaccatctaaatggcttaaaaaccaggatagaaaatgctgatgctagaaatggggatctcttgnnnnnnnnnnnnnnnnnnnngggaaagttatcagctattccaaatgatacagctgctaaactgcaagctgttaaggacaaagccagacaagccaacgacacagctaaagatgtactggcacagattacagagctccaccagaacctcgatggcctgaagaagaattacaataaactagcagacagcgtcgccaaaacgaatgctgtggttaaagatccttccaagaacaaaatcattgccgatgcagatgccactgtcaaaaatttagaacaggaagctgaccggctaatagataaactcaaacccatcaaggaacttgaggataacctaaagaaaaacatctctgagataaaggaattgataaaccaagctcggaaacaagccaattctatcaaagtatctgtgtcttcaggaggtgactgcattcgaacatacaaaccagaaatcaagaaaggaagttacaataatattgttgtcaacgtaaagacannnnnnnnnnnnnnnnncctcttttatcttggaagtgccaaatttattgactttctggctatagaaatgcgtaaaggcaaagtcagcttcctctgggatgttggatctggagttggacgtgtagagtacccagatttgactattgatgactcatattggtaccgtatcgtagcatcaagaactgggagaaatggaactatttctgtgagagccctggatggacccaaagccagcattgtgcccagcacacaccattcgacgtctcctccagggtacacgattctagatgtggatgcaaatgcaatgctgtttgttggtggcctgactgggaaattaaagaaggctgatgctgtacgtgtgattacattcactggctgcatgggagaaacatactttgacaacaaacctataggtttgtggaatttccgagaaaaagaaggtgactgcaaaggatgcactgtcagtcctcaggtggaagatagtgaggggactattcaatttgatggagaaggttatgcattggtcagccgtcccattcgctggtaccccaacatctccactgtcatgttcaagttcagaacattttcttcgagtgctcttctgatgtatcttgccacacgagacctgagagatttcatgagtgtggagctcactgatgggcacataaaagtcagttacgatctgggctcaggaatggcttccgttgtcagcaatcaaaaccataatgatgggaaatggaaatcattcactctgtcaagaattcaaaaacaagccaatatatcaattgtagatatagatactaatcaggaggagaatatagcaacttcgtcttctggaaacaactttggtcttgacttgaaagcagatgacaaaatatattttggtggcctgccaacgctgagaaacttgagtatgaaagcaaggccagaagtaaatctgaagaaatattccggctgcctcaaagatattgaaatttcaagaactccgtacaatatactcagtagtcccgattatgttggtgttaccaaaggatgttccctggagaatgtttacacagttagctttcctaagcctggttttgtggagctctcccctgtgccaattgatgtaggaacagaaatcaacctgtcattcagcaccaagaatgagtccggcatcattcttttgggaagtggagggacaccagcaccacctaggagaaaacgaaggcagactggacaggcctattatgtaatactcctcaacaggggccgtctggaagtgcatctctccacaggggcacgaacaatgaggaaaattgtcatcagaccagagccgaatctgtttcatgatggaagagaacattccgttcatgtagagcgaactagaggcatctttacagttcaagtggatgaaaacagaagatacatgcaaaacctgacagttgaacagcctatcgaagttaaaaagcttttcgttgggggtgctccacctgaatttcaaccttccccactcagaaatattcctccttttgaaggctgcatatggaatcttgttattaactctgtccccatggactttgcaaggcctgtgtccttcaaaaatgctgacattggtcgctgtgcccatcagaaactccgtgaagatgaagatggagcagctccagctgaaatagttatccagcctgagccagttcccaccccagcctttcctacgcccaccccagttctgacacatggtccttgtgctgcagaatcagaaccagctcttttgatagggagcaagcagttcgggctttcaagaaacagtcacattgcaattgcatttgatgacaccaaagttaaaaaccgtctcacaattgagttggaagtaagaaccgaagctgaatccggcttgcttttttacatggctgcgatcaatcatgctgattttgcaacagttcagctgagaaatggattgccctacttcagctatgacttggggagtggggacacccacaccatgatccccaccaaaatcaatgatggccagtggcacaagattaagataatgagaagtaagcaagaaggaattctttatgtagatggggcttccaacagaaccatcagtcccaaaaaagccgacatcctggatgtcgtgggaatgctgtatgttggtgggttacccatcaactacactacccgaagaattggtccagtgacctatagcattgatggctgcgtcaggaatctccacatggcagaggcccctgccgatctggaacaacccacctccagcttccatgttgggacatgttttgcaaatgctcagaggggaacatattttgacggaaccggttttgccaaagcagttggtggattcaaagtgggattggaccttcttgtagaatttgaattccgcgacaactacaacgactggagttcttctggggatcagtagtcaaaaaatggatggaatgggtattgaaatgattgatgaaaagttgatgtttcatgtggacaatggtgcgggcagattcactgctgtctatgatgctggggttccagggcatttgtgtgatggacaatggcataaagtcactgccaacaagatcaaacaccgcattgagctcacagtcgatgggaaccaggtggaagcccaaagcccaaacccagcatctacatcagctgacacaaatgaccctgtgtttgttggaggcttcccagatgacctcaagcagtttggcctaacaaccagtattccgttccgaggttgcatcagatccctgaagctcaccaaaggcacaggcaagccactggaggttaattttgccaaggccctggaactgaggggcgttcaacctgtatcatgcccagccaactaataaaaataagtgtaaccccaggaagagtctgtcaaaacaagtatatcaagtaaaacaaacaaatatattttacctatatatgttaattaaactaatttgtgcatgtacatagaattctttctgtattcagatggtgctaattcagactccagactgaattttaattcaagttctttctcaagtctataaatattaaactgattatttcattctaaaaaaaaaaaaaaaaaaaaaaaataaaaaaaaaaaaa

SEQ ID NO: 5325 - DNA, 2982 bp, Homo sapiens
  misc_feature (109)..(109): n is a, c, g, or t
tatgttcttctattcctgttttctcttttcgtccttcttactttatctatagtttgtgctgttttattagttgttgtgtctggccgcgcggtgtattttttctctgccncgtttgtgtgtcgttgtctgttttcttcttttcttctttgcagtggtcgtgttttgctgttctgtgtttgtgttttggtcgtctgtctcttttttcttgttttgtctgtgttgttttttttttttttttttcaggattccttcaactttaattgtgggggtaaaatcaggcagccactgaagataaaatacggtccctgggagtaatcacaatgctgttttcttttgtaaagtggacataagagttttttttttttttttattagcgcaagtggtcaaaagttgtcaaaattgtcctcattcctcgattgtctcttttttaccagtctcttgcccttcaaacagaggatacctggcctccacatcagcccatgtgatgttgccattggctaggtcttggactatgctgggcagctcagagatctctgctcttatctgccgcattgagtcacggtccctcagagttgcagtgtggggggtcttgttcactgtgtcaaagtcaatggtgacaccaaaagccacgccaatctcatcagtcctggcatagcgccttccgattgacccagaggaatcgtctactttgtgagatactccatgcctggtcagggcttccgataattccttgacaaatggcatgaactcctggttttggctcagtgggaggacggaacatttgaatggagcaactacagcagggaaactgaagaatgttctctgttcatctccttctcgtacatggaatgtatgttcaaataccgtatacatgatcctacccaggccgaaggaaggttcaattacattcggaacaacttcttccacatatagtgttttctggaatctcttcacattgatcatgtcttttgttaactgaaatgttttcccttcagtttcaattgtgaattcccctttctcattcagcagcatctccatttctgtaatgtagcactcatcacaaatggcaagatactccatcaccagttttgcatccttcttatatgccttaccaattgctcccttactgggttcaaactgaacaacattgactgttttgggttctttcagaggtttctcagctacaagtgggactttggtggctcgtgcatgacaggagaggtcataacaggaacgatcagcacatccaacaatctcaatccaaccgtaggatgttttggattctgcatcccaacagtcacaggcataatgggccatctcattctccatgtgctgccggaagcggagtttatctggagatattccaaccttcgtgaggtagaggtagatgcggccaatgaaatagcctaatactgtgttattaatcacaccctgttcaacagcatctcccaggcgcattttccgagcggactgtccgctgacctgggcttttgctgaatacaaataaaggtgaaggtctgccacattctggaacttggggtggtctttctcactgggatctacaaagtgctcaatttctgccattgtgaattctctgactctgatcagtccagatcgaggggagatctcatttctaaaagaatttccaatctgggcagcagcaaaaggcaactttccttggttgaactccaaaagtcgtttgaaattcaagaaaatcccctgtgcagtttctggtctcaagtacccaggcatgtttcctccaggcccaatgaaagtcttgaacattaagttaaaagacactggaggggatagatcatttccagtaatgggagattttacattatagttcacaaaaagatccgcaagttcttgctgtccatagttatcaagctgggccaaaacactttccatttctgatttcttttcgacagaacacttcttatcagacatcaatttctgtaaatgagcttttaatagatggtcagcacgaaaacattctccattttttacgtctttcaccatgaagtcagcaaatttgtctacatggccagaggtctttaaaactggctcaggggtgagcatggtgcaatcgatctccaggaatctgttcctcttggataaagtgctgcctccaggtctgaataatattgttcttcaaagcacagccaactggcccaaagtcatacagaccactaacacctccataaatagcaaaagcttgatcatagaaaaacctcctcttcagggtatcttccatttttgctcggtctacaatatcatctttgggctgtaacgccagctcctttgcttccagaaccctcttgcgggctttgagctcagccactgctttgtctacgtctacttggggtgctttatcttctttgagttttcgcacaagatctccctgctggcgcactgctagcctcagaggtgccagcacctcctcagcccccgcgccgtccatgctgctccgggaggcggcggcgggcaaggagatcggggcgcaggaggccgcgctgagggaccggcggagcaggagcgagggtcgggctaagagccggggcggcagcagcagcagcagagcggcgcgagcacctctaagcagcactggacgcggagagggcatgagcctgcggccctgggctgtccagagagggtggcgacggaagcggcgcgcgccgccggctcggagcatgatgaaatcgccgcgtaaacgacgcggcgcgcgtactgccgcacattcaccaccgcgtgacgcggcgccgggtcgccgccgcagattcgacacaaaacccggaaggaccccgccgaaggttttctccggttcgggagagaggtaggtagggttgcgagcgaacagatttgcacagaagtgcgtcaagccaccccagcagggtggatgttcagggacacagctctgagcgagacctgcaggccgagacacacgagaaccttcaaagcataggtttttatacgagtgac

SEQ ID NO: 5326 - DNA, 1732 bp, Homo sapiens
ggggattcgcagtgcggatttgcgaggcgcgccctggagctgctagagatccggaagcacagccccgaggtgtgcgaagccaccaaacatcccagttaccagtgtccttgaattgatagtggcttctgtttgtcagtctcatataagaactacagctcatcaggaggagatcgcagcagggtaagagacaccaacaccatgttctgcacgaagctcaaggatctcaagatcacaggagagtgtcctttctccttactggcaccaggtcaagttcctaacgagtcttcagaggaggcagcaggaagctcagagagctgcaaagcaaccgtgcccatctgtcaagacattcctgagaagaacatacaagaaagtcttcctcaaagaaaaaccagtcggagccgagtctatcttcacactttggcagagagtatttgcaaactgattttcccagagtttgaacggctgaatgttgcacttcagagaacattggcaaagcacaaaataaaagaaagcaggaaatctttggaaagagaagactttgaaaaaacaattgcagagcaagcagttgcagcaggtggagaccattggcgatgcctattgtgtagctgggggattacacaaagagagtgatactcatgctgttcagatagcgctgatggccctgaagatgatggagctctctgatgaagttatgtctccccatggagaacctatcaagatgcgaattggactgcactctggatcagtttttgctggcgtcgttggagttaaaatgccccgttactgtctttttggaaacaatgtcactctggctaacaaatttgagtcctgcagtgtaccacgaaaaatcaatgtcagcccaacaacttacagattactcaaagactgtcctggtttcgtgtttacccctcgatcaagggaggaacttccaccaaacttccctagtgaaatccccggaatctgccattttctggatgcttaccaacaaggaacaaactcaaaaccatgcttccaaaagaaagatgtggaagatggcaatgccaattttttaggcaaagcatcaggaatagattagcaacctatatacctatttataagtctttggggtttgactcattgaagatgtgtagagcctctgaaagcactttagggattgtagatggctaacaagcagtattaaaatttcaggagccaagtcacaatctttctcctgtttaacatgacaaaatgtatgtactcacttcagtacttcagctcttcaaaaaaaaaaaaaaaaaaaaaaaaaaaactcttccaaacaggctaacttatggggggacgaaattactatagaatattaacccacgcacattaccgtaacctggtaatccaaacatcccgcccctcttggcaccttcttataccgagaaaatggacggcaaatcgtaacagcaaagggcacgggagacaccctggcgaagcaaaatccgggcggccacggccagggaccaaaacagagggcacgcagaaacgagagcagccccaaacaggaccccacaggcgacacaccggcgaaaacgaacagaaacagcgccaaaagcccacacacagatacgccgacataaaacacaggaacacaaaacacaactcggcccaagagaaagaaggctagaccaagaccggggacagacgcaacacgaaagacccgacgaaggaagcacacacaaaaccaccacccgcaaaggacaacaca

SEQ ID NO: 5327 - DNA, 2742 bp, Homo sapiens
  misc_feature (201)..(241): n is a, c, g, or t
  misc_feature (824)..(865): n is a, c, g, or t
  misc_feature (1595)..(1610): n is a, c, g, or t
tggttccccagaaataataggtcccccccaggggcaggggctgacaatacggctgccttacccgccatacataaagttttatttttttggcccgaatgagggagcctcccgaaggattaaacgacgccccgatcctcaccggacctcaactaaccctaaaaaatgcacacctcaggagtctacctgagcattcaggcagcnnnnnnnnnnnnnnnnnnnnnnnnnnnnnnnnnnnnnnnnngaggctttggcccaactgcctcttgcaggctgagtccctccatgcaaaagtggggctaaatgaagtgtgttaaggggtcggctaagtgggacattagtaactgcacactatttccctctactgagtaaaccctatctgtgattcccccaaacatctggcatggctcccttttgtccttcctgtgccctgcaaatattagcaaagaagcttcatgccaggttaggaaggcagcattccatgaccagaaacagggacaaagaaatccccccttcagaacagaggctttggggtcctagcccagtgcttctccaacactgaagtgcttgcagatcatctggggacctggtttgaatggagattatgattcagtgggttgggggcagagtttctgcagttccatcaggtcccccccaggtgcaggtgctgacaatactgctgccttacccgccatacattaaggagcagggtcctggtcctaaagagttattcaaatgaaggtggttcgacgccccgaacctcacctgacctcaactaacccttaaaaatgcacacctcatgagtctacctgagcattcaggcagcnnnnnnnnnnnnnnnnnnnnnnnnnnnnnnnnnnnnnnnnnngaggctttggcccaatgcctataaaatgcccatttcgaagatatacaaaaacatacttcaaaaatgttaaacccttaccagcagcttttcccaggagaccatttgtattaccattacttgtataaatacacttcctgcttaaacttgacccaggtggctagcaaattagaaacaccattcatctctaacatatgatactgatgccatgtaaaggcctttaataagtcattgaaatttactgtgagactgtatgttttaattgcatttaaaaatatatagcttgaaagcagttaaactgattagtattcaggcactgagaatgatagtaataggatacaatgtataagctactcacttatctgatacttatttacctataaaatgagattttggttttccactgtgctattacaaattttcttttgaaagtaggaactcttaagcaatggtaatgtgaataaaaattgatgagagtgttagctcctgtttcatatgaaattgaagtaatttgttaactaaaaacaattccttagtaactgaactgtcatatttagaatggaaggaaaatgaccagtttgtgaaagttcaaagcaatagtgcaattgaagaattgacctaagtaagctgacattatggttaataatagtattttagaatttgtgcagcaaaataatttcataactttttgttttgttacttggataagatcaatctgttttattttagtaannnnnnnnnnnnnnnntagagaaaatgcagtgtggcttaacgtctctttagtatgaagattggccagaaaaagatacccagagaggaaatctaagataattataatggtccatactttttattgtatgaatcaaactcaagcataacattggccaaggaaaattaaataccattgctaacttgtgaaatggaagtctgtgatttcggagatgcaaagcattgtagtaaaaacaccaatgtgacctcgaccatctcagcccagatatcattcatatatctgttcaatgactattaaggtgcctactgtgtgctaggcctgtactggatactggggaccttgtctgtctggtttgctgctgtatcttctcccagggcattatatttatgatgaaagatgctgtggattcaattctttcagtcaagaataaacacagactttgtaggttcctgctgaataaagcaaatcccagaaacccagattttggaagaatcagcaaccccagcataaaataaacccctatcaaaatgtcagaggacatggcaaggtaaacttagcattttcaactttagaaccgggtcagcttcagggggactgctttcaaatcagccaaagagcctgtcagatcttcttagaaggaagaggttggtagttccctgctctgttttgaacatgctctagtttattaacctggggacattcccattgctgtcttaagtaagtctcatagccagctcctgtcacgtgactctcatatggattcattttcggggccagctctgaacaaagcatcatgaacatatgtgcttttggtcgtttgcaatgtgatggtggtggaggtaggtattggtttccttggaaggcatgataagaaagattcacaatggccaacagtgtgtatgaacaaaaaactgattggagcatcagctagtactgaaggtccttgctttgtgtcagaggcaaaggaacccaaggcgccaagtcctcagccttgagtgtactgctgacaactaaactcacaggctgcaaagcagacctctgatgaagatgcctgttatttcacatcactgtctttttgtgtatcatagtctgcaccttacaaatattaataaatgttccaataataggtgaaaaaaaaaaaaagaaaaaa

SEQ ID NO: 5328 - DNA, 1558 bp, Homo sapiens
  misc_feature (3)..(3): n is a, c, g, or t
  misc_feature (110)..(110): n is a, c, g, or t
  misc_feature (118)..(118): n is a, c, g, or t
  misc_feature (125)..(125): n is a, c, g, or t
  misc_feature (202)..(235): n is a, c, g, or t
gantagtaaatcaattttttaatttcacattttggattacactgagggtaaattaaatctggtagactgaaattccctagttaaataaaattagttgcagtatatgatgnacagtgtntactcanacagctgccttacaattaactcattccatgtggacaaacatttatcagatgcctattatgggcatatgtctctgctnnnnnnnnnnnnnnnnnnnnnnnnnnnnnnnnnntaagttccttttagcaattgttcagttggaagacgtattaatatttggggaaggaaaagaaagtagttgttttacaagggaggaaaaaagtgaatctgttacacatatggaagtaagcaaaatgaaaagcacttattgctttctgacagaattatagatgtaattttaagagttgctcctagcaagttaaaagtgcatataaaatatgcaactcttagttaaaggccttattttcagtcttacctatacaagtagtaaattttgtcattgctttagttacaaccatctgtaaataacttaaaagacttattatgtggggttcaaattgagtggaataaagtatagattaaaagtatacaatccttagcacgttatctcagggcttatgaaatgtaattaaatttattaagaaaatagatgaaaaattagggtacacagctggccaccaaatgcgaagtcaatctgctacttaaccctgaaaacaaaatcagttttgcatattaccactaacactaatacatatagagagcggaaccataactcattgaattttggagaggaataagcttagcgttaatattgacaatattaaggcaatattcttgtaggaatactatgtgcatgtttgatattttgccaaataacaataattaataattgttcaatgtttaagaataatattaacaaaataaaggagtttaatgcagtgatctttgtttttggcacatcaaaaattctcagtcattattcatgtttctttatgctgctggcttttgtgccctggaagatcataatagtgaccaaaatatacatgcagacttgttttttattattgttgtttaagcataatttaagaaaaaaaatttttacctggtgaacttgctatctgctctgtttctagttaaaatataataaatattatcttcctgtgctgtaaaaaaaaaaaaaaaaaaaaaaaaaaaaatttggggggggcgggcccttgaagaacgtttttaaaccccatccggtggggcggcggcgggccccagttgggtacgcggacatgcgccaaaagcggtccccaaggaaacccggggcacacatagcgcgggatctccccatatataagcgcggggacaccgcggtctggaacacccggagagggccgtggagccacagggccctctcgaggggactgaggacgaaaacgaccccccggggcgttatacgggagagaacaacaaagaacaacacagaaaacaagaacaaaacacgcacaacgcaaagaaagaaccacggagagaaaagaagcacaccacgacaaacggaaggcacgaaaat

SEQ ID NO: 5329 - DNA, 4525 bp, Homo sapiens
gggttcagtagtttgggaagggagctgggggaggcagtggcggctggagtaggtaggcgagtaaaaggaggaggaagggctggggagaagagcgaggctgtagcggctgcctgttgagggaggaagaggtggggggtgtggaggagggggaggagagagagatgacatggggagaggaggaggggggttggacgtgggaggaggaggagagggctcgagggaccgtctgtcgcgggacgggctggccagctggggcgcggagcctggaggaggaggcagcggcagcggcagcagcagccctccgagcagcagcagctgcagcagcagaaacaagtaccagccacaaagcggctcctctggcccaagcagccacagtccccccgccgcgatggcgctgcaaagccaggcgagcgaggaagcaaaggggccctggcaggaggcagaccaggaacagcaggagccggtgggtagcccagagccggagtctgagccggagcctgagcccgagcccgagcccgtgccagtgcccccgcccgagccccagccggagccccagcccctaccggaccccgcacccctgccggagctggagttcgagtccgagcgggtgcacgaacccgagcccacgcctacggtagagacccgcggcaccgcgcgcggcttccagcctcccgaaggtggcttcggctgggtggtggtgttcgctgccacctggtgcaacggctccatcttcggcatccataactctgtcgggatcctctactccatgctgctagaggaggaaaaggaaaaaaatcgccaagtggagttccaagcagcatgggtcggagccctcgcgatgggtatgatcttcttctgttctcccattgtgagtatattcactgaccgtttgggctgccgaatcacagcaaccgcgggggctgccgttgctttcattggcctccataccagctccttcaccagctccctaagcctgcgctacttcacctacgggattctctttggttgtggctgttccttcgcctttcagccatccctcgtcatcctgggccactactttcaacgccgcctgggtctggccaatggtgtggtgtctgctgggagtagcattttctccatgtccttccccttcctcatcagaatgctgggggataagatcaaggctggccaaacccttcaggtgctgggtaccttcatgtttgttcttatgctgctttcactcacctaccggcccctcctgcccagctcccaggacaccccaagcaagagaggtgtccgcaccctgcaccagcgctttctggctcagctcaggaagtacttcaacatgcgagtgttccgccaacgcacttaccgcatctgggccttcggaattgctgctgctgcccttggctactttgttccctatgtacacctgatgaagtatgtggaggaggagttctcagaaatcaaggagacctgggtgctcttggtgtgtattggggctacctcaggccttgggcgtcttgtgtcaggccacatcagtgactccatccctggacttaagaagatctacttgcaggtcctttccttcctgctcctgggcctgatgtccatgatgattcccctgtgccgggacttcgggggccttatcgtcgtctgtcttttcctgggcctttgcgatggcttcttcatcaccatcatggcccccattgcatttgagctggtgggcccaatgcaggcctcacaggccattggctacctcctgggcatgatggccctgccaatgattgctgggccccccattgcaggcctactccgcaactgttttggggactaccatgtggccttctactttgccggtgtgccccccatcatcggggctgtaatcctcttcttcgtccctctgatgcatcaaaggatgttcaagaaagagcagagagattccagcaaggataagatgttggcccctgacccagaccccaatggggagctactgccgggctcccccaaccctgaggaaccaatctaatgcctttcttgccattgtgtgccctttcccagctcttccccttcatcccaccctgctcagcatttacatttttgccaccagcacacttgttcccagacctgcgcacacagcatttcagccacctgacaatctccttggagtcaaagctccaggtgttccaaactcattaactaaattctccccagaatgcttttaaattttccagggcctttctcctcccaggatctgggaaagcttgggaaccacccctggcctttggaacctctccatatactttctaagctctgggggaggaggaggatgggacctcctggacccagcttgttagtcacccactataatcaactgccaaaggtgctactgtgtccccaggagcctaatagggtaggcccaaatctctgtttgctgaggaggtcattgccatccatatttgggagccactgggtggaggggcagggaggcaaaatgagacaagtagccttggttagtcttagagttgctgatgactgtggcttcccaagaactgggtacaagcagtgcccttattgtatggttggttaacagtctgctcccctcttcccttccttctttttttcctctactgacttctctccatactctttcccctctatttctttgtatgactgtcatagacacatgggtgcttgaagaaaggagggacccggaacttgggccaatcagcctcaccttgtcccagtccactcctaacactagcatcagtcccactcatctcaggctgagccacatctcactttttcgctcaagctatataatcctagactggaagagtagaatatcatatagggaagaaaccttaaacaccacagtgttccatgttccagtcactgatttttacaaatcttacagtccaaggcattaacctcaaggccctcccagcaccccattcttgtatacacatggcaaaatgtgaagaaactcctttcatctcagcaggtagaggaggactgatgacacgagctgccatggcgggaggaggggcagtagttattgatatggtgagccccatctctcagttttcatgacaggtctatatttctacctgggccaggccaggaaagagactatttaagaaaaaaaaaatcagttcctagcctggatcccaaaaaggtacaggcagcagttgcacatagggttggaaaatttcttttgggaaggggaagccatcccagcctttaccacccaatgtgtctcccatgctgggcatcctaggccactttgcttagagggcattaaaggtgccatgaaaggtagactctgaaccactttgatccctctgaagtaggtgactgatgcctccttatgcccaggctctggcaacagtcttactgaagaacattcccagtgcccctggctaggggcagagggcactgccaggctgtgttcagttagcacagctcacctcattaggagctcagcctctctcctcactctgcctctttgtgtctctttttctcctctctgagcctttgtctattgtgttcctgtcacccaccctttcatcatctttttgccaggcattcctggctgtcacttggagccaacagtaacttgccaccttaaggcagggtcatccccgggccaggaggatgaggttgtcctgaggggctccaaagaagacaatagttcccactcatgattttccgttacaaacaggcagctggggcatggttggcctccaatgatttcattcaaggccaaagtcctgagccccctccgctggtcccagtccagctcttatcaactccccaaaggaaaacccactggttcttagctctgtgggtaggaaggggccctagaaagggcctagttactatcctgtcagttctaacagtagtggaacaggagaatctgggccctaggagccctgtaactcccaggagagaccactgaaaatactggagcaacaatgcccctgcttccatttctccccacctcactctcaccaagtcaccagagggtggttctgtaggacctcttttgttgcttaagatgcagatggctcttaagaatcaggcagtcgcccacttctctccagatgaagggaagacattcataggtcccaaatctgcccattcagatgtcacataatatggtgggatatcaatttacttcttccacacatgtggttgtgcacatgtgagcttgtgtgcttttggagagaatgttgattggcaaaagcagcacagtattaatatttagagtaggatgcagcctcttatgcaccacagttaaatctagaacgaacaaaatttcagagctcaagacatgggacatttaaatcctcaaggagtttggaacaaaataaacagatctaaaaatttaaaaaaaaaaaaaaaaaaaaaaaaaaaaaaccgcctccttaaaaataatccccctcccgagagggggcgcccaaagcctttaaccgcgggaaacccccaagcttttttccctttggaaacaaaaaggtgggggtcaccccctctaataaggtgc

SEQ ID NO: 5330 - DNA, 2258 bp, Homo sapiens
aacatggagagtcagtgttagtactcgataaatgcaccaacctctcagagggtgtcctttctgtccgtaagcgctgccacaagcaccaggtcttcgattacccacaggtgctacaggaggctactttctgtgtggttcttcgtggagctcggctgggccaggcagtattgagcgatgtgttacaagctggctgtgtcccggttgtcattgcagactcctatattttgcctttctctgaagttcttgactggaagagagcatctgtggttgtaccagaagaaaagatgtcagatgtgtacagtattttgcagagcatcccccaaagacagattgaagaaatgcagagacaggcccggtggttctgggaagcgtacttccagtcaattaaagccattgccctggccaccctgcagattatcaatgaccggatctatccatatgctgccatctcctatgaagaatggaatgaccctcctgctgtgattctctctggcccaaaatccgggttccattaaaagttgtgaggactgctgaaaacaagttaagtaaccgtttcttcccttatgatgaaatcgagacagaagctgttctggccattgatgatgatatcattatgctgacctctgacgagctgcaatttggttatgaggtctggcgggaatttcctgaccggttgggtgggttacccggggtcggtctgcatctctgggaccatgagatgaataagtggaagtatgagtctgagtggacgaatgaagtgtccatggtgctcactggggcagctttttatcacaagtattttaattacctgtatacctacaaaatgcctggggatatcaagaactgggtagatgctcatatgaactgtgaagatattgccatgaacttcctggtggccaacgtcacgggaaaagcagttatcaaggtcagagtgcatcaacaagtttgcttcagtcttcgggaccatgcctctcaaggtggtggaacaccgagctgaccctgtcctgtacaaagatgactttcctgagaagctgaagagcttccccaacattggcagcttatgaaacgtgtcattggtggagttctgaatgtgaggctgggacagagggagtagaacaaggcctcccagcactctgatgtcagagtagtaggttaaggtggaaggttgacctacttggatctgggcatgcacccacctaacccactttctcaagaacaagaacctagaatgaatatccaagcacctcgagctatgcaacctctgttcttgtatttcttatgatctctgatgggttcttctcgaaaatgccaagtggaagactttgtggcatgctccagatttaaatccagctgaggctccctttgttttcagttccatgtaacaatctggaaggaaacttcacggacaggaagactgctggagaagagaagcgtgttagcccatttgaggtctggggaatcatgtaaagggtacccagacctcacttttagttatttacatcaatgagttctttcagggaaccaaacccagaattcggtgcaaaagccaaacatcttggtgggatttgataaatgccttgggacctggagtgctgggcttgtgcacaggaagagcaccagccgctgagtcaggatcctgtcagttccatgagctattcctctttggtttggctttttgatatgattaaaattattttttattcctttttaaactgtgtcttaaacaccaattcctgatagtccaaggaaccacctttctcccttgatatatttaactccgtctttggcctgacaacagtcttctgcccatgtctgggaacacacgccaggaggaatgtctgataccctctgcatcaagcgtaagaaggtcccaaatcataaccattttaagaacagatgactcagaaacctccagaggaatctgtttgcttcctgattagatccagtcaatgttttaaaggtattgtcagagaaaaacagagggtctgtactagccatgcaggagtcgctctagctggtaccgtaaaagttgtgggaatgtgaccccatccagggatgcaaaattctctcatcttggataactaacatagcaggggttggtaagtaatgctgctaacgcttgcaggtgtggtttaacctaattggtttatggaaaaaaagagggcaatcggggacaagcacttcaaggccagtataaggcggaaatggacacggacactggggaccaccactatttggttttttttgcttgaatctga

SEQ ID NO: 5331 - DNA, 2179 bp, Homo sapiens
tgagaagggcaaatgctatcattggaaaaactgacaaaagtcccaataggaaaaataaggaagtggagagttactatgtttctaatttttcatgtgcttctatttttttcctacttcagagccattgactaatagttgagtataacacaggttgtgtttccgggctgctgaaacatgacactaatattttcaaagaactgtggaagcctaaaaggaagccaatgagaaataactaaatgagagtttaggactgcagccttcattttcattcaaagatttaaaagtttccataaagtaaaatgttcttctccggccacctgttttcatagttctgtgttttccttcaggcctttctggcttcctatatggcagtaagaaaatgatgtgcttaatgattacaaatttcatatggaatacgaactttcagtttgtacatatgatgcacagagatgcttttgtggttttattggttttcatattacaaacaaagaaactagaaaatgaaaccattccaaaagtggaagtaatttctcactgcccctgtgataaactgtggtcactggctgtggcagcaactattataagatgctctgaaactcttcagacactgaggggcaccagaggagcagactacaagaatggcacacgctatggaaaactcctggacaatcagtaaagagtaccatattgatgaagaagtgggctttgctctgccaaatccacaggaaaatctacctgatttttataatgactggatgttcattgctaaacatctgcctgatctcatagagtctggccagcttcgagaaagagttgagaagttaaacatgctcagcattgatcatctcacagaccacaagtcacagcgccttgcacgtctagttctgggatgcatcaccatggcatatgtgtggggcaaaggtcatggagatgtccgtaaggtcttgccaagaaatattgctgttccttactgccaactctccaagaaactggaactgcctcctattttggtttatgcagactgtgtcttggcaaactggaagaaaaaggatcctaataagcccctgacttatgagaacatggacgttttgttctcatttcgtgatggagactgcagtaaaggattcttcctggtctctctattggtggaaatagcagctgcttctgcaatcaaagtaattcctactgtattcaaggcaatgcaaatgcaagaacgggacactttgctaaaggcgctgttggaaatagcttcttgcttggagaaagcccttcaagtgtttcaccaaatccacgatcatgtgaacccaaaagcatttttcagtgttcttcgcatatatttgtctggctggaaaggcaacccccagctatcagacggtctggtgtatgaagggttctgggaagacccaaaggagtttgcagggggcagtgcaggccaaagcagcgtctttcagtgctttgacgtcctgctgggcatccagcagactgctggtggaggacatgctgctcagttcctccaggacatgagaagatatatgccaccagctcacaggaacttcctgtgctcattagagtcaaatccctcagtccgtgagtttgtcctttcaaaaggtgatgctggcctgcgggaagcttatgacgcctgtgtgaaagctctggtctccctgaggagctaccatctgcaaatcgtgactaagtacatcctgattcctgcaagccagcagccaaaggagaataagacctctgaagacccttcaaaactggaagccaaaggaactggaggcactgatttaatgaatttcctgaagactgtaagaagtacaactgagaaatcccttttgaaggaaggttaatgtaacccaacaagagcacattttatcatagcagagacatctgtatgcattcctgtcattacccattgtaacagagccacaaactaatactatgcaatgttttaccaataatgcaatacaaaagacctcaaaatacctgtgcatttcttgtaggaaaacaacaaaaggtaattatgtgtaattatactagaagttttgtaatctgtatcttatcattggaataaaatgacattcaataaataaaaaaaaaaaaaaaaaaaaaaaaaaaaaaaaaaaaaaaaaaaaaaaaaaaaaaaaaaaaaaaaaaaaaaaaaaaaaaaaaaaaaaaa

SEQ ID NO: 5332 - DNA, 430 bp, Homo sapiens
tttttctgtctcaggactttcagggaaaacaatgttgacttaccaatgggcattttcaaagactctaagttggtatgtcagtcagtgtacagacaacgtgatccgcaaggcacgggcaccaccctgccgtgaaccacatctcagccaatcttccgcaaagaaatgtacccaaaaacttttctgtaaattcaggaaggtgatccacaccttccacattttgttttgaaacaatgatggtattttaaaagttcttcaaattaacaaaagtgatatcagaaatataaacatttctaaaacagagcgggctgtgaggagtgattttgccaaacttaagtcagtagcacttgacttatatctgcttttagtctgcggtggcaccacgcttaccaaggcacagtatccccttgctatccctttccttctgtgcatt

SEQ ID NO: 5333 - DNA, 2148 bp, Homo sapiens
  misc_feature (128)..(199): n is a, c, g, or t
  misc_feature (1838)..(1838): n is a, c, g, or t
gcggaggtaattgcgagccgggggtttggcggggtgaataggggggcgcattattagggggcagcggtccccgtgttgaacgacgcgatggcacgtactccctgaagcggtttaggcgggattcggcnnnnnnnnnnnnnnnnnnnnnnnnnnnnnnnnnnnnnnnnnnnnnnnnnnnnnnnnnnnnnnnnnnnnnnnncgggggaaggtggtattggcccctccgggggtggtaccctggggggcgaaggcgcgagacgccttaggtgttcgctgccccggcggaattgcggggggagcttccaggaaaaatttggcgggagggaggcttccgttccttccggggggggcgggcccagggggcttgggggaaggcaaggcattgattggcctggtttcgggggcattcgggcttgggggccgttttgaggagggcctggtgcataatggctgggacgacctggagtttctcaggtgacatcaccgaggaggacttggaggaggctggggtgcaggacccggctcacaagcgcctccttctggacaccctgcagctcagcaagtgatagcggaggcaccacgaagctgtgaactcagagcccctccctgctaccaaggcccagctatggccccagggttgaaaagttatgagggtcagggcagtatctctctgcctatttattggggtgcctatttattggggatctgcattccccgctgcccaatcatttgcaatgccctaattagggcatcctgcccctcgccttttaggctcaggacggaaggtcagttgccatggttaccgaggaccctggttactctggtgctgtcctgttttactggaccccgcctcccagccccaggggtgcctgtgggggtccatttgggtacgtctgggcccccactttcaccagtttctgcggccttccaccgggcctgaaccacagcggaggagctccgctaagacctccccacccccgctgggggtgggggcgggtgtccgtccggaaatgaaggaatagcccgaggaccgggctggggtttatttaaactgttctgtgtgggtctggggagggagagcaccttaatattattggggttggttggggtggggcaggatctcagccataaagtgccagtttgcttagttctcactgtctcctggtctgtgctgccctgctctggggatgcacggcggcagggtgggggagggaggttcctcgcaggtctcagcccgggacagggtcttgcaagcagcctcctgggcagtcgtaagggttgcggcgtgatgtcttcaataaattaagttttatttggaaaaaaaaaaaacacacaataagcaaaaccacaccacacaaaaaaaaaagggcggccccttttaaaccctcccccccgggggcccaaattttacgccggactttacctttctctgtacccacttgcgtcccctatagacgagtccaccttcccaaacccccagggcatttggtccccgccttttcttaccaaccccccccgttacctgttgaaaacaacggccttcacttttagtggatcccttctttttccaaccaaaaccccctttttccccgccggcgggcggggccatacacagctgggagagcgattcttcacccctccgcgtatattttcctccaaagcgcctctctttagggtccccgttcccctatatcaactcttcctcattacgctgcccattgcacgcggttctttatatacactagaaaacacccgccacccctgtgtcattggaactttgtccctccggaaaacacaccatatctcattccaccccccgacaattatcccgccgcctntctctttgacacatattcgcctctgttccttcccagatgccactttaccctcgcacacacctctctctatttgtgtcgctccggcgctgggctcccccctttcgatatctctctacgcacacccctcgagcggttcgtcccacacctatcccttaccgcctccccccctcccatttccctctactcccacctcccccttgtctcccccgttctgtagaaacgccccacccccctcgttgtagggcctcacgccccctgttatccttcgactgttctccctctgcttttctccactacttatctacctcct

SEQ ID NO: 5334 - DNA, 5842 bp, Homo sapiens
ctcctcccctccccctccgccctcctccgctccgggccagcgcggcggcggcggcggcggcagcagcaggagcagccccggctgcgggtcgcgacggcggcggggcgccccctcccccgtgccggggcgcggcggagggatgtggggccttgcgggaggaaggcttttcggcatcttctcggccccggtgctggtggctgtggtgtgctgcgcccagagtgtgaacgatcccgggaacatgtcctttgtgaaggagacggtggacaagctgttgaaaggctacgacattcgcctaagacccgacttcgggggtcccccggtctgcgtggggatgaacatcgacatcgccagcatcgacatggtttccgaagtcaacatggattataccttaaccatgtattttcaacaatattggagagataaaaggctcgcctattctgggatccctctcaacctcacgcttgacaatcgagtggctgaccagctatgggtgcccgacacatatttcttaaatgacaaaaagtcatttgtgcatggagtgacagtgaaaaaccgcatgatccgtcttcaccctgatgggacagtgctgtatgggctcagaatcaccacgacagcagcatgcatgatggacctcaggagataccccctggacgagcagaactgcactctggaaattgaaagctatggctacaccacggatgacattgagttttactggcgaggcggggacaaggctgttaccggagtggaaaggattgagctcccgcagttctccatcgtggagcaccgtctggtctcgaggaatgttgtcttcgccacaggtgcctatcctcgactgtcactgagctttcggttgaagaggaacattggatacttcattcttcagacttatatgccctctatactgataacgattctgtcgtgggtgtccttctggatcaattatgatgcatctgctgctagagttgccctcgggatcacaactgtgctgacaatgacaaccatcaacacccaccttcgggagaccttgcccaaaatcccctatgtcaaagccattgacatgtaccttatgggctgcttcgtctttgtgttcctggcccttctggagtatgcctttgtcaactacattttctttggaagaggccctcaaaggcagaagaagcttgcagaaaagacagccaaggcaaagaatgaccgttcaaagagcgaaagcaaccgggtggatgctcatggaaatattctgttgacatcgctggaagttcacaatgaaatgaatgaggtctcaggcggcattggcgataccaggaattcagcaatatcctttgacaactcaggaatccagtacaggaaacagagcatgcctcgagaagggcatgggcgattcctgggggacagaagcctcccgcacaagaagacccatctacggaggaggtcttcacagctcaaaattaaaatacctgatctaaccgatgtgaatgccatagacagatggtccaggatcgtgtttccattcactttttctcttttcaacttagtttactggctgtactatgttaactgagtgactgtacttgatttttcaaagacttcatttaacactgagtgaaatattactctgcctgtcaagtttttatacctgtacacacacagacacacaagcagacacacacatatatacatacgcaattgtatatatatgtgaacttctcagcatatatataaaatacacgtgtatatgaggatgtatgtgtatatgtttatacacacaggagtcagtgcccatgtgtatggaagacaaatacacatacatatatacattttgcagctatggacaatttaccacaggatgcatattaaagaaagtcatagtttttttcttttttaattgaaagggacaagtatcatctaaatattatgccttgagaatgagggcgtgaaacacaatatcatccccaaatgtgtcttgtattatcataagttagatgttttagtttaaaaatcagaaagacattcttagttaatctttgaaaactcatacagtggtattgctagtttaaaatgagtcacttacttcatatcctctcgttcagtttagtaagcaaaggcttcttggcttctctggtgatggggtttgttttcatcgggcatacgttttctgcaatggtttagtggctggggtgagccactggcagtgtgcttacctgttgtctgaaacatagatagatcccacgttgatgtctgaacgaccgtcttttgaaaactcatcgggagtgaatggcatctcgttgtaagtactctaatatacagtgtgtagtttgtttctgttgttcacttggagtggatccagcttcactgtcatgtgcgaacacagtgacacgtttggccagtgacatttcaatcactgaaaatgtgctctacatctcgtatggatttctaggcctgatatccaacagaaagcatagacgtctcaggttattcgttactctaaggtaaaaccatctaggatgattttcccccttgcagttatgttatcattcttataacattgtatgttaatagaaaatatatttgcataatatgcatatatatgtatatttaccaagattttgtttcttacgcttgctatcatggcagcatgcgatgtcatattttcctttatgtgatgtaactactttctgttatctagaaattaagattgaagctaaaacacttctactgttcaatttcagaaactaagaatcatcctcatgcctttatttctgtatctgacatatttcataagcacatccaactactcctagactgactaggattctgcaggaacatgacccgtacacaccacgcgtcacccaacgacccatgaccgttctctgaggcaaaggagggcaacctgacagcaaacacagtcactgttggttccttctgatccacagcctcatcagtatttggactttttaaagctcgtagaaacaagacaaggtgcaccggtttcatagacgcaaccttaacttactatttagatgagatctttctaaaaaaaaaaaaaagagatgatatattttttgtaaacaatatttctatcacaggcatccataaactgaaatgactacagttgtgcaaacaggtgtcacagtgaagttgagcatttggagaaaaaaataaaaagcaaaatttgcaggaagaactgctaaattaatactttatcccaaaatgccacgtatgcctcaccctctctgttctatccaaaaccaaggaccagagtgctccaatggtaggccccagttgtctcgatgtaggtagaggcaccaccctccccgaggatgcgtgtggtgtggactatccccatgagctgaccactacttgatttttctttggtggccgtaacaacctttaatttgtgggcatctgcaacagttcaaaacccaccatcagataaaacataatccacaaaatctcacgctagaggcaattacctacttttagacccttttccctctttcattcctatctttttcctcctaatcgctgctctctggttttattttcatctggagactagccagggatttctttggctttggcttttctctgaccattttttccatgggtaacaatgggggatcctaaaagttaaacagattgggaaaaaccttgttaagtggccttatcattattatcatgttaaagaaaaaaaatacatttgcaaagaccttatccctttcaatacttcaggtatctttttctgtatccagtaattaaaggtgtgaggtccacatgcagaagagggaccccaaaatgtaaatggatgtggacaaaaacagtcaatggtctatttaagtgtataatttatactattcagaactgtgacattaattctttctgggagaaaagtgatttaaaacttttttgatgcatagttgaggtacccaaatatcaaaggcagagaccccatggggctccaaagagctgcagtctccttcccaaggttttctggatataaatttgcatggtatagtcataatagcttttgagctttttatatgcatttggcaccaagactgggatccacaactttgtagacactgcgatgaagttaacatattagctatactataaatagtgtttgtaactacacacacacacacacacacacacacaaatacatacatatattctgtaaaaacaaaaaaaaactttttaagatccttgggtatgtgtttgctttactccatttcagaagaaaattacttttcttctaacaaaattattttatagcttctccatttttaaaacttgtgagagcattgagaagagaactctgactgtgttaacagaagagagttgaattggagtctctgttgtgttaaaatgacctctcgttactccacagtagttatttgagccagtgactgagtcgcggttgaggaattctgaaccggacctctgacgttgttgggaggtggctgttacccacacccagacctcttgagtaaggacagaaacgttatcattggggatataatgagatttctttcttaacaattgaaagtaataaagagttaattttctcagtagtcctgtctttccaaaatgcgccacaggggctcaagatctacagaagaatcttgttatgacagtttgttattacccatattcagatatccttgagataatggaagagccctgctacataactccctacagagaaagactgatagacttgagtagtccttaaaacaagtgttattcctgttcaccaaccccgggactgtggaggggtttcactgtctataccatgcgacatccatttcccctgaatctcaaacgaactagaaagtatgtcatgataatatttccattagatttggaagctacctgtacatctgcaatattgtgtttttaacgccagcacccagaactttgacatgttcagtcactccctgaaaggcacttctctcttgtccaaacacagcgttgacatttttactgaggagatcatctcaaaggtgatgccaaacgagtctggggctggttttaaggggacaggcacattgcagttgtaggtgttcattttcagcatctagtagataatccattggtgtttgtcccaccattggtgtattctaacaagaatgtgtccaactttgaatctcctggcttgaaagtataaaccatcacttaattcttattttaactctccacctgaaaaccagttcatatttctggccattttatgtaagcaaaactgaacaattggtgaaacattttgttactcttggaattgactctggctgtcagtgtgagccattagagtaacatcgaatcttggggcaaagagctgcccaggtgaattaaatttttccaggacactagctagtgtgccttggattgattacctcttctactgcattgaaaggcgccatgttttcctgaaatactaaattcccaacacctgggtaaacaatgaccttccagagagtggctcccgtatgcctctccctaggaccaaccccatgaacatgttttgtcacgtttgtctcatgtttctacttcacaagtcagtgagtgtgtttaaggtaagtacaggattattctagtaggaataggcgattgctgtcataatcaattctcatgttgatttcattttattgtaaagataaatttaaacccagttttgcttaagcacattgatgtaattttttggtattatttgacatgaaaaaacagcaaaattgagtgatagatacaatatgaaacttgttgatgaatgaattcaaatttattaaaaaaggagtaactgaaaaaaaaaaaaaaaaaaaaaaaaaaaaaaaaaaaaaaggac

SEQ ID NO: 5335 - DNA, 1956 bp, Homo sapiens
  misc_feature (1571)..(1591): n is a, c, g, or t
agcggggggtagggggccaggtcggagggaagcccgcccgtgcccgagcccgcgcccgagcagggactacatttcccgaggggcctcggcggcggctgcggcgaggggcacgagggtcccccggaagtggagcccgggacttccactcgtgcgtgaggcgagaggagccggagacgagaccagaggccgaactcgggttctgacaagatggccgggctgccccgcaggatcatcaaggaaacccagcgtttgctggcagaaccagttcctggcatcaaagccgaaccagatgagagcaacgcccgttattttcatgtggtcattgctggccctcaggattccccctttgagggagggacttttaaacttgaactattccttccagaagaatacccaatggcagcccctaaagtacgtttcatgaccaaaatttatcatcctaatgtagacaagttgggaagaatatgtttagatattttgaaagataagtggtccccagcactgcagatccgcacagttctgctatcgatccaggccttgttaagtgctcccaatccagatgatccattagcaaatgatgtagcggagcagtggaagaccaacgaagcccaagccatagaaacagctagagcatggactaggctatatgccatgaataatatttaaattgatacgatcatcaagtgtgcatcacttctcctgttctgccaagacttcctcctctttgtttgcatttaatggacacagtcttagaaacattacagaataaaaaagcccagacatcttcagtcctttggtgattaaatgcacattagcaaatctatgtcttgtcctgattcactgtcataaagcatgagcagaggctagaagtatcatctggattgttgtgaaacgtttaaaagcagtggcccctccctgcttttattcatttcccccatcctggtttaagtataaagcactgtgaatgaaggtagttgtcaggttagctgcaggggtgtgggtgtttttattttattttattttattttatttttgaggggggaggtagtttaattttatgggctcctttcccccttttttggtgatctaattgcattggttaaaagcagctaaccaggtctttagaatatgctctagccaagtctaactttatttagacgctgtagatggacaagcttgattgttggaaccaaaatgggaacattaaacaaacatcacagccctcactaataacattgctgtcaagtgtagattccccccttcaaaaaaagcttgtgaccattttgtatggcttgtctggaaacttctgtaaatcttatgttttagtaaaatattttttgttattctaaaaaaaaaaaaaaaaaattatcttactgtgtttatttcattttcccaatttgacaatcgtattttaaaattgaaactgatggaacattctttcttggtcttcaccatctgacaaattgaatggcaagaggtgaattttgccagtttcttttcactgatgcagatttgtgttaagatagtactgaatggagtatttataaactggccctgagcatgcataaagnnnnnnnnnnnnnnnnnnnnntttaaccttctaggaatttgaaataaatgtgtttgtgtgtctgattagatgatcattggtgtctgccaccactgtttaaaaattactgtacaggaaagtcacagcaaagatagcagttgtggactgacatgtaggacttccacagcttgtgccccattttgctaaattgggtatgacctttccttggtcctatctgcaatccctcgtaccttcctgttggttcgcaaaccggtccggcattgggatggcggagctgggagctctcttaaacgtggggactctcacatctgctgggtgtcaaagttcctcgaaaaaccaaatttgtgccccatggggggcgctatgggaatttggagcccaggccc

SEQ ID NO: 5336 - DNA, 2877 bp, Homo sapiens
cggggggatcttggctgtgtgtctgcggatctgtagtggcggcggcggcggcggcggcggggaggcagcaggcgcgggagcgggcgcaggagcaggcggcggcggtggcggcggcggttagacatgaacgccgcctcggcgccggcggtgcacggagagccccttctcgcgcgcgggcggtttgtgtgattttgctaaaatgcatcaccaacagcgaatggctgccttagggacggacaaagagctgagtgatttactggatttcagtgcgatgttttcacctcctgtgagcagtgggaaaaatggaccaacttctttggcaagtggacattttactggctcaaatgtagaagacagaagtagctcagggtcctgggggaatggaggacatccaagcccgtccaggaactatggagatgggactccctatgaccacatgaccagcagggaccttgggtcacatgacaatctctctccaccttttgtcaattccagaatacaaagtaaaacagaaaggggctcatactcatcttatgggagagaatcaaacttacagggttgccaccagcagagtctccttggaggtgacatggatatgggcaacccaggaaccctttcgcccaccaaacctggttcccagtactatcagtattctagcaataatccccgaaggaggcctcttcacagtagtgccatggaggtacagacaaagaaagttcgaaaagttcctccaggtttgccatcttcagtctatgctccatcagcaagcactgccgactacaatagggactcgccaggctatccttcctccaaaccagcaaccagcactttccctagctccttcttcatgcaagatggccatcacagcagtgacccttggagctcctccagtgggatgaatcagcctggctatgcaggaatgttgggcaactcttctcatattccacagtccagcagctactgtagcctgcatccacatgaacgtttgagctatccatcacactcctcagcagacatcaattccagtcttcctccgatgtccactttccatcgtagtggtacaaaccattacagcacctcttcctgtacgcctcctgccaacgggacagacagtataatggcaaatagaggaagcggggcagccggcagctcccagactggagatgctctggggaaagcacttgcttcgatctattctccagatcacactaacaacagcttttcatcaaacccttcaactcctgttggctctcctccatctctctcagcaggcacagctgtttggtctagaaatggaggacaggcctcatcgtctcctaattatgaaggacccttacactctttgcaaagccgaattgaagatcgtttagaaagactggatgatgctattcatgttctccggaaccatgcagtgggcccatccacagctatgcctggtggtcatggggacatgcatggaatcattggaccttctcataatggagccatgggtggtctgggctcagggtatggaaccggccttctttcagccaacagacattcactcatggtggggacccatcgtgaagatggcgtggccctgagaggcagccattctcttctgccaaaccaggttccggttccacagcttcctgtccagtctgcgacttcccctgacctgaacccaccccaggacccttacagaggcatgccaccaggactacaggggcagagtgtctcctctggcagctctgagatcaaatccgatgacgagggtgatgagaacctgcaagacacgaaatcttcggaggacaagaaattagatgacgacaagaaggatatcaaatcaattactagcaataatgacgatgaggacctgacaccagagcagaaggcagagcgtgagaaggagcggaggatggccaacaatgcccgagagcgtctgcgggtccgtgacatcaacgaggctttcaaagagctcggccgcatggtgcagctccacctcaagagtgacaagccccagaccaagctcctgatcctccaccaggcggtggccgtcatcctcagtctggagcagcaagtccgagaaaggaatctgaatccgaaagctgcgtgtctgaaaagaagggaggaagagaaggtgtcctcggagcctccccctctctccttggccggcccacaccctggaatgggagacgcatcgaatcacatgggacagatgtaaaagggtccaagttgccacattgcttcattaaaacaagagaccacttccttaacagctgtattatcttaaacccacataaacacttctccttaacccccatttttgtaatataagacaagtctgagtagttatgaatcgcagacgcaagaggtttcagcattcccaattatcaaaaaacagaaaaacaaaaaaaagaaagaaaaaagtgcaacttgagggacgactttctttaacatatcattcagaatgtgcaaagcagtatgtacaggctgagacacagcccagagactgaacggcaatctttccacactgtggaacaatgcatttgtgcctaaacttcttttggaaaaaaaaaatataattaatttgtaagtctgaaaaaaaaataatttatttttaaaaaaaattgtaaacttgcaataatgtaaaagtgtacttctgaagaaaactacatgaacgtttttgttggtattcaagtcagctagtgtttataattactggatattgaattaggggaagctcggctgccctagtaacaaaaccagcaaacgtcctgatgacaacgaagtgatgacattagccattccttagggtaggaggaacagatggatcttatagacctatgaccaatatatatataaatatatatataaatataaattaaaaatttagtg

SEQ ID NO: 5337 - DNA, 3828 bp, Homo sapiens
  misc_feature (26)..(73): n is a, c, g, or t
  misc_feature (1407)..(1458): n is a, c, g, or t
  misc_feature (2280)..(2299): n is a, c, g, or t
caaagaagttcgtcccctttgtgagnnnnnnnnnnnnnnnnnnnnnnnnnnnnnnnnnnnnnnnnnnnnnnnncggtagggacagacatctgaggacccagcctcagggatgctgtccccgggcttccaggctccagcgccgtaggactgaggcagactccacggtgagaaagagacccgatctaacccaggcctttcatcagagcccaggagggaaggcaggaagtgggaccacgaggcccggggggcttctaactcgtctgtccagggagatctgaattggggtgaagagcagaatctccagaacaaggaggaggtggtgatcatggagacagatttggctgaaatgcctgagaaaggagctctgtcttcccaggattctccccatttccaagagaagagcacagaagagggagaagtggctgctctgcgcctcacggccagatcccaggaaacagtgacattcaaggatgtggccatggactttacaccagaggagtgggggaagctggatcctgcacaaagggatgtgatgctggagaactataggaacctagtctcactttggcttccagtttccaaacctgagagctacaacttggagaatggaaaagaaccattgaagcttgagagaaaagcccccaaaagcagctattcagaactgcctttttgttgagcacagaaaacgaaggaaatttgcatttccaatgtctttcagacatggagactagaccacagagcaaggattcaacttcagtgcaagatttttccaaagcagaatcatgcaaagttgcaataatagacagactgacacggaatagtgtctatgactctaacttggaagcagcccttgaatgtgaaaattggttagagaatcagcaaggaaatcaggagagacatttgagagaaatgttcactcacatgaattcactctctgaggaaacagaccataagcatgatgtatactggaaaagcttcaatcagaaatctgtccttatcactgaagacagagttcccaaaggatcttatgccttccatacacttgaaaaaagcttgaaacaaaaatcaaacttaatgaaaaagcagagaacttataaagagaaaaaacctcataaatgtaatgattgtggtgaactcttcacctacccattttcaggtgcctttaatttccgaacaacccacgaagaagagtcccattacctcaatgaatgtgggaaatcttttagccacagagctaatttaactaaacaccagagaactcatactagaattctctttgaatgcagtgaatgcaagaaaaccttcacagaaagctcatcccttgcaacacatcagagaattcacgttggagagagaccttatgaatgcaatgaatgtgggaaaggttttaatcgaagtacacatctnnnnnnnnnnnnnnnnnnnnnnnnnnnnnnnnnnnnnnnnnnnnnnnnnnnnaatgtaatgaatgtgataaagcttttattcattcatcagcactcattaaacatcaaagaactcatactggagagaaaccttataaatgtcaagaatgtgggaaagcctttagccattgctcatccctaactaagcatcagagagttcatactggagaaaagccatatgaatgcagtgaatgtggaaaaacttttagtcagagcacacatcttgttcaacatcagagaattcacactggagagaaaccctatgagtgtaatgaatgtgggaaaaccttcagccggagctccaattttgctaaacatcaaagaattcatattggaaagaaaccgtacaaatgtagcgagtgtggaaaagccttcattcattcatcagctcttattcaacatcagagaactcataccggagagaaaccctttagatgtaatgagtgtgggaaaagctttaagtgcagttcatctctcatcagacatcaaagagttcacactgaagagcaaccctgaaaaattactgaatgtgaagaaatgtaagttggttttatcactatattaaatacttgagtgtttaggtggaaggcccatccataatatgcatgtgaggaccaattctgtatgcatctaatttcatttgcgtaatacatagttttgagccataagcaggttctttatgtccgttaatttgataattatgaaatctagccagcgatttcaaaattttaatctccaacgtcccaaatagctatctgtggaaattcaagaagtccctgagagtaggtagcagtacgaacattgtgaaatccagttttcccctctcttgtttatnnnnnnnnnnnnnnnnnnnnctctcactttgtaaggaaattcttattgggtaggttaggctgagggcttacatccttatcatcaggaagacacaatgttgttatttattactccttgagatctagatacacatatggtataattcatctagagtgtaatttcttttatattagccttaaaaaccaaaaatgctgggttcaaagtccttagaattcccttcctccctcaacaagctgctgtctatgttgatgaccataactgggatgtataatatttacagacaactctaagttacgttcacatggattatgtacatcattgattttttttttttttttttttttgagacagagtcttgctctgttgcccgggctggagtgcagtggcgcgatctcggctcactgcaacctccacctcccaggttcatgccattctcttgtctcagcctcccgagtagctgggactacaggcacctgccagtacgcctggctaattttttttgtatttttagtagagatggggtttcaccatgttagccaggatggtcttgatctcctgacctcgtgatctgcctgcctcggcctcccaaagtgctgggattacaggcatgagccaccatgcctggcatcattattgatttatgtcattgttatccctctaccgcagagaccttctttcactttccatttccctgggagttcacgtgaagtagtgaatgggtcaaaatcttaacagtggttgttgatcaagtccctcctttcttatccttggcactgaataaatctttggttttccataatcaaagggtgagggagacttcttttgtctacattattcagctttctgtaagctatgctgtgtccatttgagaaaaagccccagggatattgaaggtctgagaagttgggtggttcagtgtgttattatatttagggtcccagtaaagaagaactgaagcaactgtgagacaccagggcatacttccctgtatgagtggaaaacaaggcacggaaaatagctcacaggatagtcctcaactgacttgcttgaggataagcagcttcccttcgtgaagaagttgccatttctctggccttcatatttatctactttttgttattgttgtctgtatcggttcaatctcacactgctataaagaaatgcctgagactgggtaacttataaagaaaaaaggtttaattggctcatggttccatgggctgtacaggaagtatgactggggaggtctcagggagcttttactcatggcaaaaggcaaagccagagcaggtatcttcacagggctagagcaagaggaaaagagagaggggaggtgctacacactttttatgcaaccaaatctcatgagaactctatcacgagacagcagtagggggacagtgctaaatcattcatgagaaactacctgcgtggtccagtcaccttgcaccaggccccacctcccacattggggattacaattaaacatgagatttgggtggggatacagatctaaactgtatcattactcaaaaaaaaaaaaaaaaaa

SEQ ID NO: 5338 - DNA, 2660 bp, Homo sapiens
aaatggcgtgcccgtctctccgccggccccctgcctcgcagtggtttctcctgcagctcccctgggctccgcggccagtagtgcagcccgtggagccgcggctttgcccgtctcctctgggtggccccagtgcgcgggctgacactcattcagccggggaaggtgaggcgagtagaggctggtgcggaacttgccgcccccagcagcgccggcgggctaagcccagggccgggcagacaaaagaggccgcccgcgtaggaaggcacggccggcggcggcggagcgcagcgatggccgggcgagggggcagcgcgctgctggctctgtgcggggcactggctgcctgcgggtggctcctgggcgccgaagcccaggagcccggggcgcccgcggcgggcatgaggcggcgccggcggctgcagcaagaggacggcatctccttcgagtaccaccgctaccccgagctgcgcgaggcgctcgtgtccgtgtggctgcagtgcaccgccatcagcaggatttacacggtggggcgcagcttcgagggccgggagctcctggtcatcgagctgtccgacaaccctggcgtccatgagcctggtgagcctgaatttaaatacattgggaatatgcatgggaatgaggctgttggacgagaactgctcattttcttggcccagtacctatgcaacgaataccagaaggggaacgagacaattgtcaacctgatccacagtacccgcattcacatcatgccttccctgaacccagatggctttgagaaggcagcgtctcagcctggtgaactcaaggactggtttgtgggtcgaagcaatgcccagggaatagatctgaaccggaactttccagacctggataggatagtgtacgtgaatgagaaagaaggtggtccaaataatcatctgttgaaaaatatgaagaaaattgtggatcaaaacacaaagcttgctcctgagaccaaggctgtcattcattggattatggatattccttttgtgctttctgccaatctccatggaggagaccttgtggccaattatccatatgatgagacgcggagtggtagtgctcacgaatacagctcctccccagatgacgccattttccaaagcttggcccgggcatactcttctttcaacccggccatgtctgaccccaatcggccaccatgtcgcaagaatgatgatgacagcagctttgtagatggaaccaccaacggtggtgcttggtacagcgtacctggagggatgcaagacttcaattaccttagcagcaactgttttgagatcaccgtggagcttagctgtgagaagttcccacctgaagagactctgaagacctactgggaggataacaaaaactccctcattagctaccttgagcagatacaccgaggagttaaaggatttgtccgagaccttcaaggtaacccaattgcgaatgccaccatctccgtggaaggaatagaccacgatgttacatccgcaaaggatggtgattactggagattgcttatacctggaaactataaacttacagcctcagctccaggctatctggcaataacaaagaaagtggcagttccttacagccctgctgctggggttgattttgaactggagtcattttctgaaaggaaagaagaggagaaggaagaattgatggaatggtggaaaatgatgtcagaaactttaaatttttaaaaaggcttctagttagctgctttaaatctatctatataatgtagtatgatgtaatgtggtcttttttttagattttgtgcagttaatacttaacattgatttattttttaatcatttaaatattaatcaactttccttaaaataaatagcctcttaggtaaaaatataagaacttgatatatttcattctcttatatagtattcattttcctacctatattacacaaaaaagtatagaaaagatttaagtaattttgccatcctaggcttaaatgcaatattcctggtattatttacaatgcagaattttttgagtaattctagctttcaaaaattagtgaagttcttttactgtaattggtgacaatgtcacataatgaatgctattgaaaaggttaacagatacagctcggagttgtgagcactctactgcaagacttaaatagttcagtataaattgtcgtttttttcttgtgctgactaactataagcatgatcttgttaatgcatttttgatgggaagaaaaggtacatgtttacaaagaggttttatgaaaagaataaaaattgacttcttgcttgtacatataggagcaatactattatattatgtagtccgttaacactacttaaaagtttagggttttctcttggttgtagagtggcccagaattgcattctgaatgaataaaggttaaaaaaaaaaaaaaaaagaaaaaaaaaaaaaaaaaaaagatttttggtctggcattgtggtcttatgatgaaaacatgtatcctcttaatggcggcttctcatatattcatcctgtacattttaaaatttgttaagcaactactcgtggctaagcactgcatagcctctatgtatgttattgtggcaggcaaaaggttctgattttgggcacaacctttatataaataacacaaaaattaaaa

SEQ ID NO: 5339 - DNA, 2551 bp, Homo sapiens
  misc_feature (1327)..(1349): n is a, c, g, or t
acagccgccgctcacgtccccgcagcgcatgaccgcggcactgcggctgcagggctctctcccccgcccgcgccggattcctggagcaagggggtggggggctcggaggtgcaggacccatcattccgacacgcgccgcgacgccaggagtcggggatgacgcccctgctccctcccctcgttcctgtttctcggagtttttcgacccctgagcgcgtcgctgagtcaccttcccggaacgcgctcgggacgctctggacccagcggggactgcccgggggccgcgcaaggcgaaggcgcacccgccgatacgcgcgcggagctgcggccccagggaccccgcgtcccagccagtgccccccgacccgcccggggactctcgggtcccgcccgtctgaccccccaagtgttgggaaacggggccgagctgcctgggtcctccggaagagaagacaccgcggaggcgtgccggagttcagggcgccgcccggctaattggctgcgtgctcctcctggacctgcctcttctcgactttaagaagcgatgagagaggtccagccgccgcagggaatgacgccggtgctcctacagccacggctccgggcggggaaggcgagccccacagccggccctgcgacgcccgcctgggcagcaccgataaggagctgaaggcaggagccgccgccacgggcagcgcccccacagcgccagggaccccctggcagcgggggccgcgggtcgaggttatggatccaggtttgtggggttcctgctgggaagggctgtagggggattcctgttcctcgccaggaatgatggaacgcccagctggacgaaaggggctgtggacgatcgggagaaacattatccctcacgaggccagaagccggccgaatctgagccaaggaagggggtggcaggggcgccgcgtccccaccccaggtctcccagcaaaggccgctcctctggccagggtcaattaccggggtgtttcgggcaccaagttcccacactagtgccccattgttacccgtggccccctagtggtcggttgcgagacgtgggctctttggttatggatccagcgggcggcccccggggcgtgctcccgcggccctgccgcgtgctggtgctgctgaacccgcgcggcggcaagggcaaggccttgcagctcttccggagtcacgtgcagccccttttggctgaggctgaaatctccttcacgctgatgctcactgagcggcggaaccacgcgcgggagctggtgcggtcggaggagctgggccgctgggacgctctggtggtcatgtctggagacgggctgannnnnnnnnnnnnnnnnnnnnnncatggagcggcctgactgggagaccgccatccagaagcccctgtgtagcctcccagcaggctctggcaacgcgctggcagcttccttgaaccattatgctggctatgagcaggtcaccaatgaagacctcctgaccaactgcacgctattgctgtgccgccggctgctgtcacccatgaacctgctgtctctgcacacggcttcggggctgcgcctcttctctgtgctcagcctggcctggggcttcattgctgatgtggacctagagagtgagaagtatcggcgtctgggggagatgcgcttcactctgggcaccttcctgcgtctggcagccctgcgcacctaccgcggccgactggcctacctccctgtaggaagagtgggttccaagacacctgcctcccccgttgtggtccagcagggcccggtagatgcacaccttgtgccactggaggagccagtgccctctcactggacagtggtgcccgacgaggactttgtgctagtcctggcactgctgcactcgcacctgggcagtgagatgtttgctgcacccatgggccgctgtgcagctggcgtcaagcatctgttccacgtgcgggcgggagtgtctcgtgccatgctgctgcgcctcttcctggccatggagaagggcaggcatatggagtatgaatgcccctacttggtatatgtgcccgtggtcgccttccgcttggagcccaaggatgggaaaggtgtgtttgcagtggatggggaattgatggttagcgaggccgtgcagggccaggtgcacccaaactacttctggatggtcagcggttgcgtggagcccccgcccagctggaagccccagcagatgccaccgccagaagagcccttatgacccctgggccgcgctgtgccttagtgtctacttgcaggacccttcctccttccctagggctgcagggcctgtccacagctcctgtgggggtggaggagactcctctggagaagggtgagaaggtggaggctatgctttggggggacaggccagaatgaagtcctgggtcaggagcccagctggctgggcccagctgcctatgtaaggccttctagtttgttctgagacccccaccccacgaaccaaatccaaataaagtgacattcccagcctgaaaaaaaaaaaaaaaaaaaaaaaaaaaaaaaaaaaaaaaaaaaaa

SEQ ID NO: 5340 - DNA, 3452 bp, Homo sapiens
  misc_feature (562)..(582): n is a, c, g, or t
ttgggagatacctctttcgcttcttataacactgcaagagacagacagggtggctctcactgtgtccatttgaaggctaaagaaactgcagctcagaccagttcagcaactctcctacatcgtgtggctaaagctaagaattgtgacccatttttctgaatccaggtccccgcgatgccctgggttcagaccctaacaccctcccgtccctgagtgctggggatttaaggcagcagtgcctcctttcaggaaatcacacacacactggaaactcctgcatactcctcttactataatctgtcaccaaagactggatattcctgtgctggggctcgtgccagcgcctcgggctgccaggtgctgctttccaactcccacatgggctgccctccccctactgctacccacagggcccccactccacctgctcccagacgaggccaactcctggccaagcttaggggcacagcggaggcgctctgtttctgatttttctcgccttccttggagatgcctgtgcttggaagggaaggcagaacattgcatcttggaacaaatctgnnnnnnnnnnnnnnnnnnnnngcctggataatgtaggcagactgtcaatttcaccagttagaaagaaagagaaaagggggagaaattccccatgacagcgactgatgaagaatttcaatagaaagctgctacttcagaaaataagatcatttgctgcgaatggagaacatctcaggcagccctgatgctccaccggctctgggcatcaccagcggccccagggaaaaagaaagaaatgggaaacagcatgaaatccacccctgcgcctgccgagaggcccctgcccaacccggagggactggatagcgacttccttgccgtgctaagtgactacccgtctcctgacatcagccccccgatattccgccgaggggagaaactgcgtgtgatttctgatgaagggggctggtggaaagctatttctcttagcactggtcgagagagttacatccctggaatatgtgtggccagagtttaccatggctggctgtttgagggcctgggcagagacaaggccgaggagctgctgcagctgccagacacaaaggtcggctccttcatgatcagagagagtgagaccaagaaagggttttactcactgtcggtgagacacaggcaggtaaagcattaccgcattttccgtctgccgaacaactggtactacatttccccgaggctcaccttccagtgcctggaggacctggtgaaccactattctgaggtggctgatggcctgtgctgtgtgctcaccacgccctgcctgacacaaagcacggctgccccagcagtgagggcctccagctcacctgtcaccttgcgtcagaagactgtggactggaggagagtgtccagactgcaggaggaccccgagggaacagagaacccgcttggggtagacgagtcccttttcagctatggccttcgagagagcattgcctcttacctgtccctgaccagtgaggacaacacctcctttgatcgaaagaagaaaagcatctccctgatgtatggtggcagcaagagaaagagctcattcttctcatcaccaccttactttgaggactagccaagaacagacacaatggttcatgcccaaaaggaacagaagttccaactattgcctgggatcttgcgaaaagcgaggttccctgatccctgggagcctcacgtattttagaagccaagagaagccacatggagactcaaattcgcatcttctctatccacatcatgaccaaaggaacccctccctggtgtctgatcagggctgtggcatcacaaaacattggatcatgacatgtcgggcgatgcttggaaaagcccagcatgtatgtatgcacacattgtgtgtgtgggaaggacaaagccactctcacaagaaagggcaccaggactgctctccaaggaactggacctgtccagacagttacactccaaggtcattggagagaacttctgtatgggcaagcctgagagggagaggaaacaaaagctgtgtcctggcagaaggtctgggtttgcagatgggtgccctgaatggaactactttaactaatccatagggacttctggtatgctttcctctctttttaaaggaacttcgtgacactaaacattagcccaaaggacttcttagccttcaattgggagatacctttggtctgctcctgcaccaaagccatatgggtggaagtcagttggcctccctggttctgcagagggccagaagaatgagagagaggaagactgctggcagggaaatcgaggaggcgagactagaactgcaccagcttccctgatgtctgcagccatggctttgcagcgcagacagagcttctctgggatgctgggattcttgcctgtatgaatgcatcaagtattcatttattgcccgaataggcattgcattaagtcctctgttaggtgtcaggcaagccaaaaaaaaaaaaaagatgctaagtcctaacccccaacagaagtgttcacagtgtagacgggaaaaaatgtataaacaaatgtgtaaaaagagaaatcagctcatggcttaggatggaattagagacaggtgagggacactcaggagctcattttccagctgctcttcagagtggaagggctggctggatcgggtaggtaagaatagctggattttttagaaaagaaatggatacagtctaaagaattaactcacccggtactttattctaagaagggtctggcatccatatgaggaaaaatgctcagctccaggaaagatggggagtccaagtggattaatgatgtcatgcataattttaagagacaagggagaaaacacaatgtatagccagagaaggagaagctcccatccaaatcctactaggaagagagtgggctgcagatgaatctgtgactcatgtttccctgtttcaaagggatcctggggaaggaggggaacatgcttgcagtatctctccctgtctgtctgctcacataagcattccgtccatctgagctcatcgtgctactggtatgtgtatgtgcagttacacagttttctgtatcatagattctagtgtgtttatacaaggagacatctgtggtttccccaaccgttccaaaaggctatttcaaaggaaccagccaacgtatgagaaatgaatgtaacactgtggacattgacttcccgcataaggcagggtgaccccctgaactccagatgtctgcacagtatcttatgtgttgttttccgttgtgacgaatgtgattggaacatttggggagcacccagagggatttctcagtgggaagcattacactttgctaaatcatgtatttattcctgattaaaacaaacctaataaatatttaacccttggcaaaaaaaaaaaaaaaaaaaaaagaaaaaaaaa

SEQ ID NO: 5341 - DNA, 548 bp, Homo sapiens
  misc_feature (107)..(107): n is a, c, g, or t
gaataggcaccattttccttccggttctggcttaggttcatttacgtaatgttctccatttccaaccacatatgccaatgacagacttcattcatttttatggtggnaataataaaggacgtattttgagaaatcaaactgagagagttttcagttcatttcagacaatcgacaaaagattgcatgttttacttgaagctctgaacagatccaaatccctcttgcagagtcacatagaaatatattctcttacagccttcaaagatatcagccctgctcctttattagttagcaatattttgagccagttcaacattaatattagtaaaaagtttagttatacttttcaagaagtagagaagttccattctctaaccttttctgctttagcctctgaagacttaaatacatagaaaacaaaacagaaatgaaattaagaaatgtttgaaatagggcaacccgctcgggtccccttccacactgtggaagcttttttcttccgctctttgcaataaatcttgctgcaaaaaaaaaaaaaaaagtcgacg

SEQ ID NO: 5342 - DNA, 2744 bp, Homo sapiens
  misc_feature (509)..(551): n is a, c, g, or t
agagcacatgcacactgtcagggctagcctgcctgcttacgcgcgctgcggattgttgctccgttgtacctgctggggaattcacctcgttactgcttgatatcttccaccccttacaaaatcagaaaagttgtgttttctaataccaaagaggaggtttggctttctgtgggtgattcccagacactgaagtgcaaagaagagaccctcctagaaaagtaaaatatgactaaaagcaatggagaagagcccaagatggggggcaggatggagagattccagcagggagtccgtaaacgcacacttttggccaagaagaaagtgcagaacattacaaaggaggatgttaaaagttacctgtttcggaatgcttttgtgctgctcacagtcaccgctgtcattgtgggtacaatccttggatttaccctccgaccatccatggagcacgaggccttcagaaaagacacttcaatgggagtgaacatctctaactaaggacaggatggctnnnnnnnnnnnnnnnnnnnnnnnnnnnnnnnnnnnnnnnnnnnggttatgcaagtcgccaggcaggaggccattccaggagtgggattattcatcaaactctttgcccagttcatcccaatgggggaagtattcccttctttcctactctgggaagaatgtctcctgccactcctcaactgatgatagacttcgaaaacagatgagaagactagcagctagcaagggtgcttgtggtcacactgtggaacactaaagagctaggaaagagttgagcacaggcaacattacaaacaaaggatttgaaaacaccaagagtacaggtcttctttaaggaagaataaaaaagaagaggttcatttttctggctttttttttcacctgaaacactttttctcgagtccaaaatcattccccccgtgaagtctgcttaccaaaacataagacgacttatatatttgaaagaagtcaaatgaatgagctctctaatagaagtccatgagttgagtgggtatttcttatttgaaagtgtttttctttaatcaaaagtccttagaatgagggaaacaaaatatttatttgttttggaatcccacttatcaaatcattcaaaactttcagctggagtggggtttgcttttgttttgtttgtgtccataagagaaatggtagaagatgaatcagtatgaagacactgttaatgaggttatgagaaaaaaacagcaggggcattagtttcaggcaaggcagctcccaggtttagagattaatttttaccccctaaggaatatccagtcaaagacgctgagtgggagctgtcaggcagtagcagctgtgtttgagtttctggctgaaaatggtgaagaatggacttaattatgctaacaaactgaaaaatctagacatagatcctctgatatacaattagagatatttttatatagaccccaagcattctgtgcataaaagttaacattaggctgtggtgcagtaaccatttaatgtcgaggctctatttcggaaatacactacaaatgttaaagtacgtggctgtcctcttaagacactagtagagcaaagacttaatcatatcaacttaattctgttacacaatatgtgttttttaatatactaaccatttcttatggaaaggtcctgtggggagcccatcctctcgccaagccatcacaggctctgcatacacatgcactcagtgtggactgggaagcattactttgtagatgtattttcaataaagaaaaaaatagttttacattaaaaaaaaaaaaaaaaaaaaaaaaaaaaaaaaaaaaaaaaaaaaaaaaaaaaaaaaaaaaaaaaaaaaaaaaaaaaaaaaaaaaaaaaaaaaaaaaaaaaaaaaaggggggggggcctaaaaaaaaccccgggggggggcaaaattaaaggaaacccttttttttggaaaaaggggggccaaaagggggggctataaaaaaaagggggggggggcgggttttaaaaacgggggggggggaaaaaggggaaggggggaattttgggaaaaaaaattaatttggggggggggaaaaagggggaaaaaaaccccaaaaaaattaaaggcccaagggaaaaaaaaaatttttaggggggaaaggggggaaaaaaacggcaaatggcgggggggggaaaaattttgcttttgggagatgtttttgaaaaaatattacccggggggcgggggaccaaaaggggggggggaataaaaaaaaaagcgccccagggggtttttgggggggccccaacccccaaaagtgggttaaaaacaaaaaaacgaccacaacaccattgggaaggggtttttctgggttttaaaaaaaaacccccaaccccgccccggggagggggaaaaaaaaaaaagaaagggcccctctggtggaaaaaaaatagtatatatgcgcccgcataaggggggggaacacaaaaagaggacaatggccccaccaaattctcaccagaaagaaccctgttttttcgacggggaacccacacgaggggggaggttcgacgaaaacaaccccaaaaaggaccaatgctcacagcggtgaggcgacgcaacccgagagacaccgcacagatctgcccacgaatcggaggtactgacaggttatgagcggtgcatacagcaggcacgggagatagaaaagcaacacaattataagagacaagagacataggataaacgatataaacaccac

SEQ ID NO: 5343 - DNA, 1058 bp, Homo sapiens
  misc_feature (536)..(536): n is a, c, g, or t
  misc_feature (542)..(542): n is a, c, g, or t
agagtatagaaacagcagaacatctctctccaggactagaaggactattaggaaaacttgccctgaaggctctgaggcaagccatgacacatgtgtggatattgatgaatgtgaaaatacagatgcctgccagcatgagtgtaagaatacctttggaagttatcagtgcatctgcccacctggctatcaactcacacacaatggaaagacatgccaagatatcgatgaatgtctggagcagaatgtgcactgtggacccaatcgcatgtgcttcaacatgagaggaagctaccagtgcatcgatacaccctgtccacccaactaccaacgggatcctgtttcagggttctgcctcaagaactgtccacccaatgatttggaatgtgccttgagcccatatgccttggaatacaaactcgtctccctcccatttggaatagccaccaatcaagatttgtatccggctgggtgcatacacacaggatggagtgatgcatcccaggacaactttcctgggtaggttgagggaacagatngtttcntttttgccttgagggatgaaaacctgaaaggagtggtgtatacaacacgaccactacgagaagcagagacctaccgcatgagggtccgagcctcatcctacagtgccaatgggaccattgaatatcagaccacattcatagtttatatagctgtgtccgcctatccatactaaggaactctccaaagcctattccacatatttaaaccgcattaatcatggcaatcaagccccccttcccagattactgtctcttgaacagttgcaatcttggcaggcttgaaaatgggtgctacacttctggtttttggtgctcctgggactctgggggtttctggtccctggctatctgagttggctaaaagccttatttttttaccggggggttcccaagtttcggtctcggttcgggggtccgggggtcaggtcgggggcccgggaatccacgagtggggcttcaaccgtatcacggcgtggtagggtcacctctgcctgtgttgttttggttgttggtgtc

SEQ ID NO: 5344 - DNA, 2419 bp, Homo sapiens
tttttttttttttttttttttttttttttttttttttttttttttttttgcttcagtctctttattcgagagaaactttgtcctcaaagggaagaagtaagaagaccccctgctgaattatttcacagtagaaatagtagattcctctctggtcctagataccacccccagcagcaattttccaaacccaggatttggtaaccttgggcctagggcatcccagccccaacaagagcataacatgttagggaggaacgagagagggaggcagggcaggagttgaggaatcaccgaccactttcatccaaaccagacaccacctcgttttgcagagtcctcaggggaagctctcaaaacctcagttccctcatctgtgaaatgggagacatctgggcaagatgagtttgaaggtcccttatggttttcacgattggattctatcttctcccacccatccaggctcccaaccccaccagagctgactctggggtcgaatttgagccaatcccctccctttgtcagtgcccagtttcctcaccccttctgaaccttgctgccagaatctctgtgcctcttctctggagaaggacccaggaacctgcagggctctgtgcgctctgggaattatctaaggctggcaaaggcatcccggtgcttgaggcccttcgtgttcttgctcttcccttctccctgtccttgctggctcaagggtcagctggagatggttctgaaatcaaattcctcccactctttggacttccattcctctccccttctctcttctttctttcttccttgtcttttccttcttcttctccccaccctctccttccaagggctgaagaagttgggcattcaggcagctgacctgattcaaagcccagctccatacctcactagctgtgcaactctgaactagtgaagtctgttcttgaaacagaaactcactttctgcacccccccccccaccttgctatgatggtccccttctgccagggccaatttgaggtttcagtgtttgtgcctgaaccatcgtaggtgcttcatgaatgccagatccctttccttcatcatcatgctctgggacctttctgtcccctctcctgtccctcccctatcctcaaacaccatcttcttttcttttccctctacctcttgtcctcacgatccctcagctcccccaccccacccaggaggcagggctaagtaaggccccatcactgagtcctgggcccagagagaaggctctgggcactaagtatgttggttgcctgtgcagcagtgcaggtgagcacactttgcacactgcagggacgatatatgcatgacccatggagatgttcacatgaagctgtggggacaagactgtatgggatgttaaggctgcatttaagtacttgacaggaacctaagtcagaacaggaagacccacagagcagccagaaagagggaggccagactctaaggaggaaaacagccggtttgaattgtgctcctgtttatcagcttttccaatgacaacatgaattcctggctcccccatcctggcctggactgccagaagcccaggaaaagcagcatcctacaagccaggagggccaaggcgctgacgactgctgctgtgacccgggacaggtcccatcccatctcgtgcctcagtaaatgtgggaagaggggagatgggggccactgagcaatatttaaagctccctttttgctctcaaaccgtctatattcaaactctttaaagcattcagaggctccagcttgggatcaattcagagctgccttgtcataagcattaaggcacaataagggaaggaacagtttgtctcttaatgaagtgtgattccaaacagcccatggcctcgggaactcgcccagcgcggggtagacattgcatctgttcattgcatcttgttggagaatcagcttaacaatgaagggacttggaagagaacagaatgtggacacttaggagccaaagggcctcaggcccacaagggactgcctcctgccagctttccctccccattgccttgatctctggagacataggaggtgggagccacggtaggaggctgttaatggctgttgagggagctggaagccaagtgcattttctctgccatgttgcatcattttgtgaaaactatttgcaaagtttcttaaaggccattaagatgttcatcctcatttgcataaaaataaatatttatggcgaatatgtagtatctttttaagtgacttcaccatagtgcattctcatttgagccaggcaaactgaagttcaaatccaagctccggcagagactagctgggtacctttgggcaagttacttaacctctctaagcctcagattcctcctatgtaaaagggaagttataaccatacctaactcagggttgctgtaatgat

SEQ ID NO: 5345 - DNA, 1637 bp, Homo sapiens
agcgggcgtgcggccgggcgactgcgaaggtgcgggatagggggccgggggccgcgctccgtgaccgttctggcggcggcgctgaaccccacaacatcaccagacggccggggccaagagggcgagggcgggggcgggggcgggggcgacagcaggtccccgcggggcctgcatgaggaggctccggcgcccgccctagtaaatctttcttgggcctagaaaacattggtccgacgaagaaaagttgagactagatcccgttgaaaacttgtcctgaaatctccatcactcctgagttattgtccccaccaccatctagaggttaccgctccccgttcggcgtcgggagctccagggctggccgtgggtgctgcgccctgtctgttgggatcacgaagctgcacctctgggtccgctgttgtatttggaaattagcagcagcattttgatcatttttctcttcaccttccagtctctccatttatgaggtcacagtgagtcccgtctcaaggacacgtgttcaccatgggcttaaacttgatgaaaggagcagggagaagtcgtttataggtcattgggtgatgcttggtcctttgatgccctgggtgtaccaggggacccccgccacttggaaccgggttctgtctacctgtagacacctgagaaaaatcggtgatggaaaagctcacctctaatgattcatctccgtgtctcctattaaaattgctggcggagttcttttctggtggattggaacagcttggtgattgctgagcatctcccgtccctctcttttccagtttgtatttcttatctgggaagattttaccaggacctcaaagacagagatgtcacattctcaccagccactattgaaaacgaacttataaagttctgccgggaagcaagaggcaaagagaatcggttgtgctactatatcggggccacagatgatgcagccaccaaaatcatcaatgaggtatcaaagcctctggcccaccacatccctgtggagaagatctgtgagaagcttaagaagaaggacagccagatatgtgagcttaagtatgacaagcagatcgacctgagcacagtggacctgaagaagctccgagttaaagagctgaagaagattctggatgactggggggagacatgcaaaggctgtgcagaaaagtctgactacatccggaagataaatgaactgatgcctaaatatgcccccaaggcagccagtgcacggaccgatttgtagtctgctcaatctctgttgcacctgagggggaaaaaacagttcaactgcttactcccaaaacagcctttttgtaatttattttttaagtgggctcctgacaatactgtatcagatgtgaagcctggagctttcctgatgatgctggccctacagtacccccatgaggggattcccttccttctgttgctggtgtactctaggacttcaaagtgtgtctgggatttttttattaaagaaaaaaaatttctagctgtcagaaaaaaaaaaaaaaacacaaaggaaacaataaccagagagacgcaacaaaggcgcaacaaacaaggccaagcaccaaacaagagaacaaacccaccatccagacaaggggcaaaacgccagaaca

SEQ ID NO: 5346 - DNA, 2699 bp, Homo sapiens
gagcggggcgggcgcagcggctccctataagcagaggagctgtccgtgtgctgaaacggcccgagaagctcgcccggagaacggggaggaatatgctgtggagctcctctgccatataaacaaaaagaggaaatctttcaaacatggctgaagcaaagacccactggcttggagcagccctgtctcttatccctttaattttcctcatctctggggctgaagcagcttcatttcagagaaaccagctgcttcagaaagaaccagacctcaggttggaaaatgtccaaaagtttcccagtcctgaaatgatcagggctttggagtacatagaaaacctccgacaacaagctcataaggaagaaagcagcccagattataatccctaccaaggtgtctctgtcccccttcagcaaaaagaaaatggcgatgaaagccacttgcccgagagggattcactgagtgaagaagactggatgagaataatactcgaagctttgagacaggctgaaaatgagcctcagtctgcaccaaaagaaaataagccctatgccttgaattcagaaaagaactttccaatggacatgagtgatgattatgagacacagcagtggccagaaagaaagcttaagcacatgcaattccctcctatgtatgaagagaattccagggataacccctttaaacgcacaaatgaaatagtggaggaacaatatactcctcaaagccttgctacattggaatctgtcttccaagagctggggaaactgacaggaccaaacaaccagaaacgtgagaggatggatgaggagcaaaaactttatacggatgatgaagatgatatctacaaggctaataacattgcctatgaagatgtggtcgggggagaagactggaacccagtagaggagaaaatagagagtcaaacccaggaagaggtgagagacagcaaagagaatataggaaaaaatgaacaaatcaacgatgagatgaaacgctcagggcagcttggcatccaggaagaagatcttcggaaagagagtaaagaccaactctcagatgatgtctccaaagtaattgcctatttgaaaaggttagtaaatgctgcaggaagtgggaggttacagaatgggcaaaatggggaaagggccaccaggctttttgagaaacctcttgattctcagtctatttatcagctgattgaaatctcaaggaatttacagatacacccagaagacttaattgagatgctcaaaactggggagaagccgaatggatcagtggaaccggagcgggagcttgaccttcctgttgacctagatgacatctcagaggctgacttagaccatccagacctgttccaaaataggatgctctccaagagtggctaccctaaaacacctggtcgtgctgggactgaggccctaccagacgggctcagtgttgaggatattttaaatcttttagggatggagagtgcagcaaatcagaaaacgtcgtattttcccaatccatataaccaggagaaagttctgccaaggctcccttatggtgctggaagatctagatcgaaccagcttcccaaagctgcctggattccacatgttgaaaacagacagatggcatatgaaaacctgaacgacaaggatcaagaattaggtgagtacttggccaggatgctagttaaataccctgagatcattaattcaaaccaagtgaagcgagttcctggtcaaggctcatctgaagatgacctgcaggaagaggaacaaattgagcaggccatcaaagagcatttgaatcaaggcagctctcaggagactgacaagctggccccggtgagcaaaaggttccctgtggggcccccgaagaatgatgataccccaaataggcagtactgggatgaagatctgttaatgaaagtgctggaatacctcaaccaagaaaaggcagaaaagggaagggagcatattgctaagagagcaatggaaaatatgtaagctgctttcattaattaccctactttcattcctcccaccccaagcaaatcccaacatttctcttcagtgtgttgacttctatcctgttaacactgtaatatctttaaatgatgtacaggcagatgaaaccaggtcactggggagtctgcttcatttcctctgagctgttatcttgtgtatggatatgtgtaaatgttatgactccttgataaaaaatttattatgtccattattcaagaaagatatctatgactgtgtttaatagtatatctaatggctgtggcattgttgatgctcacatatgataaaaaagtgtcctataattctattgaaagtttttaatatttattgaattattttgttactgtctgtagtgttttgtggagtactggaccaaaaaaataaagcattataaatatatagttttatttataaggccttttctattgtgtgttttactgttgattaataaatgttatttctggacaaaaaaaaaaaaaaaaacagaccgagacaacacacgccaacgggcacacacgagacaacagcgaaaaaaaacccgcggcgcgcgaacaacgcgccaccgttgaggaacaccacacttcggagaagcaacgcagctagagaccgcaatgctggcgagcccgaccggaggacccacgcacactcagggcagtccaccaacgagcgcaacacgacccg

SEQ ID NO: 5347 - DNA, 7644 bp, Homo sapiens
  misc_feature (2529)..(2552): n is a, c, g, or t
  misc_feature (3237)..(3247): n is a, c, g, or t
  misc_feature (6572)..(6595): n is a, c, g, or t
gcgagctgagctgacagcgcggagctggcgctgtggagcgcagggagccttgccggttcctccgaccggcgtctgcgagtacagcggcggctaacctgccccggcttcaggatttacacagacgtggggcgatgcttgtgaccctgcagctcctcaaaggcccctagaagcctgtttctccgtacagtccaggacctccagccccatggagcccccgatcccacagagcgcccccttgactcccaactcagtcatggtccagccccttcttgacagccggatgtcccacagccggctccagcacccactcaccatcctacccattgaccaggtgaagaccagccatgtggagaatgactacatagacaaccctagcctggccctgaccaccggcccaaagcggacccggggcggggccccagagctggccccgacgcccgcccgctgtgaccaggatgtcacccaccattggatctccttcagcgggcgcccctgctctgctacctgcctgccaccggctgcgtgaagctggcccagcgtggctacgaccgtctgcgccgccctggttgccgctgcaagcacacgaacagcgtcatctgcaaagcagccagcggggatgccaagaccagcaggcccgacaagcctttctgacagtttgtgtcgaagccccagtgctctgcctggaaacctggttctcttctgacatctaagaagactgcagcaaggtcagaggttttagcctcctgaggctgaccttgctagtctgcccactccctacccccagcttcggaaaatacagagaccaccaccacgtaccctgtattccccaaggtgatgaagaagcactttggggctttttttcagggtcctgaaactttgtgtcaaacagacaatgcaggggcagggtgtggtttggggggaaatttttctttttcagaagacagaacacagatgtggacacatatccggaaactgcagctgcttgaatgccttcccagcccctccttctccctccctccctccgccccccccttcctcttttccattgtctttggctctcacaggagctagctgcctgggaggaattgttaactgagtaccagggtacctttaaagaagacccttggagtcttctataccttcttctccttccccatctcactccaccccactttgtccctgatgtcttggggaaggtgtagaacaccctagcagttcctattgtatatacttgggagccactgagaacagaggacggccagtgagtccaagcctcgttcctccttctgcctccccggagccacaggatggatttaggagccactgctcagtgcacttctcccttccaactgcatcaactaactctcgggggtgttctgctcaccacaccgtccttcggttcttactgagtcacagactcgcctgcccactacgtgtcctgggttctctactcagatcccttccagaaactttatatgggtagaggaagccagggcggcaaatgcgagaccaaatatcattttgccaatgagtctgaggctgtggtctctggatccagtcattatgtttttatagaataattaaaccggatgctaacggtgttttaaaaaataataataaaacaacttgtttccttttggccacccccaggaagggctgatttcaaaatctgggggcgagcaacctcaaggaacacaatttccctccctatcaacaagaggattttaacagcaaagaagagaggcagcacctcccattggcagaatgaccgctgagccaggctgggtttgggtttcttctcttctgattctgctgctcactgtcatagccttttgtgtatagtgatgtgtctgtatctttaatgtaaatagagagatgatgaaaaaagagtctattttagtgttaggaagccccagcaggggagtcggaagagcttggaagagctggggagagggtaggggaaaggtttttccaggggccactgggtttgagccctgcttctgtgcacagccacaccaccctctcccgacagccctcaaagacgtagcaactctttctctcaaggtgctaaaggactcagaaggtgcagcacgtccagtgggtaggtacttgttgcatgcaaaagctgtagtgtatctggtccttcctccccagcttttgtgtggggttcttgctttgtgtggtattttgttttcccctctaatgagagggcatggcctgagtcagaagagctaccccaggtgaaactggaagtgcatgaggcagagcgtccgtagcatttccagtttgttctgtataggacagaggtgcctccgggaaggaggcagcgaggtaggtagctatgataggcacctaatgcttctcaaggacttattttttccttcttgaagactagtagtaacatcttatgatttagagtaagttgattgtaaccataggtatttattgattggaggaagggagggtcatattattttcggctttatttatgtaacatttgctagcttataaaaggcgaatgtgaaatannnnnnnnnnnnnnnnnnnnnnnngattcgtgtagctacccttgccacagttgtgacggatgtatggatgttcttgaacatttcagaaggagtggtagaaaaaaacacacattcagccaaccacttatatgaattgaatgtatcagaagtgtactgaagggactggagatggttttcctcagatgagggggccccaaaattgatagtgcacatctgcacgctttctgcgaggcctcagaacttttcccagggcccctccctcaaattgtctccatgggaaacttgacccagtggcaagttgcactttggtgatcttggtggtctacacacccgttctgtggagagtcgatttacataagctgtgtatacacacacacacacacacacacacacacacacacacacacccctaccccacactgactgtctaccgacagagaccctatttcctggcaaacggcctcctgaaccctgactttttgtgtacatacttgtaaacacggatttttctgggttttggtttgctttttccttttttccccctgcccctgttctagcttgttcttcttggtttgctttcaacctgcttgatggatgtctgcagagtgctctctaagagtccacctcagtgcctcgtgtgctcagtggtcatgggaaggagcgaaggaaccatccttggttctcccagcttggttgtgtagcaatgacnnnnnnnnnnntttctcagcttcttggcaaaaattaaaacaacaacaacaacaacaacaacaacaacaaacagaaggataaactggcttgcctgtggaccctccccggctctggggccagtcgagagccactgagggacccagcactcagagacacaacacacatgtgtagctgcttctggctgagtgtgtttcctgtcaccaatggcctgtttggctggacgatgcctcggcttgaccttttttgaaaagtgctggttagttcccgccccctggtaaacctggggtaggtgggggttctgtcttaactcgaggggcacctgggatccaggacgcttctagggggctctggctgcccgtgttaatgaaggacagcgcttccgcgagcaccctgggaactgggtcttgggtagcaaagccctcccagagaaaagatgggcacaactaaggctttcctgagcaggaagggggtgaagaccaatcccttcctttggtcctttggtacgcaccccctcagagctgagatggaagacatggctagttcttttcagccttgtggagcctgtcagtcgccatcatacctcgagtgaggcccagctagataatgacttgtccaagatggcacacgtggaaagttgatctgcaccagaacccggatgactgtcaccttgaagcgtcctgttctccttctgtgctgtcccaggaagtgtctggcgggcgtgggcagcacagctctacactgtacgattcactagggcatcctgcgagcctcactagccttctggttcatgcctttgacaagcatttttgtgccccctctgcttactgtgacagtcgatgatgaatcttgcgttgccattttctgctgtgggtaactgcgtgcagtgtcttgccttgctttctcttcttactgtcccacagcttggtttcatgttacaaacagaaaagctcgaggctcccaccccgccacatcccaacttcatttccccctcactgtagcccatttccaccccaccacaaagttgccacaggttttctttgtatagaatatttattttgaagctctattttaatagtatttattttagaaagtctactattgtaagagttcttctgtttgtgaagaaaaaaacaagttaaaaactgaatgtactgatttagaaaatatatataaatatatattgttaaatatactttgattgcgccactgcactccagccttggcgaccagactaagacgctgtctcaaaaaaaaacaaaaacgacaaaaaaaaaacaaaacagaaaaaataaactaaggcaatgacagtccctggcaaatgctgggagggaggcagcagtggtcagggaaggtaaccctgaagcaggacttgtaaagcaaataagattgggaggccaaggtgggtggatcacgaggtcaggagttcgagaccagcctggccaacatagtgaaaccccgtctttactaaaaatacaaaaaaattagccaggtgtggtggtgggtgcctgtagtcccagctacttgggaggctgaggcaggagaatctcgaacccaggaggcggaggttacagtcagctgagaccgcaccattgcactccagcctgggtgacagagcaagattccgtctcaaaaaaaaaaaaaaaaaaaaaaaccaagaagaaaaggaatgaattagaacttcttctgcttggacttaagggcatcatcaggcaggttttgggtaggatagcaggggaggcagagacatagtcggggtcagtggtcatgagtgtggctttgagcccaaaaacttggtttctgttccctactttgccactcagtagtgcatgactttggccaaatttcttaaattcatgaagcaagtttccgggtgaatgaaatggggataaaaatagtgttcaaacctatccgttggtttgtgtgaaactgaaatgaatagtatcgtgcaggtacttgtgagcaaggggagctgctgtttcctgtccctttatgatgggaaatatctagacaagttcccaaccctctgcactgcaggctgcatggcacggagggtcttgtaacacagctggggctggccttcttttaggagcttcagtggttctgaaaacttttatttgtttgtttgttttagtagatgtggggtctttctgtgttgtccggactggtctcaaacttctggactcaagtgatcctcccccgctcaacctcccaaagtgttgggattacaggtgtgagccactgtgcccagccttgaaaactttttcaggttcttccagggttactgggcaattaaatatttctatttcattataagtcagtttttcaaagttatattatcttaattaccttttttatatgtattagtgtagagtagcattttatattttgatatcctccttatgcatagtttttcactttttattcctagtttttcgtttttaataagactttcaagaaatttattttattggccttttgaaaaaagcagctttagataaagtaagcagttctgctttcattttataatttatttctacttttgtttcattaatcttttcctccggcatgccttggattttgttgtgttactctttttctagaggctcgcattgtgtgtctggttcacttatgatcacgcttgcctacttttaagaatggaagaggggaggtggagggtggctgcacagtcgagggtgtgaggcagtcttgctctagccccaccatgccctcagcccgctgtggccacgctggttcctcaattgctggggcgtgcagtgtctgtaagggaggctactgatgccatccgaggaagatgtaaggtttcgtgtgggcagcgagagcctagcaggcatgtggggtgcccagcaaagggtaacagtggacagttgttgcctcattccacagagttttgattttttttttttttttaatggtcactccatcaacatcccccatggccagagcctgagctggtccccagagacacaggcattcagctgacagcctcgccttcacgctgctgctgttctcatgggggacaggcctcaggtggcaatgcacaaatcattagttaagggcagttgtgacagttaccaaggagtgtagcccccgcccgagtgaaaacagccctaaccaggggtggggaccttggggctctgacccgaagggtaggagaagctggaaggacagcattcctgtctgcgaaggcaggagcaaagctgccaggctatgaaggaaatggctggagcctgaagtcatgcaagctggggctggcagggacagggccaacttccaggcctgggggccaccatgaggattcaggacgtgacccccagnnnnnnnnnnnnnnnnnnnnnnnnatttaagaaaagactttatcagacgagtatggtgctcacgcctgtaatcttagcactttgggaggctgaggcaggtggatcacgaggtcaggagttcaagaccagcctggccaatatggtaaaccccatctctactaaactacaaaatagccaggcatggtggcgcacgcctgtagtcccagctactcgggaggctgaggcagaagaatcacttgaacccgggaggtggaggttacagtgagccaagatcgcgccactacactccagcctgggtgacagagtgagactccgtctcaaaaaaaccaaaagactttatcttatttcctatatgtttgtggtttcagtcctgatgtataatttgaccctagttagaatggttatctgaggaagtggcctgtacgatttctgcttttttaaatgtgtggctccctttcttcattgattaacgtatgattatttttataaatgttccatggcagtgggaagggattctctgtcacattccacatctggatcagttcctccccattttgttggtcaaatccgatctgccatatcctgtgtaatgacaagtgagttgcattctcaccgtcactcctggggtctctccgcttcccctgagctggctcagcagtctgctccatgtgttttgatgcagggtgacccattggtattcccgacactaacgcccccgtctgtggactgcttgctgcttgggcttcactgtgtctggtgttgacagtgcagacctaaaggtgtgcacacatgtgcacacacactccgctgtcttcttgtttgcactggacttaaatatctatgagggttattttcaactgctgaatttggaatgatttttatatcttttctgctttctgcccatgtacatgtgtttattttacactgttgtgattggtagttactatgtggggacacaattacttgggctgaaataatccacctgttgtggttggggtcctctggtgcattccagggtgagaggttgctcctgccatcaacaatgagtaccgagcatgattcgtatcatgtca

SEQ ID NO: 5348 - DNA, 599 bp, Homo sapiens
  misc_feature (561)..(561): n is a, c, g, or t
aatcttttatttttttttttttctttttttttttttttttgtagagaccaggtctcgctacattgcccacgctagtttcgaactcctgagttcaagcaatcctcctgcctcggcctcccaaatataggcttgagccactgcacccagcctaaagttaatttctatataacgaaacctacttttccactgatatttattataatataaaaaataagttcttttggaaaaagacatggaaacaaaataagtaacatgaaactttccttggaaatactcttaactagaagtaataacacacaaatgcaaatagacaagttttttttaaactgacagtagaaaaatcaccccaaaatccaaagccattatatctttaatatgaccacagaaaaatagttattattttctatagtattcagatcttgttttccaaccttgaggaagctaccagtattaaaaaaaagcatagtgagctgagccataaaagaaagaagaaatatggggtatgtaaataattccaaatgtcgtaataaatggaccagggtaaggggaattaacggaatnctggtggaccatcccaattaaattatctggccaggtgg

SEQ ID NO: 5349 - DNA, 2435 bp, Homo sapiens
  misc_feature (2063)..(2063): n is a, c, g, or t
tcgtggccctagttctgaaagagacttgctgtgtgatagagaacaggccatttgtgcctgaaatgttctaacctgcaaattgggtttaatggtaattatcctgcctttctgtctgggaggaaacagagatgctacatagatgaaagctctgattatcatttaaaacaaataaatgtactaaatgccatggtataatatagggaagaatggatgacttcaaagagaccatggttccgttggaggcataaaattgcctgcaaagaggcaaatataatttccagaccaattaatgacttgctgccctcgtaaatggatttaggacatctttgttccttgcttcttttgttaaaactcattcttagtttcattatcagctcactaataataccagtgttgttaagatgctcaaactagagcagaattgtatgctggatgtgacgctaggacctcagatcctttgatagtgcagttatgaccaggatctctttattctgtgcttcacgtcaacatcattaacccgatgaagcgaagcacaagtcataaaggcacatcagagaagccaagaaagcggggccgtacagagagcatcaaaatcaggtcagaaaaatgctgctttcctcttccaccaaaccttctccctgttgtttttacatgccccgtccctccagattcagcctccgttttgttctctctccttttccttttcctcctctcttccttactttcccctgtgagatgcttttctgtccttttactgcacctcttccagacctatggcatttggggacgggtcacccttcctagagtgatcctgaatccagctgcctcttctttttttgtttttgtttttgtttttgagacagagtctctttctgtcgtccaggctggagtgcagtagcgcaatcttggctcactgcaacctctgcctcctgggttcaagcgattcttgtgcctcaacctcacgaggagctgggattgcaggcgcccgccaccacacccggctaatttttgtatttttagtagagacggagtttcaccatgttggccacgctggtcttgaagcccagacctcaagtgatctgcccgccttggcctcccaaagtgctgggattacaggcatgagccaccgcgcctggcctagttccctcttcttagatggagatttctgcacatgagctgtgagatccacagacatgtcactgagctcccccactctgtcagtggaagatgaatggaataaagcctgcttgcattgtggagtgcagctgtggggacagttgtcatttttgtgttttcagcttaactgtccagcatctcccctcccttcctacagcagggacatcatgccttagatataaacttagtggtgtgcagtacccaccgtggaagctgaagaagggaagtatttcctgtctcaggcacaccccgcttccagccccataccagtcgggaagtggtcattgacctggggtggactacctggacccttgcttggggctatgagcctggagaatgtgacacaaatgaagggatgctgagactcatttcaaggaagccaccgtggtctggggttggtagtcatacagcaaggcaggtgggtagggctggcaggctgcagggatggtgtgtccactggtagcaatgtccagggatggcagcgtcctgggaatgtcatttctgctccactccttggactcgctgagctgtctccgcctccacctatcttcctacagacctcccttctagttttctgtcaattctttgagccagcaaactccatccagtacattctttcttctttcatgaaagagcttgagttggatgtaaatatatatgacctaacaattccacccctaggtgtataccctacagaaatgtgtacatgtgttcatccagagacatgctctaaatcttcacaaaaacactctccataataaccctgaacaggaaagcaccccaatgcccatgttggctggataagcacattagggtatattcacacgatggaatcccagactgcaatgggaatgagctgcaactccacccccacttggagtgtattncacccaaccctagtgttgaacgagataaggcaaaaatgcaccataggattccatttatataaagtttaaaacccagcaaaattcatccatgcggttgcaagtagagatcagtcctaagaagacagtaaccagaagggggcatgaggtggtgcttctggggtgttctgtttcttgatctggttgccggttacctgggtgctttccgtttgtgaacattcttggagctgtacacttttgatctgggcacttttctgtgtgtatgttatacttcaataaaaagttgggctttgtgactagcaaaaaaaaaaaaaaaaaaaaaaaaaaaaaaaaaaaaaaaaaaaaaaaaaaaaaaaaaaaaagtcgtatcgatgt

SEQ ID NO: 5350 - DNA, 518 bp, Homo sapiens
gggtacaatatatattaaataagcacacatacaacaaaagtaggtcgttggaagcttacataaatgtgaccagtagcttgcttgaaacctaactttttatttgttcatggaactttctagaccgtaactacactgaataatgagaatctgctgtaatctttttaggtgctgtagatgagccattggattaaattattacagtatgtttcagactgctctatgttgaaccctagtgaaatgcctctcaaaccctcctaaggatcacaatctcatgtccttttttttgttattaaatgcccagtatgtgttagtgatttaaacaaaattcaaatttttttttttttttttttttttggagacagggcgagatctctttcccaaaaaaaaaaaaaaaaaggcacaaggagccaaatggaggccctgggaaggtgccatagggggggacacccgtgtgtgtgtgacccccaagttagttgtcccccccaaaacccgtggttccttgtgccccaggaggggcg

SEQ ID NO: 5351 - DNA, 3693 bp, Homo sapiens
aaggaccggaactccgggcgggcggcttgttgataatatggcggctggagctgcctgggcatcccgaggaggcggtggggcccactcccggaagaagggtcccttttcgcgctagtgcagcggcccctctggacccggaagtccgggccggttgctgaatgaggggagccgggccctccccgcgccagtccccccgcaccctccgtcccgacccgggccccgccatgtccttcttccggcggaaagtgaaaggcaaagaacaagagaagacctcagatgtgaagtccattaaagcttcaatatccgtacattccccacaaaaaagcactaaaaatcatgccttgctggaggctgcaggaccaagtcatgttgcaatcaatgccatttctgccaacatggactccttttcaagtagcaggacagccacacttaagaagcagccaagccacatggaggccgctcattttggtgacctgggcagatcttgtctggactaccagactcaagagaccaaatcaagcctttctaagacccttgaacaagtcttgcacgacactattgtcctcccttacttcattcaattcatggaacttcggcgaatggagcatttggtgaaattttggttagaggctgaaagttttcattcaacaacttggtcgcgaataagagcacacagtctaaacacagtgaagcagagctcactggctgagcctgtctctccatctaaaaagcatgaaactacagcgtcttttttaactgattctcttgataagagattggaggattctggctcagcacagttgtttatgactcattcagaaggaattgacctgaataatagaactaacagcactcagaatcacttgctgctttcccaggaatgtgacagtgcccattctctccgtcttgaaatggccagagcaggaactcaccaagtttccatggaaacccaagaatcttcctctacacttacagtagccagtagaaatagtcccgcttctccactaaaagaattgtcaggaaaactaatgaaaagtatagaacaagatgcagtgaatacttttaccaaatatatatctccagatgctgctaaaccaataccaattacagaagcaatgagaaatgacatcatagcaaggatttgtggagaagatggacaggtggatcccaactgtttcgttttggcacagtccatagtctttagtgcaatggagcaagagcactttagtgagtttctgcgaagtcaccatttctgtaaataccagattgaagtgctgaccagtggaactgtttacctggctgacattctcttctgtgagtcagccctcttttatttctctgagtacatggaaaaagaggatgcagtgaatatcttacaattctggttggcagcagataacttccagtctcagcttgctgccaaaaagggccaatatgatggacaggaggcacagaatgatgccatgattttatatgacaagtacttctccctccaagccacacatcctcttggatttgatgatgttgtacgattagaaattgaatccaatatctgcagggaaggtgggccactccccaactgtttcacaactccattacgtcaggcctggacaaccatggagaaggtctttttgcctggctttttgtccagcaatctttattataaatatttgaatgatctcatccattcggttcgaggagatgaatttctgggcgggaacgtgtcgctgactgctcctggctctgttggccctcctgatgagtctcacccagggagttctgacagctctgcgtctcagtccagtgtgaaaaaagccagtattaaaatactgaaaaattttgatgaagcgataattgtggatgcggcaagtctggatccagaatctttatatcaacggacatatgccgggaagatgacatttggaagagtcagtgacttggggcaattcatccgagaatctgagcctgaacctgatgtaaggaaatcaaaaggatccatgttctcacaagctatgaagaaatgggtgcaaggaaatactgatgaggcccaggaagagctagcttggaagattgctaaaatgatagtcagtgacattatgcagcaggctcagtatgatcaaccgttagagaaatctacaaagttatgactcaaaacttgagataaaggaaatctgcttgtgaaaaataagagaacttttttcccttggttggattcttcaacacagccaatgaaaacagcactatatttctgatctgtcactgttgtttccaggagagaatgggagacaatcctagacttccaccataatgcagttacctgtaggcataattgatgcacatgatgttcacacagtgagagtcttaaagatacaaaatggtattgtttacattactagaaaattattagttttccaatggcaataacccatttatgagagtgttttagcctactggaatagacagggaccacatcctctgggaagcagataagcatagaactgatacttgatgcacactcgtagtggtaactcatccctaatcagcattgtaaagcaggtgccagaggtggtttgctttgtccttccaaagcaggtgagtcagccccaccgagagccaggcagctttgagtggcagcgtggtgctagcagcttcagcggaacagggtgagagttaattatgcagtcttcttgacagcggcattaatttggaaggaaactgacaagtcatgggtcaagtttcagtgacttcctccttcctctgatggcagtatatagttttcacattttaattcctcctcctgagatgcactatacttaaaaccattctctcccctgctaacagaagggtgtgaatctggtttactttgagcattaggatttgcccctttggaattctgcactccagttacttaactttcccttcagaatacatgtggaaaaaaaaaaaaaaaagcgatgactccacttttgcccctgtggcaccttgaacaaagcagttcttcccaaattatactttttttttttttaaataaggtgagcaggatgactggggagagagaaacatttgactttgactgcctcccccattctttgctgtgagctggaaagtgtgcagttggtcgtctttcttctcctttctttaggatagtaagagactcactcactgcacttctgctcagttggcttctgcatcgggatcacacagccatcagcaggactgcccagttggtgagcacactccattgaccacgtggcgccagcgcttcctcaatgcacatgattgagaggaaagaaagttctcttagatgttactgcttttgctcagactttgcaaaaaaaaatatatatatatatatgtataaatatataattattaatcacttttgtccttgagaaagtcttgaatgaacagagaatttattccattgcaatatttgattgtatagaggcacactgtttcatcgacagaagaagcaaaaaggctttgtgtaagtttttggtactatgtaccacctctgttattcttttaaagctgaagtattcatgtacttaaaccatattatatttaattgtgtttgattttaaaatatatatatatgaattctatttaaaaaaaaaaaaaatttctgctttcagggcatttatggctcttctgttgaaatatattgatctttccaaaaaaaaaaaaaaaaaa

SEQ ID NO: 5352 - DNA, 5066 bp, Homo sapiens
  misc_feature (832)..(847): n is a, c, g, or t
  misc_feature (951)..(972): n is a, c, g, or t
  misc_feature (1767)..(1781): n is a, c, g, or t
  misc_feature (2884)..(2916): n is a, c, g, or t
tcagctttggtaagttgtatttttctagaaatttgtccacttattctcaaatttaattttacaaagttgtttatcttcagaccattttatcgtttatcatttattgcatctggactgatgttttctcttacgtttttgattttaggacattctttcccttttttccctttatcagtgtcagcagtgttttacaaattttgttaatccttttgaaaactgggttttggttttgttaatcttctctattgtatacttgatttgtccattaatatttctgtccattacggctgcgagaagacgacagaaggggatttctttctacttactttgagtttaattggtattttttctgactttttgaagtgaaagtctatataattaattttcagcctttctccatttctaatacatatgtttaaacttatatgatttttgtaacattttatcttcattgtataagttttaacaagtatcttttgtcatttaattaaatttcattatgatttcttatgtgaataatggattatttcaaattatattttttattttccaatgtatgaggggatctactagttatcttcttgttaaaaaaattctggcatatactgtctgttcaatattatagtactttgaaaatttttgagacttgcttgctttttaaggtttgtagaatatctcttctatattctttttcttttattcttgttttctggttcatatatcttaactaattttactgtatcctttaatcccttttgcccttttctctttttattctttttttgtctcaatacttcagttggtaaattttcttctaattctttatgcctannnnnnnnnnnnnnnnattcatttaattattaatttcagatatatatttttacatagcaaatctctttttgacttcttattgtattcattttactgtaaatcattcaatcttaccttttnnnnnnnnnnnnnnnnnnnnnntagtaatttaaaaatctctatgggtaactccagtataagtatgtgtttgtttctagtgtgtgctttttcctcttggttttctatcatgttgtttcatttacctccaaacatgaatgtgtttatgatgaatgagagtcactgaatatttaaaaaatcatagagatattttgaagctggaagaatgttcttttcatccagacaagatttattttgtttctgctatgcagctatggacactagcaattctcatttaccttaattcaatccaggactgagaatactgaagtatgaaattaactctgtctgcttccagttcatacttcttccctgtacctcttttcttaaattttttttaaagttttatttcaacagcatttggagtataagtggtttttttttacatggatgaattatatagtggtgaattctgagattttagtgcatccatcactcaagtagtgtacattgtatctaatatgtagttttttttaatccctagctcctcttccatcctctcctttctgagtctctaaagtccatcatatcagtctgtatgcctttgtgtactcatagcttagctcccacttataagtgagagcatatggtttttggttttctctgtagctctttagaatcccaaactgtagcctaagggaaaggtttccaaggtgctctccttattgcactccaaagtatgatttttatctccctaactctatgaatctagcaaacactttgcttaacttttcagcatctcaagtgccttttctgaatttgacagatacacgtcagaannnnnnnnnnnnnnncctagcttatctctctttattaacttctccaaatctttgccaatagctatatgtcttaactgccttgtttgctctttagagctttgtaacacatgcatttttatagtttattctgcttttcaagtttttttcattgaaataattcttgtaatgaccaatagtctagtatgctgctgtaagacttctatagctgttaactcctttcatatttcaatttctttatgtgcttttttttgcaagaattcctaggctccattttctaattcatacgttggcaaatgatgaatgtgatatgacaatgatgacctctgttccagccatatacttttttaaagaaaattttattggaacacagtcatgctctcttgtttacatattatctatgacttcttttgtattacagtggcaaagttgagtaattgtggaagagaccatatggcctacaaaggctaaaatatttactatcttgttcattaagaaaaaatttgctgactcttattgagatttatttttcctttattcaactttctgaagtttgtcaattgatttaaaaatattaatgacttttcctttctaaattatatatttttatatctaacattattgtgccatttctatatttttgctatattttttgccttaaccaaacaatgtgttttaattgagtcagtgaataaagaactcactgaaagtagaagtggaaacctaagctataagctactatattatataagcttctcaacctataattgtttttccattagatatagaacaatggaagtgacaacaagattgacatggaatgatgaaaatcatctgcgcaagctgcttggaaatgtttctttgagtcttctctataagtctagtgttcatggaggtagcattgaagatatggttgaaagatgcagccgtcagggatgtactataacaatggtttacattgattacaatatgattgtagcctttatgcttggaaattatattaatttacgtgaaagttctacagagccaaatgattccctatggttttcacttcaaaagaaaaatgacaccactgaaatagaaactttactcttaaatacagcaccaaaaattattgatgnnnnnnnnnnnnnnnnnnnnnnnnnnnnnnnnnttttcattatatgtcgagataataaaatttatctagataaaatgataacaagaaacttgaaactaaggttttatggccaccgtcagtatttggaatgtggagtttttcgagttgaaggtatgtaaaattagataatcctacatctcacattatgattctaatccttgtgttcggtaggtaataattgatctacaagagcaaggaaagtgaaaggaacagttagattcatgccatactctttgataaattctgaaatgaaacgtggggaacataaggattatgaggtttttatccagaacgtataggctgctttgagcaaagcaagttgagaaatatatgtgcagagatagagatgacaaaggagatggggatgtggagagagagagatcttatcatcagagctgctctgttttgacatatgacccaaagatcagacccttatatgacccttagaacttctaggtgtaattatgtgagagcttccagagcaagttaatgtgcagagaggataatttttcctcctcttcctctcatgttgccaactctgactcctaactgagcagctcagccctgggttatgcaagaaaactccatgtcttatttcaaaagtagacttggccacatttaaccagacaagttttaaaaatgtattatgctatgtttatttcctataggaattaaggataacctagacgacataaagaggataattaaagccagagagcacagaaataggcttctagcagacatcagagactataggccctatgcagacttggtttcagaaattcgtattcttttggtgggtccagttgggtctggaaagtccagttttttcaattcagtcaagtctatttttcatggccatgtgactggccaagccgtagtggggtctgataccaccagcataaccgagcggtataggatatattctgttaaagatggaaaaaatggaaaatctctgccatttatgttgtgtgacactatggggctagatggggcagaaggagcaggactgtgcatggatgacattccccacatcttaaaaggttgtatgccagacagatatcagtttaattcccgtaaaccaattacacctgagcattctacttttatcacctctccatctctgaaggacaggattcactgtgtggcttatgtcttagacatcaactctatggacaatctctactctaaaatgttggcaaaagtgaagcaagttcacaaagaagtattaaactgtggtatagcatatgtggccttgcttactaaagtggatgattgcagtgaggttcttcaagacaactttttaaacatgagtagatctatgacttctcaaagccgggtcatgaatgtccataaaatgctaggcattcctatttccaatattttgatggttggaaattatgcttcagatttggaactggaccccatgaaggatattctcatcctctctgcactgaggcagatgctgcgggctgcagatgattttttagaagatttgcctcttgaggaaactggtgcaattgagagagcgttacagccctgcatttgagataagttgccttgattctgacatttggcccagcctgtactggtgtgccgcaatgagagtcgatctctattgacagcctgcttcagattttgcttttgttcgttttgccttctgtccttggaacagtcatatctcaagttcaaaggccaaaacctgagaagcggtgggctaagataggtcctactgcaaaccacccctccatatttccgtaccatttacaattcagtttctgtgacatctttttaaaccactggaggaaaaatgagatattctctaatttattcttctataacactctatatagagctatgtgagtactaatcacattgaataatagttataaaattattgtatagacatctgcttcttaaacagattgtgagttctttgagaaacagcgtggattttacttatctgtgtattcacagagcttagcacagtgcctggtaatgagcaagcatacttgccattacttttccttcccactctctccaacatcacattcactttaaatttttctgtatatagaaaggaaaactagcctgggcaacatgatgaaaccccatctccactgaaaaaaaaaaaaaaaaaaaaa

SEQ ID NO: 5353 - DNA, 2100 bp, Homo sapiens
  misc_feature (1364)..(1404): n is a, c, g, or t
gtcgccacattggccgggctggtttcaaactcctgacctcagcgtcagcctcccaaggtgctgggattgcaggcgtgagccaccatgcccagccaacactgaacattttgttcagaactagttaagaaaacagaaatatacgttgggggtttatggattacttatttttggggtgcaatactgggaatagaagagaaaggagcttcctttccctctccttctttcattcattcattcattttgagaagaagtcctgctctgttgcccaggatggagtgcagtggtgaaaactcggctcactgcagcctccacctcctgggttcgggcgattctcctgcctcagcctcccaggtggctgagattacgggcacgcaccaccacacacggttaatttttgtatttttttagtggagacagggttttgccattttggctaggctggtctccaactcctgacctcgggtgatccacccgcctcggcctcccagagtgctgggattacaggcatgagccaccgcacctggccaagaaaggagctttagataaataaaatgattaaacatttgtagcatgtagaatgaaactattcccttagtaatactcaaattatccagatttccaagatgttggtagcaccccgagagcttcaaaagggaaattaaaagaaaaacgacgttacccttcctgaaacacagattcactgtttgccatattcttttctctagtaaaagatgaataaagtttcctctggaaaaactaaaaacaatctgaggtatatttcagagaaaacaaaattgcttgataaaaatgccatgttaacaactgaggaaattattttacatatattaattttaacacaggaataatatgtcaaaccaggatttctcaacctcagcactatcgacattttaagctgtatagtttttggtgtgggaggctgtcctgtatattgtagaatgtttagtggcagccctggcctctacccaagaggccagtaggacccacctcctcattcaagctaatgcactaaatttttcccttcattgacaaatcccattaatgcatgtatttatcccattagtgactctcttgtgttccaggtactttgttaggcaccagagaaaatatgataaagcaaaacagctattttcctcactctcatggtgcttacagccatggtgggaaaaatccataggaaaagactcacatacacaaatgcaggcagaataaaaaaactcacacaaacaaacgttgcagatgttgttaagttacataaaggagatatgcatggctgtgcatggtggctcgtgcctgtaatcttagcacttgggggggccggggcgggtggatcacttgaggccagnnnnnnnnnnnnnnnnnnnnnnnnnnnnnnnnnnnnnnnnnctactaaaaatacaagagttggccaggcatggtggtccatgcctgtgatctcggctacttgggagactgaggtgggaggatcgcttgggcccaggaggcagagggtacagtgagctgagattgcgccactgcaatctcagcctgggagacagagagagacgtctcctgttctcctggagaacaacaagtcatgatgtcagacaagaacttggattttggagacacgggtttgaatttcagtcattcattcttttattcagtaaatatctagcaagtactgacatgtcccagatgttgttttactcactggttatatgatgggagggagacagagaaagagagagagagagagagagagagagagagagagcgctattctaaaagcttgaagtctaggctgtgcagagtggctcatgcctataatcgcagcactctgggaggctgagatgggtggatcatgaggtcaggagattgagatcatcccggctaacacagtgaaactccctctctacaaaaatacaaaaaattagctgagcatggtggcaggtgcctgtagtcccagctacttgggaggctgaggcaggagaatggcgtgaacccaggaagcagagcttgcagtgagccaagatcacaccaccgcactccaggctgggcgacagagccagactccgtctcaaaaaaaaaaaaaaaaaaaaa

SEQ ID NO: 5354 - DNA, 1041 bp, Homo sapiens
atacgcgcgcggcgccgagcggcgctcatgtcgggggcgaggagggtgggttacgggaggcttatgggggtggcgatagtgggggctgagaaggggccagtgttggcccagcaccgccgtggcagcctcatcgtccgacggcccatgggagggcccgcgctcgccggcaggccgggcaggcactgggcgtgggggcagcgggtggggggggttcgtggggcgaggcggtccgattgtacccgtgtcggggcaggccaagcggacgcgcgcgccgaggtgccacgcgtggccagagggaggactgcgcgcgtcacaggaggggacgccgttccccgtatcgcgggagagggggaggcgggggctgcgggtagggcggaggccgcctctgggagcgggggcggggcgctcggacaagcgcaagtgcgctggatgggggaaccgtgtgcgaggggatgaggtgggcaaccattttagctggtgtcagcccctcttcccttcctccattgcacatgaacatatgtccatccatatatattcatcagaatgttaatttattttgctccctctgttaggtccattttctaagggtagaagaggcaagtggtagggatgaggtctgataagaacccagggtggagagggagactcctgggcagccgttttcctcatcctttccctctcccagtccatttccaaatgtggcctccatgtgggtgctagggacatgggaaaaaccactgctatgccatttcttctctctgttcccttcctcacccccgacggtgtggctgatgatgtcttctggtgtcatggtgaccaccccctgttccctgttctggtatttcccctgtcagtttcccctctcggccaggttgtgtcccaaaatcccctcagcctcttctctgcacgttgctgaaggtccaggcttgcctcaagttccatgcttgagcaataaagtggaaacaataaaaaaaaaaaaaaaaaacaaaaaaaaaaaaaaaaaaaaaaaaaaaaaaaaaaaaaaaaaaaaaaaaaaaaaaa

SEQ ID NO: 5355 - DNA, 557 bp, Homo sapiens
  misc_feature (538)..(538): n is a, c, g, or t
  misc_feature (540)..(540): n is a, c, g, or t
  misc_feature (542)..(542): n is a, c, g, or t
ttagtgtctggatcagttcattcaaaagcaaaaatatactgggagtccaggtgtaaaggtatacacaagaaaacatccttaattaggcattaagtctaatactgtgaaccaatgagcatctttagggacttggctccatattgtgtaaggattaggaactattgggaggattgaggtaactgcctaagagtctgagctgacactgatgtcagctcccccagctgccatcaggaactccttgctatatgagctgggtgacaagtcagtccaaagtctgagttacagccgacccaactggccagacgtgggtgcgacttcccactccacctgacaaaagcagtaaaatcttgtgtctggtgcttagatgagctggttcagtgttgacggaagctgaagacagacggaagctccactacaacatgttcagggcggccctcgaggacagcgtggagaagaaatcctccctgctgagctccagccacagatttccacttcctcagcttttctcccggcggggttgcgctctggaggtactgcncncngccgcctcctccagg

SEQ ID NO: 5356 - DNA, 1518 bp, Homo sapiens
agaggggggcggagtgtggaattcttctcgggaggcagtgctgggtcctttccaccatggcacctaagaaagcaaagaagagagccgggggcgccaactccaacgtgttctccatgttcgaacagacccaaatccaggaatgtaaggaggccttcactatcatggaccagaacagggatggcttcattgacaagaacgatctgagagacacctttgctgcccttgggcgagtgaacgtgaaaaatgaagaaattgatgaaatgatcaaggaggctccgggtccaattaactttactgtgttcctcacaatgtttggggagaaacttaagggagcggaccctgaggaaaccattctcaacgcattcaaagtgtttgaccctgaaggcaaaggggtgctgaaggctgattacgttcgggaaatgctgaccacgcaggcggagaggttttccaaggaggaggttgaccagatgttcgccgccttcccccctgacgtgactggcaacttggactacaagaacctggtgcacatcatcacccacggagaagagaaggactaggagggggctcgctgctgcgccctgggctcgtctttgcagagtggtccctgccctcatctctctcccccgagtaccgcctctgtccctaccttgtctgttagccatgtggctgccccatttatccacctccatcttctttgcagcctgggtggctatgggtacttcgtggccgcacatcctacagttggaaatccatccagaggccatgttccaataaacaggaggtcgtgtatttggtcacgacatttctctgaaaaaaaaaaaaaaaaaaaaaaaaaaaaaacaaaaccacacacaaaaaaaaacggggggcggcggcccggcgcccacacgaaaaaacctacaaaaccccccccgaggaggaggcgggcgaggcgccaacgagagacaaaagagaaaagcggccaccaccgacgggcaccccaagcacgaatacatgcgagaacacacaaaagaagcagagggagactccacaccacgacagaaacaaagacgcagcagggcggagcaacaacacgccgaaccgaccgaaaaaagacaaccacacacggaggcgaggacaagcaagagcacaataacaggggacgcctccacaccaccaacgaggcaccaaccagcagagaccaacacaaaccaagacaacaaacaacgagacgagcgaacaaacaaaacaacaaaaaacacaaaacacaacaaacaaccaaagacaacaaaacaaccacgcgcaaacaaacacaatacccaacgacaaccaaccaccctacacacaaccagacaccctagaggaggacgaagagaaaggaaagccgcaagactagccaaggagagcaaggaaagcgaaggcgaggagggcacacaggcaaagaccgccacgaagaaggacgagacgagagatacacagtaagtacacaacaaaagaagagtcagaggaaagacacagcagtcagaagagaaaggagat

SEQ ID NO: 5357 - DNA, 8059 bp, Homo sapiens
  misc_feature (403)..(423): n is a, c, g, or t
  misc_feature (869)..(966): n is a, c, g, or t
  misc_feature (1259)..(1276): n is a, c, g, or t
  misc_feature (3852)..(3879): n is a, c, g, or t
  misc_feature (4892)..(4920): n is a, c, g, or t
  misc_feature (5166)..(5206): n is a, c, g, or t
ggctggctgagccgcggcgcgggactgctcacctccaagcgctcgcgcggggatcgcggctcctgctcactttgcggcccgctgtcctcctgcccgccccgagggcccccggccggagcgcagagggagggggccgcgctcgccagcaccccgccgccttcccccgcctgggggaagaatgtgccaccagctgttctccgcttgcgagcgctgcgcccagtagtgaggaacttggaggaagaagagacaaaggctgccgtcgggacgggcgagttagggacttgggtttgggcgaacaaaaggtgagaaggacaagaagggaccgggcgatggcagcaggggagccccgcgggcgcgcgtcctcgggagtggcgccgtgacacgcatggtttccccggacccnnnnnnnnnnnnnnnnnnnnnagtcggagcggcactcggcgagtccgggactgcgctggaacaatggataacttcttcaccgagggaacacgggtctggctgagagaaaatggccagcattttccaagtactgtaaattcctgtgcagaaggcatcgtcgtcttccggacagactatggtcaggtattcacttacaagcagagcacaattacccaccagaaggtgactgctatgcaccccacgaacgaggagggcgtggatgacatggcgtccttgacagagctccatggcggctccatcatgtataacttattccagcggtataagagaaatcaaatatatacctacatcggctccatcctggcctccgtgaacccctaccagcccatcgccgggctgtacgagcctgccaccatggagcagtacagccggcgccacctgggcgagctgcccccgcacatcttcgnnnnnnnnnnnnnnnnnnnnnnnnnnnnnnnnnnnnnnnnnnnnnnnnnnnnnnnnnnnnnnnnnnnnnnnnnnnnnnnnnnnnnnnnnnnnnnnnnnactaaattgatcctcaagtttctgtcagtcatcagtcaacagtctttggaattgtccttaaaggagaagacatcctgtgttgaacgagctattcttgaaagcagccccatcatggaagctttcggcaatgcgaagaccgtgtacaacaacaactctagtcgctttgggaagtttgttcagctgaacatctgtcagaaaggaaatattcagggcgggagaattgtagattatttattagaaaaaaaccgagtagtaaggcaaaatcccggggaaaggaattatcacatattttnnnnnnnnnnnnnnnnnntggaacatgaagaaagagaagaattttatttatctacgccagaaaactaccactacttgaatcagtctggatgtgtagaagacaagacaatcagtgaccaggaatcctttagggaagttattacggcaatggacgtgatgcagttcagcaaggaggaagtttgggaagtgtcgaggctgcttgctggtatactgcatcttgggaacatagaatttatcactgctggtggggcacaggtttccttcaaaacagctttgggcagatctgcggagttacttgggctggacccaacacagctcacagatgctttgacccagagatcaatgttcctcaggggagaagagatcctcacgcctctcaatgttcaacaggcagtagacagcagggactccctggccatggctctgtatgcgtgctgctttgagtgggtaatcaagaagatcaacagcaggatcaaaggcaatgaggacttcaagtctattggcatcctcgacatctttggatttgaaaactttgaggttaatcactttgaacagttcaatataaactatgcaaacgagaaacttcaggagtacttcaacaagcatattttttctttagaacaactagaatatagccgggaaggattagtgtgggaagatattgactggatagacaatggagaatgcctggacttgattgagaagaaacttggcctcctagcccttatcaatgaagaaagccattttcctcaagccacagacagcaccttattggagaagctacacagtcagcatgcgaataaccacttttatgtgaagcccagagttgcagttaacaattttggagtgaagcactatgctggagaggtgcaatatgatgtccgaggtatcttggagaagaacagagatacatttcgagatgaccttctcaatttgctaagagaaagccgatttgactttatctacgatctttttgaacatgtttcaagccgcaacaaccaggataccttgaaatgtggaagcaaacatcggcggcctacagtcagctcacagttcaaggactcactgcattccttaatggcaacgctaagctcctctaatcctttctttgttcgctgtatcaagccaaacatgcagaagatgccagaccagtttgaccaggcggttgtgctgaaccagctgcggtactcagggatgctggagactgtgagaatccgcaaagctgggtatgcggtccgaagaccctttcaggacttttacaaaaggtataaagtgctgatgaggaatctggctctgcctgaggacgtccgagggaagtgcacgagcctgctgcagctctatgatgcctccaacagcgagtggcagctggggaagaccaaggtctttcttcgagaatccttggaacagaaactggagaagcggagggaagaggaagtgagccacgcggccatggtgattcgggcccatgtcttgggcttcttagcacgaaaacaatacagaaaggtcctttattgtgtggtgataatacagaagaattacagagcattccttctgaggaggagatttttgcacctgaaaaaggcagccatagttttccagaagcaactcagaggtcagattgctcggagagtttacagacaattgctggcagagaaaagggagcaagaagaaaagaagaaacaggaagaggaagaaaagaagaaacgggaggaagaagaaagagaaagagagagagagcgaagagaagccgagctccgcgcccagcaggaagaagaaacgaggaagcagcaagaactcgaagccttgcagaagagccagaaggaagctgaactgacccgtgaactggagaaacagaaggaaaataagcaggtggaagagatcctccgtctggagaaagaaatcgaggacctgcagcgcatgaaggagcagcaggagctgtcgctgaccgaggcttccctgcagaagctgcaggagcggcgggaccaggagctccgcaggctggaggaggaagcgtgcagggcggcccaggagttcctcgagtccctcaatttcgacgagatcgacgagtgtgtccggaatatcgagcggtccctgtcggtgggaagcgaattttccagcgagctggctgagagcgcatgcgaggagaagcccaacttcaacttcagccagccctacccagaggaggaggtcgatgagggcttcgaagccgacgacgacgccttcaaggactcccccaaccccagcgagcacggccactcagaccagcgaacaagtggcatccggaccagcgatgactcttcagaggaggacccatacatgaacgacacggtggtgcccaccagccccagtgcggacagcacggtgctgctcgccccatcagtgcaggactccgggagcctacacaactcctccagcggcgagtccacctactgcatgccccagaacgctggggacttgccctccccagacggcgactacgactacgaccaggatgactatgaggacggtgccatcacttccggcagcagcgtgaccttctccaactcctacggcagccagtggtcccccgactaccgctgctctgtggggacctannnnnnnnnnnnnnnnnnnnnnnnnnnntctgagggggcgcagtcctcgtttgaagatagtgaagaggactttgattccaggtttgatacagatgatgagctttcataccggcgtgactctgtgtacagctgtgtcactctgccgtatttccacagctttctgtacatgaaaggtggcctgatgaactcttggaaacgccgctggtgcgtcctcaaggatgaaaccttcttgtggttccgctccaagcaggaggccctcaagcaaggctggctccacaaaaaaggggggggctcctccacgctgtccaggagaaattggaagaagcgctggtttgtcctccgccagtccaagctgatgtactttgaaaacgacagcgaggagaagctcaagggcaccgtagaagtgcgaacggcaaaagagatcatagataacaccaccaaggagaatgggatcgacatcattatggccgataggactttccacctgattgcagagtccccagaagatgccagccagtggttcagcgtgctgagtcaggtccacgcgtccacgggaccaggagatcaggagatgcatgatgagcaggcaaacccacagaatgctgtgggcaccttggatgtggggctgattgattctgtgtgtgcctctgacagccctgatagacccaactcgtttgtgatcatcacggccaaccgggtgctgcactgcaacgccgacacgccggaggagatgcaccactggataaccctgctgcagaggtccaaaggggacaccagagtggagggccaggaattcatcgtgagaggatggttgcacaaagaggtgaagaacagtccaaagatgtcttcactgaaactgaagaaacggtggtttgtactcacccacaattccctggattactacaagagttcagagaagaacgcgctcaaactggggaccctggtcctcaacagcctctgctctgtcgtccccccagatgagaagatattcaaagagacaggctactggaacgtcaccgtgtacgggcgcaagcactgttnnnnnnnnnnnnnnnnnnnnnnnnnnnnngccacccggtggtccagtgccattcaaaacgtgactgacaccaaggccccgatcgacacccccacccagcagctgattcaagatatcaaggagaactgcctgaactcggatgtggtggaacagatttacaagcggaacccgatccttcgatacacccatcaccccttgcactccccgctcctgccccttccgtatggggacataaatctcaacttgctcaaagacaaaggctataccacccttcannnnnnnnnnnnnnnnnnnnnnnnnnnnnnnnnnnnnnnnnagtccatgtctgacccaattccaataatccagggcatcctacagacagggcatgacctgcgacctctgcgggacgagctgtactgccagcttatcaaacagaccaacaaagtgccccaccccggcagtgtgggcaacctgtacagctggcagatcctgacatgcctgagctgcaccttcctgccgagtcgagggattctcaagtatctcaagttccatctgaaaaggatacgggaacagtttccaggaaccgagatggaaaaatacgctctcttcacttacgaatctcttaagaaaaccaaatgccgagagtttgtgccttcccgagatgaaatagaagctctgatccacaggcaggaaatgacatccacggtctattgccatggcggcggctcctgcaagatcaccatcaactcccacaccaccgctggggaggtggtggagaagctgatccgaggcctggccatggaggacagcaggaacatgtttgctttgtttgaatacaacggccacgtcgacaaagccattgaaagtcgaaccgtcgtagctgatgtcttagccaagtttgaaaagctggctgccacatccgaggttggggacctgccatggaaattctacttcaaactttactgcttcctggacacagacaacgtgccaaaagacagtgtggagtttgcatttatgtttgaacaggcccacgaagcggttatccatggccaccatccagccccggaagaaaacctccaggttcttgctgccctgcgactccagtatctgcagggggattatactctgcacgctgccatcccacctctcgaagaggtttattccctgcagagactcaaggcccgcatcagccagtcaaccaaaaccttcaccccttgtgaacggctggagaagaggcggacgagcttcctagaggggaccctgaggcggagcttccggacaggatccgtggtccggcagaaggtcgaggaggagcagatgctggacatgtggattaaggaagaagtctcctctgctcgagccagtatcattgacaagtggaggaaatttcagggaatgaaccaggaacaggccatggccaagtacatggccttgatcaaggagtggcctggctatggctcgacgctgtttgatgtggagtgcaaggaaggtggcttccctcaggaactctggttgggtgtcagcgcggacgccgtctccgtctacaagcgtggagagggaagaccactggaagtcttccagtatgaacacatcctctcttttggggcacccctggcgaatacgtataagatcgtggtcgatgagagggagctgctctttgaaaccagtgaggtggtggatgtggccaagctcatgaaagcctacatcagcatgatcgtgaagaagcgctacagcacgacacgctccgccagcagccagggcagctccaggtgaaggcgggacagagcccacctgtctttgctacctgaacgcaccaccctctggcctaggctggctccagtgtgccatgcccagccaaaacaaacacagagctgcccaggctttctggaagcttctggtctgagggaggtgtctccgaggatccttttgcctgccgccttcattgatcctgtattaagctgtcaactttaacagtctgcacagtttccaaagctttactactcttagaggacacatgccttaaaaaaggaggggaggaaccacgctgccaccaaagcagccggaagtgccttaacttgtggaaccaacactaatcgaccgtaactgtgctactgaagggaactgcctttcccccttctgggggagacttaacagagcgtggaaggggggcattctctgtcaatgatgcactaacctcccaacctgatttccccgaatctgagggaaggtgagggagtgggaagggggatggagagctcgaggggacagtgtgtttgagctggagtgctgcgggcagcctttctcatggaatgacatgaatcaacttttttctttgtttcatcttttaagtgtacgtgcttgcctgttcgtgcatgtgttcataaactcaacactttaatcatggtttcatgagcattaaaaagcaaagggaaaaaggatgtgtaatggtgtacacagtctgtatattttaataatgcagagctatagtctcaattgttactttataaggtggttttattaacaaacccaaatcctggattttcctgtctttgctgtattttgaaaaacacgtgttgactccattgttttacatgtagcaaagtctgccatctgtgtctgctgtattataaacagataagcagcctacaagataactgtatttataaaccactcttcaacagctggctccagtgctggttttagaacaagaatgaagtcattttggagtctttcatgtctaaaagatttaagttaaaaacaaagtgttacttggaaggttagcttctatcattctggatagattacagatataataaccatgttgactatgggggagagacgctgcattccagaaacgtcttaacacttgagtgaatcttcaaaggaccctgacattaaatgctgaggctttaatacacacatattttatcccaagtttataatggtggtctgaacaaggcacctgtaaataaatcagcatttatgaccagaagaaaaataatctggtcttggactttttatttttatatggaaaagttttaaggacttgggccaactaagtctacccacacgaaaaaagaaatttgccttgtccctttgtgtacaaccatgcaaaactgtttgttggctcacagaagttctgacaataaaagatactagctaaaaaaaaaaaaaaaaaaaaaaggac

SEQ ID NO: 5358 - DNA, 2105 bp, Homo sapiens
  misc_feature (1581)..(1584): n is a, c, g, or t
  misc_feature (2081)..(2081): n is a, c, g, or t
  misc_feature (2101)..(2101): n is a, c, g, or t
gtccatggccgttgtgtggcacccaatcagtgccaatgtgtgccaggctggcggggcgacgactgttccagtgagtgtgccccaggaatgtgggggccacagtgtgacaagccctgcagctgcggcaacaacagctcgtgtgatcccaagagtgggggcacttctggcttcttctgccccagcacccatccttgccaaaatggaggtgtcttccaaaccccacagggctcctgcagctgcccccctggctggatgggcaccatctgctccctgccctgcccagagggctttcacggacccaactgctcccaggaatgtcgctgccacaacggcggcctctgtgaccgattcactgggcagtgccgctgcgctccgggttacactggggatcggtgccgggaggagtgcccggtgggccgctttgggcaggactgtgctgagacgtgcgactgcgccccggacgcccgttgcttcccggccaacggcgcatgtctgtgcgaacacggcttcactggggaccgctgcacggatcgcctctgccccgacggcttctacggtctcagctgccaggccccctgcacctgcgaccgggagcacagcctcagctgccacccgatgaacggggagtgctcctgcctgccgggctgggcgggcctccactgcaacgagagctgcccgcaggacacgcacgggccagggtgccaggagcactgtctctgcctgcacggtggcgtctgccaggctaccagcggcctctgtcagtgcgcgccgggttacacgggccctcactgtgctagtctttgtcctcctcctcgcagaccccggcggttcctaccccaggccgcaggggagacggggccccaaggcaggcttcatatcctgaacgctgggatcccccaggacattccctggcccccaggccccaggtcccaggccccagggctgagctgtgggcaggccccacctggcctctgcaatgtcaccacctctgtgtcccctccttctcctggctgtgggcctgcggctggctggaactctcaaccccagtgatcccaatacctgcagcttctgggaaagcttcactaccaccaccaaggagtcccactcccgccccttcagtctgctccactcttctttctggcacagggacctgcacacctggagtgcccttcctcccccactcgcctgttcacccctgcttttcctttacacctcctcctcagggaagtgcccaccctccgtacatctttcacagccctgattgcagctgtgttcactcaccaggtacctgcagaaggcctacagggtgccaggcacttctttaatgtgttctttctttatgtgattatttgattaatctctgcctcccccactagactgtaagctccctgaaggcaagaatcctgtgcttatgctcaatattagctctcccttggcacagagtaggcactcaacaaatgctccccaaaaggctgagtggctgactgaattaagtaccagtgacatgcagtaactgctaagatagatgagccatctgtatgctctgacagttacagactgaataagttggagacttccctnnnnggtggcatttccccagggtgacaacgcagagctcaggtgtgggaaggtgccaggggcaggggtgcagaggggctgaggctgaggggggtgcagaggctggagaaaggataacaggagagagtatacaggcatgccttgatttattgcacttcacaggtagcagaatttttaaagaaattgaaggttttgggacatatatgtgacagcaataggttaagaaaagcaaagcagagaaattgaagatttgtgtcaacactgctttaagcaaatctgttggcaccatttttccaatagcatgtgcccattttgggtctctacattgcattttggtaattgcttgcaatatttcaagcattttcattgttattatatgtgttatagtgatctgtgatcagtgatctttgatatattattgtaattgtttcggggcgccatgaaccgcacccatataacacggtaaacttaatcagcaaaaaaaaaaaaaaaaaaaaaaaaanaaataaaaaaaggggcgtcnctct

SEQ ID NO: 5359 - DNA, 7047 bp, Homo sapiens
  misc_feature (744)..(784): n is a, c, g, or t
  misc_feature (2720)..(2737): n is a, c, g, or t
ctcgcgaacgtgttatccgggggatcccgggggccagtcgcggccgggacatcgggcgctgcggccggggacccgctgctgagatagatagaatatggcagagctttctgagccagagggaccagtagattggaaggaacgatgtgtagctctggagtcccaactcatgaaatttagagttcaagcaagcaagatacgagagcttttagcagagaagatgcaacagcttgagagacaagttattgatgctgaacgtcaagcagaaaaagcttttcaacaggtacaagttatggaagataaattaaaagcagctaatattcaaaccagtgaatcagagacaagattatataataagtgtcaagatctggagtcgctaatacaggaaaaagatgacgtcattcaaaacttggaattgcaacttgaagagcagaaacaaataagaatacaagaagctaaaataatagaagagaaagcagctaagataaaagaatgggtaacagttaagttaaatgagctggaattggagaatcagaatcttcgtttgatcaaccaaaaccaaactgaagagataagaacaatgcagtcaaaactacaagaagttcaaggaaagaagtcatccactgtctctacactaaagctttcggaaggccagcgcctgagcagtttgacctttgggtgctttttatctcgagcaaggagtcctcctcaagtagtaaaatctgaggaaatgagcaagatatcatnnnnnnnnnnnnnnnnnnnnnnnnnnnnnnnnnnnnnnnnnatggaaattccagaaaagtctgttgataaccaagttctagaaaacaacagaggccagagaacattgcatcaaaccccttgtggctcagaacagaatcggaaaacaagaacaagctttgccacagatggtggcatctcccagaattctggggctcctgtgagtgactggagctctgatgaggaagacgggagcaaaggaagatccaagtccagatgcacatccaccctctccagtcacacatctgaggaaggggtccagtgtagcaggatgggaagtgaaatgtatctgacagcatctgatgacagcagctctatatttgaggaagagacttttggcataaagagaccagaacacaagaagctatattcttggcagcaggaggcacagtggaaagctctaaatagtcctcttggaaagggaaattctgaattaagtaaaaaggaacaagatagttcctcggatgaactgaataaaaaatttcaatcccagagactcgattattcatcttcatcgagtgaagccaacaccccaagccctattttgaccccagctttaatgccaaagcatcctaactcactctctggaaaaggaacacaattagtgccttcatcacacctgccacccccaaagttaaggattcctaatgttttcagtataagtgcagcactagccaaaaggcacttaagccagccacagttaagctctgacaggatgtttggtacaaatagaaacgctataagcatgatacgaccactgagacctcaggaaactgatcttgatctagttgatggagacagtacagaagttttagagaatatggacacgagttgtgatgatggattattttcctatgactccttggactctccaaattcagatgaccaggaacactgtgactcagcaaagaaggtggcatacagcagaaataagactaatgacatgcacagattttagttcttgggaaagcagaatttatgctgtagccaaatcaggtattcgaatgtctgaggccttcaatatggagagtgttaataaaaattctgctgcaaccctttcctatactacatcaggactttatacatctctgatatacaagaacatgaccaccccagtgtatacaactttgaaggggaaggcgacccaaataagtagcagccctttcctggatgactcatctgggtcagaggaagaagacagctccagatccagctcccggacgtcagagtcagactcacgcagtaggagtgggccaggcagccccagagccatgaaacgaggtgtgtctctctcctctgtggcttctgaaagtgattatgctattcctcctgatgcttactccacagacacggagtactcacagccagagcagaagctcccaaaaacttgctcatcttccagtgataatgggaaaaatgaaccactggaaaaatctggttatttattaaaaatgagtggtaaagtcaagtcttggaagcggcggtggtttgttcttaaaggttgtgaattactttactacaaatctccgagtgatgtaattagaaaaccccagggccatattgaacttagtgcatcctgtagtattttaagaggagataacaaacaaacagttcagttgaccactgaaaaacacacatactatctgactgcagattctcccaatatattggaagagtggattaaagtgttacagaatgttcttcgagtacaagctgccaacccactttccctgcagcctgagggcaaacccaccatgaagggattgctcactaaggtaaaacatggatattccaagagagtctggtgtacactaataggaaagacattatattattttcggagtcaagaagataagtttcctttaggtcagatcaaactctgggaggttaaagtggaagaggttgacagatcttgtgattcagatgaagattatgaagcnnnnnnnnnnnnnnnnnnatccacacattatactatcgttatccatcccaaagaccaaggtccaacttacctcctaattggatccaagcatgaaaaggacacttggctttatcatctgactgttgcagctggaagcaacaatgtaaacgttggatctgaatttgaacaactggtttgcaaattgctaaatatagacggggagccttcctctcagatatggagacaccccactttgtgtcacagtaaagaaggaatcatttcccctctgacaactctaccttccgaagccctgcagacagaagctattaaattatttaagacctgccagctttttataaatgctgcagttgactctcctgcaattgattaccacatatctttagcccagagtgctttgcaaatctgcctgacacatcctgagctgcagaatgaaatttgctgtcagcttattaaacagacaagacgaagacagccacagaatcaaccaggaccattgcagggctggcagctcttggcactctgcgttgggctcttccttccccatcatcctttcctgtggctcctcaggcttcacctaaagaggaatgcagattccaggacagaatttggaaaatatgccatttactgccagcgttgtgtagaaagaacgcaacaaaatggtgacagagaagcaagaccctcaaggatggaaattctttcaactcttctccgaaacccttatcaccattctttgccctttagtatacctgtgcacttcatgaatgggatataccaggtagttggttttgacgcatctaccacagtggaagaatttttgaatactttgaaccaggacacaggaatgaggaaaccagcgcagtctggatttgcgttgttcactgacgatccttctggcagagatttagagcattgtcttcaaggaaacatcaagatttgtgacattatttccaaatgggaacaggcttccaaagaacagcagcctggaaaatgtgaaggtacaaggactgttcgtctgacatacaaaaacagactatatttctcagtgcaagctcgtggagagactgatagagaaaagttgctgttaatgtatcagacaaatgatcaaatcataaatggactttttcctctgaacaaagatctggcattagaaatggcagctcttttatctcaggtagagattggagattttgaaagacctttctcaactccagcagggcatgttaccaatcagtgcaaagtgaatcaaactctaaagcaagtcatagagaaattttatcctaaaaggtatagagatggctgttctgaagagcagttaaggcagctttgccagcgactttcaaccagatggatggccctccggggacacagtgctgctgactgtgtgcgcatttatttgacagtagccaggaagtggccattctttggtgccaagttgtttcttgcaaaacccataactccatcatcacttggaagtactttcttgtggctggctgtacatgaggatggtttaagcctcttagaatacaactccatgaggttaatagtcagctatgtgtacaagagtctaatgacctttggaggctatcaagatgattttatggtagtcattaacaatacacattcaaaggacaaaccaacagagaaattactttttgccatggcaaaacccaagattcttgaaatcactcttttgatcgccagttacataaacaacttccatcagcaaaaggcagcatttcaccacctctctgctccagcactgctctcagcccagacccggggaccccaagccagaatgatgggaagccagcctcttctgtcaagcagcagaccgaccaaaggccccaccttactctgaaagctggggagcctgaacattcactccttgtcctccatgctgtggctgtatcagctccctacaagttcgtttacacctggcagcacggcagccacacaccggtattccaaaccttaacaatgaagggggttagtctcttttatttgattcttaaatattcaaataaatattaacagtaaaacataaacacaaaatttgccaacacactaattttcttatagagtaaatgagtaagaattcatcattttttccatctcccttctcccttgtcatcagacacattgtgcaatgtggcttttcttttcttttctttttttcccctttttaatattctggcaatctttagaaagggagattccaaactcccatttggtaaaccagttgattatttggaaatgttcactgccaaaatagtaagtgctataactaaatgcgcttttaattaatgatatagtgtttggaaaggagtagaacatgcagcataagaaactgctgcagagtggtgcgaggagtacattttcagagcaggtgcagtacatcttccggctctatgaatcattatgtgagaaagcaggataacattaggtaacctgagcctcctgtgtggtattagaaagtataccgtcaccttttcacatcactggagtgtaaaatttaaaacaagatggtgattcctgacattccttggctgtcagtgctgcccagattcacaagaatattgcccacatttcactgtatttggtgctgggtcattttgaccttgctttgttaataatatctttaaaaacaaagacaatccttaaagctttgctcctcacacattaccttctaattatagtttgaaaatagattccctacacatacatacatatgtatgcacagatagggtcttgctatgttgcccaggctggtcttgaactcctggcctcaagcaatcctctctcctcagcctcccaaagtgctgggattacaagtgtgagccaccacacctggctccagaaattttattttatttttttgaggcagggtctcactctggttgcccaggctggagtgcagtggtgccatcatagctcactgtagcctcgaccttccgggatcaagcaatcccacttcagcctcttgaatagctgggactagaagcatgcaccaccatgcccatctaatatttgtatttttagtagagacaggatctccctatgttgtccagcctagtctcaaactcctgggttcaagcaatcctcccacctcggcctcccaaagtgctgggattgcaggcatgagccaccgtgcccagcctcaaaaatattttttaaaagaaaagagaaaataattcttctgtcaaaggaggttaaattttagttgatagagtacttaaatgcattactttattaggttatgtaagtggtcagtgcattccagtatgtgtcacaacagtgtagttcatattcatgataaaaatgaaactgtgataagacatgaaaattatattattaaaatgttcaattgtaatggtaatcatgagtatacttaattttatttatgtatagaatatttgtatttattttttggacatatatttatcactttgtcattttttttaaccaatttgagaaatgttagctgctgaattaatttgttgcccgagccttcatattttcttctttgctgccttctccctgtggcaatgtactgttctcacattaagccttttaaaaatgttccatactgtattagcatccttagaagggacagaactaagaaatacattgctcaaataatattttactttattgataatgacaaaaagaatattttttaaaccccatcaaaatagatttcaattgactgtttcccctacatcttttgagccacagtcgcccatcgaataagcaaatttgtttttgagaataaactggtaaccagtttgtgatgactctcagaagccttttggctgggttacagaagagtttctaagttcctagagagccatttaataattagttggtgagccagaggcttgacagagctgttacttatgtgtgagggctttattctcaggcagtagtttattcatcatttggtaagcccctccccacactcctctaatttaaacaagtagtgaaggcttatcttaaactgtgtagtaccttagacttggcatttatttttgatagagcagagataaaatattttgatggaaggaaatcaattttctgtaactgatgatgtgaaaattttattttctgggaaattatatagccattcaaaaattcaaagtatgttattatgattggttacaagagaataatgttacatgtttaattgtaatatttgtctcctatcattttcttccctttcagtcataataaatgatttacaaaacccaaaaaaaaaaaaaaaaaaaaaaaaaaaaaaaaaaaaaaaaaaaaaaaaaaaaaaaaaaaaaaaaaaaaaaaaaaaaaaaaaa

SEQ ID NO: 5360 - DNA, 4184 bp, Homo sapiens
  misc_feature (1443)..(1443): n is a, c, g, or t
ggcttaggaagtattaactgatctctgccctagttctcatgtgttaaatatggatagtaatagtatctaccttatgaagtgactgtgaagataaaattatggattctgtttaagggtttaggccagtgtctggcacaggggaagcattctaaaaatatagctgatgctgttaaacaatgactgttgttgttgttttactgttattatccccaaagcggcccattctgtctgttgctgtcagctatgactcagtcccctgattaacttacgcaccacccattttatcccctgcagagatgctgcccccacccccttaggcccgagggatcaggagctatgggaccagaggccctgtcatctttactgctgctgctcttggtggcaagtggagatgctgacatgaagggacattttgatcctgccaagtgccgctatgccctgggcatgcaggaccggaccatcccagacagtgacatctctgcttccagctcctggtcagattccactgccgcccgccacagcaggttggagagcagtgacggggatggggcctggtgccccgcagggtcggtgtttcccaaggaggaggagtacttgcaggtggatctacaacgactgcacctggtggctctggtgggcacccagggacggcatgccgggggcctgggcaaggagttctcccggagctaccggctgcgttactcccgggatggtcgccgctggatgggctggaaggaccgctggggtcaggaggtgatctcaggcaatgaggaccctgagggagtggtgctgaaggaccttgggccccccatggttgcccgactggttcgcttctacccccgggctgaccgggtcatgagcgtctgtctgcgggtagagctctatggctgcctctggagggatggactcctgtcttacaccgcccctgtggggcagacaatgtatttatctgaggccgtgtacctcaacgactccacctatgacggacataccgtgggcggactgcagtatgggggtctgggccagctggcagatggtgtggtggggctggatgactttaggaagagtcaggagctgcgggtctggccaggctatgactatgtgggatggagcaaccacagcttctccagtggctatgtggagatggagtttgagtttgaccggctgagggccttccaggctatgcaggtccactgtaacaacatgcacacgctgggagcccgtctgcctggcggggtggaatgtcgcttccggcgtggccctgccatggcctgggagggggagcccatgcgccacaacctagggggcaacctgggggaccccagagcccgggctgtctcagtgccccttggcggccgtgtggctcgctttctgcagtgccgcttcctctttgcggggccctggttactcttcagcgaaatctccttcatctctgtggggaancaatttcctctccgggcactgggaggcaccttcccgccagccccctggtggccgcctggcccacctcccaccaacttcagcagcttggagctggagcccagaggccagcagcccgtggccaaggccgaggggagcccgaccgccatcctcatcggctgcctggtggccatcatcctgctcctgctgctcatcattgccctcatgctctggcggctgcactggcgcaggctcctcagcaaggctgaacggagggtgttggaagaggagctgacggttcacctctctgtccctggggacactatcctcatcaacaaccgcccaggtcctagagagccacccccgtaccaggagccccggcctcgtgggaatccgccccactccgctccctgtgtccccaatggctctgcctacagtggggactatatggagcctgagaagccaggcgccccgcttctgcccccacctccccagaacagcgtcccccattatgccgaggctgacattgttaccctgcagggcgtcaccgggggcaacacctatgctgtgcctgcactgcccccaggggcagtcggggatgggccccccagagtggatttccctcgatctcgactccgcttcaaggagaagcttggcgagggccagtttggggaggtgcacctgtgtgaggtcgacagccctcaagatctggttagtcttgatttcccccttaatgtgcgtaagggacaccctttgctggtagctgtcaagatcttacggccagatgccaccaagaatgccaggaatgatttcctgaaagaggtgaagatcatgtcgaggctcaaggacccaaacatcattcggctgctgggcgtgtgtgtgcaggacgaccccctctgcatgattactgactacatggagaacggcgacctcaaccagttcctcagtgcccaccagctggaggacaaggcagccgagggggcccctggggacgggcaggctgcgcaggggcccaccatcagctacccaatgctgctgcatgtggcagcccagatcgcctccggcatgcgctatctggccacactcaactttgtacatcgggacctggccacgcggaactgcctagttggggaaaatttcaccatcaaaatcgcagactttggcatgagccggaacctctatgctggggactattaccgtgtgcagggccgggcagtgctgcccatccgctggatggcctgggagtgcatcctcatggggaagttcacgactgcgagtgacgtgtgggcctttggtgtgaccctgtgggaggtgctgatgctctgtagggcccagccctttgggcagctcaccgacgagcaggtcatcgagaacgcgggggagttcttccgggaccagggccggcaggtgtacctgtcccggccgcctgcctgcccgcagggctatatgagactgatgctttccggtgctgggagccgggagtctgagcagcgaccacccttttcccagctgcatcggttcctggcagaggatgcactcaacacggtgtgaatcacacatccagctgcccctccctcagggagcgatccaggggaagccagtgacactaaaacaagaggacacaatggcacctctgcccttcccctcccgacagcccatcacctctaatagaggcagtgagactgcaggtgggctgggcccacccagggagctgatgccccttctccccttcctggacacactctcatgtccccttcctgttcttccttcctagaagcccccctgtcgcccacccagctggtcctgtggatgggatcctctccaccctcctctagccatcccttggggaagggtggggagaaatataggatagacactggacatggcccattggagcacctgggccccactggacaacactgattcctggagaggtggctgcgcccccagcttctctctccctgtcacacactggaccccactggctgagaatctgggggtgaggaggacaagaaggagaggaaaatgtttccttgtgcctgctcctgtacttgtcctcagcttgggcttcttcctcctccatcacctgaaacactggacctgggggtagccccgccccagccctcagtcacccccacttcccacttgcagtcttgtagctagaacttctctaagcctatacgtttctgtggagtaaatattgggattggggggaaagagggagcaacggcccatagccttggggttggacatctctagtgtagctgccacattgatttttctataatcacttggggtttgtacatttttggggggagagacacagatttttacactaatatatggacctagcttgaggcaattttaatcccctgcactaggcaggtaataataaaggttgagttttccacaaaaaaaaaaaaaaaaacaaaacacaaacaataacacgaacgaaagcaaacacaacgcaaacaagacgaaccagcacaacaacacaccaaccaacaaaaagaacaaaaagaagaaaacgaaccgccgggcggagccacggaaacacaaccacgagacaacagacacgacaagcgaaaagagaaagcgacagacggcgacggaaaaaaaggggcggcgcgcaccagaaacggcagaaagccacccgccggcgacggggggaaccccccaggggggacacggacccccccagaaaagaaccgacggacaaacgacgcacgggcacacgagcagggggaaaaggcacgcgaccaacc

SEQ ID NO: 5361 - DNA, 2938 bp, Homo sapiens
  misc_feature (844)..(867): n is a, c, g, or t
gttgacaaaagtgtgaatctgatgaatgcctctaatgatattacaatggaaaatgtggtccatgagttggaactttataacacaggatattatttaggcatgttcatgaattcttttgcagtctttcaggaatgtggactctgggtattgacagatgcaaacctcacgaaggattatattgatggtgtttatgacaatgcagaatatgctgagaggtttatggaggaaaatgaaggacatattgtagatattcatgacttttctttgggtagcagtccacatgtccgaaagcattttccagagacttggatttggctagacaccaacatgggttccaggatttaccaagaatttgaagtaactgtacctgattctatcacttcttgggtggctactggttttgtgatctctgaggacctgggtcttggactaacaactactccagtggagctccaagccttccaaccatttttcatttttttgaatcttccctactctgttatcagaggtgaagaatttgctttggaaataactatattcaattatttgaaagatgccactgaggttaaggtaatcattgagaaaagtgacaaatttgatattctaatgacttcaagtgaaataaatgccacaggccaccagcagacccttctggttcccagtgaggatggggcaactgttctttttcccatcaggccaacacatctgggagaaattcctatcacagtcacagctctttcacccactgcttctgatgctatcacccagatgattttagtaaaggctgaaggaatagaaaaatcatattcacaatccatcttattagacttgactgacaataggnnnnnnnnnnnnnnnnnnnnnnnnagtttctcatttcctcctaatacagtgactggcagtgaaagagttcagatcactgcaattggagatgttcttggtccttccatcaatggcttagcctcattgattcggatgccttatggctgtggtgaacagaacatgataaattttgctccaaatatttacattttggattatctgactaaaaagaaacaactgacagataatttgaaagaaaaagctctttcatttatgaggcaaggttaccagagagaacttctctatcagagggaagatggctctttcagtgcttttgggaattatgacccttctgggagcacttggttgtcagcttttgttttaagatgtttccttgaagccgatccttacatagatattgatcagaatgtgttacacagaacatacacttggcttaaaggacatcagaaatccaacggtgaattttgggatccaggaagagtgattcatagtgagcttcaaggtggcaataaaagtccagtaacacttacagcctatattgtaacttctctcctgggatatagaaagtatcagcctaacattgatgtgcaagagtctatccattttttggagtctgaattcagtagaggaatttcagacaattatactctagcccttataacttatgcattgtcatcagtggggagtcctaaagcgaaggaagctttgaatatgctgacttggagagcagaacaagaaggtggcatgcaattctgggtgtcatcagagtccaaactttctgactcctggcagccacgctccctggatattgaagttgcagcctatgcactgctctcacacttcttacaatttcagacttctgagggaatcccaattatgaggtggctaagcaggcaaagaaatagcttgggtggttttgcatctactcaggataccactgtggctttaaaggctctgtctgaatttgcagccctaatgaatacagaaaggacaaatatccaagtgaccgtgacggggcctagctcaccaagtcctgtaaagtttctgattgacacacacaaccgcttactccttcagacagcagagcttgctgtggtacagccaacggcagttaatatttccgcaaatggttttggatttgctatttgtcagctcaatgttgtatataatgtgaaggcttctgggtcttctagaagacgaagatctatccaaaatcaagaagcctttgatttagatgttgctgtaaaagaaaataaagatgatctcaatcatgtggatttgaatgtgtgtacaagcttttcgggcccgggtaggagtggcatggctcttatggaagttaacctattaagtggctttatggtgccttcagaagcaatttctctgagcgagacagtgaagaaagtggaatatgatcatggaaaactcaacctctatttagattctgtaaatgaaacccagttttgtgttaatattcctgctgtgagaaactttaaagtttcaaatacccaagatgcttcagtgtccatagtggattactatgagccaaggagacaggcggtgagaagttacaactctgaagtgaagctgtcctcctgtgacctttgcagtgatgtccagggctgccgtccttgtgaggatggagcttcaggctcccatcatcactcttcagtcatttttattttctgtttcaagcttctgtactttatggaactttggctgtgatttatttttaaaggactctgtgtaacactaacatttccagtagtcacatgtgattgttttgttttcgtagaagaatactgcttctattttgaaaaaagagttttttttctttctatggggttgcagggatggtgtacaacaggtcctagcatgtatagctgcatagatttcttcacctgatctttgtgtggaagatcagaatgaatgcagttgtgtgtctatattttcccctctcaaaatcttttagaatttttttggaggtgtttgttttctccagaataaaggtattactttagaataaaaaaaaaaaaaaaaaaaaaaaaaaaaaaaaaaaaaaaaaaaaaaaaaaaaaaaaaaaaaaaaaaaaaaaaaa

SEQ ID NO: 5362 - DNA, 2995 bp, Homo sapiens
aaatttctttttgtaattcattttcttgacaagtttgcaaatatttgcaatttccttgtacttttcaagtaaaatctatttgttcatagtgaatttttattaagtacagaagtagattcaatttggtaatgctttgctagctttgcaaaagaatttggaaaaaattttgtttatcttattgctatggagagtttgtataacatgggaattgttccttgaaggcttgctaaaagtaactgggcctggttctttgggtgaggggattgggagggatatatctttagcaactgttttagtcagtttgagctattataacaaaataccatagaggatggcttaaacaacagacatttatttctcacagttctgtagtcttcataattcaacatcaagatgccagaatggttgagtgctggtgagggctctcttcctggtttgcagatggccccctttttcctgtgtcctcaaatttcagagagcaagagcactggtgcctcttccaagtcttttaagggcgttagtgagagtgacagccccattctcatgacctactccaatcctagttattttccaaaggccccccacccccaaatataacatttggggttagggcttcaacataaatattcattctataacattccactcctagccactctattcatatccttacatacaaaataagttcattccatcctaacagcctccaaagttttaactcattctagtatcaactaacatttaaagtccaaagtctcatctaaatatctaaatatctaaataaaggccgggcatggtggctcacgcctgtaatcccagcactttgggaggccgaggcgggtggatcactacgtcaggagttcgagaccagcctgaccaacatggtgaaaccccatctctactaaaaatacaaaaattagctgggcgtgatggtgtgcacctgtaatcccagctacacggggaggctgaggcaggagaatcgcttgaacccgagagacagaggttgcagtgagccgagatcgcaccattgcactccagcctgggcgacagtgagactttgtctcaaaaatatctaaatcagatatgggtgagacccaaggtttagcttatcctgaggcaaaatccccctccagctgtgaacctatgaaaccagacaagttatgtgcttccaaaatacagtgatgggataggcaggattaggtattccaattccaaaagtgagaaattggaaggaagaaagggatgatgaggctgggtgtgatagctcatgcctttaatcctagcactttgggaggctgaggtgggaggattgcttgagtccaggagttcgagaccagcctgggcaacatagggagaccttatttctacaaaaataataaaaataattagttgggcatggtggcttgagcatgggagttcgaggctacagtgagttgtgatcgtactgcactccagcctggatgacagagtgaaaccctgtcaataaaaaataaaaaaggatgggggagcagggggatgatggtcctatgcaagtctaaaacttagcaaggcacgtttcatgagatcttaggctcatgaataatcctctttggtcctatactgtcctctccaggaccccctgggcggtggtcctgacccgatagatctgccaggcaggggtgactcccccgtggcttttgttggagaccatctggcctgtggaaactggggcagtatccctcatgatctctaaatagccaagagaagagtcattcttgtatggaacaatggacattcacagccttcctcattcctggctttaggacttcagatacaatcatgtcagagctcagggcttcaacatatgaattttgggggcacagttcagtccatagcaatacttccattcccctgacctgcaacatgtccagttacttcgaaaagtacttgtcatccactatattaataacatgctcattgccagcctatgaaacaagttgaccactccatacataaggtcatagataatatgacacatgcaggttgagttgtcagccctgataagatcccaagacttgcccaacaagtgcagtccctggagctacctggtccagtaattagaggagtattcctgataaagtcaaatattgtccttggcagcccccacctaaaagaagctcaatagctggtatgcctgtttgtctattggagataacatgtatcacatctgagtattattttgcctcctttagttaaaattacccacaacacagccacctctgaatggggccctcaacaacagcagactcgagaggcctactatgcattaacatgggcctgacattaatgtaggcccatggaactacaggtctcattgactcttacccatacagattggatactgcggcaacaagagactgctatcaggatgcaccaggcccttaggttttggacatataaattacccaagatggttgccatatacattccctttgaatggcagctactagcctgctattggactctaatttaaacagaacacttgaccactgaagcactgtatgtgaccttaagacctgagctgcccatctcatgcaggtattattaacgaaaaataaaaatggaagccccagtttagaaataccctaaggctgactacccgcaaccgtgtaaccaaaactaatcattctgattttcctgaaatgctgtctctgatcataaatgaaatgcaaaatgtaagctttacatccttgccagcatgattcactgaaattaaaccaatcagctatagaccaacaagcttaaacagctcaacttgccctaaaaagaatgtataacagccaattataaaaaaggtcaaaatattccccccctttatgcattataaactgtgttgtaactgctgtaagattaatttcttaccacttgatttgagtcttctagattgtggtctgtacttcttgtttgaacaataaacttttaaatttttctttaaaaaaaaaaaaaaaaaaaaaaa

SEQ ID NO: 5363 - DNA, 8517 bp, Homo sapiens
  misc_feature (1047)..(1069): n is a, c, g, or t
  misc_feature (2722)..(2785): n is a, c, g, or t
taaatttaaaggcggggcggcctgtgagccctgaagtgccggccgcggagggtcctggccattttggtgggaccagttcagcctgataggatggcggaggaaggagccgtggccgtctgcgtgcgagtgcggccgctgaacagcagagaagaatcacttggagaaactgcccaagtttactggaaaactgacaataatgtcatttatcaagttgatggaagtaaatccttcaattttgatcgtgtctttcatggtaatgaaactaccaaaaatgtgtatgaagaaatagcagcaccaatcatcgattctgccatacaaggctacaatggtactatatttgcctatggacagactgcttcaggaaaaacatataccatgatgggttcagaagatcatttgggagttatacccagggcaattcatgacattttccaaaaaattaagaagtttcctgatagggaatttctcttacgtgtatcttacatggaaatatacaatgaaaccattacagatttactctgtggcactcaaaaaatgaaacctttaattattcgagaagatgtcaataggaatgtgtatgttgctgatctcacagaagaagttgtatatacatcagaaatggctttgaaatggattacaaagggagaaaagagcaggcattatggagaaacaaaaatgaatcaaagaagcagtcgttctcataccatctttaggatgattttggaaagcagagagaagggtgaaccttctaattgtgaaggatctgttaaggtatcccatttgaatttggttgatcttgcaggcagtgaaagagctgctcaaacaggcgctgcaggtgtgcggctcaaggaaggctgtaatataaatcgaagcttatttattttgggacaagtgatcaagaaacttagtgatggacaagttggtggtttcataaattatcgagatagcaagttaacacgaattcttcagaattccttgggaggaaatccaaagacacgtattatctgcacaattactccagtatcttttgatgaaactcttactgcnnnnnnnnnnnnnnnnnnnnnnnaatatatgaagaatactccttatgttaatgaggtatcaactgatgaagctctcctgaaaaggtatagaaaagaaataatggatcttaaaaaacaattagaggaggtttctttagagacgcgggctcaggcaatggaaaaagaccaattggcccaacttttggaagaaaaagatttgcttcagaaagtacagaatgagaaaattgaaaacttaacacggatgctggtgacctcttcttccctcacgttgcaacaggaattaaaggctaaaagaaaacgaagagttacttggtgccttggcaaaattaacaaaatgaaggaactcaaactatgcagatcaatttaatataccaacaaatataacaacaaaaacacataagctttctataaatttattacgagaaattgatgaatctgtctgttcagagtctgatgttttcagtaacactcttgatacattaagtgagatagaatggaatccagcaacaaagctactaaatcaggagaatatagaaagtgagttgaactcacttcgtgctgactatgataatctggtattagactatgaacaactacgaacagaaaaagaagaaatggaattgaaattaaaagaaaagaatgatttggatgaatttgaggctctagaaagaaaaactaaaaaagatcaagagatgcaactaattcatgaaatttcgaacttaaagaatttagttaagcatcgagaagtatataatcaagatcttgagaatgaactcagttcaaaagtagagctgcttagagaaaaggaagaccagattaagaagctacaggaatacatagactctcaaaagctagaaaatataaaaatggacttgtcatactcattggaaagcattgaagacccaaaacaaatgaagcagactctgtttgatgctgaaactgtagcccttgatgccaagagagaatcagcctttcttagaagtgaaaatctggagttgaaggagaaaatgaaagaacttgcaactacatacaagcaaatggaaaatgatattcagttatatcaaagccaattggaggcaaaaaagaaaatgcaagttgatctggagaaagaattacaatctgcttttaatgagataacaaaactcacctcccttatagatggcaaagttccaaaagatttgctctgtaatttggaattggaaggaaagattactgatcttcagaaagaactaaataaagaagttgaagaaaatgaagctttgcgggaagaagtcattttgctttcagaattgaaatctttaccttctgaagtagaaaggctgaggaaagagatacaagacaaatctgaagagctccatataataacatcagaaaaagataaattgttttctgaagtagttcataaggagagtagagttcaaggtttacttgaagaaattgggaaaacaaaagatgacctagcaactacacagtcgaattataaaagcactgatcaagaattccaaaatttcaaaacccttcatatggactttgagcaaaagtataagatggtccttgaggagaatgagagaatgaatcaggaaatagttaatctctctaaagaagcccaaaaatttgattcgagtttgggtgctttgaagaccgagctttcttacaagacccaagaacttcaggannnnnnnnnnnnnnnnnnnnnnnnnnnnnnnnnnnnnnnnnnnnnnnnnnnnnnnnnnnnnnnnagagattctccgctgcaaactgtagaaagggagaaaacactgattactgagaaactgcagcaaactttagaagaagtaaaaactttaactcaagaaaaagatgatctaaaacaactccaagaaagcttgcaaattgagagggaccaactcaaaagtgatattcacgatactgttaacatgaatatagatactcaagaacaattacgaaatgctcttgagtctctgaaacaacatcaagaaacaattaatacactaaaatcgaaaatttctgaggaagtttccaggaatttgcatatggaggaaaatacaggagaaactaaagatgaatttcagcaaaagatggttggcatagataaaaaacaggatttggaagctaaaaatacccaaacactaactgcagatgttaaggataatgagataattgagcaacaaaggaagatattttctttaatacaggagaaaaatgaactccaacaaatgttagagagtgttatagcagaaaaggaacaattgaagactgacctaaaggaaaatattgaaatgaccattgaaaaccaggaagaattaagacttcttggggatgaacttaaaaagcaacaagagatagttgcacaagaaaagaaccatgccataaagaaagaaggagagctttctaggacctgtgacagactggcagaagttgaagaaaaactaaaggaaaagagccagcaactccaagaaaaacagcaacaacttcttaatgtacaagaagagatgagtgagatgcagaaaaagattaatgaaatagagaatttaaagaatgaattaaagaacaaagaattgacattggaacatatggaaacagagaggcttgagttggctcagaaacttaatgaaaattatgaggaagtgaaatctataaccaaagaaagaaaagttctaaaggaattacagaagtcatttgaaacagagagagaccaccttagaggatatataagagaaattgaagctacaggcctacaaaccaaagaagaactaaaaattgctcatattcacctaaaagaacaccaagaaactattgatgaactaagaagaagcgtatctgagaagacagctcaaataataaatactcaggacttagaaaaatcccataccaaattacaagaagagatcccagtgcttcatgaggaacaagagttactgcctaatgtgaaaaaagtcagtgagactcaggaaacaatgaatgaactggagttattaacagaacagtccacaaccaaggactcaacaacactggcaagaatagaaatggaaaggctcaggttgaatgaaaaatttcaagaaagtcaggaagagataaaatctctaaccaaggaaagagacaaccttaaaacgataaaagaagcccttgaagttaaacatgaccagctgaaagaacatattagagaaactttggctaaaatccaggagtctcaaagcaaacaagaacagtccttaaatatgaaagaaaaagacaatgaaactaccaaaatcgtgagtgagatggagcaattcaaacccaaagattcagcactactaaggatagaaatagaaatgctcggattgtccaaaagacttcaagaaagtcatgatgaaatgaaatctgtagctaaggagaaagatgacctacagaggctgcaagaagttcttcaatctgaaagtgaccagctcaaagaaaacataaaagaaattgtagctaaacacctggaaactgaagaggaacttaaagttgctcattgttgcctgaaagaacaagaggaaactattaatgagttaagagtgaatctttcagagaaggaaactgaaatatcaaccattcaaaagcagttagaagcaatcaatgataaattacagaacaagatccaagagatttatgagaaagaggaacaacttaatataaaacaaattagtgaggttcaggaaaacgtgaatgaactgaaacaattcaaggagcatcgcaaagccaaggattcagcactacaaagtatagaaagtaagatgctcgagttgaccaacagacttcaagaaagtcaagaagaaatacaaattatgattaaggaaaaagaggaaatgaaaagagtacaggaggcccttcagatagagagagaccaactgaaagaaaacactaaagaaattgtagctaaaatgaaagaatctcaagaaaaagaatatcagtttcttaagatgacagctgtcaatgagactcaggagaaaatgtgtgaaatagaacacttgaaggagcaatttgagacccagaagttaaacctggaaaacatagaaacggagaatataaggttgactcagatactacatgaaaaccttgaagaaatgagatctgtaacaaaagaaagagatgaccttaggagtgtggaggagactctcaaagtagagagagaccagctcaaggaaaaccttagagaaactataactagagacctagaaaaacaagaggagctaaaaattgttcacatgcatctgaaggagcaccaagaaactattgataaactaagagggattgtttcagagaaaacaaatgaaatatcaaatatgcaaaaggacttagaacactcaaatgatgccttaaaagcacaggatctgaaaatacaagaggaactaagaattgctcacatgcatctgaaagagcagcaggaaactattgacaaactcagaggaattgtttctgagaagacagataaactatcaaatatgcaaaaagatttagaaaattcaaatgctaaattacaagaaaagattcaagaacttaaggcaaatgaacatcaacttattacgttaaaaaaagatgtcaatgagacacagaaaaaagtgtctgaaatggagcaactaaagaaacaaataaaagaccaaagcttaactctgagtaaattagaaatagagaatttaaatttggctcaagaacttcatgaaaaccttgaagaaatgaaatctgtaatgaaagaaagagataatctaagaagagtagaggagacactcaaactggagagagaccaactcaaggaaagcctgcaagaaaccaaagctagagatctggaaatacaacaggaactaaaaactgctcgtatgctatcaaaagaacacaaagaaactgttgataaacttagagaaaaaatttcagaaaagacaattcaaatttcagacattcaaaaggatttagataaatcaaaagatgaattacagaaaaagatccaagaacttcagaaaaaagaacttcaactgcttagagtgaaagaagatgtcaatatgagtcataaaaaaattaatgaaatggaacagttgaagaagcaatttgagccaaactatctatgcaagtgtgagatggataacttccagttgactaagaaacttcatgaaagccttgaagaaataagaattgtagctaaagaaagagatgagctaaggaggataaaagaatctctcaaaatggaaagggaccaattcatagcaaccttaagggaaatgatagctagagaccgacagaaccaccaagtaaaacctgaaaaaaggttactaagtgatggacaacagcaccttatggaaagcctgagagaaaagtgctctagaataaaagagcttttgaagagatactcagagatggatgatcattatgagtgcttgaatagattgtctcttgacttggagaaggaaattgaattccacagaatcatgaagaaactgaagtatgtgttaagctatgttacaaaaataaaagaagaacaacatgaatgcatcaataaatttgaaatggattttattgatgaagtggaaaagcaaaaggaattgctaattaaaatacagcaccttcaacaagattgtgatgtaccatccagagaattaagggatctcaaattgaaccagaatatggatctacatattgaggaaattctcaaagatttctcagaaagtgagttccctagcataaagactgaatttcaacaagtactaagtaataggaaagaaatgacacagtttttggaagagtggttaaatactcgttttgatatagaaaagcttaaaaatggcatccagaaagaaaatgataggatttgtcaagtgaataacttctttaataacagaataattgccataatgaatgaatcaacagagtttgaggaaagaagtgctaccatatccaaagagtgggaacaggacctgaaatcactgaaagagaaaaatgaaaaactatttaaaaactaccaaacattgaagacttccttggcatctggtgcccaggttaatcctaccacacaagacaataagaatcctcatgttacatcaagagctacacagttaaccacagagaaaattcgagagctggaaaattcactgcatgaagctaaagaaagtgctatgcataaggaaagcaagattataaagatgcagaaagatcaacaatcgtcgactgacataatagcaaaacttcaagccaaagttcatgaatcaaataaatgccttgaaaaaacaaaagagacaattcaagtacttcaggacaaagttgctttaggagctaagccatataaagaagaaattgaagatctcaaaatgaagcttgtgaaaatagacctagagaaaatgaaaaatgccaaagaatttgaaaaggaaatcagtgctacaaaagccactgtagaatatcaaaaggaagttataaggctattgagagaaaatctcagaagaagtcaacaggcccaagatacctcagtgatatcagaacatactgatcctcagccttcaaataaacccttaacttgtggaggtggcagcggcattgtacaaaacacaaaagctcttattttgaaaagtgaacatataaggctagaaaaagaaatttctaagttaaagcagcaaaatgaacagctaataaaacaaaagaatgaattgttaagcaataatcagcatctttccaatgaggtcaaaacttggaaggaaagaacccttaaaagagaggctcacaaacaagtaacttgtgagaattctccaaagtctcctaaagtgactggaacagcttctaaaaagaaacaaattacaccctctcaatgcaaggaacggaatttacaagatcctgtgccaaaggaatcaccaaaatcttgtttttttgatagccgatcaaagtctttaccatcacctcatccagttcgctattttgataactcaagtttaggcctttgtccagaggtgcaaaatgcaggagcagagagtgtggattctcagccaggtccttggcacgcctcctcaggcaaggatgtgcctgagtgcaaaactcagtagactcctctttgtcacttctctggagatccagcattccttatttggaaatgactttgtttatgtgtctatccctggtaatgatgttgtagtgcagcttaatttcaattcagtctttactttgccactagagttgaaagataagggaacaggaaatgaatgcattgtggtaatttagaatggtgatagcaataccttcttcttgcatatggtaatacttttaaaagttgaattgttttatttatttgtatattttgtaaagaataaagttattgaaagaaatgtaaagttatctacatgacttagcatattccaaagcataatacatacattaatataaaacatcattttattaacaaaattgtaaatgtttttaataccttacacattcaataaatgtttagtagttctgaaaaaaaaaaaaaaaaaaaaaaaaa

SEQ ID NO: 5364 - DNA, 3366 bp, Homo sapiens
  misc_feature (44)..(44): n is a, c, g, or t
aacaggataacttagtaccagcagtttttaaccttgacgtgagnctaaaacgtgaccgtagctgtttttaagttattgctctcatgagatgatggctgtatttatctgtttatttatacctatttatgtatttatttattgaagtgtgaaattgagcaataggcaggcaccaccgtccccagagcaggtcagcgtctcgagaggcccctggacaattgaggatgcccatcccctcccctttccctgatcttttactgaggggctgtgtgcgcgatccttgcaaattgatgatgttgccatccgtacccaggctgtgtctcataaaagtcggcctggtgccagagaggacctcctttctcccacagaatcccagatcctcaggaaaagccaaaaccgaggcccattgcccggattcgacacaaaagagggtccctgctctgttgcccgagagcagtctgcatcctgggaccagaatgctttcctggaaaaagaagcctttcaggtttccctgggccagcatcttctgatggaaggtgggagccaacacccttctgatggaaggtgggagccaacacccttctgatggaaggtgggagccaacacccttctgatggaaggtgggagccaacacccttctgatggaaggtgggagccaacacccttctgatggaaggcgggattcccgcttctgaaactccccctggagtctcactcccacacatgcccatagctagcattcaacagagaactctgtcttaagcttcaactgtgaaaatgatgacgggcttgtagcacctcagcttctttcctcgcccccttttatctgaatcctatcaattattctgatgctgggacaggtgagaagaaactgtgaagtatatgagcctttgaaagttccctgaagtttctcagttcaggaacattctcattgtatgtggtctccgctgtttgaacagccttctagctaaaaaattccaaagcctttatttgggagtcttagcttgcaagcttgtggaaggatttagcttaacaactgtcactcctgaaaagcaatctctgttccatcaaggttctagttgctggccctgtgtcctcaaagttcattacatcttatcaaggcctgtttgcaaaggggagatcccttttcttaaaaaaggctcaacccaaaagaaaccatttcttaaaaaattttacatagatcagttgtatttctatttagcaaaaatgagtgctctgcttttatttgggaatttcgatgaaaaagcgttcagagtagataatgttcatttatcaaaaatctggtttgggaaataccaaagaggctttgattgaattcccttttgacccgtgtgtaacttcctctggtagttggaccccaggcagctccgaatttgtgaacctgcttcctgatgaattctcccttgttcccccttggctctgccattatttcgttttcagtgtaatttgccaagccgcagttttctgtgctggctgtgcctctagtcgcagctctgtgactgattccctcccgggtgctgagtcccctccccggccaccatcctgcgtgaatatcctgaaattcatgggcttcctcgggggcccgcccgcaggtggtgctgggtgggttccgccaccttctcctggaaggtgagccttttcctggccaagggcagctgccttaacctctgagagtctgcgcttggccttagtcctggagacccagcctccagggactgaaccgtgctgctgttgggagccaagaccggccctttggagccggcagcccaggggtccctgctggatcatcagaaatagaagcacccgaagacggttagtggcaattccttgacccggtttgcttccaaatgaaggccatttgtccaccaggcattgaaaagacatgacttacccagtccggcatcggacttgaaaaatcgaaattgacatcactcagctgttacatttcacatccgattcagcccccttttatttccatgtgcttttcgcagccttcctgtgttggatgaaagagaataagaattcagctgacaggaggcctctatcctgtccctccaccccaccctccacctcaatcccctcccatcttccccagacctacctcacctactaggacctgaggcagctccttagcagagacccctggggtttagctgactctgggggtcaggggttcctgtccccaaacttcgcaagacagccctgaagtcacaagtgctttcttttaagtggcattggcaattggcgtgtaatgatggcagtagaatctgaatctcggatcccaggcagggttcacatttccaaacctttttgatttcccctgacctctaatggctggatcctatttttctacaacctttcagtgacatcgttcaggtttctttcttggccatttaaaaaaacaaattttttttttctcacttgtaagtcaccgccagtacctaagttaggctaacggagactttgacaggactggatttttcttccaccagaagagaagccttttccgttggtttggggccacctctttgaccatgaccatgtgatgttccgtttacagtgacttgctttgggggaggggaggctctcttaaccgattcccatgttgtacagtagatggttagaccttttgtatattagtgtgttttaagttattgatttgttttatataaaataatttatttttcaggtgccatttttcattttaactttgtttttacatgggtttgttttcaataaagtctgacactggtgtccaaaagtcaacaataaaatgaatcccattgtgttcttttgaagatgcctatgtaacttttaagctttttaaattattttcagaaaaaaaaaaagaaaagcccttatcagttttccatcagcccatggcctttttatttttttttttaaatcctggggaataaatggtgtcttaagaggtttagggggggaaaaggcaaacctagatttggataacccagaagacttcagattaataaagaagttgggaagaagacccttttcaaatttagggaagtgggctattcgggcagggtttctcaagagatggactctgggcccttttcagagttcatggagttcccctcggctcttcctgtcgggggctggcaccgctctctaccctgtgctcccggggccctttctccgttccagtccaaatggtttgagcgcgggcgggggggtcacccaacaggcgcaacagttccagacggcggaacgggtgacaacgacggaatgtggaaaggcgcgctcaaaacaaagtgcgcccacgacatatggcgaagatatacaacagatgtacagcattctccctcctctcccccccggggggct

SEQ ID NO: 5365 - DNA, 2566 bp, Homo sapiens
ttgtgccgccgcgcttttgtgtctgccgtcccggttttttcgcggctgtgtgtggttgttcgcttgttcgctcttctgttgttttctcgctgtgtgttttttgtgtggttttcttggccgttggttcctgcctctttgtttggtctcttttctctgttgtcctgtggtttgtctttcctcttcgtgctttttgtgtctcttcttgtgtgttgtggtcttcttgggtcctcttgtctttttttttttctctctcttttgtcgtccctcttgtgttggtgttttgttgccgctctcttttttttgtttttttttttttttttttgttgctgttctcttttttttttctttgtttttttttttttttttttttttttgttataaccacgcccaactggcttgttttattggagaaggggacgcagaataaacaacgtgagacagctgggacctgaggctggaagaaccccctcccctccccataacatgcccactgccccaaataaaaaaaaaaccaactatgggagagcagccgagacagcaactaggggcaggggaaagagacatggaactcgagggcagcggtgaagagaccatgcgtgtgctgggagggcccagaggcagcggcggcacaaacagcgcaggtacgagtctctgtgtcttccccggggttatgtataaatatagagagatgaggccttctctcccctgctctcccttccgctccgtgctgctcgccgcggtcccagctcctctttccacatgagggcgaagggaaggggggatgaacaagtcatcaccgaattgcaatcagacccacatccatcagcttctggatcttctgtgctattacaggattctttaagtgttcgctgagtgcctgggggtccttctgcatctgttccaggataaggcgcatggctgggtcactcatgatctgctgcacctcagggtcggccatggctcgtcgcttcacatcttcggggctgtcgtgccggttgtactgcgccatcatacagcgctggtagccgtctgccgcctccttacagctggagtccaggtctagcgccttctggtacacatccatggctttggtgtagtccttcatcgcttccagcgcagcggctttccgtgtataacccttgatgaaggtcggctccagctggatacattcctcacagtccttgagtgccagctggaactccaggagtttggtgtagcaggcagctcgattgctgtataatttggcatctttcgggttccttttgatggcttctgtataatgcttcatggcctggggatagtcccctttctgaaaacactcgttgcctttgttcttctcctccaaagccaggtcggggtttatgtaggccagccgctcttgctccttcaggattttctctgcctgctggcatttcttgagcacatctggggttcggtgctctgccagagacttgttatagaaatggatggcatccttgtacttttcttctttgaagtaggagttgccaattcgagcatatgctttggcaatctgtcgatagtcttctcggttttctctccccacttcaatggccttctcacaaagctcccggcacttattgtagtcgcccttttcaaagtataccgctgcttgattggtaatgtaagtcatgttagtggggtccagctccttggctttgtcgtaatgcttcaaggctgtgtcaaagtctttcttcttgtaggcatcgttccccagctctttttctttcagtgcctgcttcttattctctggaagatcttcttccattggctctggcttggtctcctttttgggagggggtggtggtggaggtgttgcaatctcttcctcctcatccatactgcccagatcgaccccaaggaggacgctgagagtggtcatgatccggggatcttgtagtttcgtgcccaggtcagaaggcttgtttcgtagctgctctatcagctcccggtaggtaggatcactgagtagtgtccttgtcctgggatcactctccaacttctgatacagattaggcatgttgaaagggttcatgaattttctctctgccaacctggcctccatattctgtaaaccctctttcagttgagggttatttgcctcgtgttttaagccctcctcataggttcgcttggcttcttcaaagcggtttaagaactctagagctgctgcttttcgtgaatagcccttgccccagtcaggctttaggtcgacagtcttgcagccatcctcataagccttctggtagtctcctttcttggcataggcagcagaacggttgctgtacagcacgtggttgtggggatccagcttaatagcttcggagtagcactgtaaggcatcatcgatgttacccacgctcagggccttgttgcctttctccttcagctcattgacctgctccatagcgcagcgcggtccggaaccccgttgaatcgaatccgtccgctccgcgttcccaaccgcacgcgccgccttctggaacctactagaagctactgggaccccggctcccgccccttcctcgccctcgtgccgaattcgcca

SEQ ID NO: 5366 - DNA, 2620 bp, Homo sapiens
  misc_feature (76)..(93): n is a, c, g, or t
  misc_feature (236)..(252): n is a, c, g, or t
  misc_feature (2580)..(2580): n is a, c, g, or t
ggagagttctccttagataagatttcaatatgttaatcatgtgtagaaagaaaattaaaaaggaggaatatgaagnnnnnnnnnnnnnnnnnnattattagttctgccactggtaggcattagaagcaagaaaagggagacggaccgaggaagccactttgaaccagagcttgtagaaaccactttaatcatatccaggagtttgcaagaaacaggtgcttaacactaattcaccnnnnnnnnnnnnnnnnngggctgtgaccggaactgtgggctcatcgctggggctgtcattggtgctgtcctggctgtgtttggaggtattctaatgccagttggagacctgcttatccagaagacaattaaaaagcaagttgtcctcggagaaggtacaattgcttttaaaaattgggttaaaacaggcacagaagtttacagacagttttggatctttgatgtgcaaaatccacaggaagtgatgatgaacagcagcaacattcaagttaagcaaagaggtccttatacgtacagagttcgttttctagccaaggaaaatgtaacccaggacgctgaggacaacacagtctctttcctgcagcccaatggtgccatcttcgaaccttcactatcagttggaacagaggctgacaacttcacagttctcaatctggctgtggcagctgcatcccatatctatcaaaatcaatttgttcaaatgatcctcaattcacttattaacaagtcaaaatcttctatgttccaagtcagaactttgagagaactgttatggggctatagggatccatttttgagtttggttccgtaccctgttactaccacagtttggtctgtttatccttacaacaatactgcagatggagtttataaagttttcaatggaaaagataacataagtaaagttgccataatccgacacatataaaggtaaaaggaatctgtcctattgggaaagtcactgcgacatgattaatggtacagatgcagcctcatttccaccttttgttgagaaaagccaggtattgcagttcttttcttctgatatttgcaggtcaatctatgctgtatttgaatccgacgttaatctgaaaggaatccctgtgtatagatttgttcttccatccaaggcctttgcctctccagttgaaaacccagacaactattgtttctgcacagaaaaaattatctcaaaaaattgtacatcatatggtgtgctagacatcagcaaatgcaaagaagggagacctgtgtacatttcacttcctcattttctgtatgcaagtcttgatgtttaagaacctattgatggattaaacccaaatgaagaagaacataggacatacttggatattgaacctataactggattcactttacaatttgcaaaacggctgcaggtcaacctattggtcaagccatcagaaaaaattcaagtattaaagaatctgaagaggaactatattgtgcctattctttggcttaatgagactgggaccattggtgatgagaaggcaaacatgttcagaagtcaagtaactggaaaaataaacctccttggcctgatagaaatgatcttactcagtgttggtgtggtgatgtttgttgcttttatgatttcatattgtgcatgcagatcgaaaacaataaaataaacctggctcaagcacaaaccaatttgtgttgttctgattcaataattggtttctgggtggccaattcagaagaagagtgtacatgctcaacaaatcctaggccctgcattcctgtcatcctcatccgggggaaacaccatcatcccagtagctgccctattcaactgcaacagtctccaggaccatcagtatactgcatttcatgtgcaccaaatattttgaaagacatttataaataattggcttatgactcatatttctctatgaataccttcatacagcaggtataactcttttctttatgggcttaaatattttgtcactgatcctgcaaatggacatcattttagcacactagcggtttatattttaaggaccttcattctctgttctgcacctcttctggaaattgagtaaattttgcttttttttttttactcagttgcaacttacgcttggcatcttcagaatgcttttctagcattaagagatgtaaatgataaaggaattattgtatgaaatattacaaagcgtagactatgcattgttattcattataatattttttgctgtcataatcgcctcataaagacaggtttcaaccattaaaatatgttcttccttaaaaaaaaaaaaaaaaaaaagttcctcgttgtgtcataaaaatgtttatcctaatttttctctctgaagtatatttttatcctgaatccccatttcctttataaaatcccataggcccctggctggaaaaattgcctttccaaattttcctacccccttttgttcctaaggcctaaatttttttaagcctaaattggaatggaaagaaccaacaaagaacacctttggggtttccccccccttttacccgccaagtaaagggaacaaatttggcaaaagaggggtnttttccccctttttttcccccaaaaggggagagaaaaccc

SEQ ID NO: 5367 - DNA, 1068 bp, Homo sapiens
ctcgagagaaggttccctgtgacgcgaccttgtgggacgtgattgccctttctgtgcccacccaccccctcggcagttctgtggggcaggactttggcctatacaaaggatgggggttgtggctgtggagcggaagtgggtctcaaccactatagatgatgatctgtgcccgtccggagctggtgaggacagcctgccagagtctggtctctggacactatgggcacacgactcctcccagctctgtttcttgtcctcctggtattgggatttgaggtccaggggacccaacagccccagcaagatgagatgcctagcccgaccttcctcacccaggtgaaggaatctctctccagttactgggagtcagcaaagacagccgcccagaacctgtacgagaagacatacctgcccgctgtagatgagaaactcagggacttgtacagcaaaagcacagcagccatgagcacttacacaggcatttttactgaccaagttctttctgtgctgaagggagaggagtaacagccagaccccccatcagtggacaaggggagagtcccctactcccctgatcccccaggttcagactgagctcccccttcccagtagctcttgcatcctcctcccaactctagcctgaattcttttcaataaaaaatacaattcaagttgcttctcatggatggcactgcttttctgaggactcaagggccaagatggaggggctgactcagtccagccaacatttaatgagcacctactttatgtatggagctctaacccatgggtccatgggaataaagcagtgaatagtaacaataaataatcgtaacaacaaaaaaaaaaaaaaaaaaaaaaaaaaaaaattgggccgcgtcatgggactcttgaaagaaggtttttgaaacccatgtcgttagggcacgggcgccccaagtgagtgtaatacgacacggtgccacgacggcggttccccagaggaaactcgtgcccagaacaaggccgtgcgattttccccaatataaaagcgccgggggaaacccggcgtgtttggaactacccgcg

SEQ ID NO: 5368 - DNA, 6726 bp, Homo sapiens
  misc_feature (2871)..(2884): n is a, c, g, or t
  misc_feature (6350)..(6374): n is a, c, g, or t
gagtgtggctgcagtgcgccgggacaccagggctccgcgctccgcactcaagaggctcccgcgtcccaacccctcgcgcccgcgcgttcgcggatccaggccgaggaccgaaaggggccgcccgagcccccggggccggcgcccagagagcccagcaaggccggccgccctgccggtgtgccgccggcgggtgcttctggaagggccaatgcgttcgggcagcagccctgaagccgagcccgaggctaagtgggactgaccggggcccagagtggacgaaccgccagcatggggagagaccagcgcgcggtggccggccctgccctacggcggtggctgctgctggggacagtgaccgtggggttcctcgcccagagcgtcttggcgggtgtgaagaagtttgatgtgccgtgtggaggaagagattgcagtgggggctgccagtgctaccctgagaaaggtggacgtggtcagcctgggccagtgggcccccaggggtacaatgggccaccaggattacaaggattccccgggctgcagggacgtaaaggagacaagggtgaaaggggagcccccggagtaacaggacccaagggcgacgtgggagcaagaggcgtttctggattccctggtgccgatggaattcctggacacccggggcaaggtgggcccaggggaaggccgggctacgatggctgcaacggaacccagggagactcaggtccacaggggccccccggctctgaggggttcaccgggcctcccgggccccaaggaccaaaagggcagaaaggtgagccttatgcactgcctaaagaggagcgcgacagatatcggggtgaacctggagagcctggattggtcggtttccagggacctcccggccgccctgggcatgtgggacagatgggtccagttggagctccagggagaccaggaccacctggaccccctggaccaaaaggacagcaaggcaacagaggacttggtttctacggagttaagggtgaaaagggtgacgtagggcagccgggacccaacgggattccatcagacaccctccaccccatcatcgcgcccacaggagtcaccttccacccagatcagtacaagggtgaaaaaggcagtgagggggaaccaggaataagaggcatttccttgaagggagaagaaggaatcatgggctttcctggacttaggggttaccctggcttgagtggtgaaaaaggatcaccaggacagaagggaagccgaggcctggatggctatcaagggcctgatggaccccggggacctaagggagaagccggagacccagggccccctggactacctgcctactcccctcacccttccctagcaaaaggtgccagaggtgacccaggattcccaggggcccaaggggagccaggaagccagggtgagccaggagacccgggcctcccaggtccccctggcctctccattggagatggagatcagaggagaggcctgccgggtgagatgggacccaagggcttcatcggagaccccggcatccctgcgctctacgggggcccacctggacctgatggaaagcgagggcctccaggaccccccgggctccctggaccacctggacctgatggcttcctgtttgggctgaaaggagcaaaaggaagagcaggcttccctgggcttcccggctcccctggagcccccggaccaaaggggtggaaaggtgacgctggggaatgcagatgtacagaaggcgacgaagctatcaaaggtcttccaggactgccaggacccaagggcttcgcaggcatcaacggggagccggggaggaaaggggacaaaggagaccccggccaacacggcctccctgggttcccagggctcaagggagtgcctggcaacattggtgctcccggacccaaaggagcaaaaggagattccagaacaatcacaaccaaaggtgagcggggacagcccggcgtcccaggtgtgcccgggatgaaaggtgacgatggcagcccaggccgcgatgggctcgatggattccccggcctcccaggccctcccggtgatggcatcaagggccctccaggggacccaggttatccaggaatacctggaacgaagggtactccaggagaaatgggccccccaggactgggccttcccggcctcaaaggccaacgtggtttccctggagacgccggcttacctggaccaccaggcttcctgggccctcctggccccgcagggaccccaggacaaatagattgtgacacagatgtgaaaagggccgttggaggtgacagacaggaggccatccagccaggttgcataggagggcccaagggattgccaggcctgccaggacccccaggccccacaggtgccaaaggcctccgaggaatcccaggcttcgcaggagctgatggaggaccagggcccaggggcttgccaggagacgcaggtcgtgaagggttcccaggacccccagggttcataggaccccgaggatccaaaggtgcagtgggcctccctggcccagatggatccccaggtcccatcggcctgccagggccagatgggccccctggggaaaggggcctccctggagaagtcctgggagctcagcccgggccacggggagatgctggtgtgcctggacagcctgggcttaaaggccttcccggagacagaggcccccctggattcagaggaagccaagggatgcctgggatgccagggctgaagggccagccaggcctcccaggaccttccggccagccaggcctgtatgggcctccaggactgcatggattcccaggagctcctggccaagaggggcccttggggctgccaggaatcccaggccgnnnnnnnnnnnnnngtgatagaggggaccctggggacacaggcgctcctggccctgtgggcatgaaaggtctctctggtgacagaggagatgctggcttcacaggggagcaaggccatccaggaagccctggatttaaaggaattgatggaatgcctgggacccccgggctaaaaggagatagaggctcacctgggatggatggtttccaaggcatgcctggactcaaagggagacccgggtttccagggagcaaaggcgaggctggatttttcggaatacccggtctgaagggtctggctggtgagccaggttttaaaggcagccgaggggaccctgggcccccaggaccacctcctgtcatcctgccaggaatgaaagacattaaaggagagaaaggagatgaagggcctatggggctgaaaggatacctgggcgcaaaaggtatccaaggaatgccaggcatcccagggctgtcaggaatccctgggctgcctgggaggcccggccacatcaaaggagtcaagggagacatcggagtccccggcatccccggtttgccaggattccctggggtggctggcccccctggaattacgggattcccaggattcataggaagccggggtgacaaaggtgccccagggagagcaggcctgtatggcgagattggcgcgactggtgatttcggtgacatcggggacactataaatttaccaggaagaccaggcctgaagggggagcggggcaccactggaataccaggtctgaagggattctttggagagaagggaacagaaggtgacatcggcttccctgggataacaggcgtgactggagtccaaggccctcctggacttaaaggacaaacaggctttccagggctgactgggcctccagggtcgcagggagagctggggcggattggactgcctggtggcaaaggagatgatggctggccgggagctccgggcttaccaggttttccgggactccgtgggatccgcggcttacacggcttgccaggcaccaagggctttccaggatccccaggttctgacatccacggagacccaggcttcccaggccctcctggggaaagaggtgacccaggagaggccaacacccttccaggccctgtgggagtcccaggacagaaaggagaccaaggagctccaggggaacgaggcccacctgggagcccaggacttcaggggttcccaggcatcacacccccttccaacatctctggggcacctggtgacaaaggggcgccagggatatttggcctgaaaggttatcggggcccaccagggccaccaggttctgctgctcttcctggaagcaaaggtgacacagggaacccaggagctccaggaaccccagggaccaaaggatgggccggggactccgggccccagggcaggcctggtgtgtttggtctcccaggagaaaaagggcccaggggtgaacaaggcttcatggggaacactggacccaccggggcggtgggcgacagaggccccaagggacccaagggagacccaggattccctggtgcccccgggactgtgggagcccccgggattgcaggaatcccccagaagattgccgtccaaccagggacagtgggtccccaggggaggcgaggcccccctggggcaccgggggagatggggccccagggcccccccggagaaccaggttttcgtggggctccagggaaagctgggccccaaggaagaggtggtgtgtctgctgttcccggcttccggggagatgaaggacccataggccaccaggggccgattggccaagaaggtgcaccaggccgtccagggagcccgggcctgccgggtatgccaggccgcagcgtcagcatcggctacctcctggtgaagcacagccagacggaccaggagcccatgtgcccggtgggcatgaacaaactctggagtggatacagcctgctgtacttcgagggccaggagaaggcgcacaaccaggacctggggctggcgggctcctgcctggcgcggttcagcaccatgcccttcctgtactgcaaccctggtgatgtctgctactatgccagccggaacgacaagtcctactggctctctaccactgcgccgctgcccatgatgcccgtggccgaggacgagatcaagccctacatcagccgctgttctgtgtgtgaggccccggccatcgccatcgcggtccacagtcaggatgtctccatcccacactgcccagctgggtggcggagtttgtggatcggatattccttcctcatgcacacggcggcgggagacgaaggcggtggccaatcactggtgtcaccgggcagctgtctagaggacttccgcgccacaccattcatcgaatgcaatggaggccgcggcacctgccactactacgccaacaagtacagcttctggctgaccaccatttcccgagcagagcttccagggctcgccctccgccgacacgctcaaggccggcctcatccgcacacacatcagccgctgccaggtgtgcatgaagaacctgtgagccggcgcgtgccaggaagggccattttggtgcttattcttaacttattacctcaggtgccaacccaaaaattggttttatttttttcttaaaaaaaaaaaagtctaccaaaggaatttgcatccagcagcagcacttagacctgccagccactgtcaccgagcgggtgcaagcactcggggtccctggagggcaagccctgcccacagaaagccaggagcagccctggcccccatcagccctgctagacgcaccgcctgaaggcacagctaaccacttcgcacacacccatgtaaccactgcactttccaatgccacagacaactcacattgttcaactcccttctcggggtgggacagacgagacaacagcacacaggcagccagccgtggccagaggctcgaggggctcaggggctcaggcacccgtccccacacgagggccccgtgggtgggcctggccctgctttctacgccaatgttatgccagctccatgttctcccaaataccgttgatgtgaattattttaaaggcaaaaccgtgctctttattttaaaaaacactgataatcacactgcggtaggtcattcttttgccacatccctatagaccactgggtttggcaaaactcaggcagaagtggagacctttctagacatcattgtcagccttgctacttgaaggtacaccccatagggtcggaggtgctgtccccactgccccacgttgtccctgagatttaacccctccactgctgggggtgagctgtactcttctgactgccccctcctgtgtaacgactacaaaataaaacttggttctgaatatttttaaaaaaaaaaaaaaaaaaaaaaaaaaaaaaaaaagaaaaaaagaaaaaaaagttgtgtggggcggcgcgctgtgggccctctgggaaannnnnnnnnnnnnnnnnnnnnnnnnggttggggggcggcgggggcccccagagtgagggtcaagaggtgaacatgtggggccgaaatgagcggtggtccccagagaggagagacactcgggggccagaggacaatagaggcgcgcggggggttctctccacaccaagtaataaaaaaaaggcgcgccgcggggggcgaaaaaaccgcgagagcgcgggttctctcgagaacaaaatccccccaagaaaggggagagctcttccaagagaggggcacaacaaaagcgggggctctcttctataagcgcgagggggcgctccaagggagagaccccgggagagttactaaaagatagcgcccggggcgcgggggggtga

SEQ ID NO: 5369 - DNA, 2735 bp, Homo sapiens
  misc_feature (2587)..(2601): n is a, c, g, or t
  misc_feature (2609)..(2735): n is a, c, g, or t
ctttaccattcttccatggaagaagacaaaattcatctgagtgtagaaactaactatgctatggctcaggcccctctgggtatttctcctcaggaactgctcacctgtggggagagtgacttgtggtctgcttacccaaaataattcaatactcaaggctgggtggactctacagggcaatggtgtgactgaccagctctttcattgaagacatagaaagtacaagcagacccttctggcaggagctctaacatcaggcttccaatctagatttcatcagtaataaacattttggtttctatctcaggactcccaaatcgttcaattggacttgaactcagaagggaaactggatgttacttattgaactccaggtacacattatgtttcattaaaaaatatctatacaattatgacatcaagtagatgtcattggctactagaattatgtgggaaaacccttgtttgagtaagaggacttactatgtaaatatttttgaaaaagtggagttctggccgggcgcagtggctcatgcctataatcccagcactttgggaggccgaggtgggtagattacctgaggtcaggagttcgagaccagcctgactaacacggtgaaaccctgtctctaattaaaaaaaaaaaaaaatttgctaggcatggtggtacatgcctgtaatcccagctatttgggaggctgaggcagcagaatcacctgaacccaggaggtggaggctgcagtgagccgagatcatgccactgcactccagcctggactacaagagtgaaagcccgttctcaaaaaaaaaaaaaaaaaaaaaaaagtcctttcttcagtgaactctcatagggagggccaacagataaagtcagtaagagtgacactaacctggttaaggaagtgtgtggtttctcagagcacaccctgttctcatgctcctcccactcactgcccaatctttcctctccttcacttccaggctatctttagagaacttcagaatacaataatgaaaaccatgtctttgatcattaaacaccaaaaagtaactctcctactctccgtcagcctgagccagggcaccaccacttgacctgggacagtgaatcgacaatgccgtcttctgtctcgtggggcatcctcctgctggcagcctgtgctgcctggtccctgtctccctggctgaggatccccagggagatgctgcccagaagacagatacatcccaccatgatcaggatcacccaaccttcaacaagatcacccccaacctggctgagttcgccttcagcctataccgccagctggcacaccagtccaacagcaccaatatcttcttctccccagtgagcatcgctacagcctttgcaatgctctccctgggggaccaaggctgacactcacgatgaaatcctgggagggcctgaatttcaacctcacggagatttccggaggcttcagatccatgaaggcttccaggaactcctccgtaccctcaaccagccagacagccagctccagctgaccaccggcaatggcctgttcctcagcgagggcctgaagctagtggataagtttttggaggatgttaaaaagttgtaccactcagaagccttcactgtcaacttcggggacaccgaagaggccaagaaacagatcaacgattacgtggagaagggtactcaagggaaaattgtggatttggtcaaggagcttgacagagacacagtttttgctctggtgaattacatcttctttaaaggcaaatgggagagaccctttgaagtcaaggacaccgaggaagaggacttccacgtggaccaggtcgaccaccgtgaaggtgcctatgatgaagcgtttaggcatgtttaacatccagcactgtaagaagctgtccagctgggtgctgctgatgaaatacctgggcaatgccaccgccatcttcttcctgcctgatgaggggaaactacagcacctggaaaatgaactcacccacgatatcatcaccaagttcctggaaaatgaagacagaaggtctgccagcttacatttacccaaactgtccattactgggaacctatggatctgaagagcgtccctgggttcaactgggcatcactaaggtcttcagcaatggggctgacctctccggggtcacagaggaggcacccctgaagctctccaaggccgtgcataaggctgtgctgaccatcgacgagaaagggactgaagctgctggggccatgtttttagaggccatacccatgtctatcccccccgaggtcaagttcaacaaaccctttgtcttcttaatgattgaacaaaataccaagtctcccctcttcatgggaaaagtggtgaatcccacccaaaaataactgcctctcgctcctcaacccctcccctccatccctggccccctccctggatgacattaaagaagggttgagctggaaaaaaaaaaaaaaaaaaaaaaaaaaaaaaaaaaaaaaaataaaaaaaaaaaaaaaaaaaagatctttaattaaaaaaaaaaaaaaaaaaaaaaaaaaaaaaaaaaaaataaaaaaaaaaaaaaaaaaaannnnnnnnnnnnnnntattggannnnnnnnnnnnnnnnnnnnnnnnnnnnnnnnnnnnnnnnnnnnnnnnnnnnnnnnnnnnnnnnnnnnnnnnnnnnnnnnnnnnnnnnnnnnnnnnnnnnnnnnnnnnnnnnnnnnnnnnnnnnnnn

SEQ ID NO: 5370 - DNA, 3960 bp, Homo sapiens
  misc_feature (384)..(398): n is a, c, g, or t
ctgttgctcagacggacctgcaggcattctccatgcagaacggtctgaatggacaagtggatgtctcacttgcttctgcagcctctgctgtggagagcctgaagccagcactccttgctggccagcctctagtgtatgtgccctctgcctcactgttcatgctgtatggaagtctgcaggagggaccagcgtcagggtcagggtcagagagggatgacagaagctcagaagccccagccacagtggagctgtcatctgcaccctcagctcagaagcgcctctgtgaggagaggaaacctcaggaggaggatgagccagccactaaaaggcaaagtagggaatatgaagacggcccgctgtcgcttgtcatgcccaagaaacccnnnnnnnnnnnnnnncttgcctctcccaagactatgggtaacagggcatctatacccctcaaagacattcatgtgaatggccaactccctgctgcagaagagatttcaggaaaggcaacagcaaactctcttgtttcttctgagtggggaaatccttcaagaaatacagatgttgaaaagccttcaaaagaaaatgaaagcaccaaagagccttctttgctacaatatctttgtgtgcagtctcctgcaggattaaatggtttcaatgtacttttatctggcagtcaaaccccccctactgtgggcccgtcctcaggtcagctgccgtctttcagtgtcccttgcatggtcttaccatctccacctctgggcccttttcctgttctctattctcctgcaatgccgggcccggtttcttctactcttggatcaatagcccagcttctcgtcggccccacagctgtggttaatccaaagtcgtccacactcccttctgcagaccctcagcttcagagtcagccctcactaaacctaagtccagtgatgtcaaggtcacacagtgtcgtccaacaacctgagtcccccgtttacgtgggacatccagtctcagtagtaaaattacatcagtcaccagttccagtgacccccaagagcatccaacgcacacatcgtgagacgtttttcaagacacccggcagccttggagaccctgtcctgaagagaagagaaaggaaccagtcacgaaacaccagctcggcccagaggagactagaaatccccagcggcggcgctgactaacctgccgctttgccaggtgggggtgggatcaaacgccctgagagtcccggatgtccgaggcgggatgcaaaccatcccgtcctgagcacgggtccttcctctctctttcatccacacttctgttaacttcccaccaccatcaatcatctgatttcctgaaagtaattaattgtgcatttaataccagttagagttccgactctgcatggtgtcacagtgaaagcgccgactgacttatggttttgattcaagaatcgtcttattgctggaagtagatctgaataggataccggagccttgtttttctaaaggggggcgctgtctagcacttaactagggtaagcattcttaacatgtatttccacttgccctgagtaaatctgtggtgagagaagcttcctttctgcagtttaaaaaagctactgcttccttaggcttcatcaggaagccatcttcagttgtgaatcctatggtgttatttattttgttcctgaaatgggatttagtgcaaaaagtttacaactacagtctttaacacatttttttcagggtatgacgacttgaatgtttatacttttattctataatttgccctgcacttattttacaacctagtaataatgtggataaatgtatctacatgacacatgtcaagaccaaaataactgtgaatgacacaccttgctgtaaatgaactgtgctaaccctgactgtgggcttgagaacaaagatgaactctagaactctagcagcctaactgctgcttctcaaataactgtgtgaacagtgagatattactgtttgtttctaaaaatcctactgtgcccagtttccttcactacatgccctgcattttttatttaaatatttagctgtagcgccatcagatatggatgccttctaacaattgctgtttgtaaaataaatcaggatggtagaaagtgattatatggaaaattggaacctggatgagaccttttcgttgaattctgaagagtaatgatgtgaaaattgatacagggcaagagatgattcttttgtttttcttctacttcatgtccagaagagtaagagggaaaatggacatatgtttcatatccaagggtattcaaactgtagttagttggtacctctgaaaaatgagaatggtgagcgcacgggttggttgttctagcatgaatacaattctggaaactgttatgcaatttcccttttttaacccacattactttaggggtgcattaagtcgccaaactatactagttctttgtattcctagacttgctgatatttacctctctcttgtctcttcagagtaaatggttcccttctttccttcctactttccttcattctctcttccttccctccttcctacttcttttcttccttcctcttcctctcttaaaactatcttagatgtagaatcctggtgtagggttttattttatttttattttttgacccaataaaatgttatatgaaagaatgaaaatattaatttaagagactctgggagtctgaataaagtagctttatattaactacaggataatattagccttattacccccacaagattttttaaaacttgaggtaggtagctacattaaataaatttgctacttatataaaaatttttatcaacactaaacttttaaagtttacaagttttttttttcttttttacagtcttctatagagttaggttaaaatgtggttctaaccatcaacaattgcatggttaaatgaccctgaactaaaactgatgggttccctatcaaaacaaataaaaatatacctttttcaggtttcaatctgtgcagggtatatgcatgttaattctaccatgcttaagaacttccacaaaatatttcatggagaggtctgcatttagacggaaacagaaattgcttttcccctcactgttcctgaatgctctatacttgttttaacatttttgctatctttttttattattctgatcatgatatgaccatttaacctcagaattcataattcctgaggggtgttaagaagcagtcccattggtgaggatattatgacttggtgaccattcttaggagtagaaaaccaaggacaattgcttctgtattcagtatccacttcttaatgtggctttatatgtaaaaataataatgcagtggttgtttctgtcaggaaaataaatcttacagaacaactggtggaattgaagctgctgcgctagacttggatattttgggtagtgaagaagcaatggcaatcttgagtctattattgtataatttagtaaaagaaaaaaataatcgttggtggtcctactaagagaatgcagcttttttgagttgtcacagaggctgtgtgtgccctacactgaccagggtttgtaaaaccctttcattctggtacaagagtcgggggtataacttttatacttgaatctacctaccaagtttacatttctcaattcctttttgtaaggtgctatttctgtatttaaataactttcttttaacgtaaagctgctttctgcttatcttattgcactgctagttgtatgtaggtattaattttattgctgcttactgcttttgttttcttattatttagctctgctctttttcctaatggctatattatctatagctatttacttgtaactgtactacatgtaaactgattttttgttctgattttttttctaatatttttaggaaaatattaagctttataaaatagcaataaaaaataattcatttaagaagaaaaaaaaaaa

SEQ ID NO: 5371 - DNA, 1672 bp, Homo sapiens
  misc_feature (253)..(253): n is a, c, g, or t
ctcttccacaaaacatgcagttaaatatctgaggatattcagggacttggatttggtggcaggagatcaacataaaccaagacaaggaagaagtcaaagaaatgaatcaagtagattctctgggatataaccggccggccgaagagttcacaagtgtcctggaagccggcgggtgccgctgtgtaggaaagaagctaaagcacttaccagagcctgtccggagctcagaggttcggaagacttatcgaccatngagcgcgcgtcctgcttgttgctgctgctgctgccgctggtgcacgtctctgcgaccacgccagaaccttgtgagctggacgatgaagatttccgctgcgtctgcaacttctccgaacctcagcccgactggtccgaagccttccagtgtgtgtctgcagtagaggtggagatccatgccggcggtctcaacctagagccgtttctaaagcgcgtcgatgcggacgccgacccgcggcagtatgctgacacggtcaaggctctccgcgtgcggcggctcacagtgggagccgcacaggttcctgctcagctactggtaggcgccctgcgtgtgctagcgtactcccgcctcaaggaactgacgctcgaggacctaaagataaccggcaccatgcctccgctgcctctggaagccacaggacttgcactttccagcttgcgcctacgcaacgtgtcgtgggcgacagggcgttcttggctcgccgagctgcagcagtggctcaagccaggcctcaaggtactgagcattgcccaagcacactcgcctgccttttcctgcgaacaggttcgcgccttcccggcccttaccagcctagacctgtctgacaatcctggactgggcgaacgcggactgatggcggctctctgtccccacaagttcccggccatccagaatctagcgctgcgcaacacaggaatggagacgcccacaggcgtgtgcgccgcactggcggcggcaggtgtgcagccccacagcctagacctcagccacaactcgctgcgcgccaccgtaaaccctagcgctccgagatgcatgtggtccagcgccctgaactccctcaatctgtcgttcgctgggctggaacaggtgcctaaaggactgccagccaagctcagagtgctcgatctcagctgcaacagactgaacagggcgccgcagcctgacgagctgcccgaggtggataacctgacactggacgggaatcccttcctggtccctggaactgccctcccccacgagggctcaatgaactccggcgtggtcccagcctgtgcacgttcgaccctgtcggtgggggtgtcgggaaccctggtgctgctccaaggggcccggggctttgcctaagatccaagacagaataatgaatggactcaaactgccttggcttcaggggagtcccgtcaggacgttgaggacttttcgaccaattcaaccctttgccccacctttattaaaatcttaaacaacgaaaaaaaaaaaaaaaaaaacaaagagaagacagaaaacaaacaagaaaacacaaacacagagagagaagacaagaacaaaagagagaaacaagaagaaagagcgaagaggagagcaaacacgaacaagagggacggacggagcacggcgccgcggcagcgagaagaggcg

SEQ ID NO: 5372 - DNA, 1855 bp, Homo sapiens
  misc_feature (375)..(375): n is a, c, g, or t
tttgcctgcattcgtaactgaagagataagtaaatgtcagaggttaagataaatctttttttttttttacctgtccatatttacaaacattctgcgttccgtacatagacgcctggataagaacccctgtgcaagaatgactttggtgctactttaaaaaaagtggttggggaagacctcataggaaatgacatcaataatagattgcatgataacctatactagttcttactgttaccaatttaaattctaactgcttaaaagctaacacggtccttccctttttttgagcacctgatttgaagtactttgagtaggcctcaagtgtcgtatgcaagtactaatctagggggtgtgccctttttcaaaagtgantttttggagaagataggatgtagtattatagcaaggaaaattcagcatctgggatgatcatttccttctgattagagaaatttatcttgttaatattctgttcacccaacccttctaccctcagtgttgaccaatactggaaaaaatttagggctttggagtgaaattttaaaagttcaaaaccttgatctattaattagtttgcttaccttgaggaagttgcttatcttaatcttctatttgaacttcaagtacaaaaaccctactcacggacttaactgtgaccattaaatgagataaccaaaaggctgaagatgatagtgagttgattttaccttttttctacatacagatgtttcagttctttcattagtggttgaaggtctgcgttctttttctccctccactccctccttgactacccccagaatgagctttgatggtctctactgggcctttgggggggatacattatcctgttgtttttgttctgttacttatatataatactcatggatttatttctacttctcttccattttctaatttataataacatgtgcatcttgttttccctgccaaactaaatttcgtgagggggtacatactgcacagttttttttgtcacatactgcttatgacacatgaatatgcagagcttgtcaagctctttaattaagtttaaaatgctaattgagtgaatcaaaacttaaccattatggttaggctaaaaatgtcagcttgtgtttatatagtgcttacctcagtattggaaatgccatgagtttagtatcagaaggacattattactagtgcattttaaagtgataccagtcatagttgcaaaagaaagtacacaatgggaaatggaagagaaatgtagggaatcaaaacaactagttttttcctttataacggaagttttataattcatcttttatgtaagtgtaattctcattaaaaataccctaaagcttaaagtttgcaaggctgcccagcctaacccacaacagtttgatgctgccccctagcgtttgattcccttcaccttttgctaaaataaggtaatgtttaaattacaattagatttacttactgctgtaaatctggtctattttagtttcctctgggtagttagtgttgctaataagatggacgtaagtgtttttgaactggtgaattctgattgcttttagcccccagttttccaaataggggtgaattctgggtagagatagaacaatcaccaagttaccttgctccaaaaaagaaatttacgtatgggattgttttcaaagcgggaagttagctgtgtaaataacaacaattttatatatttaatctgggcttctccttatcttgaatgatataaaaatctactttctagattaatttagttccatataactttgtattgctttgactgtactgataataaagtttgaaagtgttaaatttaaaaaaaaaaaaaaaaaaaaaa

SEQ ID NO: 5373 - DNA, 2215 bp, Homo sapiens
agggggtcgcgcatgcggggctcactcggctggcagccggcgccgctgccactcccgggagcatgaaggaccgaacccaggagctccgcacggccaaggacagcgatgatgatgatgatgtcgctgtcaccgtggaccgagaccgcttcatggatgagttctttgagcaggtggaggagattcgaggcttcattgacaagatcgcagagaacgtggaggaggtgaagcggaagcacagtgccatcctggcatcccccaaccccgatgagaagacgaaggaggagctggaagaactcatgtccgacataaagaagacagcaaacaaagttcgttccaagttaaagagcatcgagcagtccatcgagcaagaggaaggcctgaaccgctcctccgctgacctgaggatccggaagacacagcactccacgctgtccagaaagtttgtggaggtcatgtcggagtacaacgccacgcagtccgactaccgcgagcgctgcaaaggccgcatccagaggcagctggagatcaccggcaggaccacgaccagtgaggagctggaggacatgctggagagtgggaaccccgccatctttgcctctgggatcatcatggactccagcatctcgaagcaggctctgagcgagattgagacgcggcacagtgagatcatcaagctggagaacagcatccgtgagctacacgacatgttcatggacatggccatgctcgtggagagccagggagagatgattgacaggatcgagtacaatgtggaacacgcggtagactatgtggagagggccgtgtctgacaccaagaaggccgtcaagtaccagagcaaggcgcgccggaagaaaatcatgatcatcatctgctgtgtgatcctgggcatcgtcatcgcctccactgttgggggcatcttcgcctagaagccacccaaactgccactccactccaggtgggccactccaaggaggccctggctgctgccacctggctgggctgccctcccaacccccgcctctggctcagagcaccctccctcccggcccccatgctcccttctctgccatgggccctccgtccccgccccgtgtcgtgtgcatgatctctgtgagtgtgcgtctgtacgggaagaggcagagggaggcagccagcggggcgtgatgcagtgtgcacagcgaggagcagacccaggcagggccgccagggtgacacaggccacgcttccttgccttcagtaactcggtgggcccaggttctgctcttccctggggaccctaacctcgcctccagctgacctgccctgtcctctccagctgtccccacaagcagagccctgaggggtggggaccagctggccacatggtgctgcttttcaggttaggggagaggtgaccctgagggacagcccagctctgagtctcagtcgctgatcactgccagggaggctcaggctgccatggctccaggctccctcccctgcctaggggcaaagtccatcgggtcctgggcctcagcttcccttcccacattcctccggccccaggagcaaccccttgggctaggtctgaccccaggtgtccctctggaaggggctggctggtgccctatttccagccaccccagcagctagggaggcaaagcaggctgcagtcagtccctcaagccagcgttgcatgtttgggatggtggctcctgttgtcttgcgctctgggaagtcagatgtcatttcaggcctgcagtctcatcctgcccttgccatcctcccatcgatgtgccacgtgggtgtcacgtgtcccagatgcagtattcggcagccagccggggagggctacctcctcctcctcaccaccttggggcttctcatgggaaatgtgcccccgccccaggaccctctcccttgtggacaggcagggagatgcatgcgagtgcatgcagcaggggatggggccgtgtccgtgtgccccaccctccctcggctttactcctgcccagtgactgtgaccactgtccgtgttgccttcttgaacagcgattccccccaaccccttcaccaaaggtcttggtacaaccagctgcccattttgtgaaatttttatgtagaataaacatttgtatctgtaaaaaaaaaaaaaaaaaagcgttcaaaaaaaaaaaaaaccaaaaaagaaggaaggaaaaaaaaaacaaaaacaaaaaaaaaacaatcaaa

SEQ ID NO: 5374 - DNA, 771 bp, Homo sapiens
agcggccgcccttttttttttttttttttagagtaaactattcttaaactcaaacaacccttccttcttttgtcactactatattccctgtgctttccagatgcaaggaaagtaaaatggcagggctgggcctgggacaaagggttctgggtgctagcagggtgtggcctggtctggcctgcggacagatggcttcctttttccctcccacacagacccaagcttctgtgtggaagcgtgaacctcagacacttagacgtctccagttccttcaggattgagcaagtcagggtggggagaggggggaagtggtaaagatctaagtctgtgtaggtcgtgtaccatctgtattcaaggagcatcttgggtaattaagcacctacccatgtccaaggccacgtagaggctttatagaattaaaatacctgctctcaaggagcttgaaatctgataacatgcataattaatgtaaagctagattaatttctcccaagaggcaaaggaaaaaggatggggttgatggatttatgtaagatttaaaaattcacccagaaaggactgtatgcatttttgctgtttggggacatactgtttgttaagaggaacatgtctgaccattgttttcttgaaccttgatggacaaagccaagtttggagagatgcgccatctagtatggattttggcaaaaaaccataaagctcaaagcagactcgctttgtctactgctgtagcaggactaaagcaaggcaatggtgcggagcaggtcgacc

SEQ ID NO: 5375 - DNA, 3842 bp, Homo sapiens
  misc_feature (1335)..(1351): n is a, c, g, or t
cattcataagactcagagctacggccacggcagggacacgcggaaccaagacttggaaacttgattgttgtggttcttcttgggggttatgaaatttcattaatcttttttttttccggggagaaagtttttggaaagattcttccagatatttcttcattttcttttggaggaccgacttactttttttggtcttctttattactcccctccccccgtgggacccgccggacgcgtggaggagaccgtagctgaagctgattctgtacagcgggacagcgctttctgcccctgggggagcaacccctccctcgcccctgggtcctacggagcctgcactttcaagaggtacagcggcatcctgtgggggcctgggcaccgcaggaagactgcacagaaactttgccattgttggaacgggacgttgctccttccccgagcttccccggacagcgtactttgaggactcgctcagctcaccggggactcccacggctcaccccggacttgcaccttacttccccaacccggccatagccttggcttcccggcgacctcagcgtggtcacaggggcccccctgtgcccagggaaatgtttcaggctttccccggagactacgactccggctcccggtgcagctcctcaccctctgccgagtctcaatatctgtcttcggtggactccttcggcagtccacccaccgccgcggcctcccaggagtgcgccggtctcggggaaatgcccggttccttcgtgcccacggtcaccgcgatcacaaccagccaggacctccagtggcttgtgcaacccaccctcatctcttccatggcccagtcccaggggcagccactggcctcccagcccccggtcgtcgacccctacgacatgccgggaaccagctactccacaccaggcatgagtggctacagcagtggcggagcgagtggcagtggtgggccttccaccagcggaactaccagtgggcctgggcctgcccgcccagcccgagcccggcctaggagaccccgagaggagacgctcaccccagaggaagaggagaagcgaagggtgcgccgggaacgaaataaactagcagcagctaaatgcaggaaccggcggagggagctgaccgaccgactccaggcggagacagatcagttggaggaagaaaaagcagagctggagtcggagatcgccgagctccaaaaggagaaggaacgtctggagtttgtgctggtggcccacaaaccgggctgcaagatcccctacgaagaggggcccgggccgggcccgctggcggaggtgagagatttgccgggctcagcaccggctnnnnnnnnnnnnnnnnnagctggctgctgccgcccccgccaccaccgcccctgcccttccagaccagccaagacgcaccccccaacctgtcggcttctctctttacacgcagtgaagttcaagtcctcggcgaccccttccccgttgttaacccttcgtacacttcttcgtttgtcctcacctgcccggaggtctccgcgttcgccggcgcccaacgcaccagcggcagtgaccagccttccgatcccctgaactcgccctccctcctcgctcggtgaactctttagacacacaaaacaaacaaacacatgggggagagagacttggaagaggaggaggaggaggagaaggaggagagagaggggaagagacaaagtgggtgtgtggcctccctggctcctccgtctgaccctctgcggccactgcgccactgccatcggacaggaggattccttgtgttttgtcctgcctcttgtttctgtgccccggcgaggccggagagctggtgactttggggacagggggtgggaaggggatggacacccccagctgactgttggctctctgacgtcaacccaagctctggggatgggtggggaggggggcgggtgacgcccaccttcgggcagtcctgtgtgaggatgaagggacgggggtgggaggtaggctgtggggtgggctggagtcctctccagagaggctcaacaaggaaaaatgccactccctacccaatgtctcccacacccaccctttttttggggtgcccaggttggtttcccctgcactcccgaccttagcttattgatcccacatttccatggtgtgagatcctctttactctgggcagaagtgagcccccccttaaagggaattcgatgcccccctagaataatctcatccccccacccgacttcttttgaaatgtgaacgtccttccttgactgtctagccactccctccagagaataactggctctgattggaatttctggcctcctaaggctccccaccccgaaatcagcccccagccttgtttctgatgacagtgttatcccaagaccctgccccctgccagccgaccctcctggccttcctcgttgggccgctctgatttcaggcagcaggggctgctgtgatgccgtcctgctggagtgatttatactgtgaaatgagttggccagattgtggggtgcagctgggtggggcagcacacctctggggggataatgtccccactcccgaaagcctttcctcggtctcccttccgtccatcccccttcttcctcccctcaacagtgagttagactcaagggggtgacagaaccgagaagggggtgacagtcctccatccacgtggcctctctctctctcctcaggaccctcagccctggactttttctttaaggtcccccgaccaatccccagcctaggacgccaacttctcccaccccttggcccctcacatcctctccaggaagggagtgaggggctgtgacatttttccggagaagatttcagagctgaggctttggtacccccaaacccccaatatttttggactggcagactcaaggggctggaatctcatgattccatgcccgagtccgcccatccctgaccatggttttggctctcccaccccgccgttccctgcgcttcatctcatgaggatttctttatgaggcaaatttatattttttaatatcggggggtggaccacgccgccctccatccgtgctgcatgaaaaacattccacgtgccccttgtcgcgcgtctcccatcctgatcccagacccattccttagctatttatccctttcctggtttccgaaaggcaattatatctattatgtataagtaaatatattatatatggatgtgtgtgtgtgcgtgcgcgtgagtgtgtgagcgcttctgcagcctcggcctaggtcacgttggccctcaaagcgagccgttgaattggaaactgcttctagaaactctggctcagcctgtctcgggctgacccttttctgatcgtctcggcccctctgattgttcccgatggtctctctccctctgtcttttctcctccgcctgtgtccatctgaccgttttcacttgtctcctttctgactgtccctgccaatgctccagctgtcgtctgactctgggttcgttggggacatgagattttattttttgtgagtgagactgagggatcgtagatttttacaatctgtatctttgacaattctgggtgcgagtgtgagagtgtgagcagggcttgctcctgccaaccacaattcaatgaatccccgacccccctaccccatgctgtacttgtggttctctttttgtattttgcatctgaccccggggggctgggacagattggcaatgggccgtcccctctccccttggttctgcactgttgccaataaaaagctcttaaaaacgcaaaaaaaaaaaaaaaaaaaaaaaaagaaaagataatagtgaaaaaaaaaaaaaaaaaaaaaaaa

SEQ ID NO: 5376 - DNA, 1163 bp, Homo sapiens
ggcggcgcgtgtgccgcggagccgggccgcgataaaccatactcacctgtgccattccattcccgcctctagagcacgtctaccccgctccacattggccttcgtgctcgtaccgcgtccattacagcagttcccaaccctcagtctgccccaggcatctgcgccatttggccagacactacaagccattatctgtgtcgagccaaccctttcaaaggcttcgagtcacaaacatagaacatttcatgccagaatgctccaactgcagatttaccaccgttcttcgaattatatttctgctttttaatatttctgtttcttcgtttttctaaagtatggctctgaatagaatgcacattttccattgaactggatgcatttcatctagccaatccagtaatttatttatattaatctatacataatatgtttcctcagcataggagctatgattcattaattaaaagtggagtcaaaacgctaaatgcaatgtttgttgtgtattttcattacacaaacttaatttgtcttgttaaataagtacagtggatcttggagtgggatttcttggtaaattatcttgcacttgaatgtctcatgattacatatgaaatcgctttgacatatctttagacagaaaaaagtagctgagtgagggggaaattatagagctgtgtgactttagggagtaggttgaaccaggtgattacctaaaattccttccagttcaaaggcagataaatctgtaaattattttatcctatctaccatttcttaagaagacattactccaaaataattaaatttaaggctttatcaggtctgcatatagaatcttaaattctaataaagtttcatgttaatgtcataggatttttaaaagagctataggtaatttctgtataatatgtgtatattaaaatgtaattgatttcagttgaaagtattttaaagctgataaatagcattagggttctttgcaatgtggtatctagctgtattattggttttatttactttaaacattttgaaaagcttatactggcagcctagaaaaacaaacaattaatgtatctttatgtccctggcacatgaataaactttgctgtggtttactaatcaaaaaaaaaaaaaaaaacagaaagcaactaaaaaacacacgt

SEQ ID NO: 5377 - DNA, 2092 bp, Homo sapiens
aaacttcccgcacgcgttacaggagccaggtcggtataagcgccagcggcctcgccgcccgtcaagctgtccacatccctggcctcagcccgccacatcaccctgacctgcttacgcccagattttcttcaatcacatctgaataaatcacttgaagaaagcttatagcttcattgcaccatgtgtggcatttgggcgctgtttggcagtgatgattgcctttctgttcagtgtctgagtgctatgaagattgcacacagaggtccagatgcattccgttttgagaatgtcaatggatacaccaactgctgctttggatttcaccggttggcggtagttgacccgctgtttggaatgcagccaattcgagtgaagaaatatccgtatttgtggctctgttacatggttaaatctaaaacataagaagatgcacagcattttgaatttgaataccagaccaaagtggatggtgagataatccttcatctttatgacaaaggaggaattgagcaaacaatttgtatgttggatggtgtgtttgcatttgttttactggatactgccaataagaaagtgttcctgggtagagatacatatggagtcagacctttgtttaaagcaatgacagaagatggatttttggctgtatgttcagaagctaaaggtcttgttacattgaagcactccgcgactccctttttaaaagtggagccttttcttcctggacactatgaagttttggatttaaagccaaatggcaaagttgcatccgtggaaatggttaaatatcatcactgtcgggatgaacccctgcacgccctctatgacaatgtggagaaactctttccaggttttgagatagaaactgtgaagaacaacctcaggatcctttttaataatgctgtaaagaaacgtttgatgacagacagaaggattggctgccttttatcagggggcttggactccagcttggttgctgccactctgttgaagcagctgaaagaagcccaagtacagtatcctctccagacatttgcaattggcatggaagacagccccgatttactggctgctagaaaggtggcagatcatattggaagtgaacattatgaagtcctttttaactctgaggaaggcattcaggctctggatgaagtcatattttccttggaaacttatgacattacaacagttcgtgcttcagtaggtatgtatttaatttccaagtatattcggaagaacacagaatagcgtggtgatcttctctggagaaggatcagatgaacttacgcagggttacatatattttcacaaggctccttctcctgaaaaagccgaggaggagagtgagaggcttctgagggaactctatttgtttgatgttctccgcgcagatcgaactactgctgcccatggtcttgaactgagagtcccatttctagatcatcgattttcttcctattacttgtctctgccaccagaaatgagaattccaaagaatgggatagaaaaacatctcctgagagagacgtttgaggattccaatctgatacccaaagagattctctggcgaccaaaagaagccttcagtgatggaataacttcagttaagaattcctggtttaagattttacaggaatacgttgaacatcaggttgatgatgcaatgatggcaaatgcagcccagaaatttcccttcaatactcctaaaaccaaagaaggatattactaccgtcaagtctttgaacgccattacccaggccgggctgactggctgagccattactggatgcccaagtggatcaatgccactgacccttctgcccgcacgctgacccactacaagtcagctgtcaaagcttaggtggtctttatgctgtaatgtgaaagcaaatatttcttcgtgttggatggggactgtgggtagataggggaacaatgagagtcaactcaggctaacttgggtgtgaaaaaaataaaagtcctaaatcttgaaaaaaaaaaaaaaaaagggggccgcttcttaaagtattcctctgaaggggccccaaagttttaccccctcccccgcctttttctttggtaaaagggg

SEQ ID NO: 5378 - DNA, 859 bp, Homo sapiens
ctgagaggaactcctcactcagctagcttcaggagccatgacatcatctctaccatggaaattccactcactctcctgtgcccccacatttgtcctaggcctcagagtccttccccccccccccccccccccccgcccgagcacaggacacagctgggttctgaagcttctgagttctgcagcctcacctctgagaaaacctcttttccaccaataccatgaagctctgcgtgactgtcctgtctctcctcatgctagtagctgccttctgctctccagcgctctcagcaccaatgggctcagaccctcccaccgcctgctgcttttcttacaccgcgaggaagcttcctcgcaactttgtggtagattactatgagaccagcagcctctgctcccagccagctgtggtattccaaaccaaaagaagcaagcaagtctgtgctgatcccagtgaatcctgggtccaggagtacgtgtatgacctggaactgaactgagctgctcagagacaggaagtcttcagggaaggtcacctgagcccggatgcttctccatgagacacatctcctccatactcaggactcctctccgcagttcctgtcccttctcttaatttaatcttttttatgtgccgtgttattgtattaggtgtcatttccattatttatattagtttagccaaaggataagtgtcccctatggggatggtccactgtcactgtttctctgctgttgcaaatacatggataacacatttgattctgtgtgttttcataataaaactttaaaataaaatgcagacagttaacaacctaatacaataacacggcacattcgggctacttgccaattccccttg

SEQ ID NO: 5379 - DNA, 2516 bp, Homo sapiens
  misc_feature (109)..(109): n is a, c, g, or t
tgctttccatcattgataggcgccgggcagctgagctggtaggaggaccagacggggatgttcggctccgccccccagcgtcccgtggccatgacgaccgctcagaggnactccctgttgtggaagctcgcggggttgctgcgggagtccggggatgtggtcctgtctggctgtagcaccctgagcctgctgactcccacactgcaacagctgaaccacgtatttgagctgcacctggggccatggggccctggccagacaggctttgtggctctgccctcccatcctgccgactcccctgttattcttcagcttcagtttctcttcgatgtgctgcagaaaacactttcactcaagctggtccatgttgctggtcctggccccacagggcccatcaagattttccccttcaaatcccttcggcacctggagctccgaggtgttcccctccactgtctgcatggcctccgaggcatctactcccagctggagaccctgatttgcagcaggagcctccaggcattagaggagctcctctcagcctgcggcggcgacttctgctctgccctcccttggctggctctgctttctgccaacttcagctacaatgcactgaccgccttagacagctccctgcgcctcttgtcagctctgcgtttcttgaacctaagccacaatcaagtccaggactgtcagggattcctgatggatttgtgtgagctccaccatctggacatctcctataatcgcctgcatttggtgccaagaatgggaccctcaggggctgctctgggggtcctgatactgcgaggcaatgagcttcggagcctgcatggcctagagcagctgaggaatctgcggcacctggatttggcatacaacctgctggaaggacaccgggagctgtcaccactgtggctgctggctgagctccgcaagctctacctggaggggaaccctctttggttccaccctgagcaccgagcagccactgcccagtacttgtcaccccgggccagggatgctgctactggcttccttctcgatggcaaggtcttgtcactgacagattttcagactcacacatccttggggctcagccccatgggcccacctttgccctggccagtggggagtactcctgaaacctcaggtggccctgacctgagtgacagcctctcctcagggggtgttgtgacccagcccctgcttcataaggttaagagccgagtccgtgtgaggcgggcaagcatctctgaacccagtgatacggacccggagccccgaactctgaacccctctccggctggatggttcgtgcagcagcacccggagctggagctcatgagcagcttccgggaacggttcggccgcaactggctgcagtacaggagtcacctggagccctccggaaaccctctgccggccacccccactacttctgcacccagtgcacctccagccagctcccagggccccgacactgcacccagaccttcacccccgcaggaggaagccagaggcccccaggagtcaccacagaaaatgtcagaggaggtcagggcggagccacaggaggaggaagaggagaaggaggggaaggaggagaaggaggagggggagatggtggaacagggagaagaggaggcaggagaggaggaagaagaggagcaggaccagaaggaagtggaagcggaactctgtcgccccttgttggtgtgtcccctggaggggcctgagggcgtacggggcagggaatgctttctcagggtcacttctgcccacctgtttgaggtggaactccaagcagctcgcaccttggagcgactggagctccagagtctggaggcagctgagatagagccggaggcccaggcccagaggtcgcccaggcccacgggctcagatctgctccctggagcccccatcctcagtctgcgcttctcctacatctgccctgaccggcagttgcgtcgctatttggtgctggagcctgatgcccacgcagcggtccaggagctgcttgccgtgttgaccccagtcaccaatgtggctcgggaacagcttggggaggccagggacctcctgctgggtagattccagtgtctacgctgtggccatgagttcaagccagaggagcccaggatgggattagacagtgaggaaggctggaggcctctgttccaaaagacaggtacaagtcctgcccttgacctctctgcccacacgcctcccctgttccagggaaagtggctctgtgtaggggagtgtgaagggggagccctagggagaaggggctagagtggagagcagttgttctgcctggaggaaaaagaaaaccgtctgcctgctgcatttaccaaaaggaaaaccgaaaaaaagaagaaactatatcccgttttttttttttttaactctaaaagtcaggaaatgcatctctgtaactgtgcttaaacatactcatattttttcataacttgaaggcttgttgtgttggggatacatcacagaccgac

SEQ ID NO: 5380 - DNA, 1652 bp, Homo sapiens
ccacgcgtccgggaggggtttccgccagcaccctgactgtgcgcctggccgcctactcgcattttgcttcccttgcctctgcatctaagctgggcatggctctcagtgcctgcgtgcaggggtggcgtacagctgacgctgcgaatgagcctggggtagcccatggcttcctgggagaagaagcaccatagatctcccatcatagggaggaaagtcctctgcatctgtgccattaaaggagaaagcaaatagcaagggatgtccccctgggaaatggaagcatgggggctgagtaccagttgaagtggatggtgatccccactttgttgtggatttccccctgagcagactcaccgtgtgcttcaacattgatgggcagcccggggacatcctcaggctggtctctgatcacagggactctggtgtcacagtgaacggagagttaattggggcacccgcccctccaaatggccacaagaaacagcgcacttacttgcgcactatcaccatcctcatcaacaagccagagagatcttatctcgagatcacaccgagcagagtcatcttggatggtggggacagactggtgctcccctgcaaccagagtgtggtggtggggagctgggggctggaggtgtccgtgtctgccaacgccaatgtcaccgtcaccatccagggctccatagcctttgtcatcctcatccacctctacaaaaagccggcgcccttccagcgacaccacctgggtttctacattgccaacagcgagggcctttccagcaactgccacggactgctggggtcagttcctgaatcaggatgccagactcacagaagaccctgcagggcccagccagaacctcactcaccctctgctccttcaggtgggagaggggtctgaggccgtcctaacagtgaaaggcaccaagttccaatgggtctggaagcaaaggaacattttccccgggggaaaaacacaaagactgcttggtctggccagcaccatgcccgcccaaaccatttgaccgcgggaactacatggatttcctggcactcgccttccttttgtcaccgcgcagcaaccttttggcggggtgatggccccgggaaacctcgcaaccgtggttgcttcttaagcaagcccttgtcctctatcgcccccccccccgatgacacacggctctagggggtagagtccgtctttacccggccctgcgattaatatataatgccccctcgcccatattacttgtgacccccgctggaacggcaccgcgcgcccccaaggatacactccacccgccccgatagatgtgctggaccacttcccgcgcgccgcctatatttaacctccccaccgcgctctcgtctcccgcatccatcagccgctactcaccggctctcttcctctacacctcgctcaccagcactatgacgcgcacacagacctgccgctaaaatacacatctattctcctcaccagcttcgcttctatatcagcttctgatcatagagttccacacccaagactgcgccatactaattagctcgaacccactcgcgcctcggcgcgtcggcgagatcgcccgcgcgcgcgcccgcagtgtcgcagcagagcaccgtccatgttccgccgctgctcgctgcactta

SEQ ID NO: 5381 - DNA, 4362 bp, Homo sapiens
  misc_feature (2996)..(3064): n is a, c, g, or t
gacaggcccggagcgagccccggatgcctggctgatccgcggccgggcccgcacccggagcggcgggatgggcggggagccgcggtcgcgccgggctccttccaccccgccctcggcgcccccgcccctccagaaaggggaggaggcgaggggagcccgccgcggaggccgagcgagccggcgcccagcccagcctggcgactggggaccccggcacatgaggtggacgccccggggaagacttgggtgcacagccaggcgagaaggtcttgagtcagacagagcaccagccttggggaccctggaccactatcatggagactgagagcgagcagaactccaattccaccaatgggagttctagctcagggggcagctctcggccccagatagctcaaatgtcactttatgaacgacaagcagtgcaggctctgcaagcactgcagcggcagcccaatgcagctcagtatttccaccagttcatgctccagcagcagctcagtaatgcccagctgcatagcctggctgccgtccagcaggccacaattgctgccagtcggcaggccagctccccaaacaccagcactacacagcagcagactaccaccacccaggcctcgatcaatctggccaccacatcggccgcccagctcatcagccgatcccagagtgtgagctctcccagtgctaccaccttgacccaatctgtgctactggggaacaccacctccccacccctcaaccagtctcaggcccagatgtatctacggccacagctgggaaacctattgcaggtaaaccgaacccctgggtcgaatgtgcctctagcctcccaactcatcctgatgcctaatggggcggtggctgcagtccagcaggaggtgccatctgctcagtctcctggagttcatgcagatgcagatcaggttcagaacttggcagtaaggaatcaacaggcctcagctcaaggacctcagatgcaaggctccactcagaaggccattcctccaggagcctcccctgtctctagcctctcccaggcctctagccaggccctagcggtggcacaggcttcctctggggccacaaaccagtccctcaaccttagtcaagctggtggaggcagtgggaatagcatcccagggtccatgggtccaggtggaggtgggcaggcacatggtggtttgggtcagttgccttcctcaggaatgggtggtgggagctgtcccaggaagggtacaggagtggtgcagcccttgcctgcagcccaaacagtaactgtgagccagggcagccagacagaggcagaaagtgcagcagccaagaaggcagaagcagatgggagtggccagcagaatgtgggcatgaacctgacacggacagccacacctgcgcccagccagacacttattagctcagccacctacacacagatccagccccattcactgattcagcaacagcaacagatccacctccagcagaaacaggtggtgatccagcagcagattgccatccaccaccagcagcaagtccagcaccggcagtcccagctccttcacacagctacacacctccagttgggcgcagcagccagcagcaggcggaattgacagcagcaacagcagcagccgcaagccaccaccctcactgcccctcagccaccacaggtcccacctactcagcaggtcccaccttcccagtcccagcagcaagcccaaaccctggtcgttcagcccatgcttcagtcttcacccttgtctcttccacctgatgcagcccctaagccaccaattcccatccaatccaaaccacctgtagcacctatcaagccgcctcagttaggggccgctaagatgtcagctgcccagcaaccaccaccccatatccctgtgcaagttgtaggcactcgacagccaggtacagcccaggcacaggctttggggttggcacagctggcagctgctgtacctacttcccgggggatgccaggtacagtgcagtctggtcaggcccatttggcctcctcgccaccttcatcccaggctcctggtgcactgcaggagtgccctcccacattggcccctgggatgacccttgctcctgtgcaggggacagcacatgtggtaaagggtggggctaccacctcctcacctgttgtagcccaggtccctgctgccttctatatgcagtctgtgcacttgccgggtaaaccccagacattggctgtcaaacgcaaggctgactctgaggaggagagagatgatgtctccacattgggttcaatgcttcctgccaaggcatctccagtagcagaaagcccaaaagtcatggacgagaagagcagtcttggagaaaaagctgaatcagtggctaatgtgaatgctaatactccaagcagtgaactagtagccttgacccccgccccttcagtaccgcctcctacactagccatggtgtctagacaaatgggtgactcaaaacccccacaggccatcgtgaagccccagattctcacccacatcattgaaggctttgttatccaggaaggagcagaacctttcccggtgggttgttctcagttactgaaggagtctgagaagccactacagactggccttccgacagggctgactgagaatcagtcaggtggccctttgggagtggacagcccatctgctgagttagataagaaggcgaatctcctgaagtgcgagtactgtgggaagtacgcccccgcagagcagtttcgtggctctaagaggttctgctccatgacttgcgctaagaggtacaatgtgagctgtagccatcagttccggctgaagaggaaaaaaatgaaagagtttcaagaagccaactatgctcgcgttcgcaggcgtggaccccgccgcagctcctctgacattgcccgtgccaagattcagggcaagtgccaccggggtcaagaagactctagccggggttcagataattccagttatgatgaaagcccnnnnnnnnnnnnnnnnnnnnnnnnnnnnnnnnnnnnnnnnnnnnnnnnnnnnnnnnnnnnnnnnnnnnncccaatacagctccacctacaccggaattacatggcatcaaccctgtgttcctgtccagtaatcccagccgttggagtgtagaggaggtgtacgagtttattgcttctctccaaggctgccaagagattgcagaggaatttcgctcacaggagattgatggacaggcccttttattacttaaagaagaacatcttatgagtgccatgaacatcaagctgggccctgccctcaagatctgcgccaagataaatgtcctcaaggagacctaaggtggccctcttgcacaaaccagcctaaggcagacactctccactgtccaggttataacctggtaccagcagactttgcagggaagaaagagttgttccaatcatgtaaccttctgtaggggattactgagacagggaagagaagtgcaagaattggttgctggtgctacatggcggcagctttgacattttctctgggttctactttattttttaaaatctttacagttctcaccatttcacgtaccttaatccaatctttataaaagaggcagtctagagaactaggactgctcagccttatcctggagtggagcatttagcccaggtcttaattctccaagaggaggaatacatagtatggtaaggcaaggaactgggtggaatgtcaggttgcctgcccaatgggagaggtagggtttttctagcttgtgtgacagaagtagcaaaatctggtcctcccccctcccagtgtagctgtggctcagagttttttctttttgttgtcacttactcccttgtgattgaattttttctcctgcatccatggcaggatccccagccagtatagagacttggttggcatcttctgctgcagggactaaaagtatttgactggggcacatgtggctgttgtcattctttctgcatcccactgttcccctccaatttatgttattttctaccctgtttttcagttccatctctgctctgtcctatagctttataaaaccagagtgtgtggggctgaggtcaggagtataagtacctgccttaggcactattccttatataacaaaaatattaaatatttttttcctcagtaaaaggatgaaaattggtttcagttgtcttactctattccagtctttgcccactttcacacaaatgacaaggccaatatgttttgtttgttttttaatcattaagagtttttgtacaaaaggaggatggcaacagaagagtaaaggacccaagaaaactgctaaatcaaaaaaaaagaaacctttaaaaaaaaaaaaaaaaaa

SEQ ID NO: 5382 - DNA, 4366 bp, Homo sapiens
ggcgtttccgagagggtgtccttagaagaccaaagtccggggatggcggcagagggggaccagctcagcctgcctccccaagggacctcagattggccctgaggactcatcccgggagagcacggagcaaggccaggacacagaggtgaaagccagcgatcctcacagcatgccagagctgcccaggacagccaaacaacccccagtcccgccccccaggaaaaaacggatctctcgacaactggcctcgaccctcccagctcccttagagaacgctgagctctgcacacaggcgatggccttggagacacccacgccgggtccacccagagagggccaaagccctgcttctcaggctgggactcagcaccctcctgcccaggccactgcccattcccagagctctccagagttcaagggctccctggcctccctctcagacagcttgggggtgtctgtcatggccaccgaccaggactcctactccaccagcagcacggaggaggagctggagcagttcagcagccccagcgtgaagaagaagccctccatgatcctgggcaaggctcggcaccggctgagctttgccagtttcagcagcatgttccacgctttcctctccaacaaccgcaagctgtacaagaaggtggtggagctggcgcaggacaagggctcgtactttggcagcctggtgcaggactacaaggtgtacagcctggagatgatggcgcgccagacctccagcacggagatgctgcaggagattcgcaccatgatgacccagctcaagagctacctgctgcagagcaccgagctcaaggccctggtggaccccgccctgcactccgaggaggagctcgaagcaattgtagagtctgccttgtacaaatgtgtcctgaagcccctgaaggaagccatcaactcatgcctgcatcagatccacagcaaggatggttcgctgcagcagctcaaggagaaccagttagtgatcctggccaccaccaccactgacctaggtgtgaccaccagcgtgccggaggtgcccatgatggagaagatcctgcagaagttcaccagcatgcacaaggcctactcacctgagaagaagatctccatcctgctcaagacctgcaaactcatctacgactccatggccctcggcaacccagggaagccctatggggcggatgacttcctgcctgtgctcatgtatgtgctggcccgcagcaacctcacggagatgcttctcaatgtggagtacatgatggagctcatggaccccgccctgcagctgggggagggttcctactatctgaccaccacctacggggccctggagcacatcaagagctacgacaagatcacggtgacccggcagctgagtgtggaggtgcaggactccatccaccgctgggagcgccggcgtactctcaacaaggcccgggcctcccgctcctccgtacaggtgaggcctgagagcgggaggggcccggtggggccatgtcccagacaccatccctgctgcctgctggctaaggagccgtgacatcacctggctgctccagccgcccagccctgccttaggggagcagtgagactccccacaccagaggaagggcccccagcccctgctgccagtgtgtgtccaggacttgggtgcgtctaaaaacatatcagcaggcattggtgttctccctgggcaagcaggaagggtgcaggaggaatgagacacacccatcattccttagcccctcctaggacccagcaccctgcaggggctggagatggggacttgtcatcccagtccctgctttaaggagcccacaggctcatctacagccttgctccttagtccctggacaaatgcagcagctggcaaggggtttggggtaacccccaccaacccagtggcccacccctccccatacctctctctatacagactcagtattcaaaccagtcccgcccctccccaactccatcaccccacccacccccaggctgcatcaaatccagctgcccccagttccccaaacatgcccagcccagttcactggctgctcaaccgctgccctcactggtcaatctccccttcttcactggctgtcactgcccatcctttaagacgactcagtttctccaacagcccctcctctgagaagccttccctgatacacacacacaccgtttcacacaggctgggtggggtgccctcctctgggcttcctgcggcctccccttttacagtgcatatcacatcctatcatcctctgcatatgaagctgtcacctctgggagggcacagcccatggttcacatgcctcaggggcgccaagcccagggcctgggacagagcaggactgggtgtgtaaaaaagggtgagagttggactagtgagccaggcacatccagagctgtgagcagctatgcagactcactcctctgacacccagagcagaccagtcctgagccacactcctggctttcaagatggtgcatctataataagcagagcccaggcctgggagacaggaggcttgagttctggccccagccctgtactagcttgctgtgtgaccctcagcaatccctgccccactctgggactcagttttcctgcccacacaggctgactatggctaatcaatttaataactgactctctggggagaaaacaaaagctctgattttagcttctgtccatttccatggggtgagtcctccatggccaacttcaacttggcatcactgaatgtggagttggaaagaagtgtatgcagtcggctctccctggcgggtgtgagccagctccagcacacctctgttcccatcccctcccaacaccccggactcccacagactgtagggacatggacactcttggtccaagcctggcccaggcatcccgtacttcctgcttctaccttaggggttcctgatgctgagccaggcagagtatggatgaaacggaccacccactgtttgggagacggaagcttcggaggggggtcccctcagcaccacatctgggatctggggagggcaccaccctctgccccctcccagtgcctcctccgcacaccatgccttggggggtgggcacccttccctggggaggggaagcccagagctggacagtcactagcaggtggatagtgccctgggaggcctaatggaggacaaggagccctgaggcagccactaagacggagggagtgggccgggcttttcccctcctggaagaaatgggcggtccccgtgaagctcttgacaggagcccggcctcgcctaagccctagccaccagttgccatcacggtctccgccgagccgggatcctcagccgcttcccgcgcaggcctgctgttcccaatccggccacaagggggcagccccgcgcgcagcctctctgcctgcagccctgagccccggggaaggcgaggccgctccgggccggagcttccagcgcctgctcgcccatttatgggaggcgggcgctatccccactttacagccggggctcgacgaatcaaggccacacaggcagtgggagcaaaggcaaagcccggcaggtgtggggctgggtccctaggggtggaggacggcgggcgggcgccctgctcgtgctgcgagtgcccagccccagcccgcaggcgtcgcctcgccttgcccgccctgctcatgccgggccttccccacccgactgcgcccagcctccttcacccggtcccctcccgctttaccaatccctgccccacgcagctcctcagagccccagggctcttgcagccctaaggggctggactgtgttgcccgcccgcactatgggatgcccgggcgggctcgcacctcccttcttatctgtgctgccctccgtgcccagcattgcgcctggggtgcagggaactcacctggagggagggagggagggaatgaatgaatgaatgaatgatggggagcctgtggaccagcagccaggggacgcgccggctcctctttgcagggactccgagacgcgccttaattcatctcccagaactgtcggcccagctgggaagccaggcagggagggggacgggccccccgcaggctcgcggcagagacgggaaaggcgcaggtgccggactcgcagacagcttggcgcccgccacccgctatccatccagggaggggcctgggccgggagagggcgcctgaggagacagggccccgccgtgaccacaggcccctcgcgtctccgcaggacttcatctgcgtgtcgtacctggagcccgagcagcaggcgcggacgctggcgtcgcgggcggacacccaggcccaggcgctgtgcgcgcagtgcgcggagaagttcgcggtggagcggccgc

SEQ ID NO: 5383 - DNA, 1736 bp, Homo sapiens
  misc_feature (27)..(29): n is a, c, g, or t
  misc_feature (39)..(39): n is a, c, g, or t
  misc_feature (41)..(42): n is a, c, g, or t
  misc_feature (47)..(51): n is a, c, g, or t
  misc_feature (54)..(55): n is a, c, g, or t
  misc_feature (57)..(57): n is a, c, g, or t
  misc_feature (60)..(61): n is a, c, g, or t
  misc_feature (74)..(74): n is a, c, g, or t
  misc_feature (77)..(78): n is a, c, g, or t
  misc_feature (80)..(85): n is a, c, g, or t
  misc_feature (88)..(93): n is a, c, g, or t
  misc_feature (113)..(115): n is a, c, g, or t
  misc_feature (119)..(119): n is a, c, g, or t
  misc_feature (127)..(128): n is a, c, g, or t
  misc_feature (132)..(132): n is a, c, g, or t
  misc_feature (134)..(135): n is a, c, g, or t
  misc_feature (140)..(145): n is a, c, g, or t
  misc_feature (151)..(157): n is a, c, g, or t
  misc_feature (164)..(164): n is a, c, g, or t
  misc_feature (166)..(166): n is a, c, g, or t
  misc_feature (181)..(182): n is a, c, g, or t
  misc_feature (184)..(188): n is a, c, g, or t
  misc_feature (191)..(191): n is a, c, g, or t
  misc_feature (198)..(198): n is a, c, g, or t
  misc_feature (200)..(200): n is a, c, g, or t
  misc_feature (205)..(205): n is a, c, g, or t
  misc_feature (219)..(220): n is a, c, g, or t
  misc_feature (225)..(225): n is a, c, g, or t
  misc_feature (236)..(237): n is a, c, g, or t
  misc_feature (248)..(249): n is a, c, g, or t
  misc_feature (254)..(256): n is a, c, g, or t
  misc_feature (267)..(268): n is a, c, g, or t
  misc_feature (270)..(277): n is a, c, g, or t
  misc_feature (279)..(292): n is a, c, g, or t
  misc_feature (294)..(299): n is a, c, g, or t
  misc_feature (303)..(312): n is a, c, g, or t
  misc_feature (314)..(318): n is a, c, g, or t
  misc_feature (321)..(324): n is a, c, g, or t
  misc_feature (326)..(331): n is a, c, g, or t
  misc_feature (335)..(338): n is a, c, g, or t
  misc_feature (340)..(347): n is a, c, g, or t
  misc_feature (349)..(357): n is a, c, g, or t
  misc_feature (359)..(380): n is a, c, g, or t
  misc_feature (382)..(387): n is a, c, g, or t
  misc_feature (389)..(444): n is a, c, g, or t
  misc_feature (448)..(521): n is a, c, g, or t
  misc_feature (523)..(722): n is a, c, g, or t
  misc_feature (724)..(752): n is a, c, g, or t
  misc_feature (754)..(943): n is a, c, g, or t
ggaaggggggggaagggaagggggttnnngggggggagngnnaaagnnnnnggnngnggnnggggggggggggnggnngnnnnnnaannnnnngggggggggggggggggggnnngggngggggggnnaaangnnggggnnnnnngggggnnnnnnnggggggngnggggggggggggggnngnnnnnggnggggggngnggggngggggggggggggnnggggnggggggggggnnggggggggggnnggggnnnggggggggggnngnnnnnnnngnnnnnnnnnnnnnngnnnnnngggnnnnnnnnnngnnnnnggnnnngnnnnnnacannnngnnnnnnnngnnnnnnnnngnnnnnnnnnnnnnnnnnnnnnngnnnnnnannnnnnnnnnnnnnnnnnnnnnnnnnnnnnnnnnnnnnnnnnnnnnnnnnnnnnnnaagnnnnnnnnnnnnnnnnnnnnnnnnnnnnnnnnnnnnnnnnnnnnnnnnnnnnnnnnnnnnnnnnnnnnnnnnnngnnnnnnnnnnnnnnnnnnnnnnnnnnnnnnnnnnnnnnnnnnnnnnnnnnnnnnnnnnnnnnnnnnnnnnnnnnnnnnnnnnnnnnnnnnnnnnnnnnnnnnnnnnnnnnnnnnnnnnnnnnnnnnnnnnnnnnnnnnnnnnnnnnnnnnnnnnnnnnnnnnnnnnnnnnnnnnnnnnnnnnnnnnnnnnnnnnnnnnnngnnnnnnnnnnnnnnnnnnnnnnnnnnnnngnnnnnnnnnnnnnnnnnnnnnnnnnnnnnnnnnnnnnnnnnnnnnnnnnnnnnnnnnnnnnnnnnnnnnnnnnnnnnnnnnnnnnnnnnnnnnnnnnnnnnnnnnnnnnnnnnnnnnnnnnnnnnnnnnnnnnnnnnnnnnnnnnnnnnnnnnnnnnnnnnnnnnnnnnnnnnnnnnnnnnnnnnnnnnncggaggtgcagcagaagattgagaaacaatatgatgcagatctggagcagatcctgatccagtgatcaccatctagtgccgtgaggcatgtggaccgatcttttagcagtacattcccagagagccccagagctctcaagctcctttctgtcagggtggggggttcagcctgtcctgtcacctctgaggtgcctgctggcatcctctcccccatgcttactaatacattcccttccccatagccatcaaaactggaccaactggcctcttcctttcccctgggaccaaaatttaggggcctcagtccctcaccgccatgccctggcctattctgtctctccttcttccccctggcctgttctgtctctgagctctgtgtcctccgttcattccatggctgggagtcactgatgctgcctctgccttctgatgctggactggccttgcttctacaagtatgcttctcccacagctgtggctgcaggaacttaatttatagggaggagcctgtggcagctgctgccccagccacagctgcactgactgtgctcaccacacatctggggcagccttccctggcaggggccctcgtggcttctcattttccattcccttcactgtggctaaggggtggggtgaggggatggagagggagggctgcctaccatggtctggggcttgaggaagatgagtttgttgatttaaataaagaatttgtcatttttgaaaaaaaaaaaaaaaaaaaaaaaagactaatcgctccaaaaacaaaatgggaaaaaaggagaggggg

SEQ ID NO: 5384 - DNA, 4006 bp, Homo sapiens
  misc_feature (221)..(221): n is a, c, g, or t
  misc_feature (247)..(247): n is a, c, g, or t
  misc_feature (249)..(249): n is a, c, g, or t
  misc_feature (1833)..(1874): n is a, c, g, or t
  misc_feature (2529)..(2550): n is a, c, g, or t
ggccgaagtcgggcgagcgcgccgtgcggcggctgggagtgggctgcaggtgccgcgcggggagcccgcccagacttcggggaggcagcggggcgccgtggccccgcggctcagctccctgccgggtcgggtgtcccagccctgcgacttccggggcccggcggctcctcggggagctcgtaaaaaggcagcctccggggcgaaagagcgcgcggcgcggngcgccgggacggtccgcggcacgggntnggagccgccggcgctcgggctcccgcagggcggcgggcggggcggggtgaggcgggccggccgccctcccctctcctccctcccgcagatagcactcccttcctccggtcccgcagccaattaggcggccccctcgggcgggaggcgtggggcgctgcataaaacggcggggagctgccaccccgggagcgggctgcgcagtgtccgggccgagccggtgcgccgcagactagggcgcctcgggccagggagcgcggaggagccatggccaccgctaacggggccgtggaaaacgggcagccggacgggaagccgccggccctgccgcgccccatccgcaacctggaggtcaagttcaccaagatatttatcaacaatgaatggcacgaatccaagagtgggaaaaagtttgctacatgtaacccttcaactcgggagcaaatatgtgaagtggaagaaggagataagcccgacgtggacaaggctgtggaggctgcacaggttgccttccagaggggctcgccatggcgccggctggatgccctgagtcgtgggcggctgctgcaccagctggctgacctggtggagagggaccgcgccaccttggccgccctggagacgatggatacagggaagccatttcttcatgcttttttcatcgacctggagggctgtattagaaccctcagatactttgcagggtgggcagacaaaatccagggcaagaccatccccacagatgacaacgtcgtatgcttcaccaggcatgagcccattggtgtctgtggggccatcactccatggaacttccccctgctgatgctggtgtggaagctggcacccgccctctgctgtgggaacaccatggtcctgaagcctgcggagcagacacctctcaccgccctttatctcggctctctgatcaaagaggccgggttccctccaggagtggtgaacattgtgccaggattcgggcccacagtgggagcagcaatttcttctcaccctcagatcaacaagatcgccttcaccggctccacagaggttggaaaactggttaaagaagctgcgtcccggagcaatctgaagcgggtgacgctggagctgggggggaagaacccctgcatcgtgtgtgcggacgctgacttggacttggcagtggagtgtgcccatcagggagtgttcttcaaccaaggccagtgttgcacggcagcctccagggtgttcgtggaggagcaggtctactctgagtttgtcaggcggagcgtggagtatgccaagaaacggcccgtgggagaccccttcgatgtcaaaacagaacaggggcctcagattgatcaaaagcagttcgacaaaatcttagagctgatcgagagtgggaagaaggaaggggccaagctggaatgcgggggctcagccatggaagacaaggggctcttcatcaaacccactgtcttctcagaagtcacagacaacatgcggattgccaaagaggagattttcgggccagtgcaaccaatactgaagttcaaaagtatcgaagaagtgataaaaagagcgaatagcaccgactatggactcacnnnnnnnnnnnnnnnnnnnnnnnnnnnnnnnnnnnnnnnnnnggcttctgccttagagtctggaacggtctggatcaactgctacaacgccctctatgcacaggctccatttggtggctttaaaatgtcaggaaatggcagagaactaggtgaatacgctttggccgaatacacagaagtgaaaactgtcaccatcaaacttggcgacaagaacccctgaaggaaaggcggggctccttcctcaaacatcggacggcggaatgtggcagatgaaatgtgctggaggaaaaaaatgacatttctgaccttcccgggacacattcttctggaggctttacatctactggagttgaatgattgctgttttcctctcactctcctgtttattcaccagactggggatgcctataggttgtctgtgaaatcgcagtcctgcctggggagggagctgttggccatttctgtgtttccctttaaaccagatcctggagacagtgagatactcagggcgttgttaacagggagtggtatttgaagtgtccagcagttgcttgaaatgctttgccgaatctgactccagtaagaatgtgggaaaaccccctgtgtgttctgcaagcagggctcttgcaccagcggtctcctcagggtggacctgcttacagagcaagccacgcctctttccgaggtgaaggtgggnnnnnnnnnnnnnnnnnnnnnnacagtaaggttttttggtttttgttttttgttttcttgtttttaaaaaaaggatttcacagtgagaaagttttggttagtgcataccgtggaagggcgccagggtctttgtggattgcatgttgacattgaccgtgagattcggcttcaaaccaatactgcctttggaatatgacagaatcaatagcccagagagcttagtcaaagacgatatcacggtctaccttaaccaaggcactttcttaagcagaaaatattgttgaggttacctttgctgctaaagatccaatcttctaacgccacaacagcatagcaaatcctaggataattcacctcctcatttgacaaatcagagctgtaattcactttaacaaattacgcatttctatcacgttcactaacagcttatgataagtctgtgtagtcttccttttctccagttctgttacccaatttagattagtaaagcgtacacaactggaaagactgctgtaataacacagccttgttatttttaagtcctattttgatattaatttctgattagttagtaaataacacctggattctatggaggacctcggtcttcatccaagtggcctgagtatttcactggcaggttgtgaatttttcttttcctctttggggatccaaatgatgatgtgcaatttcatgttttaacttgggaaactgaaagtgttcccatatagcttcaaaaacaaaaacaaatgtgttatccgacggatacttttatggttactaactagtactttcctaattgggaaagtagtgcttaagtttgcaaattaagttggggagggcaataataaaatgagggcccgtaacagaaccagtgtgtgtataacgaaaaccatgtataaaatgggcctatcacccttgtcagagatataaattaccacatttgccttcccttcatcagctaacacttatcacttatactaccaataacttgttaaatcaggatttggcttcatacactgaattttcagtattttatctcaagtagatatagacactaaccttgatagtgatacgttagagggttcctattcttccattgtacgataatgtctttaatatgaaatgctacattatttataattggtagagttattgtatctttttatagttgtaagtacacagaggtggtatatttaaacttctgtaatatactgtatttagaaatggaaatatatatagtgttaggtttcacttcttttaaggtttacccctgtggtgtggtttaaaaatctataggcctgggaattccgatcctagctgcagatcgcatcccacaatgcgagaatgataaaataaaattggatatttgagaaaaaaaaaaaaaaaaaaggggcggccgaaatttaacattggggggcccgaaaaggaaagcaaaggagagggggtacaaaagggggggaaaaaagggggtaagc

SEQ ID NO: 5385 - DNA, 746 bp, Homo sapiens
cagcctcctggtgactctcgcctcctcttttccagcggacgctaccagaggacgaaggtctgactctggccaacggcccagaatttctggcccagttttgcctgaggaagccaactgtgcaggaggtcaggatcccggtagggtgagagtgggaaagttaacattcccaagagactccaagcaacaggatttcctgacctgggactattacctttctcacattacatggccagatttacttcctgctattattaaaagtacgaaaaagatgaagatatgtgtttaatggaaacaagggcaagagtttgcctgactggactttgaggaggctgtaggatcatggcgctaacggcatttggagggctgggaagggactctagccctggctttacctgcctttgtcatcagctggagcaagcaactccgcaacctcggagcctcagtttccttttctgtaaaaggcggggagggtgggtggtaagtgcaatgctgaatcagaactcatagagctgctgggtggacatgtgaagtaaaagaggagacagctttgtgctcctggaaggatgccatttgcgttttcctcatcaagtttgatctcctgcaaatcatccaagcacctccatctgaccttctcagttgagaggtcctcagtgtttctgtggcctccaggagaaaggtccccctccccggtgaggccaggtgatggaggctgacggcagcttcacagttcctgaaggtccgaaagg

SEQ ID NO: 5386 - DNA, 2206 bp, Homo sapiens
  misc_feature (1914)..(1915): n is a, c, g, or t
  misc_feature (1935)..(1936): n is a, c, g, or t
  misc_feature (2030)..(2030): n is a, c, g, or t
  misc_feature (2079)..(2079): n is a, c, g, or t
acaggacatttttcatttgtgaatttaatgctatactgtcaaggtacttgcttgtgtctgaactctagtgcacttatgattttgtagaccatgtgaaatttaataagataccttttttttcctttctttgtgtgtagtgcagcaacagtttggtctgcatttgttagaagtttaactcctaacaacccaaagacctatttaacaattggtgcataaatgaaagtagtactgtatacttgaaactgtttaagtacaagttgaacaaaaattatgaaaaggtatatttgcttctcgggaaagcaaagaagctgctttaaaaaataaaaaggggactaaaaatttgttttgtataaagaggttagccctgcgcacgtaggactgaattcagtgatatccctatacactgccatttagtggataggttattgtacttccattcatactctgggcacttgtgttgtattgttctgttacatactttttttaacctgttttgttttatcatatatgcattaaaagtattatctttatcaacatttgctgctactgtgttaacatttttgttttgcttgccatgaatttcaacttccaccacccagtgaattgatttataaattgctatgctttgctgtttttctgttgctgtggaacttaaagaatgtgaaagctgtcaaagggtattttacgaatcacttttgtgtttgatatagtaaaacaatgtgattcattccaaagtaacagaaggttatttgtaagaaagttaaaggcttgtgaacaaagaaagctaagctgttgtacatatttgtagttggctgtgcatggtacaaatttattaatatgaagaaatgcaaaatgtattgcttttgatatttctcttccgagatgaacaagtagcatgtaatgcaactgtttgacagtttaactcaagtcatgcttcaaactgttttaatgatcaaatcaagacacatttcattttacattttattattgtacagtttttgtttcggatgatgatcacagcaatctttattctatacattttatgtgaacttttttaatgtctttaatttggattttttttttttttagtattttaacatttattttaatcctgaagacacttttttgattgtgtttcgtaagagacaacatggcctcctaaggtgcaatcctgccgctatagtgagctaatgtcctgaatcctaaggcttcagtaaattgcttttgcctttttcatgaatggtaagcagcagcattgtgagatcgatctgtcctggcagttaacacgatgtgcaacagtgtgttagcatggaacagaacgcttttcacaaaacaaaggactgttttacaaatgattattccgacagtgtgtcgacataaacttttacaactgcacagcagccaaaaaaagaaaaaaaaaagaaaaaaaaaactttaactggatggacgttgttagggtgagaaataaaaggacagcctccaaaggttgagaatgagaattgttttttcctggatatcaaagggattatcacagcgcaatcattgtctacacaacatgtactctcaacgcctgggttacataggaaatgcaccctgaggttttaataaaagcccctatggctataactttaaataaactaaaccaaaaatgttattgatgttttatatatagagagtagtctcattagtttttgttactgtaatgtttgaagtctcaaatgcaccgtattacggtaaataacatggttttgaaaacttttttttattttgtcacagacctgttgtcatagttgaaatgatgtttattgtagatggtatttgaacttattcttctggaaatagttcatcaagtatgtttgttgctcattgtgatacattaaaaactgtatctacatatttaaaaaaaaaatactnngttttcaaaccagtatacanngataagcttccaggctgcatagaaggaggagagggaaaatgttttgtaagaaaccaatcaagataaaggacagtgaagtaatccgtaccttgtngtttgttttgatttaataacataacaaataaccaaccctttcctgcctnacatgcattcattccacatatatacacacacaaagagagttaatcaacttgaaagtgttccttcaattctgatatagaaatgcaatttaacacacttaaggattaactttttgacctttttcgtgtt

SEQ ID NO: 5387 - DNA, 3820 bp, Homo sapiens
  misc_feature (1160)..(1178): n is a, c, g, or t
  misc_feature (3652)..(3693): n is a, c, g, or t
  misc_feature (3695)..(3705): n is a, c, g, or t
  misc_feature (3707)..(3760): n is a, c, g, or t
cacgaggccgggccgcccgctgcttcccacccctgcagcctgcgctgcggagtacaaagagcggagggcgcgcttgacctggggctggggtccagccctgcccgccggtgccgtctgctcaactagttaggtggctgctgcgcaggattccgggaaacgtcagtctgccatgagccggcaggactgagcctgcgactcggagcagagcgagtgaggggcagagcggtgctcaggagtgcggcccggggccgccggagctgggggtcgggccgggcgatgatccggggcttcgaggcgcccatggcggagaacccgccgccgccgccgccgcccgtcatcttctgccacgactccccgaagcgggtgctggtgtcggtcatcaggacgaccccgatcaagccaacgtgcggcggtggaggggagccggagccgccgccgccgctcatccccaccagccccggcttcagcgacttcatggtgtacccgtggcgctggggcgagaacgcacacaacgtgacgctcagccctggggccgcgggggccgccgcctcggccgccctgcctgcagccgcagccgccgagcactcggggcttcgtggccggggcgcgcccccgcccgccgcctcggcctccgccgccgcctcgggaggtgaggacgaggaggaagcgagcagcccagacagcggccacctcaaggatggaatccgacgtggtaggcccagagcagatactgtccgcgatttaataaatgaaggagagcattcatccagcagaatccgttgtaacatctgtaatagggtgtttccacgggagaaatcgctccaggctcacaaaaggactcatacaggtgagaggccctatctgtgtgactatccagactgtggaaaagcctttgttcaaagtggacagctcaaaacacatcagcgtcttcacaccggagagaaaccttttgtttgttcagaaaatggctgcctgagcagattcacccatgcaaaccgccactgtccgaagcacccctacgccaggctgaagagagaggagcccacggacacactcagcaaacatcaggctgccgacaacaaggccgcggccgagtggctggcgaggtattgggaaatgagagagcagcgcacccccactttgaaaggcaagctggttcnnnnnnnnnnnnnnnnnnngcaggaccctctggaataccttcagtctgatgaagaggacgacgagaagagaggggcccagcgccggctgcaggagcagcgggagcgcctgcatggagccctcgcgctcatagagcttgccaacctgactggggcgccactccgacagtagcttggacactgactcttccactgtacaaaagtactgcccagcatacttaaaaagtagatccttgggcataagctaagcaccttatttgcttatcataggctgctattctgtagaaatttatgaagaatgttattgccccagaatatggggtgagagagaactgcacttttttaatatggaaatgaattcatcgtaaagtttaaaatattttgtaaatatggactgcacagtacagggtagaaaactacatattgtgggaagctagattttgcaagtttaatgcattcattggaagcagttctcacaggaagcactttctgaataagacacttgtttgaaaaacagaatggtacaaatagccaaagaagattaaaacagattatttataagatcatttttaacaatatatattagtatgtttaacaatactgtaaacactgaagcaagcaagaaagtataaaatatgtaagatagataattttaattgcaaaatactgtgcccactaaggctagagaaatgggaggctattttggaagatgttctaagtaatggacttagaagaaaatagatatttgaggctcttggtaagatgcacaatagttcagaatttttgaaattggagcaaaatcagtcttattctatctggggctttacaactcagtataatgtttaagtttgaaaagcacttgtcatccctagcatgttaacttgggaacttttgcacatttcatatttctcatttgctgaaattgagtgattaatcttgcaaagtctaggtaacatagtaattggtaattttaaaaatacatattaagggccctgtaatgagatttggcacttggatttttactaaagggacacctgcagggttgttttgtagtgaaatgttttagatcttttgttagcaaacactacattttaattgtactgcttgtttagaattattagcaaatggaagcctccatatttatattttcagtgcataaagccaccttcttgctttacttcagagtaacatgccaagctattttgtgttcactaaatttagctatcagttaaacactgcagaaaatattagctactcaaataagtaggcttctgaaatagttttaactgcaagtgtgttaacttgtgtggtggtttgaagccatttttccaaataaagttattaaacaccactttatgtactgaagcatgaacagaaaaatcaagagctgagcagaccacctcctttatgtaggcaaaacttccatcattttggcttttgttctaaacagaactaaatgacatgcatagcatggtaacttacagatcgcttaattggagtaaaactcagagtaatagagggaaatatgggctcttcagtgcctttttagcttttttgagttgaagacgttcctacagatgtagtttaaacattacaaagtaggcttctttatccaaaaatcccaatgtgtcatagtacacagatagtttaaaatatgtagccacggggaaggggaggcatgtaaatgtcttgaagaggagaaaaagtatgaaagaagatacgatagttacgaataatgtgtatgatgaggacatactttaaaaatgtaattcctctgtacagtaaattacaaatctttagggatttttttgtaataagagaatttatatttgtaatggtctaagaatttttttgtaatgtggtatatagaattttaatttggagcacttataagctggtaagagagactatagcatctgaattatcttggtttatgtttcagcatttcctctagaatttttgctctcaaatatgtgatttaatgaactaaaaacaacactcatcagtcttgggaaatttgaactttgatcaacttaactaaagaaggaagggtagtaagaatttttcaaatacaaatatttgccaattcacagatgataacatttaaggccttcaaaagtaagggtttttccttgtttctccagtcagcttttgtcaactctaatagttttttcataaacattttttatttgtataattgcaacagtttaagaaattatcacaactatttagaaacatttaaaatgttctttttgatataagctatatacttggaaaaatacattggtatctaaaatttgaggtgtgttaagactgctttttgttttaaaaaatggtttacattcaaatttttgaagtgttttatgcttcatatggctaagttgtagtttggcagagttaacagcataagaataaacatgctgtaattttaaaagatgctttgaataaaaatttattttaatttaaaaaaaaaaaaaaaaaaaggaaaaaaaagnnnnnnnnnnnnnnnnnnnnnnnnnnnnnnnnnnnnnnnnnnannnnnnnnnnnannnnnnnnnnnnnnnnnnnnnnnnnnnnnnnnnnnnnnnnnnnnnnnnnnnnnnagaggggggggccgccccctaaaaagaattccccccccgaggggggccccaaaatttatt

SEQ ID NO: 5388 - DNA, 729 bp, Homo sapiens
  misc_feature (264)..(264): n is a, c, g, or t
  misc_feature (270)..(270): n is a, c, g, or t
agatgctatatttttctgttctgttttctgaagattttgccatttaaaatgatccagtgaaaaatatttatccacattgaagaaagtggatttcccatgcaaattgaatcttcattaacacattttaaaaggctttactgtattaggtaacatagatattaaaggatttttctaggcaagaagctcaactttttttttccataaaaataatttttgcttaaatagtaactcatggttttcttttattaaatggggttgttgtcngtatgntaaaccattgaagtaggaggaggatgcatattgtactatgcattcaaatttatcactgttttttctgacagactttccctttgtcctttctagttatgacttgggaatggggtaacttctttatgcatagtattaagggttatagtatgaagaaatcataaaattgcaagttttggtttgcattactctaatgtgggttcatttaatctgagatcttaaatatcttgcagccttaaatcactacaaacatttgcatttttattatgccagttatttccaaaatgtattgttatacatgtcacttatgtttttaagctaatattgactgtaggataatctccttgttcccctcaaaatagtcatgaaagtgtacatgaaaatatttttaaagaataaatttctttaaattacaaaaaaaaaaaaaaaaaaaaaaagagggggggccccggtaccccaaat

SEQ ID NO: 5389 - DNA, 6002 bp, Homo sapiens
cacaggaaataagcaatggaggtggggtcctttgctcgcgccgaaattcaaaggaataaatagttccggcgcgggtgttgagagcggtgtggcaggtgttgtagccgctatggtgaagttcgctttgtagcggccccggctagagagttgttctgttccctgcctttgtgacccggaggagcttttggggtgcgtcaagcccctggcctgaggcagcggtgaggcgtaactggtttgtggcctgtttgattcctgtcagaggtttgctgacccaagacagtatcgaaaatgcatattaagtcaattattctagagggattcaagtcctatgctcagaggaccgaagtcaatggttttgaccccctcttcaatgctatcactggcttaaatggtagtgggaaatccaacatattggactccatctgctttttgctgggcatctccaacctgtctcaggttcgggcttctaatttacaagatttagtttacaaaaatgggcaggctggtattaccaaagcctctgtgtcaatcacttttgataattctgacaaaaagcaaagtcctttaggatttgaggttcatgatgaaatcacagtaacaaggcaggtggttattggtggtagaaataaatatttaatcaatggagtcaatgccaacaacaccagagtacaggatctcttctgttctgttggccttaatgttaacaaccctcactttctcatcatgcagggccgaattacaaaagtattgaatatgaaacctccagagattttatccatgatagaagaagcagctggaaccaggatgtatgaatacaaaaaaatagctgcacagaaaactatagaaaaaaaggaggctaagctgaaagaaattaagacgatacttgaagaagagattactccaaccattcaaaaattaaaagaggaaagatcgtcctacttggagtaccaaaaagtaatgagagaaatagaacatttgagtcgtttatatattgcttatcagtttttgctggctgaagataccaaagtacgctcagctgaggaattaaaagaaatgcaagataaagttataaagcttcaggaagaattgtctgagaatgataaaaaaataaaagcacttaatcatgaaatagaagaattggaaaaaagaaaagataaggaaactggaggtatacttcgatctttagaagatgctcttgcagaggctcagcgagttaatactaaatctcaaagcgcatttgatctcaagaagaaaaatctggcatgtgaggaaagcaaacgcaaagagctggaaaaaaatatggttgaggactcaaaaactttagcagcaaaggaaaaagaggttaaaaagataacagatggactgcatgcccttcaagaagcaagtaataaagatgctgaagctctggcagctgcacagcagcacttcaatgctgtttccgctggcctgtccagtaatgaagatggagcagaagcaactcttgctggtcaaatgatggcctgtaaaaatgatataagtaaagctcagacagaagccaaacaggctcagatgaagttgaagcatgctcaacaggaattaaagaataaacaagctgaagttaagaagatggatagtggctacaggaaggatcaagaagctctagaagctgtaaaaagacttaaagaaaaacttgaagctgaaatgaaaaagctaaattatgaagaaaataaagaggaaagccttttggaaaagcgcaggcagctgtctcgtgatattggtagattgaaagaaacatatgaagctctattagccagatttcccaatcttcgatttgcatacaaggatccagagaagaactggaatagaaattgtgtgaaaggacttgtggcttctctgattagtgtgaaagacacttctgcaaccacagctttagaattagtggctggagaacgactctacaatgttgtagtagacacagaagttactggtaaaaagctactagaaaggggggaactgaaacgtcgatacactataattccactcaataaaatttcagccagatgtattgcaccagaaactctgagagttgctcagaatcttgttggccctgacaacgttcatgtggctctttccttggttgaatataaaccagaacttcagaaagcaatggagtttgtctttggaacaacatttgtttgtgacaatatggataatgccaaaaaagtggcctttgataagaggataatgactagaactgtaactctcggaggtgatgtgtttgatcctcatgggacattgagtggaggtgctcgatcccaggcagcttccattttaaccaagtttcaagaactcaaagatgttcaggatgaactgagaatcaaagagaatgagctgcgggctctagaagaggaattagcaggtcttaaaaacactgctgaaaagtatcgccaactaaaacagcagtgggagatgaaaactgaagaggcagatttattacaaaccaagctccagcaaagctcatatcacaagcaacaagaagaattagatgccctttaaaaaaaccattgaggaaagtgaggagactttgaaaaacactaaagaaatccaaagaaaagcagaagaaaaatatgaagtattggaaaataaaatgaaaaatgcagaagctgaaagagagcgagaactgaaagatgctcagaaaaaactggattgtgccaaaacaaaggcagatgcatctagcaagaagatgaaagaaaaacaacaggaagttgaagctatcactctggaactggaagagctcaagagagagcatacatcttacaaacaacagcttgaagctgtaaatgaagctatcaaatcctatgaaagtcagattgaagtaatggcagctgaggtggctaaaaataaggagtcagtaaataaagctcaagaagaggtgaccaagcaaaaagaggtgataacagcccaagacactgtaattaaagctaaatatgcagaagtggcaaaacacaaggagcaaaacaatgattctcagcttaaaattaaggaattagaccacaacatcagcaaacataaacgggaggctgaagatggtgctgcaaaggtatccaaaatgttgaaagattatgactggattaatgcagagagacacctctttggccaacccaatagtgcctatgatttcaaaactaacaaccctaaagaagctggtcagagacttcagaagttgcaagaaatgaaggagaaactaggaagaaatgtcaatatgagagctatgaatgtattgacagaagctgaagagcgatacaatgacttgatgaagaagaagagaattgtagaaaatgacaaatccaaaattcttacaactatagaagaccttgaccagaagaaaaaccaagccctaaatattgcatggcaaaaggtgaacaaggactttgggtctattttttctactcttttgcctggtgctaatgctatgcttgcaccaccagagggtcaaactgttttggatggtctggagttcaaggttgccttgggaaatacctggaaagaaaacctaactgaacttagtggtggtcagaggtctttagtggccttgtcattaatactgtccatgcttctcttcaaacctgctccaatttatatccttgatgaggtagatgcagccttggatctttctcatacccaaaacattggacagatgctgcgtactcatttcacacattctcagttcattgtggtgtcactaaaagaaggtatgttcaacaatgcaaacgttcttttcaaaaccaagtttgtggatggtgtttctacagtagccagatttactcagtgtcaacatggaaagatttcaaaggaagcaaaatccaaggcaaaaccacccaaaggagcacatgtggaagtttaaactacaaagttatttcttcatcttgacctgtttttttaaatgtaaacttttaaggacttgagataactaatttgtttatatacaaaaattaatgttactgtgttacttaacccatgttttctctttatataatcacttatcgcttacaaatgagcatatattcctcatctcttaactagtctaattatggtccaattattgtggttgtgattttatgcatatcatcaaatgtttttttcttatgcgggtcttttatatattagggatcctgagatacccgattctatatgtaaaagctaatatacaaaaagcagattaaattacatgataaatgtagctgatcatcagtgtttaattgatttaattcctaaggcaatattaatgtgttttctaaagtcattcaggtaaggaagaattataaatcaggtaactggaccaacaaagggaacacatataaagctattatgcatgcatggagccgtttgaggctagttttttaaggccacaactccagacccctgatttagactgagataggaaacagatcttgaaagaatccttattttaatgatacatgaatatcatgttcctatacgcttaataattggtctctacgttttaatgatacatgaatatcatgttcctatacgcttaataattggtctctacgactttaatgtttttgtttttttaagctgtgtaagtatttttaaatcaaagcttaggaggtgtgttgcgtggtactatctgctgcaaatttatctgaagtttgttaatattttccaagatttttgtcagccttttcataatccagtcattaacaacctattggtaaacaagaatgtaggtgccagtagactaaaccaaatttatttttccctgagtctgatatatatatgtataaatataaataactcaatccatctgttccaccaaaataactcaaaagttggatgattatttgtcttccgctttccagttcaaagggatgaaattcctttagaacttgaaagatgacactagcgaacaccatgagaatactgtctacagtttttggtacgtcatcactagaacagtgaccccaaactgaatcatgaaaggtctgacatgatgtaatctgatcttccatgtgttattttggccccacatctcttcttgattttttagtcttatttccttagtgttattatcatacttcccctgatatatggccgtacttcctggccctgggcttgacatttcccacccttcattctccatacatatgagatgtcagaaaacatgcagtaattgatattatgggacacattggaaaggattgaatctggaattagttctgtccactgtggaggggagaggaaataatgctgtaaatgttgagttacagaaagtccaatgtcaaatatagtttttttgtttcctttcaaatgtattacagactgtgccaaaacagttaccaattcacactgtcaatattaaagtataccatagtatacaaattagtcagtacttgctgttaattttaatatttctgatttaacagttagttattaagtggtacttcattgctgttttagccaacgttttaaaaataatttgggagtttgactattttggcttacgtactcatttccttttctctgctaaaaatgttttgcttgtgtgcgttcctgatttttgtcttgtataatcttgatctttgaaaaccctcaaacatgtattaaattgttgtaactttttttcattagagggaagacattaaggggattggggacatttgtttcacacatctgcagtaatatgagttaactaatatttaacaagctctttctttacattagctgctgttctcatttgtatgtattgtcatatttaatcctcagagtaacctagtgaggtaaatactgttgttgtcagcatggtgtaatcgaggaattgagtgagttgagcagaaaagttaggaaacttgctcagggtgataatacagttaggagtgtcagggcccatggacaaatcttgtcagtctccagaacctaagatatactacgtcactgacagcttgaacatttgtatttattgtacagaataaatttaagaaaaacaaaaaaaaaaaaaaaaa

SEQ ID NO: 5390 - DNA, 18248 bp, Homo sapiens
  misc_feature (1482)..(1515): n is a, c, g, or t
  misc_feature (6772)..(6782): n is a, c, g, or t
  misc_feature (8295)..(8339): n is a, c, g, or t
  misc_feature (12405)..(12440): n is a, c, g, or t
  misc_feature (12666)..(12719): n is a, c, g, or t
  misc_feature (12857)..(12872): n is a, c, g, or t
  misc_feature (14894)..(14937): n is a, c, g, or t
  misc_feature (15311)..(15329): n is a, c, g, or t
  misc_feature (16885)..(16899): n is a, c, g, or t
  misc_feature (17687)..(17703): n is a, c, g, or t
  misc_feature (17705)..(17719): n is a, c, g, or t
gaagccgcatccagacaaaagctgccgcatccctgccctgcccaacccctggagggattcgagtttggtgcttgtccccgtctgattctcagcgccaaactttttgctagttcagagattccaagagtctgatgagttactctgagaggaaaccctctgcctgttgttgaggaggactgagcacagtgcttaggcgctgagggggaaaaagaaggggaaaaaaaagaaaatgatttcctgggaagttgtccatacagtattcctgtttgctcttctttattcttccctagctcaagatgcgagcccccagtcagagatcagagctgaggaatttcccgagggggcctccacgttggcttttgtgtttgatgtgactggttctatgtatgatgatttagttcaggtgattgaaggggcttccaaaattttggagacgtctttgaaaagacctaaaagacctcttttcaactttgcgttggtgcctttccatgatccagaaattggcccagtgacaattaccacagatcccaagaaatttcaatatgaactcagagaactgtatgttcagggtggtggtgattgcccagaaatgagtattggagctataaaaattgccttggaaatttctcttcctggttctttcatctatgttttcactgatgctcggtccaaagattaccggctcacccatgaggtgctgcaacttatccaacagaaacagtcacaagtcgtatttgttctgactggagattgtgatgacaggacccatattggatataaagtctatgaagaaattgcctctacaagttctggtcaagtgttccatctggacaaaaaacaagttaatgaggtattaaaatgggtagaagaagcagtacaggcctccaaagttcaccttttatccacagatcatttggaacaggctgtaaatacttggagaattccttttgatcccagcctgaaagaggtcactgtgtctttgagtgggccttctccaatgattgaaattcgcaatcctttagggaagctgataaaaaagggatttggcctgcatgagctattaaatatccataactctgccaaagtagtgaatgtgaaagagccagaggctggaatgtggacagtgaagacctcaagcagtggaaggcactctgttcgcattactggcctcagtactattgatttccgagctggcttttctcgaaagcccaccctggacttcaaaaaaacagtcagcagaccagtgcaaggaatacctacctatgtactgctcaatacttctggaatttccactccagctagaatagatcttcttgaacttttgagtatctcaggaagttctcttaagactattcctgttaaatattacccacatcgaaaaccttatggcatatggaatatttctgactttgtaccaccaaatgaagctttctttctcaaagtaacaggctatgataaagatgattacctcttccagagagnnnnnnnnnnnnnnnnnnnnnnnnnnnnnnnnnntgctcccaaagttacgatgcctgagaaaaccccaggatactatctgcagccgggccaaattccctgctctgttgacagtcttttgccctttaccttgagctttgtcagaaatggagttacacttggagtagaccagtatttgaaagaatctgccagtgtgagcttagatattgcaaaggtcactttgtctgacgaaggtttctatgaatgcattgctgtcagcagtgcaggtactggacgggcacagacattttttgacgtatcagagccccctccggtcatccaagtgcctaacaatgttacagtcactcctggagagagagcagttttaacatgtctcatcatcagtgcggtggattacaatctaacctggcagaggaatgacagagatgtcagactggcagagccagcgagaattaggaccttggctaatctgtcattggagctaaagagtgtgaaattcaacgatgctggagagtatcattgtatggtttctagtgaaggtggatcatcagccgcttcagttttcctcacagtgcaagaaccacccaaagtcactgtgatgcccaagaatcagtctttcacaggagggtctgaggtctccatcatgtgttctgcaacaggttatcccaaaccaaagattgcctggaccgttaacgatatgtttatcgtgggttcacacaggtataggatgacctcagatggtaccttatttatcaaaaatgcagctcccaaagatgcagggatctatggttgcctagcaagtaattcagctggaacagataaacagaattctactctcagatacattgaagcccctaagttgatggtagttcagagtgagctcttggttgcccttggggatataaccgttatggaatgcaaaacctctggtattcctccacctcaagttaaatggttcaaaggagatcttgagttgaggccctcaacattcctcattattgaccctctcttgggacttttgaagattcaagaaacacaagatttggatgctggcgattatacctgtgtagccatcaatgaggctggaagagcaactggcaagataactctggatgttggctcacctccagttttcatacaagaacctgctgatgtgtctatggaaattggctcaaatgtgacattaccttgttatgttcagggttatccagaaccaacaatcaaatggcgaagattagacaacatgccaattttctcaagacctttttcagttagttccatcagccaactaagaacaggagctctctttattttaaacttatgggcaagtgataaaggaacctatatttgtgaagctgaaaaccagtttggaaagatccagtcagagacaacagtaacagtgaccggacttgttgctccacttattggaatcagcccttcagtggccaatgttattgaaggacagcagcttactttgccctgtactctgttagctggaaatcccattccagaacgtcggtggattaagaattcagctatgttgctccaaaatccttacatcactgtgcgcagtgatgggagcctccatattgaaagagttcagcttcaggatggtggtgaatatacttgtgtggccagtaacgttgctgggaccaataacaaaactacctctgtggttgtgcatgttctgccaaccattcagcatgggcagcagatactcagtacaattgaaggcattccagtaactttaccatgcaaagcaagtggaaatcccaaaccgtctgtcatctggtccaagaaaggagagctgatttcaaccagcagtgctaagttttcagcaggagctgatggtagtctgtatgtggtatcacctggaggagaggagagtggggagtatgtctgcactgccaccaatacagccggctacgccaaaaggaaagtgcagctaacagtctatgtaaggcccagagtgtttggagatcaacgaggactgtcccaggataagcctgttgagatctccgtccttgcaggggaagaggtaacacttccatgtgaagtgaagagcttacctccacccataattacttgggccaaagaaacccagctcatctcaccgttctctccaagacacacattcctcccttctggttcaatgaagatcactgaaacccgcacttcagatagtgggatgtatctttgtgttgccataaatattgctgggaatgtgactcaggctgtcaaattaaatgtccatgttcctccaaagatacagcgtggacctaaacatctcaaagtccaagttggtcaaagagtggatattccatgtaatgctcaagggactcctcttcctgtaatcacctggtctaaaggtggaagcactatgctggttgatggagagcaccatgttagcaatccagacggaactttaagcatcgaccaagccacgccctcagatgctggcatatatacatgtgttgctactaacatagcaggcactgatgaaacagagataacgctacatgtccaagaaccacccacagtggaagatctagaacctccatataacactactttccaagaaagagtggccaatcaacgcattgaatttccatgtcctgcaaaaggtacccctaaaccaaccatcaaatggttacacaatggtagagagttgacaggcagagagcctggcatttctatcttggaagatggcacattgctggttattgcttctgttacaccctatgacaatggggagtacatctgtgtggcagtcaatgaagctggaaccacagaaagaaaatataacctcaaagtccatgttcctccagtaattaaagataaagaacaagttacaaatgtgtcggtgttgttaaatcagctgaccaatctcttctgtgaagtggaaggcactccatctcccatcattatgtggtataaagataatgtccaggtgactgaaagcagcactattcagactgtgaacaatgggaggatactgaagctcttcagagccactccagaggatgcaggaagatattcctgcaaagcaattaatattgcaggcacttctcagaagtactttaacattgatgtgctagttccacccaccataataggtaccaacttcccaaatgaagtctcagttgtcctcaaccgtgacgtcgcccttgaatgccaggtcaaaggcactccctttcctgatattcattggttcaaagatggcaagcctttatttttgggcgatcctaatgttgaacttctagacagaggacaagtcttacatttaaagaatgcacggagaaatgacaaggggcgctaccaatgtactgtgtctaatgcagctggcaaacaagccaaggatataaaactgactatctatattccacctagtattaaaggaggaaatgtcaccacagacatatcagtattgatcaacagccttattaaactggaatgtgaaacacggggacttccaatgcctgccattacttggtataaggacgggcagccaatcatgtccagctcacaagcactttatattgataaaggacaatatcttcatattcctcgagcacaggtctctgattcagcaacatatacgtgtcacgtagccaatgttgctggaactgctgaaaaatcattccatgtggatgtctatgttcctccaatgattgaaggcaacttggccacgcctttgaataagcaagtagttattgctcattctctgacactggagtgcaatgctgctggaaacccttctcccattctcacctggttgaaagatggtgtacctgtgaaagctaatgacaatttccgcatagaagctggtgggaagaaactcgaaatcatgagtgcccaagaaattgatcgaggacagtacatatgcgtggctaccagtgtggcaggagaaaaggaaatcaaatatgaagttgatgtcttggtgccaccagctatagaaggaggagatgaaacatcttacttcattgtgatggttaataacttactggagctagattgtcatgtgacaggctctcccccaccaactatcatgtggctgaaggatggccagttagttgatgaaagggatggattcaagattttattaaatggacgcaaactggttattgctcaggctcaagtgtcaaacacaggcctttatcggtgcatggcagcaaatactgctggagaccacaaggaggaatttgaagtgactgttcatgttcctccaacaatcaagtcctcaggcctttctgagagagttgtggtaaaatacaagcctgtcgccttgcagtgcatagccaatgggattccaaatccttccattacatggttaaaagatgaccagcctgtgaacactgcccaaggaaaccttaaaatacagtcttctggtcgagttctacaaattgccaaaaccctgttggaagatgctggcagatacacatgtgtggctaccaacgcagctggagaaacacaacagcacattcaactgcatgttcatgaaccacctagtctggaagatgctggaaaaatgctgaatgagactgtgttggtgagcaaccctgtacagctggagtgtaaggcagctggaaatcctgtgcctgttattacatggtacaaagataattgtttactctcaggttccaccagcatgactttcttgaacagaggacagatcattgatattgaaagtgcccagatctcagatgctggcatatataaatgcgtggccatcaactcagctggagctacagagttattttacagtctgcaagttcatgtggccccatcaatttctggcagcaataacatggtggcagtggtggttaataacccggtgaggttagaatgtgaagccagaggtattcctgccccaagtctgacctggttgaaagatgggagtcctgtttctagtttttctaatggattacaggttctctctggtggtcgaatcctagcattgaccagtgcacaaatcagcgacacaggaaggtacacctgcgtggcagtgaatgctgctggagaaaagcaaagggacattgacctccgagtatatgttccgccaaatattatgggagaagaacagaatgtctctgtcctcattagccaagctgtggaattactatgtcaaagtgatgctattcccccacctactcttacttggttaaaagacggccaccccttgctgaagaaaccgggcctcagtatatctgaaaatagaagtgtgttaaagattgaagatgctcaggttcaagacactggtcgttacacttgtgaagcaacaaatgttgctggnnnnnnnnnnnaaaaaaactacaatgtcaacatttgggtccccccaaatattggtggttctgatgaacttactcaacttacagtcattgaagggaatctcattagtctgttgtgtgaatcaagtggtattccacccccaaatctcatctggaagaagaaaggctctccagtgctgactgattccatggggcgagttagaattttatctgggggcaggcaattacaaatttcaattgctgaaaagtctgatgcagcactctattcatgtgtggcgtcgaatgttgctgggactgcaaagaaagaatacaatctgcaagtttacattagaccaaccataaccaacagtggcagccaccctactgaaattattgtgacccgagggaagagtatctccttggagtgtgaggtgcagggtattccaccaccaacagtgacctggatgaaagatggccaccccttgatcaaggcaaagggagtagaaatactggatgaaggtcacatccttcagctgaagaacattcatgtatctgacacaggccgttatgtgtgtgttgctgtgaatgtagcaggaatgactgacaaaaaatatgacttaagtgtccatgctcctccaagcatcataggaaaccacaggtcacctgaaaatattagtgtggtagaaaagaactcagtatctttgacttgtgaagcttctggaattcccctgccttccacaacctggttcaaagatgggtggcctgtcagccttagcaattctgtgaggattctttcaggaggcaggatgctacggctgatgcagaccacaatggaagatgctggccaatatacttgtgttgtaaggaatgcagctggtgaagaaagaaaaatctttgggctttcagtattagtaccacctcatattgtgggtgaaaatacattggaagatgtgaaggtaaaagagaaacagagtgttacgctgacttgtgaagtgacagggaatccagtgccagaaattacatggcacaaagatgggcagcccctccaagaagatgaagcccatcacattatatctggtggccgttttcttcaaattaccaatgtccaggtgccacacactggaagatatacatgtttggcttccagtccagctggccacaagagcaggagcttcagtcttaatgtatttgtatctcctacaattgctggtgtaggtagtgatggcaaccctgaagatgtcactgtcatccttaacagccctacatctttggtctgtgaagcttattcatatcctccagctaccatcacctggtttaaggatggcactcctttagaatctaaccgaaatattcgtattcttccaggaggcagaactctgcagatcctcaatgcacaggaggacaatgctggaagatactcttgtgtagccacgaatgaggctggagaaatgataaagcactatgaagtgaaggtgtacattccacccataatcaataaaggggacctttgggggccaggtctttcccctaaagaagtgaagatcaaagnnnnnnnnnnnnnnnnnnnnnnnnnnnnnnnnnnnnnnnnnnnnnctgcctccctcagctggtacaaggatggacagccccttaaatccgatgatcatgttaatattgctgcgaatggacacacacttcaaataaaggaggctcaaatatcagacaccggacgatatacttgtgtagcatctaacattgcaggtgaagatgagttggattttgatgtgaatattcaagttcctccaagttttcagaaactctgggaaataggaaacatgctagatactggcaggaatggtgaagccaaagatgtgatcatcaacaatcccatttctctttactgtgagacaaatgctgctccccctcctacactgacatggtacaaagatggccaccctctgacctcaagtgataaagtattgattttgccaggagggcgagtgttgcagattcctcgggctaaagtagaagatgctgggagatacacatgtgtggctgtgaatgaggctggagaagattcccttcaatatgatgtccgtgtactcgtgccgccaattatcgagggagcaaatagtgatctccctgaagaggtcaccgtgctggtgaacaagagtgcactgatagagtgtttatccagtggcagcccagcaccaaggaattcctggcagaaagatggacagcccttgctagaagatgaccatcataaatttctatctaatggacgaattctgcagattctgaatactcaaataacagatatcggcaggtatgtgtgtgttgctgagaacacagctgggagtgccaaaaaatattttaacctcaatgttcatgttcctccaagtgtcattggtcctaaatctgaaaatcttaccgtcgtggtgaacaatttcatctctttgacctgtgaggtctctggttttccacctcctgacctcagctggctcaagaatgaacagcccatcaaactgaacacaaatactctcattgtgcctggtggtcgaactctacagattattcgggccaaggtatcagatggtggtgaatacacttgtatagctatcaatcaagctggcgaaagcaagaaaaagttttccctgactgtttatgtgcccccaagcattaaagaccatgacagtgaatctctttctgtagttaatgtaagagagggaacttctgtgtctttggagtgtgagtcgaacgctgtgccacctccagtcatcacttggtataagaatgggcggatgataacagagtctactcatgtggagattttagctgatggacaaatgctacacattaagaaagctgaggtatctgacacaggccagtatgtatgtagagctataaatgtagcaggacgggatgataaaaatttccacctcaatgtatatgtgccacccagtattgaaggacctgaaagagaagtgattgtggagacgatcagcaatcctgtgacattaacatgtgatgccactgggatcccacctcccacgatagcatggttaaagaactacaagcgcatagaaaattctgactcactggaagttcgtattttgtctggaggtagcaaactccagattgcccggtctcagcattcagatagtggaaactatacatgtattgcttcaaatatggagggaaaagcccagaaatattactttctttcaattcaagttcctccaagtgttgctggtgctgaaattccaagtgatgtcagtgtccttctaggagaaaatgttgagctggtctgcaatgcaaatggcattcctactccacttattcaatggcttaaagatggaaagcccatagctagtggtgaaacagaaagaatccgagtgagtgcaaatggcagcacattaaacatttatggagctcttacatctgacacggggaaatacacatgtgttgctactaatcccgctggagaagaagaccgaatttttaacttgaatgtctatgttacacctacaattaggggtaataaagatgaagcagagaaactaatgacttttgtggatacttcaataaatattgaatgcagagccacagggacgcctccaccacagataaactggctgaagaatggacttcctctgcctctctcctcccatatccggttactggcagcaggacaagttatcaggattgtgagagctcaggtgtctgatgtcgctgtgtatacttgtgtggcctccaacagagctggggtggataataagcattacaatcttcaagtgtttgcaccaccaaatatggacaattcaatggggacagaggaaatcacagttctcaaaggtagttccacctctatggcatgcattactgatggaaccccagctcccagtatggcctggcttagagatggccagcctctggggcttgatgcccatctgacagtcagcacccatggaatggtcctgcagctcctcaaagcagagactgaagattcgggaaagtacacctgcattgcctcaaatgaagctggagaagtcagcaagcactttatcctcaaggtcctagaaccacctcacattaatggatctgaagaacatgaagagatatcagtaattgttaataacccacttgaacttacctgcattgcttctggaatcccagcccctaaaatgacctggatgaaagatggccggccccttccacagacggatcaagtgcaaactctaggaggaggagaggttcttcgaatttctactgctcaggtggaggatacaggaagatatacatgtctggcatccagtcctgcaggagatgatgataaggaatatctagtgagagtgcatgtacctcctaatattgctggaactgatgagccccgggatatcactgtgttacggaacagacaagtgacattggaatgcaagtcagatgcagtgcccccacctgtaattacttggctcagaaatggagaacggttacaggcaacacctcgagtgcgaatcctatctggagggagatacttgcaaatcaacaatgctgacctaggtgatacagccaattatacctgtgttgccagcaacattgcaggaaagactacaagagaatttattctcactgtaaatgttcctccaaacataaaggggggcccccagagccttgtaattcttttaaataagtcaactgtattggaatgcatcgctgaaggtgtgccaactccaaggataacatggagaaaggatggagctgttctagctgggaatcatgcaagatattccatcttggaaaatggattccttcatattcaatcagcacatgtcactgacactggacggtatttgtgtatggccaccaatgctgctggaacagatcgcaggcgaatagatttacaggtccatgttcctccatctattgctccgggtcctaccaacatgactgtaatagtaaatgttcaaactactctggcttgtgaggctactgggataccaaaaccatcaatcaattggagaaaaaatgggcatcttcttaatgtggatcaaaatcagaactcatacaggctcctttcttcaggttcactagtaattatttccccttctgtggatgacactgcaacctatgaatgtactgtgacaaacggtgctggagatgataaaagaactgtggatctcactgtccaagttccaccttccatagctgatgagcctacagatttcctagtaaccaaacatgccccagcagtaattacctgcactgcttcgggagttccatttccctcaattcactggaccaaaaatggtataagactgcttcccaggggagatggctatagaattctgtcctcaggagcaattgaaatacttgccacccaattaaaccatgctggaagatacacttgtgtcgctaggaatgcggctggctctgcacatcgacacgtgacccttcatgttcatgagcctccagtcattcagccccaaccaagtgaactacacgtcattctgaacaatcctattttattaccatgtgaagcaacagggacacccagtcctttcattacttggcaaaaagaaggcatcaatgttaacacttcaggcagaaaccatgcagttcttcctagtggcggcttacagatctccagagctgtccgagaggatgctggcacttacatgtnnnnnnnnnnnnnnnnnnnnnnnnnnnnnnnnnnnnaaatcaagttaaatgtccaagttcctccagtcattagccctcatctaaaggaatatgttattgctgtggacaagcccatcacgttatcctgtgaagcagatggcctccctccgcctgacattacatggcataaagatgggcgtgcaattgtggaatctatccgccagcgcgtcctcagctctggctctctgcaaatagcatttgtccagcctggtgatgctggccnnnnnnnnnnnnnnnnnnnnnnnnnnnnnnnnnnnnnnnnnnnnnnnnnnnnnntcaccgtccatgtaccacccaggatcagaagtacagaaggacactacacggtcaatgagaattcacaagccattcttccatgcgtagctgatggaatccccacaccagcaattaactggaaaaaagacaatgttcttnnnnnnnnnnnnnnnngaaaatacactgctgaaccatatggagaactcattttagaaaatgttgtgctggaggattctggcttctatacctgtgttgctaacaatgctgcaggtgaagatacacacactgtcagcctgactgtgcatgttctccccacttttactgaacttcctggagacgtgtcattaaataaaggagaacagctacgattaagctgtaaagctactggtattccattgcccaaattaacatggaccttcaataacaatattattccagcccactttgacagtgtgaatggacacagtgaacttgttattgaaagagtgtcaaaagaggattcaggtacttatgtgtgcaccgcagagaacagcgttggctttgtgaaggcaattggatttgtttatgtgaaagaacctccagtcttcaaaggtgattatccttctaactggattgaaccacttggtgggaatgcaatcctgaattgtgaggtgaaaggagaccccaccccaaccatccagtggaacagaaagggagtggatattgaaattagccacagaatccggcaactgggcaatggctccctggccatctatggcactgttaatgaagatgccggtgactatacatgtgtagctaccaatgaagctggggtggtggagcgcagcatgagtctgactctgcaaagtcctcctattatcactcttgagccagtggaaactgttattaatgctggtggcaaaatcatattgaattgtcaggcaactggagagcctcaaccaaccattacatggtcccgtcaagggcactctatttcctgggatgaccgggttaacgtgttgtccaacaactcattatatattgctgatgctcagaaagaagatacctctgaatttgaatgtgttgctcgaaacttaatgggttctgtccttgtcagagtgccagtcatagtccaggttcatggtggattttcccagtggtctgcatggagagcctgcagtgtcacctgtggaaaaggcatccaaaagaggagtcgtctgtgcaaccagccccttccagccaatggtgggaagccctgccaaggttcagatttggaaatgcgaaactgtcaaaataagccttgtccagtggatggtagctggtcggaatggagtctttgggaagaatgcacaaggagctgtggacgcggcaaccaaaccaggaccaggacttgcaataatccatcagttcagcatggtgggcggccatgtgaagggaatgctgtggaaataattatgtgcaacattaggccttgcccagttcatggagcatggagcgcttggcagccttggggaacatgcagcgaaagttgtgggaaaggtactcagacaagagcaagactttgtaataacccaccaccagcgtttggtgggtcctactgtgatggagcagaaacacagatgcaagtttgcaatgaaagaaattgtccagttcatggcaagtgggcgacttgggccagttggagtgcctgttctgtgtcatgtggaggaggtgccagacagagaacaaggggctgctccgaccctgtgccccagtatggaggaaggaaatgcgaagggagtgatgtccagagtgatttttgcaacagtgacccttgcccaacccatggtaactggagtccttggagtggctggggaacatgcagccggacgtgtaacggagggcagatgcggcggtaccgcacatgtgataaccctcctccctccaatgggggaagagcttgtgggggaccagactcccagatccagaggtgcaacactgacatgtgtcctgtggatggaagttggggaagctggcatagttggagccagtgctctgcctcctgtggaggaggtgaaaagactcggaagcggctgtgcgaccatcctgtgccagttaaaggtggccgtccctgtcccggagacactactcaggtgaccaggtgcaatgtacaagcatgtccaggtgggccccagcgagccagaggaagtgttattggaaatattaatgatgttgaannnnnnnnnnnnnnnnnnnnnnnnnnnnnnnnnnnnnnnnnnnnctctgatactagaataatacgtgccaaaattaccaatgtacctcgtagtcttggttcagcaatgagaaagatagtttctattctaaatcccatttattggacaacagcaaaggaaataggagaagcagtcaatggctttaccctcaccaatgcagtcttcaaaagagaaactcaagtggaatttgcaactggagaaatcttgcagatgagtcatattgcccggggcttggattccgatggttctttgctgctagatatcgttgtgagtggctatgtcctacagcttcagtcacctgctgaagtcactgtaaaggattacacagaggactacattcaaacaggtcctgggcagctgtacgcctactcaacccggnnnnnnnnnnnnnnnnnnntcagcatcccatacacatggaaccacaccgttttctatgatcaggcacagggaagaatgcctttcttggttgaaacacttcatgcatcctctgtggaatctgactataaccagatagaagagacactgggttttaaaattcatgcttcaatatccaaaggagatcgcagtaatcagtgcccctccgggtttaccttagactcagttggacctttttgtgctgatgaggatgaatgtgcagcagggaatccctgctcccatagctgccacaatgccatggggacttactactgctcctgccctaaaggcctcaccatagctgcagatggaagaacttgtcaagatattgatgagtgtgctttgggtaggcatacctgccacgctggtcaggactgtgacaatacgattggatcttatcgctgtgtggtccgttgtggaagtggctttcgaagaacctctgatgggctgagttgtcaagatattaatgaatgtcaagaatccagcccctgtcaccagcgctgtttcaatgccataggaagtttccattgtggatgtgaacctgggtatcagctcaaaggcagaaaatgcatggatgtgaacgagtgtagacaaaatgtatgcagaccagatcagcactgtaagaacacccgtggtggctataagtgcattgatctttgtccaaatggaatgaccaaggcagaaaatggaacctgtattgatattgatgaatgtaaagatgggacccatcagtgcagatataaccagatatgtgagaatacaagaggcagctatcgttgtgtatgcccaagaggttatcggtctcaaggagttggaagaccctgcatggacattaatgaatgtgaacaagtgcctaaaccttgtgcacatcagtgctccaacacccccggcagcttcaagtgtatctgtccaccaggacaacatttattaggggacgggaaatcttgcgctggattggagaggctgccaaattatggcactcaatacagtagctataaccttgcacggttctcccctgtgagaaacaactatcaacctcaacagcattacagacagtactcacatctctacagctcctactcagagtatagaaacagcagaacatctctctccaggactagaaggactattaggaaaacttgccctgaaggctctgaggcaagccatgacacatgtgtagatattgatgaatgtgaaaatacagatgcctgccagcatgagtgtaagaatacctttggaagttatcagtgcatctgcccacctggctatcaactcacacacaatggaaagacatgccaagatatcgatgaatgtctggagcagaatgtgcactgtggacccaatcgcatgtgcttcaacatgagaggaagctaccagtgcatcgatacaccctgtccacccaactaccaacgggatcctgtttcagggttctgcctcaagaactgtccacccaatgatttggaatgtgccttgagcccatatgccttggaatacaaactcgtctccctcccatttggaatagccaccaatcaagatttnnnnnnnnnnnnnnnatacacacaggatggagtgatgcatcccaggacaactttcctgggtagatgagggaacagactggttctttttgccttgagggatgaaaacctgaaaggagtggtgtatacaacacgaccactacgagaagcagagacctaccgcatgagggtccgagcctcatcctacagtgccaatgggaccattgaatatcagaccacattcatagtttatatagctgtgtccgcctatccatactaaggaactctccaaagcctattccacatatttaaaccgcattaatcatggcaatcaagcccccttccagattactgtctcttgaacagttgcaatcttggcagcttgaaaatggtgctacactctgttttgtgtgccttccttggtacttctgaggtattttcatgatcccaccatggtcatatcttgaagtatggtctagaaaagtcccttattattttatttattacactggagcagttacttcccaaagattattctgaacatctaacaggacatatcagtgatggtttacagtagtgtagtacctaagatcattttcctgaaagccaaaccaaacaacgaaaaacaagaacaactaattcagaatcaaatagagtttttgagcatttgactatttttagaatcataaaattagttactaagtattttgatcaaagcttataaaataacttacggagatttttgtaagtattgatacattataataggacttgcctattttcatttttaagaagaaaaacaccactcattttataaaatatagtannnnnnnnnnnnnnnnngnnnnnnnnnnnnnnnagcttatcttgattgaacattcagaacaaggatattattttcagtgattttgtgagatcagctgaaccacttatgataataataataaaaaagactgctttgccctcacgtcagttgtacatggcatggaactttaaaaattttaatataaactttcatccagttagcttcataacttttacgttccagaattttgtttattttcctgtcacatgaacagcaatttaaagataccagtgggacaggtttggttttttaaaaatctcatgtgttcaaattaacataaatattacacgtcaatacactgtacatggtggtaatagactctaagcaattgccaagatgtattctatttttatgaagtgtatatatattaccttagtgtgcattttctatataatatcttgatggactcttttataaaattattttataaaaaacaatgttacactaaaatcagcctaaataaattttcacaactttttttcataaccttaaaaaaaaaaaaagttggtggtggtatgcttaa

SEQ ID NO: 5391 - DNA, 931 bp, Homo sapiens
cccacgcgtccgcccacgcgtccgctcatatggtgcctgaggttttgagcttccttaaggttacttggccccttcaagactgttctgaactccctcaactctctctgcagggcatggagattgtacagaccatgaacagtgatcctggcctggcagtggggtacacagcttttaatggagttgacttcgaggggaccttccatgtgaatacccagacagatgatgactatgcaggcttatctttggctaccaagatagctccagcttctacgtggtcatgtggaagcagacggagcagacatattggcaagccaccccattccgagcagttgcagaacctggcattcagctcaaggctgtgaagtctaagacaggtccaggggagcatctccggaactccctgtggcacacgggggacaccagtgaccaggtcaggctgctgtggaaggactccaggaatgtgggctggaaggacaaggtgtcctaccgctggttcctacagcacaggccccaggtgggctacatcagggtacgattttatgaaggctctgagttggtggctgactctggcgtcaccatagacaccacaatgcgtggaggccgacttggcgttttctgcttctctcaagaaaacatcatctggtccaacctcaagtatcgctgcaatgacaccatccctgaggacttccaagagtttcaaacccagaatttcgaccgcttcgataattaaaccaaggaagcaatctgtaactgcttttcggaacactaaaaccatatatattttaacttcaattttctttagcttttaccaacccaaatatatcaaaacgttttatgtgaatgtggcaataaaggagaagagatcatttttaaaaaaaaaaaaaaaaaaggtgcgagcggccgcgaatttggtagtagtagtaggagacgc

SEQ ID NO: 5392 - DNA, 3103 bp, Homo sapiens
atcggcctccgctcccgcctccaaacctcgcctggctcccagctggtgctgaagctcgtcagttcaccatccgccctcggcttccgcggggcgctgggccgccagcctcggcaccgtcctttcctttctccctcgcgttaggcaggtgacagcagggacatgtctcgggagatgcaggatgtagacctcgctgaggtgaagcctttggtggagaaaggggagaccatcaccggcctcctgcaagagtttgatgtccaggagcaggacatcgagactttacatggctctgttcacgtcacgctgtgtgggactcccaagggaaaccggcctgtcatcctcacctaccatgacatcggcatgaaccacaaaacctgctacaaccccctcttcaactacgaggacatgcaggagatcacccagcactttgccgtctgccacgtggacgcccctggccagcaggacggcgcagcctccttccccgcagggtacatgtacccctccatggatcagctggctgaaatgcttcctggagtccttcaacagtttgggctgaaaagcattattggcatgggaacaggagcaggcgcctacatcctaactcgatttgctctaaacaaccctgagatggtggagggccttgtccttatcaacgtgaacccttgtgcggaaggctggatggactgggccgcctccaagatctcaggatggacccaagctctgccggacatggtggtgtcccacctttttgggaaggaagaaatgcagagtaacgtggaagtggtccacacctaccgccagcacattgtgaatgacatgaaccccggcaacctgcacctgttcatcaatgcctacaacagccggcgcgacctggagattgagcgaccaatgccgggaacccacacagtcaccctgcagtgccctgctctgttggtggttggggacagctcgcctgcagtggatgccgtggtggagtgcaactcaaaattggacccaacaaagaccactctcctcaagatggcggactgtggcggcctcccgcagatctcccagccggccaagctcgctgaggccttcaagtacttcgtgcagggcatgggatacatgccctcggctagcatgacccgcctgatgcggtcccgcacagcctctggttccagcgtcacttctctggatggcacccgcagccgctcccacaccagcgagggcacccgaagccgctcccacaccagcgagggcacccgcagccgctcgcacaccagcgagggggcccacctggacatcacccccaactcgggtgctgctgggaacagcgccgggcccaagtccatggaggtctcctgctaggcggcctgcccagctgccgcccccggactctgatctctgtagtggccccctcctccccggccccttttcgccccctgcctgccatactgcgcctaactcggtattaatccaaagcttattttgtaagagtgagctctggtggagacaaatgaggtctattacgtgggtgccctctccaaaggcggggtggcggtggaccaaaggaaggaagcaagcatctccgcatcgcatcctcttccattaaccagtggccggttgccactctcctcccctccctcagagacaccaaactgccaaaaacaagacgcgtagcagcacacacttcacaaagccaagcctaggccgccctgagcatcctggttcaaacgggtgcctggtcagaaggccagccgcccacttcccgtttcctctttaactgaggagaagctgatccagtttccggaaacaaaatccttttctcatttggggaggggggtaatagtgacatgcaggcacctcttttaaacaggcaaaacaggaagggggaaaaggtgggattcatgtcgaggctagaggcatttggaacaacaaatctacgtagttaacttgaagaaaccgatttttaaagttggtgcatctagaaagctttgaatgcagaagcaaacaagcttgatttttctagcatcctcttaatgtgcagcaaaagcaggcaacaaaatctcctggctttacagacaaaaatatttcagcaaacgttgggcatcatggtttttgaaggctttagttctgctttctgcctctcctccacagccccaacctcccacccctgatacatgagccagtgattattcttgttcagggagaagatcatttagatttgttttgcattccttagaatggagggcaacattccacagctggccctggctgtgatggtgtccttgcaggggccggagtaggagcactggggtgggggcggaattggggttactcgatgtaagggattccttgttgttgtgttgagatccagtgcagttgtgatttctgtggatcccagcttggttccaggaattttgtgtgattggcttaaatccagttttcaatcttcgacagctgggctggaacgtgaactcagtagctgaacctgtctgacccggtcacgttcttggatcctcagaactctttgctcttgtcggggtgggggtgggaactcacgtggggagcggtggctgagaaaatgtaaggattctggaatacatattccatgggactttccttccctctcctgcttcctcttttcctgctccctaacctttcgccgaatggggcagcaccactgacgtttctgggcggccagtgcggctgccaggttcctgtactactgccttgtacttttcattttggctcaccgtggattttctcataggaagtttggtcagagtgaattgaatattgtaagtcagccactgggacccgaggatttctgggaccccgcagttgggaggaggaagtagtccagccttccaggtggcgtgagaggcaatgactcgttacctgccgcccatcaccttggaggccttccctggccttgagtagaaaagtcggggatcggggcaagagaggctgagtacggatgggaaactattgtgcacaagtctttccagaggagtttcttaatgagatatttgtatttatttccagaccaataaatttgtaactttgcaaaaaaaaaaaaaaaaaaaaaagaaagcaaaaaaaaaaaaaaaaaaaaaaaaaaaaa

SEQ ID NO: 5393 - DNA, 1590 bp, Homo sapiens
tcctcctgtataagatatcgtcctctgtaacaaccgggtgccgcgattttctctgcgcccgtcttctaaaattttgtgccggtcttcctgaggtcgctaaatacccgtgctcggaaccaccaattgtgcgttgatatttgatcacctggtgtaatcacgacacttgcacatgattgttctttcggaatatcctgtgaaatatgatcacgtttcttcggcgcccccatggcttaaaggactgcctggttcttcactgattgggtatgttttgttagatctcattgatggagttgaaggcggaaaaagagtggacagacccggtggtctgacctgaagagtgccctagtcttcattactttcacttattgggtttttcaccagtgctgaagacccttacagagtctgtcagcactgacaccatctatgccatgtcagtcttcatgctgttaggccatctcatcttttttgactatggtgccaatgctgccattgtatccagcacactatccttgaacatggccatctttgcttctgtatgcttggcatcacgtcttccccggtccctgcatgccttcatcatggtgacatttgccattcagatttttgccctgtggcccatgttgcagaagaaactaaaggcatgtactccccggagctatgtgggggtcacactgctttttgcattttcagccgtgggaggcctactgtccattagtgctgtgggagccgtactctttgcccttctgctgatgtctatctcatgtctgtgtccattctacctcattcgcttgcagctttttaaagaaaacattcatgggccttgggatgaagctgaaatcaaggaagacttgtccaggttcctcagttaaattaggacatccattacattattaaagcaagctgatagattagcctcctaactagtatagaacttaaagacagagttccattctggaagcagcatgtcattgtggtaagagaatagagatcaaaaccaaaaaaaatgaaccaaaggcttgggtggtgagggtgcttatcctttctgttattttgtagatgaaaaaactttctggggacctcttgaattacatgctgtaacatatgaagtgatgtggtttctattaaaaaaataacacatccaaaaaaaaaaaaaaaaaaaaacacacaaaaaggaaaacagaagaaagaaaagaagcacaaacaaaaaaagaaaaacaagagagggggggggggcgccagaagagcacccgggagggggagccaggtgtaggcgcccgcgcgtgtcgttgtacaaaggtggccccacaatagagagcgcgccataaacacacaggagagacggcgcccgcgttacaacacaggcgggcgagggggggaacaccggctgcagggggaacctgcggagaaaggcgagcccaacccacgggggggggggaggcaacaactcgcgcaacacatcccgcacaaagagaaaataagcggcgcccagggggagaaaccaaaccaccgagaggcggtacaccgtgtccacacccacacgccgatatgcgcgcgccgcgaagaagagagctgcacgacgagtgagtctcc

SEQ ID NO: 5394 - DNA, 2593 bp, Homo sapiens
cattgcctgagtaaaattaggtttttaggtctttttggcatttacttcttttacagctgatgtggaatcaattattcctttatatgttcataagtacaaaatttcactatcttaattacttccaaacaaacaatttccaagcaagggtatgtgtgcctggtttttctgctcctccaattctaagatcgttatttgtttgccttctgtttctcacccaaaaatacagatggttgggaaagatacatcttattgagttgtcctatgcagtctctgtctatatttgcatttctttctattcctatcttgcctttttttttttttttacacagatttggttttcccttccctttgtgaaaaccagaattgagcagcattgtacatcagagatggtacccaggaaatgtctttgttcctcagtatttttcgtcaaaacttccatgcaaagacagtcccagcaaagttgacatacatcccaacctctctcattggcttttctaactttttatagagctattcccctgagaaaagtgaaatgctgagtatgatgggtattgcctgttgataggatagctaaggaaatttgcttttggagaatgtatcttaaataattatacaggaaagtagtcacagtatagtgttctgtttaaggtacatcatgggtacataaatgtctaaaaccttcatcctttggtctatttctctgtaagtgtaaattacatatatattagaaagagagatagaatcaaagaattaggggtgttacagaggcagctttttgctgccttggttttgactgtatcagcatttctattgcagacctctattttcaggggttttagagactcgaccataaaaatttgtttcaggcttaaaagttttgaaagatttttttaggtatctaattttaaacaaatagatcttgtttttatattataggagggaaataaatggagtttactagttcaattttgcgctaatataacttttaataaacttaactttttaaacaaaaacataaaatctaattagttcatagttggttgatgcttttttaaaagaatcaattattgaccttgagaaacttgcctgcttcatcagtatagtaacctatctttgagatattttaaaacgtgtatacctttattaacattatcttgattccagcggtggatcagtatgataatgcagatttatgacatccatataagctatctggtaatatagatttaggaatatatagtatatatgatacatatatatatatatatatttactagatagattaaggagaaaaagctcccataaacttagtttgtcaaataaataccatatatttaaaaaatgcacagacatttatcattcagagtcagaatgagattcaagtaattgcaaagggaagttgtctcttgggtaaacaatacacattttatagcttcttgtgaaactaattttttcctttctatattgtggttatgggaaagtaaaagaattaaaattaatacagactttatttaaataacattaaactgtgaagcagagagaaacgccaggaaattaaatatttaggccattatcttgtggttgtctgacaatacttcacctttcttttaattccccatgatgttttcaattatggagagagtattaaaatctagatttaagtttctgcattgttctcattacactcaacactatttcattaagttcttgataatatgtagtcttctgtgtgcaaggaaagaaataaataacacatttatttgctgaatgagttttaaggtgtgcaagttgtagtgatgtttttcccacacaggattctatacacttataccatcttaaatctggcatttttttttcagatagcttctactgacaaacacaaagcttgtttgtgtgcaaatataaggctaaataaatggtgctaaagtgtattatgactgtcagataaaatcaggcaaaattttgtggtgcttaaattaattttttcattgattttattgatcagtgcattgaacagtgtttattattcacaagttgtcttttattagtaaatcaaggcctcatagcacattgttaaataaagtggttgactagtctatgtaacagctcaccaagctactatctcttttaactccttataatgttgcgtcattaaaggtcaaggggtcatgctattaatctcattgctatagaccattaacatgactgaacttttccacaaagtacttatgtttacaatgctataaccctttgactgctgcggcaacctttaaccacacaaatgtcacaagctagaatcatcagcatggttcttgccatggcaatcaaagagttaagggctgtgcagtgatttgttttgtatttattaatttatatttattttgtttccattcaaggaggggattaggggtggggcagtttttgtctgctgtaagtgtcttaacctagggaagggttaaatggctttttatactattgcatcttctgtatttaccatcaattcattgtgttgtaattaaaagaaactgtcaataaataagagaacagaaaaatgaaaaaaaaaaaaaaaaaaaaaaaaaaaaagtcgtatcga

SEQ ID NO: 5395 - DNA, 3655 bp, Homo sapiens
  misc_feature (410)..(424): n is a, c, g, or t
  misc_feature (1843)..(1859): n is a, c, g, or t
  misc_feature (1871)..(1941): n is a, c, g, or t
acggcgcgctgggctcacactgtcccgccgcggacgggctttgtggttgggggcgcgcgtgcgagtgccagtgagagtgtgggtgcgcgctgtgggccgcggcgcgggtgggtggccgtgcgttcttgcgagccggcctgcaggaggcgaggctcccctggcctcccgcacccagcggcggaccgagcccctggagggaagttgccgcagccgcccgggccgccggccctcctgtcccgcgccaggtacacagcttctcctagcatgacttcgatctgatcagcaaacaagaaaatttgtctcccgtagttctggggcgtgttcaccacctacaaccacagagctgtcatggctgccatctctacttccatccctgtaatttcacagccccagttcacagccatgaatgnnnnnnnnnnnnnnnacaacgagtccattgccttcttttataaccgaagtggaaagcatcttgccacagaatggaacacagtcagcaagctggtgatgggacttggaatcactgtttgtatcttcatcatgttggccaacctattggtcatggtggcaatctatgtcaaccgccgcttccattttcctatttattacctaatggctaatctggctgctgcagacttctttgctgggttggcctacttctatctcatgttcaacacaggacccaatactcggagactgactgttagcacatggctccttcgtcagggcctcattgacaccagcctgacggcatctgtggccaacttactggctattgcaatcgagaggcacattacggttttccgcatgcagctccacacacggatgagcaaccggcgggtagtggtggtcattgtggtcatctggactatggccatcgttatgggtgctatacccagtgtgggctggaactgtatctgtgatattgaaaattgttccaacatggcacccctctacagtgactcttacttagtcttctgggccattttcaacttggtgacctttgtggtaatggtggttctctatgctcacatctttggctatgttcgccagaggactatgagaatgtctcggcatagttctggaccccggcggaatcgggataccatgatgagtcttctgaagactgtggtcattgtgcttggggcctttatcatctgctggactcctggattggttttgttacttctagacgtgtgctgtccacagtgcgacgtgctggcctatgagaaattcttccttctccttgctgaattcaactctgccatgaaccccatcatttactcctaccgcgacaaagaaatgagcgccacctttaggcagatcctctgctgccagcgcagtgagaaccccaccggccccacagaaggctcagaccgctcggcttcctccctcaaccacaccatcttggctggagttcacagcaatgaccactctgtggtttagaacggaaactgagatgaggaaccagccgtcctctcttggaggataaacagcctccccctacccaattgccagggcaaggtggggtgtgagagaggagaaaagtcaactcatgtacttaaacactaaccaatgacagtatttgttcctggaccccacaagacttgatatatattgaaaattagcttatgtgacaaccctcatcttgatccccatcccttctgaaagtaggaagttggagctcttgcaatggaattcaagaacagactctggagtgtccatttagactacactaactagacttttaaaagattttgtgtggtttggtgcaagtcagaataaattctggctagttgaatccacaacttcatttatatacaggcttcccttttttatttttaannnnnnnnnnnnnnnnntaataaacacgnnnnnnnnnnnnnnnnnnnnnnnnnnnnnnnnnnnnnnnnnnnnnnnnnnnnnnnnnnnnnnnnnnnnnnntaattccattttttcccttacataggaaaactgtaagttggaattatcttttgtttagaaagcatgcatgtaatgtatgtatgcagtatgccttacttaaaaagattaaaaggatactaatgttaaatcttctaggaaatagaacctagacttcaaagccagtatttgtttaggtcatgaagcaaacaatgctctaatcacaatattaactgtttaattaaaatgttgtaacaagtataaaacagggaatgtaagtttattaccaaagtgatatgtattccaaaaaagtcatagaagatgaagcactataatattgttcccatatatttaaaatacccaagtacattctaattaccagtatatcagaggaaaattttcgtagtctttgtaaaataatatactcatcatagaaaacttgaaaaatgcagaaatgtataaaaaagcaaaaatgattactgataatatcacaacccagaagtaaccacctttaaaaagcaacccccatgtatgcctatatgtgtattgtatactttttttacataattggagtcatactgtaaacagttttataagtagatctttttcattgcaaaattgccacattttcttatggcattaaaaattttacaaaaacataattttaatggctatattatattccatttaatggatgcaactcagtttatttaaccattcccatgttgttaactatttaggttgtttctaattttcattattataaagttgcagaaatttggtgtacataaaactgtctccatataattgattattaggatatattcccatgaaggattctttttttaaaaaaatgtgaaatgtcatcttgtacttacacctttcatgaaaagggatttcctgcttttgtactgcatgggtggcagttgtgaggaaaagccagtcaaatgacctttttacaaaagaaatgcagtggtcacttcagttgagagtgactttttaatacaacaagatcaactagaagaattcaactgtctcaagaatcaaggtaccccaatatatctcgcaattccaaactttgtttgagggactcgttatccagctcttggtagccacacctgcaatgtaaaatggaagaaaatgcaaagaaaccaaatgtgccgagtgaataaaggattgtcatatcaattagtgtgggtccatctgtagcaaatgggttgagtgtgtcagtatgtggttggttactgtgtattcgccaggaatcaccccgataggctgccaccctattaggtgatacctgtttaatatgttgtccaggtagactagtagttgcatcagtttgctgtaacaagtaaccagtgaggtaacacagtggtgaagcaggtcaggggaggtcaggaggatgtctgagagaaagaagtccgggagatgaatggctgtctaggaaggaggatgtcagtgcacggttagtgtttgagcagagggcagacttgtaaagtacctgtagtgaaaagaatgtggggacccgattagcagaaaggtgtttgcacgtactttatacaaaatacagaatactttatattggaagtgaaagaaatgaacgtggacttttacacatgtgcatatttttctggaggctatatggattatttgaaatgaaaagcatactaattggactttaataaatcattttcaatcagaaaaaaaaaaaaaaaaaaaaaaaaaaaaaaaaaaaaaa

SEQ ID NO: 5396 - DNA, 1390 bp, Homo sapiens
tggcacgaggagagattctaactattgcttttaccttcagtgtgaactagtgtggtaacaactttgaaaaggcaggccgggtgcggtggctcacgcctgtaatcccagcactttgggaggccaaggcgggtggatcacttgaggtcagaagtttgagaccagcctggccaacatggcgaaaccccatctctactaaaaatacaaaaaactagccgggtatggtggcacatgcctgtgatcccggctacccaggaggctgaggcaggagaatcgcttgaacctgggaggcggaggttgcagtgagccgagattgcgccactgcactccagcctgggcaacagagtgaaactctgtctcaaaaaaaaaaattgaaaaggcaaatgtgattgaatatctgaaaagctttaaaagtggcctttctgttacgtctgtggcacaaatggctcatgagcgcaggacacttatggtcttgtgtcctatacttcatgtgtgatgccaccagaaatgttatggattccgtattgaacacactgagagtggtatgagccctcaggactgcaccacagagtaaacacaaccttgatatggtggcgaatatgtgtgtctttcttgtttcatttgtggttggggacaaaatcgatgtatttgtctaaatagtcgatattcatcttaacatggttggttgtgtaatcaccagctatattgtgaactgtgcaataaaacagaagcgtttgtgtatataattacctttggatacctgaaattcccaagcttggttacaatgtaatgctcagtataaggctgtgcaaacatgtaagggaataatggtggtcgatgggatatatgaaatgggatctagagggcttcgagtgaagccaatcatgttgaacgaacactggttcagtgtagatgaagtagagtgaggcgtatgcagtcataaaatgaagggtggacaggagattacatttgaagaaaggataagcactcagacttggtctcttttaaattaaaatatttcttttctcatgtgcaaatgtatatcaaagacttgaacaggtattctcttgaaatttgaggatttttagtttttaatgctgtctttgcttaatattaaatatgtgttgcctattggctcccaaattgtgtgggagtctctaaatgtttcctcttgaaggttcattattgaaagtggttaagtgcacaatgctatttttgtttgatagtttgagttttatgaccctatgagtttaaatgaaatctgttaaatgtttcagagttaacactttttttttgataatttggaataaagtttgttttttaagcccaaaaaaaaaaaaaaaaaaaaaaaaaaaaaaagggcggaaaagtttaaaaatgttggggggggggc

SEQ ID NO: 5397 - DNA, 4577 bp, Homo sapiens
  misc_feature (4187)..(4188): n is a, c, g, or t
  misc_feature (4193)..(4193): n is a, c, g, or t
  misc_feature (4283)..(4283): n is a, c, g, or t
tttaacagccttgagatgagatcacacaaacactcaaatgtagcttctaggggaggggagaacccaggaggctgggctttctcttctcttctcaccactggaagggaggagtaaccagaaggagcggaagctaaaacacgctgtccagagaggggagctgtggtcagtgggacgtcatgagtcagtcatagggtttgtcctgatggtggtggtggcaggtggtaagggttggggaaaaatgaagaattagaggaaacccccaacaccagcaggcaggctgtactgtgactggactctccctcaacatcccccactctgctcaaagctgagggacagaggtggatagtgctgggagggaagagaagagagggggaggagaaggagagagggaaaggggcagtggagagaacaaggccatttctgtttcttttccagggacctgaccagagctgggtggagggaaagcgtgtgtgtgggacttggcatgaaatgaccaatgatgacgagaagtgaccaggaaattccattccctaggacattagggtctctgaaacttgagggtggggtcagagtgtgaagaagacaggtcagggtgaatgtgatggtagcgcagggcagtgggggatgggaacaaagccagaaaaggaagtaagagccactggcggccactcttctttaaagcagccagaagagagtgggttgaggaaaaatgaagtcctgagctggtcagcccaggcggaagagccacccgaatccaaccccacagtgaatagggaaggggctgagaaaacaacaggagggatgaggattagacctcataaggccacgtcctgagagccaagtggtgctcagaactcgacctctctgagttccaaatggcaagagtgaaatatggaaccgggaaagccaccccccgcccccaccaagatcatactaggacttgagggtctcagagctgttgggaggtgagcagaagggatgggaaagaggtgccagggaggaaggatgtacaggctagttctctggtcctgttcgggccccaaaccggttctcccggtcccaccgcctctggccctaaggcctccaacccgcggcctgacaagccctcacatgaagcagctggagagaaagaaagaatcgagagaatggcatgggcaattctggctagaagcccggggcagcagctggtccctgtgtggagaccccgagacatggagggctgctgagggactctggagaagcggagtggactccatatttcagccaagtgacaggcccaacaccaaccttcccttccccaggaaaggtcttctgggggcttaagaggaaagagggctaggccctaagcctcccctccccaaatatattcaatcacacagattccgtatctgtctccccccactacacaactctacctagaagttctctgctgttcccaacccttaaccggactgggacctctctgggaatctttcggaccctctccctcccacctcccccaacattccagttccttcttttccttctactcttcagcggcctcagcctgcgcaccccaggagcgtggatgactacggccaccccgggcgcgcacccctttcccaccaccccagcatctctgcagcccaggacacccgcctcccccacaccccgcatccggtgtgtctccgcctggcccggccggcgcggcaggcgggccaggggaccaactgcacggcctcacctgctcttctccaccatccagacgttcagctacagctggtgggggtgagggactctgctccgtggccgccagtgtgggcttcccgggctagctctgcggcgaggtgggggagccgagtacgagccggcagaggtggggccggctgagggcggaggcggcggcgacgcgattacgaaacccgtccggctcggagccgggcgcactgctcccctctggactgcggaggcactgcactgcgcgggacgtgggagggtgcctctgcagcccctcaaggccgccgcccctgcggggagaactggagaatgcggacacctagatgaggccctggcacccaagctggggcccccggaatctcacgttccctttactcgccaggcatttcggggcaaaacgaagcggagccccccaaacccccagacctaaccaagttcagagattcgcagaagcacgccccccaccccaaatttattgtgctctacccaaaatggaataggactaggtttatttacccattgtgagggtagagaggcgagtctggaggagcagggattgggagaaggggtggaaaaatactctgattcttaaaaatactttgtaacctaaagtccttaaattgtggaagaaaggaatactcctcctttccattgtagtctagagttaagatttcaaatccataaattagaggacctaaaattagagggcaattaactgctcattcattgggcccccagtcagcacgggggtgctggaagagatcgggaataatagcgcagaccaatgagcctagggagatgctttcatcgtctctccttccctcaagtgttctggaacctatcatttgaattagccgagtcaggcaggagggggcggggaatccttccgcccttcttaggaggggctgcattgcagggggagagtgaactgacagactcagtcactgaagagggaaaaggagtgagaagacaaagccgtcaaagccccaacagctttgtatttctccagcccggcgcagaccccggagctcccgaggcactccctccatctttggaacacgccagtaattgattgataacaggaagctatgagggaccctgtgagtagccagtacagttcctttcttttctggaggatgcccatcccagaactggatctgtcggagctggaaggcctgggtctgtcagatacagccacctacaaggtcaaagacagcagcgttggcaaaatgatcgggcaagcaactgcagcagaccaggagaaaaaccctgaaggtgatggcctccttgagtacagcaccttcaacttctggagagctcccattgccagcatccactccttcgaactggacttgctctaaggccaagacttctctctcccatcaccttgccctcattgtcttccctctcaagccccttcctttccactcctttcccattttaatcttgttctctccctactgtgttggtggtgctgatgaatctgccagagttgagttctatgtatttatttatctatctgtctactccatttctctcaaaagccctcaagtcacaaagtaaatggttcaagcaatggagtactgggtcacagggattcctcctttcccccccaaatattaactccagaaactaggcctgactggggacacctgagagtagtatagtagtgcaaaatggaagactgatttttgactctattataatcagcttcagagattccttaaaccttcctaatttcctgctccagggcagtaaacacaaatatttcttcaaggggtgatgaaaacctcggaagttttaatttgaggttatctgctacaaaacagtatttctaaaaggctaaagtgataagtctcttgcttttttttgatcctgctcttatattcttttttttcctcagagaaatcaggagggtagttagaggtataaaacaggaggaaatattatggaaaatgaaaatagggaaaataattgaatcattttagaagtagctaatttcttttctcaaaagagtgtcccttcttcacacctactcactttacaactttgctcctaactgtgggttgaaaactctagctaaagaaagttatcaaatcttaacatgcattcctactattatgatagtttttaaggtttcaattcaatcttctgaacggcataagtcctattttagccttacctcctgcatttgcaatacgtaatactgatcagtgggcacagttcttcagctacattgagaccctgaaatgaacaattatattctgactcgacatcttgtccccaatccttccaaaaatattgatggtgatttgtgctaccatttactcgtttatttaataaagacattcaatcccaaaaaaaaaaaaaaaaaaaaaaaaaaaaaaaaaaaaaaaacaaaaaaaaagaacaaaaaaaaaagaagaaaaaaagggcgggggcccccaaaaaagaccccccgagggaacaanngcggncggcgaaccccaaaacactggcccaaagaaagccccagggggggagggggggcccacaacaaaaacccccggggggggcgccgaaataancccccacccttggttttttgtgaaagaagggggggcctttaggggggggagactataaaaacctcgggcgggcgcggcccctttgtttcaaaccccccccattggggaagaaaacgccccccgggggggttttttggggagaaacactttttctttggggggggggggccattttgtggcaaaccatcttgccagaagtttttgttccctggggagaaaaaaatgattgtttttggggccgttcgggtgtgaaaggaaccggcggcttgtgggggggccccaaaagaaacatcc

SEQ ID NO: 5398 - DNA, 3874 bp, Homo sapiens
  misc_feature (231)..(247): n is a, c, g, or t
  misc_feature (2480)..(2490): n is a, c, g, or t
tttccacaaaaatcccatctttttatagcactaatgaaatggcagatatggggtggtcaaagataatcagatgtcaagtagtggtcttctgcaggccggccgcttccatcatggaactgtcattaccacctctgctgaaggacagtggtgcggcctctaggaacgaagttagtcctctggaaatggacctaaatcccaccacatttttaccctaatgaatgatttttctannnnnnnnnnnnnnnnntaacttgagtcatattttcagaaacattttttgacaaatgatgaagcatgcactaagtataatttttttttattgctagagaagtaacacttaaagtaacgattttttttttctgactccggctaaacaccagaatgacagagaagtggcagaaaccatatgtttgtactcacatctggccacaaaaccagaaatactgtacattatgtaaagaggtctggtgtggtgtgacatcctgtataagaatatcatcaatttaaaatataaaatttggaaactattctgctttacagactccttttactcttaacatgttcaggaaactggatgtggaattggtacaattctctgaccgctttttgtgtcaaattatattgtgataaaaaaacaatgacatactattttccctatcgcaaagaaaagtattttcgtttatactgttttttcctttggaaaattttcaattgtacattttatttcactgatagttgtatttttcacaaggaaaatgttgtggttataattacgtttgatatatctctacaacaccttttgttattttcagtaaatcttagttatatgttgaatttctaatgtgaattctatcttgaggtaaccatttttttcatacagatttgcttcagtgttatccagaatatgcattcagtactagaattagtttagctttataaatagggctgtgttagacactgcagtaattttctaattcataaaataaacttcttactaaactagcacttgattaacttgttgaggtaaaaatctaactacatttacattttgaagaataaaactgataattagactatttgcagtgttaaacacagcttccttaactcttagaactggaagttgtagagctctccttttggtgcctttccagcctttatacacactattgtagctttcttaggtttgataggtagcgtttcaagtagtttagctgagacagtgaatgtattaggttcaacatgaccttgtgttttatttgtgtttgccaacaggatgccttatttgtttgagaaaaagatgtactagtgtcattctaaactatctccttttttaggattctaaagaagttaatcatcatccttttgtttattttaccaccatttagtgccttaaatcctatcaagaaagcagtgttactgctcaatgcccaaataagacacgcggatattgctattgtcttgcttttgagttaacaggccaactttttatacttaaaacctcagtaaactggcaaagaattgaaggtaatgtgatttgatttgagaataaaacattgtagcattgggtgaaaaatgagtatttgagttaagcttacatatttatttctgatggttatcttattaaaagcaataatccttaatactgtacttgccattagactaggtactcagtaatggaagtttctctcaagggttaaatgttccatttttgaaagttttaaaaaacctgtttgggtggtttattttgaaaacaaaagtaacctattagattcattttgcctaactcatatgagagatgcagagtatcaacagtgggagcatcataaaatgaattttccaagtggagaggagtaggaagcagccatatgatagtattgactctggacagaattgatgtctttcgtttccaaagtgcagagtagggaactacatttcctaatgtggcattgtaaatatacatctttatattactcttccagcctacgttcctaaatcattgataatttaaatattttttaaagccaccttaatttaggtagctcttggaatcgatgtttgaattcactagccacattttcttcatgatatgcctcgtggcaaacaaagatgtttccttaagatgaatcttacatttcccatagaaaataacccatttcctttggcactgcagttgccctcaaactgcttgcagttgtattcattttagtacaacaaaggttttcataatatgggaggccaagtctatgatactgcctcaaagagaccctattgtgtagatgcatcatcttctctcatttgatccatagagcataggcaaagatgtcaacctcaggccttagagaaaagtggaaatgttattatgacagccgtccatgagttatcgctttgtatgaagttaaatacagtcatgcgttgcttaacagcagggatacattctgagaaatgcattgttaggcaattccgttgtgcgaacatcctannnnnnnnnnncaaacctaggtggcatagcccacaacgtacccaggctatatggtaaacctgtacagcatgttactgtactgaatactgtaggcagttgtaacacaatggtatttgtgtatctagacatagaaaacatacagtaagaatatggtattataatcttacgggaccactgtcaaatacgcggtctgtctttgaaaagttgtaatgcggcgcatgactataaatacctagctggttagcatttacattccttgccagggagtttgaaatttatactatagaaataactttaggttttaggtagagttaaagaggtaaagcacatgttgccacaacccaggaaagtatttttaagaaagattggattttcctacctttagagatctaaaaaaaatttaatataaaaaatcattttgtgttggtgtttattactagttcagatgagtggctgctgaaggggcccccttgtcattttcattataacccaatttccacttatttgaactctttagtcataaatgtctaatgacttatgaattagcacagttaagttgacactagaaactgcccatttctgtattacactatcaaataggaaacattggaaagatggagaaaaaaatcttattttaaaatggcttagaaagttttcagattactttgaaaattctaaacttctttctgtttccaaaacttgaaaatatgtagatggactcatgcattaagactgttttcaaagctttcctcacatttttaaagtgtgattttccttttaatatacatatttattttctttaaagcagctatatcccaacccatgactttggagatatacctataaaaccaatataacagcagggttattgaagcagctttctcaaatgttgcttcagatgtgcaagttgcaaattttattgtatttgtagaatacaatttttgttttaaactgtatttcaatctatttctccaagatgcttttcatatagagtgaaatatcccaggataactgcttctgtgtcagtcgcatttgacgcataactgcacaaatgaacagtgtatactcttggttgtgcattaacttacatgtataatttttggcatctgtgttcacaaatgcatgtgttagcaaatcacctttatttataagtgacaataattgaagttaaggatataaagaaacctgcatttgtagtccagcgttttcatttggtccataacacaatgtatggaaatgtgaaagacaattttgtacatttgtttgttactaactcagatcattaaaatgaaaacaatttttttaaacaagaaaaaaaaaaaaaaaaaaaaaaaaaaaaaaaaaaaaaaaaaaaaaaaaaaaaaaaaaaaaaaaaaaaacaaaaaaaaagagggg

SEQ ID NO: 5399 - DNA, 3289 bp, Homo sapiens
  misc_feature (2082)..(2128): n is a, c, g, or t
agcgggtgatgttcactcgcgcgtcgagcacacggtgggtccggcggcgggttggcgccccaggcggcgttccctgtggcctggcgcctgggccgctgccctgagcgggttccgccccagagcccgaccctcctgggggctctaggcggagtcccgcgagccgagggggaccggcgaccgctgccgaggcatgaagaaggggtaaggcgtgagcccccaagatttcacgcatgccccctagcttcggtactctgacaccttctcttgcacttgcggatgatgaactggaataacgatgaaagaaagcacatccgatctcaacattcacgtcctgccctataaccgattaattaattgatccccagctagactagtgttggagaaatcagcatgttaaaacaactgttgatgatagctgttggagtaaagttgcagtggaagctatggctgcaaaatcgttaaaatcttcaaggtgaactggcacaaaggttaatctcaagatgccgctagtgaaaagaaacatcgatcctaggcacttgtgccacacagcactgcctagaggcattaagaatgaactggaatgtgtaaccaatatttccttggcaaatataattagacaactaagtagcctaagtaaatatgctgaagatatatttggagaattattcaatgaagcacatagtttttccttcagagtcaactcattgcaagaacgtgtggaccgtttatctgttagtgttacacagcttgatccaaaggaagaagaattgtctttgcaagatataacaatgaggaaagctttccgaagttctacaattcaagaccagcagcttttcgatcgcaagactttgcctattccattacaggagacgtacgatgtttgtgaacagcctccacctctcaatatactcactccttatagagatgatggtaaagaaggtctgaagttttataccaatccttcgtatttctttgatctatggaaagaaaaaatgttgcaagatacagaggataagaggaaggaaaagaggaagcagaagcagaaaaatctagatcgtcctcatgaaccagaaaaagtgccaagagcacctcatgacaggcggcgagaatggcagaagctggcccaaggtccagagctggctgaagatgatgctaatctcttacataagcatattgaagttgctaatggcccagcctctcattttgaaacaagacctcagacatacgtggatcatatggatggatcttactcactttctgccttgccatttagtcagatgagtgagcttctgactagagctgaggaaagggtattagtcagaccacatgaaccacctccacctccaccaatgcatggagcaggagatgcaaaaccgatacccacctgtatcagttctgctacaggtttgatagaaaatcgccctcagtcaccagctacaggcagaacacctgtgtttgtgagccccactcccccacctcctccaccacctcttccatctgccttgtcaacttcctcattaagagcttcaatgacttcaactcctccccctccagtacctcccccacctccacctccagccactgctttgcaagctccagcagtaccaccacctccagctcctcttcagattgcccctggagttcttcacccagctcctcctccaattgcacctcctctagtacagccctctccaccagtagctagagctgccccagtatgtgagactgtaccagttcatccactcccacaaggtgaagttcaggggctgcctccacccccaccaccgcctcctctgcctccacctggcattcgaccatcatcacctgtcacagttacagctcttgctcatcctccctctgggctacatccaactccatctactgccccaggtccccatgttccattaatgcctccatctcctccatcacaagttatacctgcttctgagccaaagcgccatccatcaaccctacctgtaatcagtgatgccaggagtgtgctactggaagcaatacgaaaaggtattcagctacgcaaagtagaagagcagcgtgaacaggaagctaagcatgaacgcattnnnnnnnnnnnnnnnnnnnnnnnnnnnnnnnnnnnnnnnnnnnnnnnatagtgattcggaagatgattcagaatttgatgaagtagattggttggagtaagaaaaatgcattgataaatattacaaaactgaatgcaaatgtcctttgtggtgcttgttccttgaaaatgtttggtcattctagtgttttgctttcttttccttataataaatgacccttttcctccataacttttgatttctaaggaaaatattagcatacatttcaaactaaatgttttacagtggcttatcttttttttccccctgaaaagactaatttggtcaaataaaccactaagtattaagcatggacagctgttgttagagtagcagattcagttttttgatatatcttaattgtgtactttgtgaattttaatttaaagaaagcaactgaaattgaaatcttgagggcagctgtatctactaatgagccttattccatttcctgatgttttaaaagaagaaacactgccttgattatacgaatacactcagaaagtacatttagcttgtagtgttgaattctcttaaaggaatgcttgaattttttcattattgttttattgtttttatatacttgccttatttgaatgtttagcagtatccccttcccacttatatattgtgtgatatgattttgcttgcctataggagttaaaaacttttccatgtgaaatactctgacttaaacatacatgtaacttacataactgttaagaataacagtctgatttaataaatggttcattttaaaagttaaaaaaaaaaaaaaaaaaaaaaaaacaaaaacaaacacaaaaagacacacaaacaccacacacacaccccacccccacaacaaccacacaaacgccaaacaacacaacagaccagaaaacaaaagaaaggcagcgggggcaggcaaaaaatcactcgcgggggggcgagcagagaaacccacacccaccactctatgacagcaagcgcgagcccactagggagccatgacacacaagaacgcagccgcgccgtcaaacacacgcacagcggaagaaacgtgaattgggacatacggacagaccaactcgcggcgggggagcaaccgcaccacccaacagaacacgcgccggaaacaacacagcggggcggccacccactcgcgggcaacgacggataaataacgg

SEQ ID NO: 5400 - DNA, 2003 bp, Homo sapiens
tttgatatgcctgcattttggaaaaaaaaattgaggatttagcccagtcgctttcccttgatatagccttgttctgaattaaaatggaaaaaatatttcaattattttcatcttgttctcaactggatgttagtcaatgtggtctctttttgaatatgtatcaaatattaatgatccataatattagggagataattttaaatgaagtgatacgtgtctaacttacttaaagaataagtttttggtttttgctttcaaagacaaccaaatctgatattgttcatcctgataaaaataacaacttttagtgcttaaagcattaattaagcaagtggctaggtatgataaagaacttctgcttgctccccaagaggcaaactattagaagaactggagcgggagtcctttggacccatcgtggatctctttaagccactgctacccaaaaacattcaggacaagcaaacatttagagcaagaatctccaaataattcttcaggatttgtaatgaaatgatgttcagttccattttgctctttacatagggtggagaattgtcatgtcttctctaatttttccaagtaaagtggtagcaaaatgttttaaaaagcaatcttatattagaaaacaaaaatgttgtcacttgaaataccaaaacaacatttctgagcgttgttgagggactggcaaagcaatcagctactataacaaatcagtagaaataaccctcccacaccagatatgcatgcagaaggaatggagtattatagagacttgatacaatggacatatgcacatggaggtacaaaacacacagtctaaatacaaatgaattccatcagatttactatacggaacatcagtagtgacagattgcacttcttacttaataacagcaaacttaatttctgaggggaaaaaaatggcgaagtcttatcccaaacaaatagcaagagaggtatcatcaaagagctaaaattttctttggcatggtaaagggggaaattgagtttaccaacttatttacatgacatttctctatattggtgagtaatgcaatgccattttgttacataaagttgtttgatgttttttaatatgccttcatataaatattttattcaatatgttgtatttgtgaatttaacaaatgatattaaacacaaactacaatgcagacagacaaactctttgtatgcaaattagcaatacataccaacagttcttgatacacaggtacctactacatgcagctcatcattgctgtcctcttcccatgctataggtgagaccagacacaaagtaaatgacctaactcaattacaaataacaaggacccctctgcaatatgtctaaacatatattagaagaaagtatttgacatccttcatagggataaatgcccttatagacaccccatatataaaacacaacagagatacacatttacataaatctcagtcatttacaaaaataaatcttgtcttaatttaaaccaataaacagacttgcaggggaaaaagaaaccagcaagtagggctaattatcagtaacaaatagatgggggtgtttgctctgtgtgtgtgtgtgtgtgtgtgtgtgtgtgtatatgtgtgtgtttgtgtgaagtgaagtgttgctgctgtaagtagtgtccataagcccatttgactgtattacaagttagttaattactcatatagttggccacatattatgggatctatgttttctgaaaataattggttaatggaagttatctaatatattttaactgttcctgttaaaaacaataggcttcaagatgacataacaccaaatcaaaaatgaccaaaggaatcattttgtttgttagatttgtaatttagcatcattggcaataaatctactcaaacgttaaaaaaaaaaaaaaaaaaaaaaaaaaaaaaaaaaaaaaaaaaaaaaaaaaaaaaaaaaaaaaaaaaaaaaaaaaaaaaaaaaaaaaaaaaaaaaaaaaaaaaaa

SEQ ID NO: 5401 - DNA, 5001 bp, Homo sapiens
  misc_feature (4916)..(4916): n is a, c, g, or t
ggcggaggccgggccaggcggggctgtagggctggggcaggcggcgcccgggtctggccctggcctacgggctaagcgcccggccccggggccgcggatccggcagccatgtgtggatcttgaagcgccatgtggtcttctgaagcgctttgacagttctaaagggctttatattgcaaactgatcaaagcgcttcgtagccccggaagcgcttaggcatctccgaagtagcgctgggcaaagtgaaggcttcctgatctcagaagcacgttgtgggcttggaaacctacggcagcctttagtcaattttggatcgctttgacttctccaacacggtttggcatctctgaaaccttgagaactgtgatgggcagtggaaagaagagggaaaggtgcccatggcgtccgagcggggcaaggtcaagcacaactggagcagcacgtcggaagggtgtccccgcaagcgcagctgcctccgggagccctgtgatgtggccccctccagccggccagctcagaggtctgcgtcgcgttctggagggcccagcagccccaagcgcctgaaagcccagaaggaggacgatgtggcttgctcgcggaggttatcctggggctcatcccgccgcagaaataactcctcctcctccttctccccacatttcttgggccctggtgtgggcggggccgcctccaaaggctgcctgattcggaacactcgggggttcctgtcttcagggggatcccctctgcgtcctgccaacgcctctttggaagaaatggcttctctagaggaggaagcctgcagccttaaggttgattccaaagatagttctcataactccacaaactctgaatttgcagctgaagctgagggtcagaatgatacaattgaggaacccaacaaggtccagaaaaggaagagggatagacttcgagaccagggctccacaatgatctacctgaaggctatccagggcatcctggggaaatcgatgccaaaaaggaagggagaggctgccactcgggcaaaaccaagcgcagcagagcatcccagccatggagaaggaccagccaggagtgaaggaccagccaagactgcagaaggagcagccaggagtgtcacagtcactgctgctcagaaggagaaagacgcaaccccagaggtcagcatggaggaggataagacagtgccagagaggagcagcttctatgacaggagagtagttatagaccctcaagagaaacccagtgaggagccccttggggaccgaaggactgtcattgacaaatgctctccacccctagagttcttggatgactctgactctcatttagaaatccaaaagcataaagatagggaggtggtgatggagcacccctcttctggaagtgactggtctgatgttgaggagatctccacagtcagattctctcaggaggaacctgtctccctgaaaccttcagccgttctggagccttcttccttcaccaccgactatgtcatgtaccctcctcatttgtacagtagtccttggtgtgactacgccagctattggaccagcagccccaagccttctagctacccctccacaggcagcagcagcaacgatgcagcccaggttgggaagagcagccggagccgcatgagtgattattcccccaactctacagggagtgtccaaaacacctccagagacatggaggcctcagaggaaggctggtcccagaattctcgttcatttcgcttctccagaagctcagaagaaagagaggtgaaggagaaaagaacattccaagaggagatgcctccgcgtccttgtggaggacacgcatccagctccctgccaaagagccacctggagccaagcctagaggagggcttcattgacactcattgtcacctggacatgctctattccaagctatctttccaagggacctttacaaagttcagaaaaatttacagcagctccttccctaaggaatttcagggctgcatctctgacttctgtgatccccgcaccctgacagattgcctatgggaggagctgttgaaagaggatctggtctggggggcctttggctgtcaccctcattttgcacgttactacagtgagagtcaagaaagaaatcttttgcaagccttaaggcaccctaaggctgtggcatttggagaaatgggcttggattactcttacaagtgcaccacgcctgtcccagaacagcacaaggtatttgagagacagctgcagctggctgtgtctctaaagaagcccttggtgatccactgccgagaagctgatgaagatctgctagaaatcatgaaaaagtttgtgccccctgactacaagatccataggcattgcttcaccggcagctacccggtcattgagcccctgctgaagtactttcccaacatgtctgtgggcttcacggcagtgctgacatactcctctgcctgggaggcccgggaagccttgaggcagatcccactggagagaatcatcgtggaaacggatgctccctatttcctccctcgccaggttcccaaaagcctttgccagtatgcccacccgggcctggccttgcatacggtccgagagattgccagagtcaaagatcagccactctccctcaccttggctgccttgcgtgagaacaccagtcgcctctacagtctttaagcagagaagggcgaccagcagcctgacagaacacaggctggcttgaagtctgtgtctcaggtcgaggatgtgtttagagagctgattggaacacagaaaaccaggacaggatgttttcctccaagcgggtcataaggcttcagcttctgggtggtgggtggggtggggtgggcatggaatgaggggtatggggactgcctgtaatagcactgggattttgcctcccagccaaaatgctccagggtaggcagcaaagaagaaagagtgcgatatgagggtacagtgagtttggcagtccaaattctgttctctgcagcctgtttttgagtagttggtgaataaagtcacccgcctacttgtctaagcacatgtgggtgtgtaactcagttcctggttctcggttctaaaaacagacttccaactgggaaactttttgggggaaattaactggacacctatctcggaggtttattttcttgcaaccagtgaagtcgtcctcctcccttccctggataactcttcagtttgactgtcactgttctggtgtcaactccagcgtcggcacaggcagaaggacttcagctgctggtctcattggttccactgccattgatatgggggggtgcagaggagcactcattgtccatgatggagatccaggacagactgggggactccgggaagaggctttcttggggaagaggaccccaaaggaggtacttcctcctcactgatgccctcagggctgctgtgtgggtgtgttaagctgataaggttcagtttgcggcggaaactacctgctagtcttgtgtcaggggctgccagcctccttttgttttacttttgcccccttcttgggaacatttgaccaaaaataatcctcatttcatcttgtgtacagtcctttgtgtaccccgcccaggttgagaggtgaatcagcgtaattctccgaagctctgctgggcagctcagccatgttacattgtctatgcagaataagcaggcctggtgtctgcaaatgtaccagtccttctcccgcatctcctgggtgcccccttggctttgcctctcctgtgtcctgtctttctgcgttttagaagtgagagcctctccttcaccttttgagcaactgagtcatctcaagtcctgagctctgctctgccgcctgctggtgccttgtaaaggtatactcgttacaggccctagaggttctaatggtccagggttaagtgagaggagactgtactttgtttcaaaggatccttcaccctgatctgcagtgaggtggatagatcacctggagtccctcgtctgtggtcttggaggcttaaattgtaaaatacatcccttatggaatcctaaattcctctaggtgtttttggaaggcgcatttgagccttgtgagctaaaatggaatggatttaatatttcctatctggcatttccatcttgcccctggtacacaagtcactggcctggaactcagccttgattcactgtccgtcttcacggattagctgtgctgttatgttgtctgtgctgcagattggcccatgtgggaagtcgggggggacctgatttcctgcttggaagacttgggggactgccgagcatatcaaagtgtttatagtcaccaagtgaactgcagcacaaccatctcctctccagcaagccctgaagtcagtagtgcctgcaggtgaaaccaaccagccctgtgttagaggaggaaaagcggagatgacatggaagtctccaagcctgtgccatccacctgccaaggaaaagcacaaggtgctatctacttttctctctaggatttagattatcatttatgtgctgttgcacagtgaaacctcacctgtgtgggcgtgaaagctgattggcattgtttttgattcagctttttggatggctaattgttttcactgtgctgtgggaatgcctctgtattttttcccctctttggccatctttttctgaaaataaagtgatggatcctctagccaaaaaaaaaaaaaaaaaaaaaaattttgggcggccggccgaaaattttaaaccatcgtgtgggcggcgcccccgaagttaattgaacattggcaaaggtctgtcccaagaacctcggcaagaaagtggggtttccaccaaaaaaacgcgggaaccgggtgtcgacaatccaggggttccgggctaccgtctacaacggccaccggtctatcccccctgggcggcggnaccaccacacccacaaatcaacatcaataataacatagaagacgttcagcagaccacaaatcacaacacccatcaagcctatacg

SEQ ID NO: 5402 - DNA, 3856 bp, Homo sapiens
  misc_feature (537)..(551): n is a, c, g, or t
  misc_feature (1538)..(1538): n is a, c, g, or t
atggccgggctcggccaccccgccgccttcggccgggccacccacgccgtggtgcgggcgctacccgagtcgctcggccagcacgcgctgagaagcgccaagggcgaggaggtggacgtcgcccgcgcggaacggcagcaccagctctacgtgggcgtgctgggcagcaagctggggctgcaggtggtggagctgccggccgacgagagccttccggactgcgtcttcgtggaggacgtggccgtggtgtgcgaggagacggccctcatcacccgacccggggcgccgagccggaggaaggaggttgacatgatgaaagaagcattagaaaaacttcagctcaatatagtagagatgaaagatgaaaatgcaactttagatggcggagatgttttattcacaggcagagaattttttgtgggcctttccaaaaggacaaatcaacgaggtgctgaaatcttggctgatacttttaaggactatgcagtctccacagtgccagtggcagatgggttgcatttgaagagtttctgcagnnnnnnnnnnnnnnncctgatcgcaattgggtctagtgaatctgcacagaaggcccttaagatcatgcaacagatgagtgaccaccgctacgacaaactcactgtgcctgatgacatagcagcaaactgtatatatctaaatatccccaacaaagggcacgtcttgctgcaccgaaccccggaagagtatccagaaagtgcaaaggtttatgagaaactgaaggaccatatgctgatccccgtgagcatgtctgaactggaaaaggtggatgggctgctcacctgctgctcagttttaattaacaagaaagtagactcctgagctgcagagtcccccccggtagccggcaagaccgcacaggcaaggccgatgactctgtgcccactcctgttgttttccttgacaatctactgtgccactgtgctactaactcttgtttacaaaatttgattctaagttgaattgcttcattcaacacccccaccctccctcccctcgaggtggtacctaagctgtggatttgctaaatgaattaagcaacctagaagatacagagctaatgaattatcaaaatgtgattaatcccagtaaggaaacactcatttagtgtctgtatttttggtgtgaaaattatttagttgccagtatattctgaagaatgtcttcttgatcagtcagataagcttgcttttttttttttttttttttcatgaatcatgtttggttcctgtgaaagtccctggtccagggatcctcctcctttctcttttacttctgaattctgaaattcagttagttacttttgcctttcgctcttctatcacagccaccttgaccttgggtaaaacccaaggtctttccttctggctaccttcctgcaggtccaccctgtctgccattggtctcctctgcctctgactacatctgccaccaacaaccctcccctcacccctgccaggggcagacaggcttctcagcagaactgtgactgaaatcagacngcgcggtcgggggcagagtaactacacagaggcacatcctgacagggtttgccccagagatctaaattccagaaggagggcaccacacctaggaaggtaaatccagtatcagaaggttgctaaaagattaaagatcaagaagcttggaaacatcccatgggtacaatgtcttagaaagtctttaagtcacataccatgaatttttgcttcattactgaccatatatgaccttggaggaactcttttttttttttccttctactcatttctgtttccacctaccctgactcaccgtatttccagtcttctacccctgcagttatcctagtccagcaaagtcatttctttcaaaagagacatcatgtctgaaaataattactggtagtctaatatgagccagagtaaacagctcctcatggtcaatgaacatgttcaggaagcgatcaccttgatgcttgaacccaaccccagacagtggacaattctactttgaaatatccgtgaatatttactgtgggatccaatttaaacttctttcttctctagcctttaaattacacaactttgaactgacacggatctcttacaaagaacaatgcggcactgaaggaagagatgattcctttactcaaacctgcaggaatcagcctattaacaggcaggggaaacggtactttccaatgaatggtaactgatccaggcacattatcacacttcctagtcatctccacctttcctgtattgcctgtggcttgttgtttaagattaagaatcaaagagattaagaagtatcacttcaagtcttgctctgctcacttctatgtttgcagtcaaattattccttatgttggtgacctaaagagaattactttcattcatttcatttcccccgtagcagatggaagtgagaaacctctgagaaaatgaaaacatccttaaccactatctttcccttttatttgattattttatgtcagaaatttgcaaaagtttttttctcctccttctcttccttgttgcttaactttttaattcatgccatatgcagatatccaattatgtgcatcctgtgaataaaccacgtcttggtcactgtcatattttgaaccatctcatcagagatgaataatatctttttaccagagagagaacgaatgttagccacatgcccaagttaacaaagaaaaaatgttctcaaggttgtccttttgggttaaatctggcccttccttggcaaaagcaaaaattctccctgtgagagctcaacatctcaaatacaaccacaggaaaaatggcccaatctgccagtttaggcttaccagcatataatttttaatatctttacttctatcatcccaaatcaaagaactcttctctattatgtttaatcaattgcaagcaaatagatttttctttgtaacaatttgttctgcagaaggctgtttttcacttttcctttcttttgcttctttctgtctttccttctcttttgtctggagaaatcacttagactctgtgtgcctcttctacattgcattctgctctgctatgttacctgctaggctggcttctttggactccctatatgattgatgatgtgaaaacctaaattacttgcagcatagtattacttctttgatgttctcattagcataatgttatttttgaaaaggaaagatactatcacataagttttcctcatctgttgtgatatacaccaatggataaactaacggaaactgctttttgacattaaaagacaggagaaattatatttaactaagtaaaagttaagtcagaattacttgggtgatgtgattcaatttagttaaaggatgatatagagaaaatacattatttagcattatttcttcagctataatgaattgctatagaaatcaggcagatctttctaatgtgtattgattggtcttttcagctactctgaacagattactaaggccatctcctcatctctaagggagaaaaatagtctgtagatgaataatgtaaggtaaagagttgcatgtcagtctttgtaattatttacactttaactttctccagaactcagacatgatttcaacatggtgttagatttgtgcattttattttcctgaccacctcattccagccaatgtatggttatccactctgtgtgccaaaaccaatcatgcctttcacggccctttagttcagagaagttctgcactgatttttagtctcttgatgtctcaatcttacatgtataccaatcacaatggaataaagtgttgagttgtactgtgaaaaaaaaaaaaaaaaaaaaggcggccgct

SEQ ID NO: 5403 - DNA, 3602 bp, Homo sapiens
  misc_feature (2990)..(2990): n is a, c, g, or t
  misc_feature (3025)..(3025): n is a, c, g, or t
  misc_feature (3470)..(3471): n is a, c, g, or t
  misc_feature (3582)..(3582): n is a, c, g, or t
cctctcttctccctccctccggcacgagggtgtccctccccgcccggctggaggctgctccggaccgggacgcagagtctgcggacccggcgccgaggcggccacccgagacgcggcgcgcacgctccggcctgcgcagcccggcccggccatggcggccccccgcccgtctcccgcgatctccgtttcggtctcggctccggctttttacgccccgcagaagaagttcggccctgtggtggccccaaagcccaaagtgaatcccttccggcccggggacagcgagcctcccccggcacccggggcccagcgcgcacagatgggccgggtgggcgagattcccccgccgcccccggaagactttcccctgcctccacctccccttgctggggatggcgacgatgcagagggtgctctgggaggtgccttcccgccgccccctcccccgatcgaggaatcatttccccctgcgcctctggaggaggagatcttcccttccccgccgcctcctccggaggaggagggagggcctgaggcccccataccgcccccaccacagcccagggagaaggtgagcagtattgatttggagatcgactctctgtcctcactgctggatgacatgaccaagaatgatcctttcaaagcccgggtgtcatctggatatgtgcccccaccagtggccactccattcagttccaagtccagtaccaagcctgcagccgggggcacagcacccctgcctccttggaagtccccttccagctcccagcctctgccccaggttccggctccggctcagagccagacacagttccatgttcagccccagccccagcccaagcctcaggtccaactccatgtccagtcccagacccagcctgtgtctttggctaacacccagccccgagggcccccagcctcatctccggctccagcccctaagttttctccagtgactcctaagtttactcctgtggcttccaagttcagtcctggagccccaggtggatctgggtcacaaccaaatcaaaaattggggcaccccgaagctctttctgctggcacaggctcccctcaacctcccagcttcacctatgcccagcagagggagaagccccgagtgcaggagaagcagcaccccgtgcccccaccggctcagaaccaaaaccaggtgcgctcccctggggccccagggcccctgactctgaaggaggtggaggagctggagcagctgacccagcagctaatgcaggacatggagcatcctcagaggcagaatgtggctgtcaacgaactctgcggccgatgccatcaacccctggcccgggcgcagccagccgtccgcgctctagggcagctgttccacatcgcctgcttcacctgccaccagtgtgcgcagcagctccagggccagcagttctacagtctggagggggcgccgtactgcgagggctgttacactgacaccctggagaagtgtaacacctgcggggagcccatcactgaccgcatgctgagggccacgggcaaggcctatcacccgcactgcttcacctgtgtggtctgcgcccgccccctggagggcacctccttcatcgtggaccaggccaaccggccccactgtgtccccgactaccacaagcagtacgccccgaggtgctccgtctgctctgagcccatcatgcctgagcctggccgagatgagactgtgcgagtggtcgccctggacaagaacttccacatgaagtgttacaagtgtgaggactgcgggaagcccctgtcgattgaggcagatgacaatggctgcttccccctggacggtcacgtgctctgtcggaagtgccacactgctagagcccagacctgagtgaggacaggccctcttcagaccgcagtccatgccccattgtggaccacccacactgagaccacctgcccccacctcagttattgttttgatgtctagcccctcccatttccaacccctccctagcatcccaggtgccctgacccaggacccaacatggtctagggatgcaggatccccgccctggggtctggtcctcgcccatcctgcagggatttgcccaccgtcttccagacaccccacctgaggggggcaccaggtttagtgctgctgctttcactgctgcacccgcgccctcggccggccccccgagcagcctttgtactctgcttgcggagggctgggagaccctccaggacattcccaccctcccccatgctgccaagttgtagctatagctacaaataaaaaaaaaccttgttttccagaaaaaaaaaaaaaaaaaaaaaaaaaaaaaaaaaaaaaaaaaaaacaccaccacaacacacaagaacaaaaaaaacaaccccccccaaacaacaaaaaaccagaaaaaaaccacacggggggggggccccttaaaaaattctctgggcgggccccccccctttgtgccccgtctttttttttcccaccccgggccccccacaggaggggtgcccctcccagtctggggcgggggcccacgtttcacacaactccccgatcgccacccccgcccccccctacagatttcgggacaaaaaccacccacccctggggggggggggcgtgccatctccgccaccatacccccaccaggcagcctccaatgcccatccggcggctcaatgcaagcctctcccccgggggtcagactccggggttttacaatcaccgcccccccatcccgggcccggcggtgtatccaaataagcaatcgataccctctcccccaccgaatagttgatatccccatctccacaccaattcgctaacatccgtgcggggcacccaccacgttcacgccgccccttataaagccgcctcccctcgcacctcaacccccgcctgtcgattaaataaatccacaacttgatcccccccccacaaatggtcgttatgtgtaaaccttcttcttcccccccaccccattactttnagcccacatcccgtattcccaaaccccccccacancctccgttcgtgttatctttcccccccccccggtgtgttcttctacgaacccaaaatatcccaaccgcactactgaatcgttactgcggtcctcacgtttcaaccgaccactacatctattatatctacactcccgacgatccccccccccctctaccaatccaccccaaactattaatatacacccgcctattccagcccacctcgctccgctccccggctgccttttataattacggatatgggccctcccccctctgtcgtcgtcttcacccctcgggaccccttctatatatcaccaaaaactttctatactttttctccccccgccccccattattccccccccccaacacaccgatcggcgacgactcgtatcaccgccgggcgccccaatcatatcacttttataggactatcgcagtccccatacctccaaatcgcnnaccacttacgtctacgtctctttatgtccacgcccccacccacgatacaccccgcaaaagtaaaacattacttcaatttcagcgacttcgttttcccccagcatcataatnccactactataaccagggga

SEQ ID NO: 5404 - DNA, 2103 bp, Homo sapiens
aaagctcctagatctgataaacaacttcagctaactttcaggagacaaaatcaatatacaaaatatggtagcatttttatacaccaacgacatccaagctgagagccaaatcaagaatgcaatcctattcacaattgccacaaaaagaataaaatacctaggaatacagctaaccagggagatgaaagatctctacaacaaaaattacaaaacactgctgaaagaaatcagagatgacacaaatggaaaaacattccatacttatggataggaagaatcaatattgttaaaatggccatactacccaaagcaatttatagattcaatgctattcctatcaaactaccaataacattcttcacagaatcagaaaaaaaaagcattaaaatttatttgaaaccaaaaaagagcccaaaaagccaaagcaatcctaagcaaaaagaacaaagctggaggcatcgcattacccaacttcaaactatactacagggctacagtaaccaaaactgcatgatactggtacaaaagcatggtgctggtacaaaagcagacacatagatcaatggaacagaatagagggcccagaaatagagctacacacctacaaccatctaatctttgacaaagttgacaaaaatacgcaatggggaaagaattccccattcagtaagtggtactgggataactagctagccatatgcagaggattgaaactgaaccacttccttacaccatatgcaaaaatcaactcaagatggattaaagacttaaatgtaaaaccccaaactataaaaactctggaagataacctaggcaataccattctggacataggaacggaaaaagatttcatgacaaagatcccaaaaataattgtaacgaaagcaaaaattgacaaatgggacatgattaaacagaattaccatttgactcagcaatcccattattggttatatacccaaaggaatctaaatcattctgtcataaagacatatatacacaaatgttcacggcagcactatacacaatcgcaaagtcagggaatcaaactaaatgtccatcagtggtagaaaggataaagaaaatgtggtggcagggagtggtggctcatgtctgtaatcccagcactttgggaggctgaggcgggtggttcacctgaggtcaggagtttgagaccagcctggccaacatggcgaaactccgtctccgctaaaaatacgaaaattagccaggcgtggtggcgagcacctgtcatcccagctacttgggaggcctaggcgtgagaatcgcttgaacctggaaggtggtggttgcagtgagccgagatcctgccactgcactccagcctgggcaaccaagcgagactctgccttaaaaaaaaaaaaaagaaaatgtggcacgtatacaccatggaatactatgcagccataaaaaagaatgggatcatgtcctgtgcagcaacgtggatggagctggaagccattatcctaaatgaactcactcagaaacagaaaaccaaataccacatgttctcacttataagtagaagctaaacattgagtacacatggatacaaagaagggaaccgcagacactggggcctacctgaggtcggagcatggaaggagggtgaggatcaaaaaactacctatctggtactatgctttttatctggatgatgaaataatctgtacaacaaaccctggtgacatgcaatttacctatatagcaagcctacacatgtgcccctgaacctaaaaaaaaagttaaaagaaaaacgtttggattattttccctctttcgaacaaagacattggtttgcccaaggactacaaataaaccaacgggaaaaaagaaaggttccagttttgtctgaaaattctgattaagcctctgggccctacagcctggagaacctggagaatcctacacccacagaacccggctttgtccccaaagaataaaaacacctctctaaaaaaaaaaaaaaaaaaaaaaaaaattaataaaaataaaaaaaaataaaaaaaaaaaaaaaaaaaactctcgggggggcccgacccaaaatgccccttgtggggggtttttaaatatcatggcccc

SEQ ID NO: 5405 - DNA, 1322 bp, Homo sapiens
tgtcttaaatgactatgctttttttacaaaaatctcttggtatctctcatgcatgtggaaaaatggactttttagtcactagcatgtcagtgttaactgacccctatccagtttccaaatagaatgtacaatctccctagttcttcgatgtgcatgactggcctttgatgttttaataagtccctgaaatgtatctttaaaaggaaaagggaaatatgcctgggaatagatgcgtgcttctgaaattgtgcataaaatagctatgtaagaaatataagcatcgaaagagtgaaacacacttatttctcctctaatcattaatttcaaggtgataagcatttatggttttttctagggcttgtattaaaccactgaacaattgtcttaaagtatactcctcacagaactaaagagtaaaaatagaaaatgttaaaatagtaacaaaatatttacaagatagccttaaaacataatctgtaccataaaacctacaagttaccaattactattcaattaaagttcaaccgtattactgaaatatacttctgattttgaaatgttgagcccaaatatgtgattgcatcttcatgctgcatattcagtgttcactaaaactttaattttaaatgttgcacttcagaaatgtaaaaggatgtccagccaatgtaattttccttcatcacttgtgatattgaccagttttaaagtctttggcctatttttaaaaagtgaggatagctgcatcttttctacttcatatacaacttttctacatgtaaccctcaacttacacattgcctagtgaaacagagccaaaaaatgcagtatcacctgtaccttttaattttattaaacttttttcaatcatgaatttttcaccgtcttccctttataaataaattctagtgacaaatcaagatttggttttatttttatggaattcacctctcacttttgccttccattcccttttaaacctctctggaacgttgttcctctgtggttccttctggccggcgccggtccgggcctccccgtgggccatccccttgggtaaacgtggtatccccttttaaccccgggtgggatggcaagcaatttccctccccggaatttgccctggtgggcgtattggaacctaccgcaaccccccttctctctgtgtcccgcacccggctttaaaaacccattttggcccacaggtcgaccttttaaaagtttgtcgcccttaagtatctgcccctctctaaaattgtctctttggggaaaggggagactctccccgggtgggttaaaaaaattctggcaaccggcccctcccg

SEQ ID NO: 5406 - DNA, 4299 bp, Homo sapiens
  misc_feature (2829)..(2846): n is a, c, g, or t
  misc_feature (3208)..(3216): n is a, c, g, or t
atggcagagcccggctgagccttgtgttctacgccagtgccaggagggtgttgtcacagagtctggggtgcgctgtgttgttcattgtaaaaaccctttggagcatctgggaatgtgctgccccacatgtccaggctgtgtgtttgagggtgtgcagtatcaagaaggggaggaatttcagccagaaggaagcaaatgtaccaagtgttcctgcactggaggcaggacacaatgtgtgagagaagtctgtcccattctctcctgtccccagcaccttagtcacatacccccaggacagtgctgccccaaatgtttgggtcagaggaaagtgtttgacctcccttttgggagctgtctctttcgaagtgatgtttatgacaatggatcctcatttctgtacgataactgcacagcttgtacctgcagggactctactgtggtttgcaagaggaagtgctcccaccctggtggctgtgaccaaggccaggagggctgttgtgaagagtgcctcctacgagtgcccccagaagacatcaaagtatgcaaatttggcaacaagattttccaggatggagagatgtggtcctctatcaattgtaccatctgtgcttgtgtgaaaggcaggacggagtgtcgcaataagcagtgcattcccatcagtagctgcccacagggcaaaattctcaacagaaaaggatgctgtcctatttgcactgaaaagcccggcgtttgcacggtgtttggagatccccactacaacacttttgacggtcggacatttaactttcaggggacgtgtcagtacgttttgacaaaagactgctcctcccctgcctcgcccttccaggtgctggtgaagaacgacgcccgccggacacgctccttctcgtggaccaagtcggtggagctggtgctgggcgagagcagggtcagcctgcagcagcacctcaccgtgcgctggaacggctcgcgcatcgcgctcccctgccgcgcgccacacttccacatcgacctggatggctacctcttgaaagtgaccaccaaagcaggtttggaaatatcttgggatggagacagttttgtagaagtcatggctgcgccgcatctcaagggcaagctctgtggtctttgtggcaactacaatggacataaacgtgatgacttaattggtggagatggaaacttcaagtttgatgtggatgactttgctgaatcttggagggtggagtccaatgagttctgcaacagacctcagagaaagccagtgcctgaactgtgtcaagggacagtcaaggtaaagctccgggcccatcgagaatgccaaaagctcaaatcctgggagtttcagacctgccactcgactgtggactacgccactttctaccggtcctgtgtgacagacatgtgtgaatgtccagtccataaaaactgttattgcgagtcatttttggcatatacccgggcctgccagagagagggcatcaaagtccactgggagcctcagcagaattgtgcagccacccagtgtaagcatggtgctgtgtacgatacctgtggtccgggatgtatcaagacctgtgacaactggaatgaaattggtccatgcaacaagccgtgcgttgctgggtgccactgtccagcaaacttggtccttcacaagggaaggtgcatcaagccagtcctttgtccccagcggtgacctttgtttcgatccttaagactctgaaatctggtgactttgacactgaagcggaagagccaatgaaggactgcagtatttgtgtgcccgattctgtaaacacacacacacagagtatatatgtgtatatatatatagatatattcaaaaacattgcatcatttatatgaactatagggggattattatatgtatattttttgctataagacatgtattgtttctaggatcctaacctgtaagccattgaacatgttgtataaatacaccaggtgtttttaatttaataaggtggcatgcagatacattggatagtgttaacatcacatacatttgtcatttttaaggaagttttctaagagccctcaattgcctgcctgtattaattttagttttgagtcaggatttgtaatggagtgggaaatgtgtttctctggagaagggcacatttatctaggggcatttcaggtttccaaagaaaggaatgtatgcctgggaaagacagcaggagattggtgaccggccctaatggtgcatgaaaagcgagtgataggctgttagaatgtattaggtcatgggctaacattatttccaaaattgattggctggttgccaagaaatatatatttgtcactagggcataaccgaagaatcaagtgatttcttgccatccttgcgtagtcctcaagtcttctaatcatctatgtgtgtatgatggatgtgaccatttatatgtcatgtgttgaaattaaagggtgtctggatgccatgttaattttattgagcatgagaaagtatttgaagaaactgttgcacaacatatgatgaaattttgatttctctgaatctcagagtaatttaagatgggcaaatccaatgagttgatgtaaccaatctacattttgtggctatttcatgtataaaatgaaaggctttagttatttctagaggagtcccatccaacactatttggcgactgttaatatgttataattattagacagtggaaaagcctttattgactaattgatttaacctcagtccaaagaacagtctctatacttgccctcatttactgataggctgctactagttaccatttgattgtcttgactttcgtcttcagttgnnnnnnnnnnnnnnnnnncaaaaacaaaacccactgtgtcttaaaataaaatgttctgcattgtagtcaataaagggcttaagatgtaaaacaatgcattttctctctcaagatgtcctgtgttatactttacaattagttgtatcaacttcagattcattaaattttaacagctgtatttagttataatttttgtatcttacaacagtatatataaagactattattaatagacaaaagcaaacccacgtttttgacaagccagcatattgccaatgctcgtcaaagacatttatgtttcttttacattcatgacagctaaagtattaacttggaattttttttttttttttttgactggaaaatccctatgtttgttnnnnnnnnnaataaagtgcagggcgtaatagtgactggctgggggcactgggcctttgtgttttttttcattcctgtgtttggatactaatcaccctcgtatctgcagcctgaggtagtcaggtcattgtttcaatgctgcccttggaaagaagactttgacttaggtgctttgggatctaagtgtggtttgtgactatccccattatttaagcatttgggggtctcacttttgcttatctgtaacacaaagaggccatgtagtatagtgagcagggttgagaatcgggaaaactagacccctgccactaacaggctaggagactttgggcagtaatgggaggcactgagggtttgcaaatactttcctacttgtaatctcattgattccctgctctgccctgacaggaggggtagggaaaatcagttgacgttgcctggtggttcctaccttctgtaaaacgaacagattccttaagattagctttaaatcccttttcagttcactgttggttctcatctttgaaagagggcagcataagggaaatgatggagaagggagaattgtggatggttatttatagctcatgattcatccaaggactgagttattctccccatgaggctaaccggcctctttcccaacacttaatcatggcagccaggatgggtgaatgatgaaagctcttctgcatgagccggtttcatcatcttgggtgggttgattacaagtttgtgtggcattcctttagctggggattagcttaatctctgtacatttttctcatttctaattgaagaagaaagggagggcagagaggacagaaaattacttgggtttactaattcaaagagccatctctgatgggagagggtgaggaaatcagctgaatggttggcctgcatattcttttttaggccacaggctacagctgagcaatggcttagtctaatgattgggcacaatgaggatttaccaagtgcttcaatgagagcagtcctgtttcattcacatgggatgttttcaattggttcttcaactaagctcttgcagagtgagatgacttgaaataaaaatgttctatgaatattg

SEQ ID NO: 5407 - DNA, 864 bp, Homo sapiens
  misc_feature (783)..(800): n is a, c, g, or t
gagtacactgatcttatatccaaaacctctctgaaatctgaaatctctctttagttgttaagttccttaattttttttttccatgtagcccagtaattttcaaagtgtagtctggggattccagagagccccccagaccctttcaggaaaggtcaaaaacattttcataataatactcgacattatttgccttttctttcattctcacaaagataaagagttttccagaggcagcacaccatgaccccagtggaatatgtgcttgtatagttctgctttaaacatttcttagttttaacttctaagatggtaactatcaacagatagaatctctatcaagaaaagccctttgggggtttcaataacttttaagaatacaacaagtcgtaacaccaaaatgtttgagaacctttatggagaccatcaaccctatgagctacactaagttttatcacttcctacctgatcctcacatccccatttctttttcttgtattagggtatggccaggatgacatccttggcctactccttatcttaaagagaatgatacacttttaatttctctatcaagtttactgaaaagttaagttttggtttataacttgtatcaagttgaagaagttcctctctagtcctggcttgctaagtggtgtactccactaccccaaaatcacacatagggggttaaactttatcacatcatttttttctgcctctattgggggaaccatatggtttttctcctgtagcctcttaatgtgaattacatggataaagttnnnnnnnnnnnnnnnnnnttgcattcctaagagcaatcccacttgtttaagaattgttgtttaatacatattattggattca

SEQ ID NO: 5408 - DNA, 5656 bp, Homo sapiens
  misc_feature (1767)..(1838): n is a, c, g, or t
  misc_feature (2718)..(2792): n is a, c, g, or t
  misc_feature (2939)..(2965): n is a, c, g, or t
gagaaggggaccttcaggtccaggcaaagggggaacttctgtcgtgggaacgaaaaagaaagaggatttacagggtggggggacagaggggcagcaggaaccagaagggagacagtggcggtcgcaccggggccgatccgagagttccccttagagaacggagctcacgggcggggaggcctcacctgctagtaggacgcagaaagacagaaggcgaaggagaccccctgccgtagccatcttgcctctctgctgagcggaagcccccgttcggctcctgtctgttagcggcctctctaggctaccactgacaccgtctctgtggcccggagcctaagagaccggaagttcgtgtttccaggcgcttccggaaaccgcgggagagggtcgctgacgtggaggcgtccgaagggcagcagggtgtgtcggggctcggattaagacatcggagtcggagacctgagagatgttaaccaaattcgagaccaagagcgcgcgggtcaaagggctcagctttcaccccaaaagaccttggatcctgactagtttacataatggggtcatccagttatgggactatcggatgtgcactctcattgacaagtttgatgaacatgatggtccagtgcgaggcattgacttccataagcagcagccactgttcgtctctggaggagatgactataagattaaggtttggaattacaagcttcggcgctgtcttttcacattgcttgggcacttagattatattcgcaccacgttttttcatcatgaatatccctggattctgagtgcctccgatgatcagaccatccgagtgtggaattggcaatctagaacctgtgtttgtgtgttaacagggcacaaccattatgtgatgtgtgctcagttccaccccacagaagacttggtagtatcagccagcctggaccagactgtgcgcgtttgggatatttctggtctgaggaaaaaaaacctgtcccctggtgcggtggaatcggatgtgagaggaataactggggttgatctatttggaactacagatgcagtggtgaagcatgtactagagggtcacgatcgtggagtaaactgggctgccttccaccccactatgccccttattgtatctggggcagatgatcgtcaagtgaagatctggcgcatgaatgaatcaaaggcatgggaggttgatacctgccggggccattacaacaatgtatcttgtgccgtcttccaccctcgccaagagttgatcctcagcaattctgaggacaagagtattcgagtctgggatatgtctaagcggactggggttcagactttccgcagagaccatgatcgtttctgggtcctagctgctcaccctaaccttaacctctttgcagcaggccatgatggtggtatgattgtgtttaagctggaacgggaacggccagcctatgctgttcatggcaatatgctacactatgtcaaggaccgattcttacgacagctggatttcaacagctccaaagatgtagctgtgatgcagttgcggagtggttccaagtttccagtattcaatatgtcatacaatccagcagaaaatgcagtcctgctttgtacaagagctagcaatctagagaatacctaaggacctgggaaacccatccctaaagatgctgactcccagaatcctgatgcgcctgaagggaaacgatcctcaggcctgacagccgttttggggtcgccttccaacaaccgcgtttggccgcgcccaaaacnnnnnnnnnnnnnnnnnnnnnnnnnnnnnnnnnnnnnnnnnnnnnnnnnnnnnnnnnnnnnnnnnnnnnnnnggtgcccaactgtgatgagatcttctatgctggcacaggcaatctcctgcttcgagatgcggactctatcacactctttgacgtacagcagaagcggactctggcatctgtgaagatttctaaagtgaaatacgttatctggtcagcagacatgtcacatgtagcactactagccaaacacgccattgtgatctgtaaccgcaaactggatgctttatgtaacattcatgagaacattcgtgtcaagagtggggcctgggatgagagtggggtatttatctataccacaagcaaccacatcaaatatgctgtcaccactggggaccacgggatcattcgaactctggatttacccatctatgtcacacgggtgaagggcaacaatgtatactgcctagacagggagtgtcgtccccgggtactcaccattgatcccactgagttcaaattcaagctggccctgatcaacagaaaatatgatgaggtactgcacatggtgaggaatgccaaactagttggccagtctattattgcttatctccagaagaagggctatcctgaagtggcactgcattttgtcaaggatgagaaaactcgctttagtctggcactggagtgtggaaacattgagattgctctggaagcagccaaagcactggatgacaagaactgctgggaaaagctgggagaagtggccctgctgcaggggaaccaccagattgtggaaatgtgctatcagcgtaccaaaaactttgacaaagtttccttcctgtatcttatcactggcaacttagaaaaacttcgcaagatgatgaagattgctgagatcagaaaggacatgagtggccactatcagaatgccctatacctgggtgatgtnnnnnnnnnnnnnnnnnnnnnnnnnnnnnnnnnnnnnnnnnnnnnnnnnnnnnnnnnnnnnnnnnnnnnnnnnnnacagctgctacccatggcttagatgaagaagctgagagcctaaaggagacatttgacccagagaaggagacaatcccagacattgaccctaatgccaagctgctccagccacctgcacctatcatgccattggataccaattggccnnnnnnnnnnnnnnnnnnnnnnnnnnntgaaggcaccattgccagcaaagggaagggaggagcactggctgctgacattgacattgacactgttggtacagagggctggggagaggatgcagagctgcagttggatgaagatgggtttgtggaggctacagaaggtttgggggatgatgctcttggcaagggacaggaagaaggaggtggctgggatgtagaagaagatctggagctccctcctgagctggatatatcccctggggcagctggtggggctgaagatggtttctttgtgcccccaaccaagggaacaagtccaactcagatctggtgtaataactctcagcttccagttgatcacatcctggcaggctctttcgaaacagccatgcggctccttcatgaccaagtaggggtaatccagtttggcccctacaagcaactgttcctacagacatacgcccgaggccgcacaacctatcaggctctgccctgcctaccctccatgtatggctatcctaatcgcaactggaaggatgcagggctgaagaatggtgtaccagctgtgggcctgaagcttaatgacctcatccaacggttgcagctgtgctaccagctcaccacagttggcaaatttgaggaggctgtggaaaaattccgttccatccttctcagtgtgccacttcttgttgtggacaataaacaagagattgcagaggcccagcagctcatcaccatttgccgtgagtacattgtgggtttgtccgtggagacagaaaggaagaagctgcccaaagagactctagaacagcagaagcgcatctgtgagatggcagcctatttcacccactcaaacctgcagcctgtgcacatgatcctggtgctgcgtacagccctcaatctgttcttcaagctcaagaacttcaagacagctgccacctttgctcggcgcctactagaactcgggcccaagcctgaggtggcccaacagacccgaaaaatcctgtctgcctgtgagaagaatcccacagatgcctaccagctcaattatgacatgcacaacccctttgacatttgtgctgcatcatatcggcccatctaccgtggaaagccagtagaaaagtgtccactcagtggggcctgctattcccctgagttcaaaggtcaaatctgcagggtcaccacagtgacagagattggcaaagatgtgattggtttaaggatcagtcctctgcagtttcgctaaggccccctttgtgtgcatgggtcagtcaccatatgttccccccagagaatgtgtctatatcctccttctaacagcaccttccccctgcagctactcttcagatctggctctctgtaccctaaaacctagtatctttttctcttctatggaaaatccgaaggtctaaacttgacttttttgaggtcttctcaacttgactacagttgtgctcataattgtccttgcctttccagcttaattattttaaggaacaaatgaaaactctgggctgggtggagtggctcatacctgtaatcccagcactttgggaggctacggtgggcagatcatctgaggccaggagttcgagacctgcctggccaacatggcaacaccccgtctctaataaaaatataaaaattagcctggcatggtagcatgcgcctatagtcccagctgctcaggaggctgaggcatgagaatcgcttgaacctaggaggtggaggttgcattcaactgagatcataccacttcattccagcctgggtgacagagcaagactctgtctcaaaaaaaaaaaaaaaaaaaaaaaaaaaaaaaaaaggaaaactctgtgatggacatttgtttagtaaatcccttcagtatttatccctcctttccccacagcagctttctttcctgtcaactagaaaggagcaggatgtaataaatacattttggtgtgactaggccacaccaactcttaatcatctcccattttccttagacatttaaatttcaaggcaggtaccctctgtgtactcagaaatttgaagaagttatttggttttccaaaatgcacactgcgggttattgatttgttctttacaactattgttctcatatttctcacactaaataaatctctatgagagcttcttgaaaaaaaaaaaaaaaaagcgaaaaaaaaaagaacaaaaaaaaaaagaggggggggggcgagcataaaaagataccaccgacggagcgccccactgatagcgcgtaacccagcatttttcgttgtcagaagcggggtccccacatgagagagaggaggcaaataaaaacgacgagacagcggggcacagagtatacacacacggcggcgacgggggggaacagaccgcgccgacgacggtgagacaacccctcgtggggagaagggagacccactatgaacaacgggggggggggagagacagaaagtattgttgggggagacagaaaacttctatactatggaaaggaagaataatattaaagagagcgcttctgacaagagggcgcggaacaactaattataaacagacgttttagcaacaggggtggagaagaaggtggtggtgtaaaacaaaaaaagcaggggagaaaaatatcactatagtagggacgatgaaagaagttttaggaggacataagcgggaggatatgagtttttgcgagaatgattttttattccccggaga

SEQ ID NO: 5409 - DNA, 435 bp, Homo sapiens
  misc_feature (6)..(6): n is a, c, g, or t
  misc_feature (16)..(16): n is a, c, g, or t
  misc_feature (18)..(18): n is a, c, g, or t
attgancattgtttancnacccagtacgggcactatgtctggcacacagtagggtgagagtagttataaatgcttgttgagtaggttcattactgggaggccgaagtctcccaggatttaactctgtgtttcaaatccctaaactgatttcataagcttcattacactcaggttaaatccacatgatcctgactaaactgcactacaactgaaaatgtactcatattcttttaccagctgaagtccatttcaagagtcactatagatcgtacaaaaatggtgaataggccacttgatattttggtatgtgatctaaacaatgtacagattgggttttcaataggttctcaaaaggcaggaagtgaaggagcaagctggtattcacctgtctggtttaggttatgtagtagttaaactggatagcacaagaccaaa

SEQ ID NO: 5410 - DNA, 7568 bp, Homo sapiens
  misc_feature (119)..(167): n is a, c, g, or t
  misc_feature (196)..(196): n is a, c, g, or t
  misc_feature (2631)..(2648): n is a, c, g, or t
  misc_feature (5156)..(5204): n is a, c, g, or t
  misc_feature (7543)..(7543): n is a, c, g, or t
tgcatctcaagtccaaaaggcagaaaatacacacgcggcgaagacacccgggcagccgtggaggctccggcccgtccttggtcgtcaattacctcattgtggatctgccagggccaagnnnnnnnnnnnnnnnnnnnnnnnnnnnnnnnnnnnnnnnnnnnnnnnnncttgcggggggggggggaaagactgattntttttttttttcgtcgctctcgggatcgctcttctgcctttattttattgttttggacatttttgagcgccggggcttgaacggtgctttttgttcattcctgggttttaatattattttccttcttcatccctctctggccactatggaattctaatttccagcatgtatcagccgaggtggagctgcggggccctggcatgaaagggtcctcactgagcagcgagtcgtcccccgtgtcctctccggccaccaaccacagctcccccgccagcacacccaagcgcgtgcccatgggccctatcatcgtcccccctgggggccacagcgtgcccagcaccccccccgtggtgaccatcgctccaaccaaaaccgtgaatggtgtctggaggagtgagagccggcaggatgccggtcccaggagcagcagtggaggtcgggaacgcctcattgtggagcccccgctccctcaggagaaggcagggggaccagccatcccctcgcacctgctcagcaccccctaccccttcggcctctcccccagctcagttgtgcaggattcccgcttcccgccactcaacctccagcggcccgtgcaccacgtggtgccccccagtaccgtgaccgaggactacctgagaagcttccggccctaccacaccaccgacgacctccgcatgtcctcactgcctcccctcggcctggacccggccactgctgcagcctactaccaccccagctacctggccccacaccccttcccccacccggccttcaggatggacgactcctactgcctgtctgccctgaggtccccgttctaccccatccccacccccggctccctgcccccactgcacccatcagcgatgcacctgcacctctctggggtccgctaccctcccgagctctcccactcatccctggcagcgctgcactcggagcgcatgtctggcctcagcgcggagaggctgcagatggacgaggagctaaggcgggagagggagcgcgagcgcgagcgcgagcgtgagcgtgaggctgaccgcgagcgggagaaggaacgtgagcgcgaacgcgagaaggagcgcgagcaagagaaggagcgtgagcgtgagaaggagcgcgagcgcgagctggagcgccagcgggagcagcgggcccgggagaaggagctgctggccgccaaggccctggagcccagcttcctgcccgtggccgagctgcatgggctgcgtggccatgccactgaggagcggggcaagccctcggagcagctgaccccaacccgagcagagaagctgaaggatgccagcctgcaggcgcccaagcccgtccaacaccccttgcatccggtgcccaccccacaccacacggtgcccagcctcatctccaaccatggcatcttctctctgcctagcagcagtgctgccacagccctgctgatccagcgcaccaatgaggaggagaagtggctggcgcggcagcggcggctgcggcaggagaaggaggaccggcagtctcaggtgtccgagttccggcagcaggtgctggagcagcacctggatatgggccggcccccggtgccggcggaggcagagcacaggccggagagcaccaccaggccaggaccaaaccgtcacgagccaggtggccgtgaccctccgcagcactttggggggccaccacctctgatttcgcccaagccccagctccatgctgcacccacggccctctggaaccccgtgtccctgatggacaacaccttggagacgcggcgggccgaaagccactctctgcacagccacccggctgcatttgagcccagccgccaggcagccgtgccgctggtgaaggtggagcgggtcttctgcccggagaaagcagaggaggggccacggaagcgtgagcctgcccctctggacaagtaccagccacctccgccgccaccacgagagggagggagcctggagcaccagcccttcctgcccgggcccgggcccttcctggctgagctcgagaagtccacccagaccatcctgggccagcagcgggcctccctcccacaggcggccaccttcggggagctcagcggacccctgaagcctggctcgccctaccggcccccagtgccacgggcccccgaccctgcctacatctatgatgagtttctgcagcagcgccggaggctggtcagcaagctggacctggaggagcgcaggcggcgggaggcccaggagaaagggtactactacgacctcgatgactcttacgacgagagcgatgaggaggaggtcagggcccacctccgttgcgtggccgagcagccgcccctcaaactggacacgtcctctgagaagctagagtttttgcaactttttggcttgaccacccaacagcagaaggaggaattggtggcccagaagcggaggaagcgnnnnnnnnnnnnnnnnnngagagaagcccgtcgcccccaacaattcagagcaagcggcagacgccttcaccgagactggcgctgtctacccgctacagccctgatgagatgaacaacagtcccaacttcgaagaaaagaagaagttcctgaccatcttcaacctgacccacatcagcgctgagaagaggaaagacaaagagagacttgttgaaatgctccgtgccatgaagcagaaggcactgtcagcagcagtggccgactccttgacaaactctccgagggacagtcctgccgtctccctgagtgaaccagccacgcagcaagcctctctggatgtggagaagccggttggtgttgctgcttccttgtctgacatcccaaaggccgcggagcctgggaagctggaacaggtccggccccaggagctgtcgagagtccaggagctagctcctgccagcggggagaaggccaggctgagcgaggcccctggaggcaaaaagagtctgagcatgcttcactatatccggggcgctgcacccaaggacattcctgtgccgctgtcccacagcaccaatgggaagagcaagccgtgggagccctttgtggcagaagagtttgcacatcagttccacgagtcagtgctgcagtccacccagaaggccctgcagaagcataaagggagcgtggctgtgctgtctgcagagcagaaccacaaggttgacacgtccgtccactacaacattcctgagctgcagtcctccagccgcgcccctccaccccagcacaatgggcagcaggagccccccactgcaaggaagggccccccaacccaggagttggaccgggactcggaggaggaggaagaggaggatgatgaagatggagaagatgaggaggaagtccccaagcgcaagtggcaagggatcgaggccgtttttgaagcttaccaggaacacatagaagagcaaaatctggagcggcaggtgttacagacacaatgtagacgactggaggcccggcactacagcctcagcctgacggcagagcagctctcccacagcgtggcggagttgaggagccagaaacagaagatggtctcagaacgggagcggctccaggcagaactggaccacttacgaaagtgccttgccttgcctgcaatgcactggcctaggggctacctgaagggatatcccaggtgacggtttcccttgcactaggccgaacctatagtatagaaatattatctattttattaccttgaatatttaatatttttcactgggaggtttgaagcttacaaaatgagaatgtgccatgcatgaagcaaaggattccaggctccagaaaaaatgaatgaactcaccttgacgtcaatgcaattgaatcaccgttgtcattcagcgagcaaccaatgtaggattgcccacagtttttctttttaaaggtggttttcgcccttcctctcccacattatttcttaatctgaacatgaaggctccattagcaacactaaaacttgatcattaacagccccctgtgcatatgagtggatcaaaccggttctgttctttcttgtgttgccatgttactatgcctcaagcccagtttgcttttgccgcagcgatggggccagtctcattcctccccaggagtgaaacttgcttcagctgaaaaggttgggtgcattgtcagtaaaaagggcttatttgtttcattttactttcctgcaaaattttcttcaaagcaacaagtcctaggagcacacaaagcaacccaaaggcttttccctggaaaagctctttcttacctaaagataaaaccaattcacaaactgaaggtagctttttattactccgtggggagcatgtacagagctctgtgtatacacagcttcacacccaccagattgttactacagtgggttgggttttcatacagacgtaaattttgagagaaaagtcaaaggtgcttcagccttgtactgtgtatatatattaaaaaaaaaacaaagttttgtatgtttttattactttaactattgttataaaaagcctgccatttttaatatgtggtttgggggatttttgtttgttgggggttttgtttgttgttttggttttttttgggcaaaaaaaaaaaaaaccttgcttttagtgtttgtactgctgctggtcaggacattaaaatattgaagtgtttttaaaaattaaagaagaagaaaagtaaaagagcttaccactggcgcctatgcgatcacttcatttttagtttgagttgcaccagaagctgtagaaaaaggccatggcgctactgcttacctcctccactccccctgcctgcccccagcatctggacaagctaatagcaaatattacccattgctatcaagggaggagggggtagtctgtagaacccatgtgtgacagtcatgtgcacacatgggcgggggcttttaaaaacctttcaggaagtcaatgatttctgtgattgatataattctaaggtgtctgagagcaggtacnnnnnnnnnnnnnnnnnnnnnnnnnnnnnnnnnnnnnnnnnnnnnnnnncacaaggtctgagctgaacccctcctttttgaacttactgtgacaagcacaggaacggtcagaaactgggctcatcacaccaaggcaaagcaacgggcgagtcttcctccttgtcctagttactgcctatggaggcagtgtttagatcaggaaggcctctcttgctcccaagggccctcaccagaggccagggctgccagtcactggtctggggggtggaggcctgagctgagggcagggtgcctgacctgtgtgccggctgctcactgctgtgaccagcagccgagcccttggccctagcccttgctgcgcagaacagcttgctggcagctggcatcgtgtcgctttatctgcccccgcacagtttgctttgtacgtctgccaagaatcttccagttattagcaaactcagacgaatgtaccgccagtattatcagcagtcaacaagcaccttcctctccacagaagcagctggaagagaactcgaggggctgtgctgcaggcctcccctcgaaagacactgggaggtcaacatgttccacaggtgttcagagggagtctgctacaaactatcagggcaaaatctcactggatttctccactgaaaacctacttgaggtttctggtctgaaggcttaagagtcacatcttagcacttccgctctcaggcctcctcctccatcacagatgtctggatgcttttggaaatggccttggctaaagtaaaagggaaaagtagatccgataacttaaaaacgtagctcatcccttaccatccaaggggcactcccttggttggattttctatgacagcacaggggacaggtggcacaccatgagaggtctgcccagggtgggagcagtgtcactgtgctagcaatagttggcttctcccctgtcagtggaaaccccacttctgcccggcccttgagcttcttgcccactgtctccccatccttccacctacttgtggcgatctgagtactctactcttgctcaagaagtaatacgacaatcagaatacaaaccagtaaggcaacacgaataaactaagaaaaaggtaagaactgtctcaaaaacgaaagcacaccacccaagacacagtacccagtcatggtttccccatccaactattagtttcatactttgaaaacttactttcagattattctcaaagaacacagtagcacctaaatctgttttcaattgggcttaaaaattgacatgcaatctcttaagtaagttttttgttcagctacttcacactgagtacctcaaatctgctctggagtcgattatgccacctgtgtgtcaggatgcacgtgaaagccctcggctcggtccttagaccatcttcctacattacctggaagggagctgccatctgtccctctgcagagggataccttccaatagtaaattatctggttcctcactgaaacaagttatttttgcttcatatagtcagagtcagactgacatgataaaatatcatgttcctaatctgttgtctcagataagtgaccaagacgggactttccacattttagtctacattctaatcttaaaggaataaagcactgaattgggactaacattctgataggttgcacccttaagagtattcagagagcatcaaaaggagcccacaccttcagcagtgaaggattctaacacagggaatctgcagtttgtagcagaatggtattttcctcaagtagctcataatactgccaaatctcaaaagttaagctgaatttcacaccagatcctacccctttccctgagccacatgtttcacacaagtgtagaaaatgccagggatccaccacaagatggagatggtcagcacaaaccgattctgttcctctttaaagtgtatattagccacttagcaatctctatattctttcaagtaaccaagctgttgactttcttactacttgcagtagcctgtccccaacttttccatccagtgcttaacctaaaaaactccttaactctgccttgacctgaggaagaccatgctaactggtgttattttgtatgtaccctgtgcttaattctataacagtaaaccccatacgcaggtgggagggaggaacaccggtgcctcggtcactctgggggcagtttagatgctgtgaaattaaacctgttctaagtgtacttgtttgaattaattgtattgtaatattatttgttgaatgtagtaattaggtatttatgaatatattgctgtaatttctgacaacatccaaaaaataaaatcttcctaaattatgttaaaaaaaaaaaaaaaaaaaggaaaaagagaagaaaaaagggaaaaaaaaaangagggggaaaaaaaaaagggggggg

SEQ ID NO: 5411 - DNA, 3108 bp, Homo sapiens
  misc_feature (719)..(738): n is a, c, g, or t
ccgcctcctctccgtgtgggggcgggggccccaaatttggtgggtgggccataggaaagccaaggccaaggcctggtggaggtggtgggggtggcggaggaggctgcagaggggggagtcccaaaggtggtagtggcatgggaattccagggagctgtgccgacatgggaggtggagcggctttgtccccatcttcccctctccgtgtgggtgagccagtggcactgtcagaggaggagcggctgaagttggctcagcagcaggcggcattgctgatgcagcaggaggagcgtgccaagcagcagggagatcattcgctgaaggaacatgagctcttggagcagcagaagcgggcagctgtgttactggagcaggaacgacagcaggagattgccaagatgggcaccccagtccctcggcccccacaagacatgggccagattggtgtgcgcactcctctgggtcctcgagtagctgctccagtgggcccagtgggccccactcctacagttttgcccatgggagcccctgttccccggcctcgtggtcccccaccgccccctggagatgagaacagagagatggatgacccctctgtgggccccaagatcccccaggctttggagaagatcctgcagctgaaggagagccgccaggaagagatgaattctcagcaggaggaagaggaaatggaaacagatgctcgctcgtccctgggnnnnnnnnnnnnnnnnnnnngactgaggaggacacagtgtccgtatctaaaaaggagaaaaaccggaagcgtaggaaccgaaagaagaagaaaaagccccagcgggtgcgaggggtgtcctctgagagctctggggaccgggagaaagactcaacccggtcccgtggctctgattccccagcagctgatgttgagattgagtatgtgactgaagaacctgaaatttacgagcccaactttatcttctttaagaggatctttgaggcttttaagctcactgatgatgtgaagaaggagaaagagaaggagccagagaaacttgacaaactggagaactctgcagcccccaagaagaagggatttgaagaggagcacaaggacagtgatgatgacagcagtgatgacgagcaggaaaagaagccagaagcccccaagctgtccaagaagaagttgcgccgaatgaaccgcttcactgtggctgaactcaagcagctggtggctcggcccgatgtcgtggagatgcacgatgtgacagcgcaggaccctaagctcttggttcacctcaaggccactcggaactctgtgcctgtgccacgccactggtgttttaagcgcaaatacctgcagggcaaacggggcattgagaagccccccttcgagctgccagacttcatcaaacgcacaggcatccaggagatgcgagaggccctgcaggagaaggaagaacagaagaccatgaagtcaaaaatgcgagagaaagttcggcctaagatgggcaaaattgacatcgactaccagaaactgcatgatgccttcttcaagtggcagaccaagccaaagctgaccatccatggggacctgtactatgaggggaaggagttcgagacacgactgaaggagaagaagccaggagatctgtctgatgagctaaggatttccttggggatgccagtaggaccaaatgcccacaaggtccctcccccatggctgattgccatgcagcgatatggaccacccccatcgtatcccaacctgaaaatccctgggctgaactcgcccatccctgagagctgttcctttgggtaccatgctggtggctggggcaaacctccagtggatgagactgggaaaccgctctatggggacgtgtttggaaccaatgctgctgaatttcagaccaagactgaggaagaagagattgatcggaccccttggggggaactggaaccatctgatgaagaatcctcagaagaagaggaagaggaagaaagtgatgaagacaaaccagatgagacaggctttattacccctgcagacagtggccttatcactcctggaggcttttcatcagtgcctgctggaatggagacccctgaactcattgagctgaggaagaagaagattgaggaggcgatggacggaagtgagacacctcagctcttcactgtgttgccagagaagagaacagccactgttggaggggccatgatgggatcaacccacatttatgacatgtccacggttatgagccggaagggcccggctcctgagctgcaaggtgtggaagtggcgctggcgcctgaagagttggagctggatcctatggccatgacccagaagtatgaggagcatgtgcgggagcagcaggctcaagtagagaaggaggacttcagtgacatggtggctgagcacgctgccaaacagaagcaaaaaaaacggaaagctcagccccaggacagccgtgggggcagcaagaaatataaggagttcaagttttaggtcccctcacactagccctttttttggccctacgtctggatgcctgggcttcacacaagaaccacctctcccgcagttcccaaggacttgtcatttcatgttcttattttagacctgttttgtaaataaagctgtttcccaaggaaagagatgaatatttaaaaaaaaaaaaaaaaaaaaaaaaatttaaataacaacaaaaaaggggccaaaaaaaaaaaagaaaaccaaaaagctaggagtaacaaagatgtggggtccacaataatagaggggaagttaatatatattaataaaagctcaaaggcacgtgggcacggagacgttattaacaaaagtgagggaacgggggaaaaacgcgtgttaagttgtggagaatctatgtggtgaaagggcaacttaatttcggtgagaaagataacaataattgggcacaacaattaacatgaaaggagatattttcaaagggatgagtaggggtaacacttaggcggagtttaaaaggggctaaaggagggttaaactcgagcggacatagtgtgtatggattgaacatttgggatcatgacaattgattatggaagttatatacagggagttgtgaaaacata

SEQ ID NO: 5412 - DNA, 2222 bp, Homo sapiens
  misc_feature (569)..(603): n is a, c, g, or t
  misc_feature (2144)..(2187): n is a, c, g, or t
tcggcgcagcgccatggggagcccctttttttttttgcccccgctgctcctgcgcgcggtgaagctgctgcggaggcgcttccggctgctgctggcgctcgccgtggtgtctgtggggctctggactctgtatctggaactggtggcgtcggcccaggtcggcgggaaccccctgaaccggaggtacggcagctggagagaactggccaaggctctggccagcaggaacattccagctgtggatccacacctccagttctaccatccccagaggctgagcctcgaggaccacgacaatgtgtgtgtgtgtgcatggccagagcagaccctgtccccaaggccaggccatggggtgaacatcagcaccagttccggggccgtgccaacctgcatgtgtttgaagactggtgtggcagctctatccagcagctcaggaggaacctgcatttcccactgtacccccatattcgcacaaccctgaggaagcttgctgtgtcccccaaatggaccaactatggcctccgcatctttggctacctgcacccctttactgatgggaaaatccagtnnnnnnnnnnnnnnnnnnnnnnnnnnnnnnnnnnnctgagcctcgatgaccaggtctcaggcctccagctgctggccagtgtgggcaagactggaaaggagtggaccgccccgggagagtttgggaaatttcggagccaaatttccaagccggtgagcctgtcagcctcccacaggtactacttcgaggtgctgcacaagcagaatgaggagggcaccgaccacgtggaagttgcatggcgacggaacgaccctggagccaagttcaccatcattgactccctctccctgtccctcttcacaaatgagacgttcctacagatggatgaggtgggccacatcccacagacagcagccagccacgtggactcctccaacgctcttcccagggatgagcagccgcccgctgacatgcttcggcctgacccccgggacaccctctatcgagtgcctctgatccccaagtcgcatctccgccacgtcctgcctgactgtccctacaaacccagctatctggtggatgggcttcctctgcagcgctaccagggactccggtttgttcatctgtcttttgtttaccccaatgactatacccgcctgagccacatggagacccacaataaatgtttctaccaggaaaacgcctactaccaagaccggttcagctttcaggagtacatcaagattgaccagcctgagaagcaggggctggagcagccagcaggttttgaggaaaaccttctagaagagtcccagtatggggaagtggcagaggagacccctgcctccaacaaccagaatgccaggatgcttgagggaagacagacacctgcctccaccctggagcaagatgccactgactaccgcctccgaagcctgcggaaactcctggctcagccccgggagggcctgctggcccccttctccaagcggaactccacagcgtccttcccagggaggaccagccacattccagtgcagcagccagagaagaggaagcaaaaacccagccctgagcccagccaagattcacctcattccgacaagtggcctcctgggcaccctgtgaagaacctgcctcagatgagggggcccaggcccaggcccgctggtgacagccccaggaagactcagtggctgaaccaggtggagtcgtacatcgcagagcagagacggggtgacaggatgcggcctcaggcccctggaaggggctggcatggggaggaggaagtggtggcggccgcaggccaggaaggacaagtggagggagaggaagagggggaagaagaggaggaggaagaggatatgagtgaggtgttcgagtacgtacctgtgtttgacccggtagtaaactgggaccagaccttcagtgcccggaatctcgacttccaagccctgaggactgactggatcgatctgagctgtaacacatctggcaacctgctgcttccagagcaggaagctctggaggtcacgcgagtcttcttgaagaagctcaaccagaggagccggggctctgtggattttcctattccggacatcttatgcaaatggaaccatgtaatgtgtggcctttnnnnnnnnnnnnnnnnnnnnnnnnnnnnnnnnnnnnnnnnnnnncgtgttgtagaatctattaaacacttcattcctcg

SEQ ID NO: 5413 - DNA, 3948 bp, Homo sapiens
acaggcccgcgacgctcccctcagctggcggcggccgcggagagatgccgcgggggccgctcgcagccgccgctgacttgtgaatgggaccgggactggggccgggactgacaccgcagcgcttgccctgcgccagggactggcggctcggaggttgcgtccaccctcaagggccccagaaatcactgtgttttcagctcagcggccctgtgacattccttcgtgttgtcatttgttgagtgaccaatcagatgggtggagtgtgttacagaaattggcagcaagtatccaatgggtgaagaagaagctaactggggacgtgggcagccctgacgtgatgagctcaaccagcagagacattccatcccaagagaggtctgcgtgacgcgtccgggaggccaccctcagcaagaccaccgtacagttggtggaaggggtgacagctgcattctcctgtgcctaccacgtaaccaaaaatgaaggagaactactgtttacaagccgccctggtgtgcctgggcatgctgtgccacagccatgcctttgccccagagcggcgggggcacctgcggccctccttccatgggcaccatgagaagggcaaggaggggcaggtgctacagcgctccaagcgtggctgggtctggaaccagttcttcgtgatagaggagtacaccgggcctgaccccgtgcttgtgggcaggcttcattcagatattgactctggtgatgggaacattaaatacattctctcaggggaaggagctggaaccatttttgtgattgatgacaaatcagggaacattcatgccaccaagacgttggatcgagaagagagagcccagtacacgttgatggctcaggcggtggacagggacaccaatcggccactggagccaccgtcggaattcattgtcaaggtccaggacattaatgacaaccctccggagttcctgcacgagacctatcatgccaacgtgcctgagaggtccaatgtgggaacgtcagtaatccaggtgacagcttcagatgcagatgaccccacttatggaaatagcgccaagttagtgtacagtatcctcgaaggacaaccctatttttcggtggaagcacagacaggtatcatcagaacagccctacccaacatggacagggaggccaaggaggagtaccacgtggtgatccaggccaaggacatgggtggacatatgggcggactctcagggacaaccaaagtgacgatcacactgaccgatgtcaatgacaacccaccaaagtttccgcagagcgtataccagatgtctgtgtcagaagcagccgtccctggggaggaagtaggaagagtgaaagctaaagatccagacattggagaaaatggcttagtcacatacaatattgttgatggagatggtatggaatcgtttgaaatcacaacggactatgaaacacaggagggggtgataaagctgaaaaagcctgtagattttgaaaccaaaagagcctatagcttgaaggtagaggcagccaacgtgcacatcgacccgaagtttatcagcaatggccctttcaaggacactgtgaccgtcaagatctcagtagaagatgctgatgagccccctatgttcttggccccaagttacatccacgaagtccaagaaaatgcagctgctggcaccgtggttgggagagtgcatgccaaagaccctgatgctgccaacagcccgataaggtattccatcgatcgtcacactgacctcgacagatttttcactattaatccagaggatggttttattaaaactacaaaacctctggatagagaggaaacagcctggctcaacatcactgtctttgcagcagaaatccacaatcggcatcaggaagccaaagtcccagtggccattagggtccttgatgtcaacgataatgctcccaagtttgctgccccttatgaaggtttcatctgtgagagtgatcagaccaagccactttccaaccagccaattgttacaattagtgcagatgacaaggatgacacggccaatggaccaagatttatcttcagcctaccccctgaaatcattcacaatccaaatttcacagtcagagacaaccgagataacacagcaggcgtgtacgcccggcgtggagggttcagtcggcagaagcaggacttgtaccttctgcccatagtgatcagcgatggcggcatcccgcccatgagtagcaccaacaccctcaccatcaaagtctgcgggtgcgacgtgaacggggcactgctctcctgcaacgcagaggcctacattctgaacgccggcctgagcacaggcgccctgatcgccatcctcgcctgcatcgtcattctcctgggttgcccaagcttaatggaacccccctctcccagggaagacatgagattgctttatctgggcttccagctgatgctattttcctatgttaaagtaaacagaagattttgtcttctgggggtctttataaaacttcctttcctctatgtggtggctacagagagtccaaccacacttacgtcattgtagtattgtttgtgaccctgagaaggcaaaagaaagaaccactcattgtctttgaggaagaagatgtccgtgagaacatcattacttatgatgatgaagggggtggggaagaagacacagaagcctttgatattgccaccctccagaatcctgatggtatcaatggatttatcccccgcaaagacatcaaacctgagtatcagtacatgcctagacctgggctccggccagcgcccaacagcgtggatgtcgatgacttcatcaacacgagaatacaggaggcagacaatgaccccacggctcctccttatgactccattcaaatctacggttatgaaggcaggggctcagtggccgggtccctgagctccctagagtcggccaccacagattcagacttggactatgattatctacagaactggggacctcgttttaagaaactagcagatttgtatggttcccaagacacttttgatgacgattcttaacaataacgatacaaatttggccttaagaactgtgtctggcgttctcaagaatctagaagatgtgtaaacaggtatttttttaaatcaaggaaaggctcatttaaaacaggcaaagttttacagagaggatacatttaataaaactgcgaggacatcaaagtggtaaatactgtgaaataccttttctcacaaaaaggcaaatattgaagttgtttatcaacttcgctagaaaaaaaaaacacttggcatacaaaatatttaagtgaaggagaagtctaacgctgaactgacaatgaagggaaattgtttatgtgttatgaacatccaagtctttcttcttttttaagttgtcaaagaagcttccacaaaattagaaaggacaacagtctgagctggaattcgccttaaactctggacactctatatgtagtgcatttttaaacttgaaatatataatattcagccagcttaaacccatacaatgtatgtacaatacaatgtacaattatgtctcttgagcatcaatcttgttactgctgattcttgtaaatctttttgcttctactttcatcttaaactaatacgtgccagatataactgtcttgtttcagtgagagacgccctatttctatgtcatttttaatgtatctatttgtacaattttaaagttcttattttagtatacatataaatatcagtattctgacatgtaagaaaatgttacggcatcacacttatattttatgaacattgtactgttgctttaatatgagcttcaatataagaagcaatctttgaaataaaaaaagatttttttttaaaaaaaaaaaaaaaaaattttttattatttatttattttttttttttttttttttttgtgtgttatgtgggggggggggggg

SEQ ID NO: 5414 - DNA, 3294 bp, Homo sapiens
ttttttattttttttttttttttcttttcttttttttttttctttttttttttttttttttttttttttttttttttttttttatatatatatgtatttataactggttacacgttggattcataattaggcatcaccagtagtagttggcacagttttgttatttaagctcagggtcaagttctgtttcattttgtcgttccaaagtacaaaaagaaaaaaaaaatcaaaggcatttcatctccatggtgttttcttaaatacagtaatgtcataggaaacagtatgtacagatgagcagtgcctcctgacccctcctctgtctcttggagataggggctggggtccgatggagacgggtcaatgcggcctgctgctggactccgatgcctgcctcttgcgtgaaggggtgtagccgttgagacagccattggtctgccgtttggagggccctccattcaggatgtcctggatgtgctgcacgatgaggttgatggccaccagattatctgcacctctagggatgatcacatcagcatacttctttgttggcaagcagaattcctcaaaggcaggcttgacgaacgtaatgtactgagataaaatctgctcaagatccctgcctctctcgctgatgtcccttaatactctgcgtgagagccgggtgtccgcatctgtatccacaaaaagcttcatctggaacaggtctcgtacctcctgggagtagaaggccaggatcccttcaaagagcaccacgtctgcgggatagacagtaactgtctcctccttccgggaatgggagacaaagtcatacacggggatctggactgttttcccttcagtgatttctttgagtgttttgagaatgagttcattgtcaaaggcatccgggtggtcaaagttgaactggcccttcagggctttggccttctgctccgaggtaaggacacggtagaagctatcctggctcaggatgaccacctgcttctggcgatagtccacctcattctgccccaggagctgcacgatcttagcacacacggaagacttgccgctagctgttcccccgctgacgcctataaggaagggctcgccgccgttgggctgctggtggttctgcagggtctgctcgctgtccccggccatggttcgcgccgcccctcctcccgctgcctgtgcgaacggacgcacgctccccgcccgcgcccgcgtcggactccctccgctttccgcagccgccgctgggcgctgccggggctgaggccgctgtcgctcgcctgcgagccgctcggagcccggtgacggggctgggtttcccgaaggagccaagagccttcctttgcccgcagcggctggtccggtttacatcccaggcagaggtcagcgtgatgctgctgctccaatccgggcgggcagcgcgctgctattcgccgaggcggaggcggcgaggcgtctggccccagcctccgcccctcccgggccccgccgccgcccgaggtctctgcgaaagggtctcactctatccaataggctggaatgcagtagcatgatcaccacttactgacgctttgacctcccagtctcaagcaatcctcccacttcagcctttcgagtagctgagactacagagtcttgctttgtcaccaggctggaatgcagtggcgcaatcttggctcactacaacctccacctcccggtttcaagcgattcttgtgcctcagcctcctgagtagctgggattacaggcataacctgggtcctggtttacaggacagacaagtacaagagactgaaggcagaagtggaaaaacagagtaaaaaattggaaaagaagaaggaaacaataacagagtcagctggtcgacaacagaaaaagaaaatagagagacaagaagagaaactgaagaataacaacagagatctatcaatggttcgaatgaaatccatgtttgctattggcttttgttttactgccctaatgggaatgttcaattccatatttgatggtagagtggtggcaaagcttccttttacccctctttcttacatccaaggactgtctcatcgaaatctgctgggagatgacaccacagactgttccttcattttcctgtatattctctgtactatgtcgattcgacagaacattcagaagattcttggccttgccccttcacgagccgccaccaagcaggcaggtggatttcttggcccaccacctccttctgggaagttctcttgaactcaagaactctttattttctatcattctttctagacacacacacatcagactggcaactgttttgtagcaagagccataggtagccttactacttgggcctctttctagttttgaattatttctaagccttttgggtatgattagagtgaaaatggcagccagcaaacttgatagtgcttttggtcctagatgatttttatcaaataagtggattgattagttaagttcaggtaatgtttatgtaatgaaaaacaaatagcatccttcttgtttcatttacataagtattttctgtgggaccgactctcaaggcactgtgtatgccctgcaagttggctgtctatgagcatttagagatttagaagaaaaatttagtttgtttaacccttgtaactgtttgttttgttgttgtttttttttcaagccaaatacatgacataagatcaataaagaggccaaatttttagctgttttatgtacaaggagagatctgtttcattttgttttgccgtatttctagatataagttttagcatgggccaggaaggactaaaataaaagtttttaaggtactgtactttttgccatacttgactcatatactcaaaatacagagttgtcttggtgtaggaattggaaagcaagagtggaaaggaacgtaataactcgttggagtttaaaaatgagggtcttggcaagtaacactgatgtctgaacaaaaattcattttaattaataattaaaatgagggtctcagtgttctcttcatattctattacaggctctcagatcctgtggggcactcctagattccctgggacaggtgtagtcatgctgggaaccgcggaagtccttagtcaaagctcgagtttgcagcgtccaagggaagaggtggaaagactccccgaatttgaaaaaggcgggggggtaaaataagacacaggtcaggggtcccgaacaacattcgcggttagaagattttcaacagagaaatccggatatttatggcagagaaaaagagaggctgactgagatattattatagatag

SEQ ID NO: 5415 - DNA, 1623 bp, Homo sapiens
gctcttccagaggcaagaccaaccaagatgagtgccttgggagctgtcattgccctcctgctctggggacagctttttgcagtggactcaggcaatgatgtcacggatatcgcagatgacggctgcccgaagccccccgagattgcacatggctatgtggagcactcggttcgctaccagtgtaagaactactacaaactgcgcacagaaggagatggagtatacaccttaaatgataagaagcagtggataaataaggctgttggagataaacttcctgaatgtgaagcagatgacggctgcccgaagccccccgagattgcacatggctatgtggagcactcggttcgctaccagtgtaagaactactacaaactgcgcacagaaggagatggagtgtacaccttaaacaatgagaagcagtggataaataaggctgttggagataaacttcctgaatgtgaagcagtatgtgggaagcccaagaatccggcaaacccagtgcagcggatcctgggtggacacctggatgccaaaggcagctttccctggcaggctaagatggtttcccaccataatctcaccacaggtgccacgctgatcaatgaacaatggctgctgaccacggctaaaaatctcttcctgaaccattcagaaaatgcaacagcgaaagacattgcccctactttaacactctatgtggggaaaaagcagcttgtagagattgagaaggttgttctacaccctaactactcccaggtagatattgggctcatcaaactcaaacagaaggtgtctgttaatgagagagtgatgcccatctgcctaccttcaaaggattatgcagaagtagggcgtgtgggttatgtttctggctgggggcgaaatgccaattttaaatttactgaccatctgaagtatgtcatgctgcctgtggctgaccaagaccaatgcataaggcattatgaaggcagcacagtccccgaaaagaagacaccgaagagccctgtaggggtgcagcccatactgaatgaacacaccttctgtgctggcatgtctaagtaccaagaagacacctgctatggcgatgcgggcagtgcctttgccgttcacgacctggaggaggacacctggtatgcgactgggatcttaagctttgataagagctgtgctgtggctgagtatggtgtgtatgtgaaggtgacttccatccaggactgggttcagaagaccatagctgagaactaatgcaaggctggccggaagcccttgcctgaaagcaagatttcagcctggaagagggcaaagtggacgggagtggacaggagtggatgcgataagatgtggtttgaagctgatgggtgccagccctgcattgctgagtcaatcaataaagagctttcttttgacccaaaaaaaaaaaaaaaaaaaaaaaaacaaaaaactcgtggtggcgcggcattaggagcccttgaaaagggttttgagaaacattgtgggtgggagacgcgggggcacaggatggtataggtggacacatgggagaaaaggggttcccaaggaaaaccggggaccgagaaacaaagggcgggggatttctccacaagttaaaaaaggcccgga

SEQ ID NO: 5416 - DNA, 2812 bp, Homo sapiens
  misc_feature (199)..(223): n is a, c, g, or t
ataccagcctcgagttcatgtgattcgcaaagacttcagcagtgacctttcacccactaagcctgttcctgttggggatggggtgaaaacgttcaactttcctgagactgtgttcaccacagttacggcctatcagaatcagcagattaccagattaaaaattgaccgaaacccttttgctaaaggattcagagattcnnnnnnnnnnnnnnnnnnnnnnnnnaccatcatggagacatatgcattctggagacctcctgtgcgcacactcaccttcgaagacttcaccaccatgcagaagcagcaaggaggcagcacaggcacttccccaaccacctccagcactgggacaccatccccttcggcttcttctcatcttttatctccatcctgttctcctccaacttttcatctggcccccaacactttcaatgtgggctgccgagaaagccagctgtgtaatctaaacctctctgattatccaccatgtgcccgaagcaacatggctgccttgcagagctacccagggctgagtgacagtggctacaacaggcttcagagtggcaccacttcagccactcagccctctgaaaccttcatgcctcagaggactccatccctgatctcaggaataccaactcctccctcgttgcctggcaacagcaagatggaagcctacggtggccagctggggtcctttcccacttcccagtttcagtatgtcatgcaggcaggcaatgctgcctccagctcctcatcaccacacatgttcgggggcagccacatgcagcagagctcctacaatgccttctcccttcacaacccttacaacctgtatggatacaatttccccacttcccctaggctagctgcaagcccggaaaaactgagcgcctctcaaagcactttactctgttcttctccttccaacggggcctttggagagaggcagtacctgccgtcagggatggagcacagcatgcacatgattagcccttcacccaataaccaacaggcaaccaacacttgtgatggccggcagtatggggcagttccaggctcctcctcccagatgtccgtgcacatggtttaaaggccagtccaaacaccacggagcatttggcaatcaaggccccagagtctccgtggtcagatcctcctctttgggagtccagtgtctttgaaaaacaggaaccgtgttttttttttttttttttttttttctggccgaagacatatacccaagaacaagagatacctttaagccagtgaaggatacttgcgatagaatcatccgcaactcagtggccattcttctgccttcccagaccttagttttataaagcattgtctgttccagagtggcctttgaagagactgaataatcacttcgtcataatgttaagggagatgctagtgtgtggcagccatgaaaagttacacatacacacccacatacagacagacctacctatacatacgtgcacacacacatacatattcatacacaattcatacacatgcaatcatacatgcacactgactctgaactgggtgaactctgtggagggaggcccagaatgggtgctttcaccaagaatttgtctgtgtacaactctagatggagtgggccagcagtagctgccagtctttctcccctgcagcttcctctgcttctggaatgaaccatgtatcctggagaccctcccaatggatgagagtggaaagacatcagtacaactggacttggcttccggaaaaagattgcttttgaactttggctctcttcacttgtatgctatcattgatattcccagtggtgcccgtggaaagagggagaaagagaagctgaacaggagaaagacaaacagaaagaatagagaacaggaacgaggtggagagcaagactgacagagaaagtgtgagcaatgatgagaattttaattcaccaaggagacgtgtttttggtttgtccccccaaaccccgcccgccccactacaggttatggaaagaatcatggcattactgaggagtaaacctctctggcacactgagcatggtcagggcattggtcagagggacagagcaaggaatgcatcctgagcccacagctttgaccactgtgatccagaagagaggtgcactacgtgggaagtgctgattccacagcatgcagcctggtaggggaaggaaaataaaagggtgtgaagaaggaatagttttataatctcggaagatgataccaagagcagaggcaacaaatagaggcctggcctccaggtgccggatccagacacctgacctagaatgcctgcccgctatccctgtggcaggaaatatcccctcatgtcccagggaattgcagatgggtcttctatacccttctacctgcccttagatctccatttttatcaaatagtacattgcattttgaagttttgggttttgtccttcatctttccctttcccttcaaatcttttaatggtaagaaagcaagtgaagcttggtgcaagctaaaatttttaaatggtgtggaaatgcaaataataccaagtaaaataatacagatattattaaagtttctggttttgaggtgttgtagataaatgtatttatgtgcctagtggggaatccaatattatgaatatgaaaaagggggcaataaaagggtatgtaaaatatgtatgaagaaaaggtgtacaaaaatttgcccttatgcacggaactctgtttctaagtgccaagcacagaaagccgctaaataaaatctttgcaattgttaaaaaaaaaaaaaaaaaaaaaaaaaaaaa

SEQ ID NO: 5417 - DNA, 1764 bp, Homo sapiens
ggcacgaggcctcgtgccgttttaatggatatttatttttttacattggtcagtacacaggtcaggagctcacgccagggccttgaggacaggctgaccctcctccccggggtggcgtggggctggggcaccctccgacggcagagcctccttcagaaagtgcagctcaagtcttaaagacaccaaaactgagccatgggcacgcgccgtctccgggccatggcgttcactgcagggcgggggcggcaccgctcccctgtgactgcatcccgcctccctggggacctgcctgtggcaggaaggaatggggggccccagccccaggccgggaaggagccagcggccgacaaagcagaaacacccgctgctccacgtagcccctgctcgctgtccttgctctcagaagtcccggtcccatgtagatagaggggggcgcatcttaccaaagcatttcctcctggaggctacgccgctgtgctcccagtcaggcggctggtagggagctttgcctgccccggggataccctctgccagccgctggaagtgggaatgctggcgacagactgtgtcctctttcccaccttcatagcaggaatcacccggacccgactggctgggcttcgtgctagcgagggttctgggggtgggtcttggtgatcttgtcctatggggagtctgcagtggtctcagccacatcctatgtattttggctctggaggagcaaagctgtatcctggagttggtctgtgatttgccgacagccttgcaggctgggctcagggacaaagtcccccccaaaacccgcaggtcctcatgtccagacgctgcccagtcctgtcctgaaaacagcacgccccaggcccacagaaccccccaccctacatttgccttgggtggagctgggggtggtcctaggactgcgggtgcccttagctgaagggggtggggagaagcgtggactgggcagcctgtgggtaattggaggttcattgagaattgagtctttggaaacactaagaaaatcaaatttttaaaagttatttatggcctgggaaacaatttgcatttgtccccaaatacgcttagctgtgtgccgcttagaacgatgcgaaaccatccctctgtgtaagcccgtgccgtgtgactcgaagcctagcgccctccctgcgaagcatcagacgccacccagccctggggggaggcccacgcctgctggaccaacgcgggttctggggtgcacagcgccaggttaacgctgaagcctgccccgctgagcccaggagccgggaggcctgcgggctgacccagaatccgatcatgcacctgtcctcatgccagcggctttggctggggttggtctgaagcctgcacgcggcagttctttgttaaagatctgagggactcctcagtcctggggcgtcgccgcctgcagcctcttccaagccctgcgtccagcgagcgtcacagcacaacctgcaaaaacggagctgggctgcagctggggctggcatggactttcatttcagagattcggtttttaagaagatgcatgcctaatgtgttcttttttttttccaatgatttgtaatatacattttatgactggaaacttttttgtacaacactccaataaacattttgattttaaaaaaaaaaaaaaaaaaaaaaaaaaaaaaaaaaataacagacaaccaacaaaaatcacaacacacaccaaaaaacaaaacaaaatcaaaaaaaacacaacacaacaaacaagaaaga

SEQ ID NO: 5418 - DNA, 1403 bp, Homo sapiens
acttggccttacactccgctcggctcaccatgtgtcactctcgcagctgccacccgaccatgaccatcctgcaggccccgaccccggccccctccaccatcccgggaccccggcggggctccggtcctgagatcttcaccttcgaccctctcccggagcccgcagcggcccctgccgggcgccccagcgcctctcgcgggcaccgaaagcgcagccgcagggtctctctaccctcgagtggtgagtatcgccgaagtgggcattcgcggtgtgcgctgccctggagtcactggggaacgacccgactccagagcctcgacctgacctgtctcctgttttgtctccccttagtccggcgccagctgccagtcgaggaaccgaacccagccaaaaggcttctctttctgctgctcaccatcgtcttctgccagatcctgatggctgaagagggtgtgccggcgcccctgcctccagaggacgcccctaacgccgcatccctggcgcccacccctgtgtcccccgtcctcgagccctttaatctgacttcggagccctcggactacgctctggacctcagcactttcctccagcaacacccggccgccttctaactgtgactccccgcactccccaaaaagaatccgaaaaaccacaaagaaacaccaggcgtacctggtgcgcgagagcgtatccccaactgggacttccgaggcaacttgaactcagaacactacagcggagacgccacccggtgcttgaggcgggaccgaggcgcacagagaccgaggcgcatagagaccgaggcacagcccagctggggctaggcccggtgggaaggagagcgtcgttaatttatttcttattgctcctaattaatatttatatgtatttatgtacgtcctcctaggtgatggagatgtgtacgtaatatttattttaacttatgcaagggtgtgagatgttccccctgctgtaaatgcaggtctcttggtatttattgagctttgtgggactggtggaagcaggacacctggaactgcggcaaagtaggagaagaaatggggaggactcgggtgggggaggacgtcccggctgggatgaagtctggtggtgggtcgtaagtttaggaggtgactgcatcctccagcatctcaactccgtctgtctactgtgtgagacttcggcggaccattaggaatgagatccgtgagatccttccatcttcttgaagtcgcctttagggtggctgcgaggtagagggttgggggttggtgggctgtcacggagcgactgtcgagatcgcctagtatgttctgtgaacacaaataaaattgatttactgtctgcaaaaaaaaaaaaaaaaaaaaaaagccgatcgtaattcgagggtacttggccaattc

SEQ ID NO: 5419 - DNA, 2765 bp, Homo sapiens
  misc_feature (2655)..(2764): n is a, c, g, or t
agtaatatggaatgaagaatagacctggagagccaggatgggatggaagggtttcatgagagtcagaatttacttggtgagaataagaaaacaggcagaatttctggtctttgatccatttggaggaaagagaccctggtccttcctagtaaagcttttaaggtacatgctaactcatctaacactgcactaataccataaaaatgtgtcccacataggatacaagtgtcacatgagtagaatttataaggtgtggggaaggtaaaatttttgtatagagatggggcggggagggactcactatgttgcccaggctggtctttaactcttgggctcaagtgatcttcctgcctcagcttcccagagtgctgggattataggcgtgagccacagtacctggctaaaactttttttttttttttttttttaacttttctaattagaaccttatttaaaattaaaagagtttctaaattaaaccagcattttagttaaaattcttaccctaagtaaggctggttctatatggttaaggatgttttaggttgtctaaatgtcacactaaattattaaactggttagaatatacatgcacttaacccaaatatcttaagcttgaatgaattaggtccctgcacgttagctctatagaagatggttattctctttaaaggtacatctttaatagtgaaatcaatattgtatgtcctatagtaaggtcaattcagggaagacaggtctggaatactgatatattaaaaaacttggtagaggataaaatgttgatgtcaatccagatactctttggttgctttttttgagaaagggtctcgctgtgtcattcaggctggagtgcagtggtgcaatcatggcttactgtagccttgaagtccttgctcaagcaatcctcccacctaagtcttctgagtagccaggactagaagcgcacaccaccatgcccagctaatttttaaatttttagtagagattttgcccaggctggtcttgaactcctgagctcaagtcatccgctgcctcagcttcccaaagtgctgagattgcaggcctgagctgtgtctggcccaaactcattgagttggtgatttctaaattttaggagtgatgtttcattaccattctgtatcatagagcattccttttctccttcagggtcttatactatggtttacagagctatctttccactgggcttttttacagattgaacagagtaatatttttgatcccaaaacaattatatcctagaagttggtaaataacactgggatcagtttcctgttaccagtctttgtcatctagatcttagaagtagtaacgcatgtcacttcaccatcaatctctaaggttccatgcttgtctgtacctagaatatcaggtaaacgttaaggctgttttttttttgtttgtttgtttgttttctgagacggagtctcgctctgtcgcccaggctggagtgtagtggcgcgatctcgcctcactgcaagctccgcctcctgggttcacgccattctcctgccttagcctctcagagtagctgtgactgcagatgcccgccatcatgcccggctaattttttttgtatttttagtagagacgtggtttcaccatgttggccaggatggtctctatctcccagcctcgtgatccgcctgcctcagcctcccaaagtgctgggattacaggcgtgagccactgcgcccggccacgttaaggctgtttttttaaaatgtttatttgaaagacaattttctttattccaggaatttctgagttacaacttttcacttatgccaccttatggaagaaagatcaatttccaatctttagatttgaggaaaataacgttcatagttgtgtttttgttgttgggtttttttgtttttgttttttttaacttttccaaaaccaggtacaaagtgagagaagcacaaaaccatttggtggaagtgataagtcaaatccatgatgtaaccttgtctttcccatcacctgattttttgctttaagccctggttttcaaattaatgatggaattaaagttgatgagggtgaactttgagcattaatagaccttggagcctttccctatgtgactttcattttgagctcttgctgtttggattttaaggacacctctgctgtccaggacgctgccaaggtctgcagagaattcaccgagcgtgagcaaggagaagtccgcttctctgccgtggctctctgcaaggcagcctaatgctctgtgggagggactttgctgatttcccctcttcccttcaacatgaaaatatatacccccccatgcagtctaaaatgcttcagtacttgtgaaacacagctgttcttctgttctgcagacacgccttcccctcagccacacccaggcacttaagcacaagcagagtgcacagctgtccactgggccattgtggtgtgagcttcagatggtgaagcattctccccagtgtatgtcttgtatccgatatctaacgctttaaatggctactttggtttctgtctgtaagttaagaccttggatgtggtttaattgtttgtcctcaaaaggaataaaacttttctgctgataagataaaaaaaacaaaaaaaaaaaaaaaaaaaaaaaaaaaaaaaaaaaannnnnnnnnnnnnnnnnnnnnnnnnnnnnnnnnnnnnnnnnnnnnnnnnnnnnnnnnnnnnnnnnnnnnnnnnnnnnnnnnnnnnnnnnnnnnnnnnnnnnnnnnnnnnnc

SEQ ID NO: 5420 - DNA, 918 bp, Homo sapiens
attcgacatcgaactttggatcccttcccatcgtaggcccctttaaaaataatgggtcgcagcgacggtcgcggaggaattgcgcgcggagccgcatcacggacgcggggcgtgccagtttataaagggagagagcaagcagcgagtcttgaagctctgtttggtgctttggatccatttccatcggtccttacagccgctcgtcagactccagcagccaagatggtgaagcagatcgagagcaagactgcttttcaggaagccttggacgctgcaggtgataaacttgtagtagttgacttctcagccacgtggtgtgggccttgcaaaatgatcaagcctttctttcattccctctctgaaaagtattccaacgtgatattccttgaagtagatgtggatgactgtcaggatgttgcttcagagtgtgaagtcaaatgcatgccaacattccagttttttaagaagggacaaaaggtgggtgaattttctggagccaataaggaaaagcttgaagccaccattaatgaattagtctaatcatgttttctgaaaacataaccagccattggctatttaaaacttgtaatttttttaatttacaaaaatataaaatatgaagacataaacccagttgccatctgcgtgacaataaaacattaatgctaacactttttaaaaaaaaaaaaaaaaagaatagctttcaaaataaatgtgaaatggtccgcctgggcgctctaaaaagagtcttttcgtagaaccatttcgttggggccggcggggccccattgggtctcaggtcacagtgggtccataggggtgttcccagaagaaaactcgtgtcatagacgagtgggttgtgattcttccccgatttaaaaggcgcgggggtgcaccgaggtgtcttgaaaaatttcc

SEQ ID NO: 5421 - DNA, 6315 bp, Homo sapiens
ccacgcgtccggaggctgccagcagccagcagtgactgcccgccctatctgggacccaggatcgctctgtgagcaacttggagccagagaggagatcaacaaggaggaggagagagccggcccctcagccctgctgcccagcacgagcctgtgctcgccctgcccaacgcagacagccagacccagggcggcccctctggcggctctgctcctcccgaaggatgcttggggagtgaggcgaagctgggcgctcctctcccctacagcagcccccttcctccatccctctgttctcctgagccttcaggagcctgcaccagtcctgcctgtccttctactcagctgttacccactctgggaccagcagtctttctgataactgggagagggcagtaaggaggacttcctggagggggtgactgtccagagcctggaactgtgcccacaccagaagccatcagcagcaaggacaccatgcggcttccgggtgcgatgccagctctggccctcaaaggcgagctgctgttgctgtctctcctgttacttctggaaccacagatctctcagggcctggtcgtcacacccccggggccagagcttgtcctcaatgtctccagcaccttcgttctgacctgctcgggttcagctccggtggtgtgggaacggatgtcccaggagcccccacaggaaatggccaaggcccaggatggcaccttctccagcgtgctcacactgaccaacctcactgggctagacacgggagaatacttttgcacccacaatgactcccgtggactggagaccgatgagcggaaacggctctacatctttgtgccagatcccaccgtgggcttcctccctaatgatgccgaggaactattcatctttctcacggaaataactgagatcaccattccatgccgagtaacagacccacagctggtggtgacactgcacgagaagaaaggggacgttgcactgcctgtcccctatgatcaccaacgtggcttttctggtatctttgaggacagaagctacatctgcaaaaccaccattggggacagggaggtggattctgatgcctactatgtctacagactccaggtgtcatccatcaacgtctctgtgaacgcagtgcagactgtggtccgccagggtgagaacatcaccctcatgtgcattgtgatcgggaatgaggtggtcaacttcgagtggacatacccccgcaaagaaagtgggcggctggtggagccggtgactgacttcctcttggatatgccttaccacatccgctccatcctgcacatccccagtgccgagttagaagactcggggacctacacctgcaatgtgacggagagtgtgaatgaccatcaggatgaaaaggccatcaacatcaccgtggttgagagcggctacgtgcggctcctgggagaggtgggcacactacaatttgctgagctgcatcggagccggacactgcaggtagtgttcgaggcctacccaccgcccactgtcctgtggttcaaagacaaccgcaccctgggcgactccagcgctggcgaaatcgccctgtccacgcgcaacgtgtcggagacccggtatgtgtcagagctgacactggttcgcgtgaaggtggcagaggctggccactacaccatgcgggccttccatgaggatgctgaggtccagctctccttccagctacagatcaatgtccctgtccgagtgctggagctaagtgagagccaccctgacagtggggaacagacagtccgctgtcgtggccggggcatgccccagccgaacatcatctggtctgcctgcagagacctcaaaaggtgtccacgtgagctgccgcccacgctgctggggaacagttccgaagaggagagccagctggagactaacgtgacgtactgggaggaggagcaggagtttgaggtggtgagcacactgcgtctgcagcacgtggatcggccactgtcggtgcgctgcacgctgcgcaacgctgtgggccaggacacgcaggaggtcatcgtggtgccacactccttgccctttaaggtggtggtgatctcagccatcctggccctggtggtgctcaccatcatctcccttatcatcctcatcatgctttggcagaagaagccacgttacgagatccgatggaaggtgattgagtctgtgagctctgacggccatgagtacatctacgtggaccccatgcagctgccctatgactccacgtgggagctgccgcgggaccagcttgtgctgggacgcaccctcggctctggggcctttgggcaggtggtggaggccacggctcatggcctgagccattctcaggccacgatgaaagtggccgtcaagatgcttaaatccacagcccgcagcagtgagaagcaagcccttatgtcggagctgaagatcatgagtcaccttgggccccacctgaacgtggtcaacctgttgggggcctgcaccaaaggaggacccatctatatcatcactgagtactgccgctacggagacctggtggactacctgcaccgcaacaaacacaccttcctgcagcaccactccgacaagcgccgcccgcccagcgcggagctctacagcaatgctctgcccgttgggctccccctgcccagccatgtgtccttgaccggggagagcgacggtggctacatggacatgagcaaggacgagtcggtggactatgtgcccatgctggacatgaaaggagacgtcaaatatgcagacatcgagtcctccaactacatggccccttacgataactacgttccctctgcccctgagaggacctgccgagcaactttgatcaacgagtctccagtgctaagctacatggacctcgtgggcttcagctaccaggtggccaatggcatggagtttctggcctccaagaactgcgtccacagagacctggcggctaggaacgtgctcatctgtgaaggcaagctggtcaagatctgtgactttggcctggctcgagacatcatgcgggactcgaattacatctccaaaggcagcacctttttgcctttaaagtggatggctccggagagcatcttcaacagcctctacaccaccctgagcgacgtgtggtccttcgggatcctgctctgggagatcttcaccttgggtggcaccccttacccagagctgcccatgaacgagcagttctacaatgccatcaaacggggttaccgcatggcccagcctgcccatgcctccgacgagatctatgagatcatgcagaagtgctgggaagagaagtttgagattcggccccccttctcccagctggtgctgcttctcgagagactgttgggcgaaggttacaaaaagaagtaccagcaggtggatgaggagtttctgaggagtgaccacccagccatccttcggtcccaggcccgcttgcctgggttccatggcctccgatctcccctggacaccagctccgtcctctatactgccgtgcagcccaatgagggtgacaacgactatatcatccccctgcctgaccccaaacccgaggttgctgacgagggcccactggagggttcccccagcctagccagctccaccctgaatgaagtcaacacctcctcaaccatctcctgtgacagccccctggagccccaggacgaaccagagccagagccccagcttgagctccaggtggagccggagccagagctggaacagttgccggattcggggtgccctgcgcctcgggcggaagcagaggatagcttcctgtagggggctggcccctaccctgccctgcctgaagctccccccctgccagcacccagcatctcctggcctggcctgaccgggcttcctgtcagccaggctgcccttatcagctgtccccttctggaagctttctgctcctgacgtgttgtgccccaaaccctggggctggcttaggaggcaagaaaactgcaggggccgtgaccagccctctgcctccagggaggccaactgactctgagccagggttcccccagggaactcagttttcccatatgtaagatgggaaagttaggcttgatgacccagaatctaggattctctccctggctgacaggtggggagaccgaatccctccctgggaagattcttggagttactgaggtggtaaattaacttttttctgttcagccagctacccctcaaggaatcatagctctctcctcgcacttttatccacccaggagctagggaagagaccctagcctccctggctgctggctgagctagggcctagccttgagcagtgttgcctcatccagaagaaagccagtctcctccctatgatgccagtccctgcgttccctggcccgagctggtctggggccattaggcagcctaattaatgctggaggctgagccaagtacaggacacccccagcctgcagcccttgcccagggcacttggagcacacgcagccatagcaagtgcctgtgtccctgtccttcaggcccatcagtcctggggctttttctttatcaccctcagtcttaatccatccaccagagtctagaaggccagacgggccccgcatctgtgatgagaatgtaaatgtgccagtgtggagtggccacgtgtgtgtgccagtatatggccctggctctgcattggacctgctatgaggctttggaggaatccctcaccctctctgggcctcagtttccccttcaaaaaatgaataagtcggacttattaactctgagtgccttgccagcactaacattctagagtattccaggtggttgcacatttgtccagatgaagcaaggccatataccctaaacttccatcctgggggtcagctgggctcctgggagattccagatcacacatcacactctggggactcaggaaccatgccccttccccaggcccccagcaagtctcaagaacacagctgcacaggccttgacttagagtgacagccggtgtcctggaaagcccccagcagctgccccagggacatgggaagaccacgggacctctttcactacccacgatgacctccgggggtatcctgggcaaaagggacaaagagggcaaatgagatcacctcctgcagcccaccactccagcacctgtgccgaggtctgcgtcgaagacagaatggacagtgaggacagttatgtcttgtaaaagacaagaagcttcagatgggtaccccaagaaggatgtgagaggtgggcgctttggaggtttgcccctcacccaccagctgccccatccctgaggcagcgctccatgggggtatggttttgtcactgcccagacctagcagtgacatctcattgtccccagcccagtgggcattggaggtgccaggggagtcagggttgtagccaagacgcccccgcacggggagggttgggaagggggtgcaggaagctcaacccctctgggcaccaaccctgcattgcaggttggcaccttacttccctgggatccccagagttggtccaaggagggagagtgggttctcaatacggtaccaaagatataatcacctaggtttacaaatatttttaggactcacgttaactcacatttatacagcagaaatgctattttgtatgctgttaagtttttctatctgtgtacttttttttaagggaaagattttaatattaaacctggtgcttctcactcacaaaaaaaaaaaaaaaaaaaaggtttgggttcctgcccatagggagtgtggagtggggcacatgaggctcacccagacgcagacccccagacaggtcccttcagctctgagtctcattcattcatctgtaaagtggggattttcgctctcccacccctcgctggaagctggggggcctagacttgggcttggtttcccaaggtgggaagcgagcaggcttttctggctccacagagcctggccttgagtcgggcaggagggtgtggggctgcagggctgctccaaggctctggtgctgaggcgtctcactgcctccaccatgtgctttggctttggctatcagctgggacaccctcccctccactccgcccacaggcccggattgaggccggcgtgctctgtgacaggcagctgctagagcccagattccaggtccaggtgagtcatgatcaggccccaggtaggagaagggcagacagagtgtccaaaagcgtgagagcacgaagtgaggagaaggtggagaagagagaagaggaagaggaagaggaagagaggaagcggagggaactgcggccagggtaaggacaggggagggaat

SEQ ID NO: 5422 - DNA, 2652 bp, Homo sapiens
  misc_feature (2622)..(2647): n is a, c, g, or t
tataaaagctgggccggcgcgggccgggccattcgcgacccggaggtgcgcgggcgcgggcgagcagggtctccgggtgggcggcgcgacgccccgcgcaggctggaggccgccgaggctcgccatgccgggagaactctaactcccccatggagtcggccgacttctacgaggcggagccgcggcccccgatgagcagccacctgcagagccccccgcacgcgcccagcagcgccgccttcggctttccccggggcgcgggccccgcgcagcctcccgccccacctgccgccccggagccgctgggcggcatctgcgagcacgagacgtccatcgacatcagcgcctacatcgacccggccgccttcaacgacgagttcctggccgacctgttccagcacagccggcagcaggagaaggccaaggcggcgtgggcccacggcggcggcggcggcggcgactttgactacccgggcgcgcccgcgggccccggcggcgccgtcatgcccgggggagcgcacgggcccccgcccggctacggctgcgcggccgccggctacctggacggcaggctggagcccctgtacgagcgcgtcggggcgccggcgctgcggccgctggtgatcaagcaggagccccgcgaggaggatgaagccaagcagctggcgctggccggcctcttcccttaccagccgccgccgccgccgccgccctcgcacccgcacccgcacccgccgcccgcgcacctggccgccccgcacctgcagttccagatcgcgcactgcggccagaccaccatgcacctgcagcccggtcaccccacgccgccgcccactcccgtgcccagcccgcaccccgcgcccgccgtcggtgccgccggcctgccggccctggcgagcgcgctcaaggggctgggcgccgcgcaccccgacctccgcgcgagtggcggcagcggcgcgggcaaggccaagaagtcggtggacaagaacagcaacgagtaccgggtgcggcgcgagcgcaacaacatcgcggtgcgcaagagccgcgacaaggccaagcagcgcaacgtggagacgcagcagaaggtgctggagctgaccagtgacaatgaccgcctgcgcaagcgggtggaacagctgagccgcgaactggacacgctgcggggcatcttccgccagctgccagagagctccttggtcaaggccatgggcaactgcgcgtgaggcgcgcggctgtgggaccgccctgggccagcctccggcggggacccagggagtggtttggggtcgccggatctcgaggcttgcccgagccgtgcgagccaggactaggagattccggtgcctcctgaaagcctggcctgctccgcgtgtcccctcccttcctctgcgccggacttggtgcgtctaagatgagggggccaggcggtggcttctccctgcgaggaggggagaattcttggggctgagctgggagcccggcaactctagtatttaggataacttgtgccttggaaatgcaaactcaccgctccaatgcctactgagtagggggagcaaatcgtgccttgtcattttatttggaggtttcctgcctccttcccgaggctacagcagacccccatgagagaaggaggggagcaggcccgtggaggaggggggctcagggagctgagatcccgacaagcccgccagccccagccgctcctccacgcctgtccttagaaaggggtggaaacatagggacttggggcttggaacctaaggttgttccctagttctacatgaaggtggaggtctctagttccacgcctctcccacctccctccgcacacaccccacccagcctgctataggctggctttcccttggggctggaactcactgcgatggggtcaccaggtgaccagtggagcccccaccccgagtcagaccagaaagctaggtcgtgggtcagctctgaggatgtatacccctggtgggagagggagacctagagatctggctgtggggcgggcatggggggtgaagggccactgggaccctcagccttgtttgtactgtaatgcccttcagcatttgcctagcgaacacgaagcacgatcagtccatcccagagggaccggagttatgacaagcttcccaaatattttgctttatcagccgatatcaacacttgtatctggcctctgtgcccagcagtgccttgtgcaatgtgaatgtaccgtctctgctaaaccaccattttatttggttttgttttgtttggttttctcggatacttgccaaaatgagactctccgtcggcagctgggggaagggtctgagactctctttccttttggttttgggattacttttgatcctgggggaccaatgaggtgaggggggttctcctttgccctcagctttcccagccctccggcctgggctgcccacaaggcttctcccccagaggccctggctcctggtcgggaagggaggtgcctcccgccaacgcatcactggggctgggagcagggaagggaattcttggttctcttcttttggggagaacgctagagtctcactctagatgttttatgtattatatctattatataacatatcaaagtccaacatnnnnnnnnnnnnnnnnnnnnnnnnnntctcc

SEQ ID NO: 5423 - DNA, 1191 bp, Homo sapiens
gcggcgcgtggtctacgccgagatgacaggaagaacgctcagtgctggtgattcgtcagcgatgagacgcgagctggagtagacacgctagtgaccagtcgagtggcctggagagccctcagtacgatcaatgctcttgtggcgcaagtgcgaagcaaccagatgactagtgcgagactgcaagtgagcgatttcgcgctgtcaaggagttagcacttgcagggtgaagggagaaggtatgccaaggtaccatgcgatcacagatgcagggcggatatgccgccgtagacgcttccgcaaagctcatgtgttccagtagtggagcgcgctcacgtaagcatccgagtgatgatgcacggacgcaacaaacggcaaaaaaagctcatgaactgtgccgcaatcgtcaaagcatgccttcgagatcataaacctgcttcacaggcgaagaaccctctgcaggtccctggtgaacgcccatcatcaacagtggtccccgggaggactcccacacgcattgggcgcgccgggactgtgaagacgacaggctgtggatgtgtcccccctgcgccgtgtgaaccgaggccatttggttgctgtgcacaggcgctcgtgaggctgccttccggaacattaagaccattgctgagtgcctggcagatgagctcatcaatgctgccaagggctcctcgaactcctatgccattaagaagaaggacgagctggagcgtgtggccaagtccaaccgctgattttcccagctgctgcccaataaacctgtttgccctttggggcagtcccagcaaaaaaaaaaaaaaaaaaaaaaaaaaaaaaaaaaaaaaaaaaaaaaaaaaaaaaaaaaaaaaaaaaaaaaaaaaaaaaaaagaaaaaaaaaaaaaaaaaaaaaaaaaagcagaaaaaaaaaaaaaaaataaaaaaaagaagatagagagagaggagaaggcggggggtccccactcatataattcatggagctggcggtgaggaggaggaaagatcaatggaggctgcggtatatcagtcttatatatggtggtacggggggggccatcgacatcttgatgtgcttgttcggtggactactttattcggtgaagggggctctacatattgctctggggtatacatcgatttgatgacgaaacactggtgcagtgattatagagagttcac

SEQ ID NO: 5424 - DNA, 3481 bp, Homo sapiens
  misc_feature (442)..(466): n is a, c, g, or t
  misc_feature (528)..(662): n is a, c, g, or t
  misc_feature (1210)..(1220): n is a, c, g, or t
  misc_feature (1608)..(1636): n is a, c, g, or t
  misc_feature (1887)..(1911): n is a, c, g, or t
gccggaggcggcggctgccccgcgggcggcaacgacttccagtggtgcttctcgcaggtcaagggggccatcgacgaggacgtggccgaagcggacatcatttccaccgttgagtttaattactctggagatcttcttgcaacaggagacaagggcggcagagttggttactttttccagcggtgaacaacgagaataaaagccgccctcattctaggggagaatataatgtttacagcacctttcaaagtcatgaaccggagtttgactatttgaaaagtctagaaattgagggaaaaaacttaagtagaacattaagggtgggtataccaggaaacgagaatgctgctcattttctactgtctacaaatgataaaactataaaattatggaaaataagtgaacgggataaaagagcagaaggttataacctgaaagacgnnnnnnnnnnnnnnnnnnnnnnnnntttaggcatcacggcgctacgggtacacgttgcctttgctttatccaatgctgttgagaagnnnnnnnnnnnnnnnnnnnnnnnnnnnnnnnnnnnnnnnnnnnnnnnnnnnnnnnnnnnnnnnnnnnnnnnnnnnnnnnnnnnnnnnnnnnnnnnnnnnnnnnnnnnnnnnnnnnnnnnnnnnnnnnnnnnnnnngataaaactataaaattatggaaaataagtgaacgggataaaagagcagaaggttataacctgaaagacgtttcagtaaatagtgatcatttaggatcacggcgctacggatgacctgagaattaatttatggcacttagaaatcacagatagaagctttaacatcgtggacatcaagcctgctaacatggaggagctgaccgaagtcatcactgcagccgagttccacccgcaccagtgcaacgtgttcgtctacagcagtagcaaagggaccatccgcctgtgtgacatgcgctcctcggccctgtgcgacagacactccaagttttttgaagagcctgaagatcccagcagtaggtccttcttctcagaaataatttcatccatatccgatgtaaaattcagtcatagtgggcggtacatgatgaccagagactacctgtcggtgaaggtgtgggacctcaacatggagagcaggccggtggagacccaccaggtccacgagtacctgcggcagaaggcttttgttttctctatgaagaacgaannnnnnnnnnnagtttgagtgttgctggaacggttcggatagcgccatcatgaccgggtcctataacaacttcttcaggatgtttgatagagacacgcggagggatgtgaccctggaggcctcgagagagagcagcaaaccgcgcgccagcctcaaaccccggaagagaacaatggcagatggatcgagtacgacaggacagaaaccgcgatcaacaacctcaaccccgccttctccaagaagttcgtgcttgactaccacttcgaggaggtacagaagctcaagttcgcgctctttgaccaggacaagtccagtatgcggctggacgagcatgacttcctgggccagttctcctgcagcctgggcacgatcgtctccagcaagaagatcactaggccnnnnnnnnnnnnnnnnnnnnnnnnnnnnntgcggggaagggcttgattacgatcgctgcccaggagctgtccgacaaccgcgtcatcacactaagcctggcgggcaggaggctggacaagaaggacctctttgggaagtcagacccctttctggagttttataagccaggagacgatggcaagtggatgctggtccacaggactgaggtgatcaagtacacactggaccctgtgtggaagccattcacagtgcccttggtgtccctgtgtgatggggacnnnnnnnnnnnnnnnnnnnnnnnnngtcatgtgctacgactatgacaatgacgggggccatgacttcatcggcgagttccagacctcagtgtcacagatgtgtgaggctcgagacagcgtcccgctggagttcgagtgcatcaaccccaagaagcagaggaagaagaagaactataaaaactcgggcatcatcatcctgcgatcctgcaagataaaccgagactactccttccttgactacatcctgggaggctgccagctcatgttcaccgttggaatagactttacagcctccaacgggaatcccctcgacccttcctctttgcactatatcaaccctatgggcaccaacgaatatctgtcggccatctgggctgttgggcagatcattcaggactacgacagtgataagatgtttccagctctgggattcggggcccagttacccccagactggaaggtctcccatgagtttgccatcaacttcaaccccaccaaccccttctgctcaggtgtggatggtattgcccaggcgtactcagcttgcctgccccacatccgcttctacggtcctaccaatttctcccccatcgtcaaccacgtggcccggtttgcggcccaggccacacaacagcggacggccacgcagtacttcatcctcctcatcatcacggacggggtcatcagtgacatggaggagacacggcatgccgtggtgcaggcttccaagctgcccatgtccatcatcatcgtgggcgtgggcaatgcggacttcgctgccatggagttcctggatggggacagccgcatgctgcgctcccacacgggggaggaggcagcccgcgatattgtgcagttcgttccctttcgagagttccgcaacgcagcaaaagagaccttggccaaagctgtgctggcggagctgccccaacaagttgtgcagtatttcaagcataaaaacctgccccccaccaactcggagcccgcctgagctccagtgcccagcagcagcatgtcagctgagcctcctgccctcccccaggaacatgcacgctcactctgcttccttgtgggtggcctttttttaccgatccccttttttattttttacaaccggacctccacccccaacttcctccagcccagctgggcttcctttgttggagtcaactgttgatgcttccaggccaaactggcttcctctcctcctctccccacctttgccattcttaagtattgaatgtactttgtataattttagtggaattgttattgagaataaaatttttacaatcaaaaaaaaaaaaaaaaaaacagacaaacaaaaaatctccgcgggggccccatgtgccgcgggtgccggcaacaagggaggcctcatgaacaggtgggccctgtgcccttgacgctgtgtttccccgagtgaacccaaaagggtgtttacctgtgtcatacaaacgcgtgggcgacacaaacattctgtcgccgggtgtctcccctcccattatttggggagaggctcgagcttatacaattttcgagagatataacagcccagaggggggtttaacccccgggtgctgacttttactgag

SEQ ID NO: 5425 - DNA, 4025 bp, Homo sapiens
  misc_feature (938)..(945): n is a, c, g, or t
catagatgcctactagcttcttttttttgtttttttttttttttttttttttgatggtccagttgtttatttagaaacctgattgttcaagaacatggtgggtgcttcacacctttttcactgggattgtgctggaggtgataggcagcattctaccatttcctcagcaacagaggtgaaggctcctcaactcagaagcacaaattgtaggggacagggtgggcagggaaagggagaaggaaatcccaaggcaattcaatagaagagggtaaaacgactccaaacatcactaagggcaggtgggggcctgcttgctcagtgcctgctaagtgtcctgccctccttgctctctctacccacctccactcaaaagatcctactgaatctccaggtaggcagcagggaatatcctatcattaggggacaataacaggaaaagccacagaggagaggaagaggattgagtgagagttcaggagagcaaatatcacaggcccggtgaggtctcaaggtggctgccagcaggggcagcagcattcacccagggcccccacacccacagagttgcccgagaggtccacagctcagctccactctgctgtttggccctcaggggttccagggtggggaggtggggaggaggcaagccagtccaggaagagtctggattccgtgaagggtcaagtgtagtgttggtctcagaagtcaaattcgtccaggtcccctgtgccctccccacctggagagccccacacccggcggtaattgctctccagctctttctgccgctggcgttccttctgggcctcttcagctcccggcaccaagatattgaagaagatctccttgaggtttctcgtgtcctcatcagtcagccaacgtgcaccctcttcagtcccttcagcccatgggcggacaattttgacttcttttcccgnnnnnnnngttggggtgatgggggaggctttttggggacaaccctctttttcttgtgcttcttcaccagctctggactctgtttttcctccagtcttttgatgagtttgttgagagtggatgtgagagccagcattgcccgatcccgctctgactccttcttcagcccatctgggtccagctctttctctgtctccgaacggagccggtctcggtctgacggaagcaggatcccttccagttccttctcaaattctcccagtaactgccgttcatcctcatcttcatcctcatcctcatcctcatcctcctcttcttccatctctctctgccgttctggatcacccctttccttctctggttccctctgagggacttctgcagcatcatccacaggctgctcttggcctatatttggcttccccttttttgttccacctttcagctcctctatgaatcgaatcaaatccgcagggcttcgaatgactttgacctgcacgttgttctgaaaatcattgggagcaccagaagctgaatctgctgcctcagggcttgggtcctgctcctcagccggcacctcctcccctcctggggcctggtcctctggctcattaagcatcttccagaaatctgagtccttactgtcatccttggtcgggctcgcacctgccatcttttggggtgccaccccagacttggtctcactccacacttgggggcctagatcttgcagctcctctatgattttatctccatactgctttgagtcggcttgcctctgaacgtaggccatgtactcctcaggctgtagggaagggtgacagaggatggcctgcggtgcagcactgggtgggggccggaggagagggtgggggcagagccgaggagtgcgaatggtcagcacataagagcaggacaagggctcgtccacgcgatcgatgtagtccccagagatacctgcaccctcgtcacagaggaaccgaacctcggcctcccggggcctcccattaaggtcgcacttggacccattgccataggtctggctgtggtagcgtttaagacgatgctgcttggaggccttggctgtttcatcatcccagtcgaaggctgattggtagtagccgagatagaggacttcacctttgagaagaagcagagcagatgatcggagcagcatttgtttctccccaaatctagaaattttagttcatatgtacactagccagtggttgtggacaaccatttacttggtgtaaagaacttaatttcagtataaactgactctgggcagcattggtgatgctgtatcctgagttgtagcctctgtaattgtgaatattaactgagatagtgaaacatggtgtccggttttctattgcatttttcaagtggaaaagttaactaaatggttgacacacaaaaattggtggagaaattgtgcatatgccaattttttgttaaaaccttttgttttgaactatactgctttgagatctcatttcagaagaacggcatgaacagtcttcagccacagttgtgatggttgttaaatgctcacaattgtgcattcttagggtttttccatccctggggtttgcaagttgttcacttaaaacattcttaaaatggttggcttcttgtctgcaagccagctgatatggtagcaaccaaagattccagtgtttgagcatatgaaagactctgcctgcttaattgtgctagaaataacagcatctaaagtgaagacttaagaaaaacttagtgactactagattatccttaggactctgcattaactctataatgttcttggtattaaaaaaaaagcatatttgtcacagaaatttagttaacatcttacaactgaacatgtatgtatgttgcttagataaatgtaatcactgtaaacatctatatgatctgggattttgtttttattttgaaatgggagcttttttgtttacaagttcattaaaaactaaaaactgtttctgtaaaaaaaaaaaaaaaaaactcgagttttttttttttttttttttttaaacagctacaaaatccatgagcagtccaaccaatactgaacagttctgtttctgcaggtcatctggggtcttaatcatcttctccttcatcatctgtttctctcttcctcttttcacctttcccaccttcttcctcctcttcatcctcatcctcatcttcatcttcttcatcaagtccaaattcttcttcctcctcactgacttcatcgtcgtcctcatccccttctacatcttcatcttcatcatcttcttcatcaaactcctcttcttcaccatcctcatcgtcctcgtcttcctcatcttctccttcttcgtcctcctcctcttcatccacaccatccacctcggcatctgagtcaggtgcttcctggtcctctcggtcatagccatccaagtaggtaagctggggcaggagcttgaagacactctctcggtagtcattcaggttggtaacctcacagttaaagaggtccaggcttttcagacattctaactttttcaaaggttccaaggtgctgatatctttcagtttatttccacttaagtttagatgtgtgagatttggaagtttttcagctaacatgtccagacctccaaagattctattttcactgagttcaagctttttcaatttaggcagcttggggagattttatctgatgatcaagcctacagtttattaaactgaggaactctaagttcacaaattcagctgttaagccctcaatttttccatcatttgatttgcaattgtccaagacaagttctcgaacagctgccggggtccggttcctcagctccaggtggatcctcctcttcatgtccatgttcccctcttcccccctcttcaaacttaactttccgcggcgggggcggaggggggagaggcgtcccggcttgcgcagcgagggccgtcggaagggtttgctagcggcggaggccggcggcgcggtcctgggtggcgggcggcgtgcgggcaggcgagcggagcccccggagccaagttactcacgggagcggagagaaacccctcgtgccacatatcct

SEQ ID NO: 5426 - DNA, 4202 bp, Homo sapiens
  misc_feature (1081)..(1101): n is a, c, g, or t
gaattcgcggccgcctcttgcggtcccagagtggagtggaaggtctggagctttgggaggagacggggaggacagactggaggcgtgttcctccggagttttctttttcgtgcgagccctcgcgcgcgcgtacagtcatcccgctggtctgacgattgtggagaggcggtggagaggcttcatccatcccacccggtcgtcgccggggattggggtcccagcgacacctccccgggagaagcagtgcccaggaagttttctgaagccggggaagctgtgcagccgaagccgccgccgcgccggagcccgggacaccggccaccctccgcgccacccaccctcgctttctccggcttcctctggcccaggcgccgcgcggacccggcagctgtctgcgcacgccgagctccacggtgaaaaaaaaagtgaaggtgtaaaagcagcacaagtgcaataagagatatttcctcaaatttgcctcaagatggaaaccctttgcctcagggcatccttttggctggcactggttggatgtgtaatcagtgataatcctgagagatacagcacaaatctaagcaatcatgtggatgatttcaccacttttcgtggcacagagctcagcttcctggttaccactcatcaacccactaatttggtcctacccagcaatggctcaatgcacaactattgcccacagcagactaaaattacttcagctttcaaatacattaacactgtgatatcttgtactattttcatcgtgggaatggtggggaatgcaactctgctcaggatcatttaccagaacaaatgtatgaggaatggccccaacgcgctgatagccagtcttgcccttggagaccttatctatgtggtcattgatctccctatcaatgtatttaagctgctggctgggcgctggccttttgatcacaatgactttggcgtatttctttgcaagctgttcccctttttgcagaagtcctcggtggggatcaccgtcctcaacctctgcgctcttagtgttgacaggtacagagcagttgcctcctggagtcgtgttcagggaattgggattccnnnnnnnnnnnnnnnnnnnnntgtctccatctggatcctgtcctttatcctggccattcctgaagcgattggcttcgtcatggtaccctttgaatataggggtgaacagcataaaacctgtatgctcaatgccacatcaaaattcatggagttctaccaagatgtaaaggactggtggctcttcgggttctatttctgtatgcccttggtgtgcactgcgatcttctacaccctcatgacttgtgagatgttgaacagaaggaatggcagcttgagaattgccctcagtgaacatcttaagcagcgtcgagaagtggcaaaaacagttttctgcttggttgtaatttttgctctttgctggttccctcttcatttaagccgtatattgaagaaaactgtgtataacgaaatggacaagaaccgatgtgaattacttagtttcttactgctcatggattacatcggtattaacttggcaaccatgaattcatgtataaaccccatagctctgtattttgtgagcaagaaatttaaaaattgtttccagtcatgcctctgctgctgctgttaccagtccaaaagtctgatgacctcggtccccatgaacggaacaagcatccagtggaagaaccacgatcaaaacaaccacaacacagaccggagcagccataaggacagcatgaactgaccacccttagaagcactcctcggtactcccataatcctctcggagaaaaaaatcacaaggcaactgtgactccgggaatctcttctctgatccttcttccttaattcactcccacacccaagaagaaatgctttccaaaaccgcaaggtagactggtttatccacccacaacatctacgaatcgtacttctttaattgatctaatttacatattctgcgtgttgtattcagcactaaaaaatggtgggagctgggggagaatgaagactgttaaatgaaaccagaaggatatttactacttttgcatgaaaatagagctttcaagtacatggctagcttttatggcagttctggtgaatgttcaatgggaactggtcaccatgaaactttagagattaacgacaagattttctactttttttaagtgattttttgtccttcagccaaacacaatatgggctcaggtcacttttatttgaaatgtcatttggtgccagtattttttaactgcataatagcctaacatgattatttgaacttatttacacatagtttgaaaaaaaaaagacaaaaatagtattcaggtgagcaattagattagtattttccacgtcactatttatttttttaaaacacaaattctaaagctacaacaaatactacaggcccttaaagcacagtctgatgacacatttggcagtttaatagatgttactcaaagaattttttaagaactgtattttattttttaaatggtgttttattacaagggaccttgaacatgttttgtatgttaaattcaaaagtaatgcttcaatcagatagttctttttcacaagttcaatactgtttttcatgtaaattttgtatgaaaaatcaatgtcaagtaccaaaatgttaatgtatgtgtcatttaactctgcctgagactttcagtgcactgtatatagaagtctaaaacacacctaagagaaaaagatcgaatttttcagatgattcggaaattttcattcaggtatttgtaatagtgacatatatatgtatatacatatcacctcctattctcttaatttttgttaaaatgttaactggcagtaagtcttttttgatcattcccttttccatataggaaacataattttgaagtggccagatgagtttatcatgtcagtgaaaaataattacccacaaatgccaccagtaacttaacgattcttcacttcttggggttttcagtatgaacctaactccccaccccaacatctccctcccacattgtcaccatttcaaagggcccacagtgacttttgctgggcattttcccagatgtttacagactgtgagtacagcagaaaatcttttactagtgtgtgtgtgtatatatataaacaattgtaaatttcttttagcccatttttctagactgtctctgtggaatatatttgtgtgtgtgatatatgcatgtgtgtgatggtatgtatggatttaatctaatctaataattgtgccccgcagttgtgccaaagtgcatagtctgagctaaaatctaggtgattgttcatcatgacaacctgcctcagtccattttaacctgtagcaaccttctgcattcataaatcttgtaatcatgttaccattacaaatgggatataagaggcagcgtgaaagcagatgagctgtggactagcaatatagggttttgtttggttggttggtttgataaagcagtatttggggtcatattgtttcctgtgctggagcaaaagtcattacactttgaagtattatattgttcttatcctcaattcaatgtggtgatgaaattgccaggttgtctgatatttctttcagacttcgccagacagattgctgataataaattaggtaagataatttgttgggccatattttaggacaggtaaaataacatcaggttccagttgcttgaattgcaaggctaagaagtactgcccttttgtgtgttagcagtcaaatctattattccactggcgcatcatatgcagtgatatatgcctataatataagccataggttcacaccattttgtttagacaattgtctttttttcaagatgctttgtttctttcatatgaaaaaaatgcattttataaattcagaaagtcatagatttctgaaggcgtcaacgtgcattttatttatggactggtaagtaactgtggtttactagcaggaatatttccaatttctacctttactacatcttttcaacaagtaactttgtagaaatgagccagaagccaaggccctgagttggcagtggcccataagtgtaaaataaaagtttacagaaaccttaaaaaaaaaaaaaaaaaaaaacaccaaaaaccccaaaaattttgggggccctcgcccaaaaagatttttaaaccactttgtggggggggggggcccc

SEQ ID NO: 5427 - DNA, 7449 bp, Homo sapiens
ttttggctaaggcaacggaatagatgaagtcattaatggaaaccaggaacactgaagaaacagtgaacaattaaagtactttgagttatcaaagtgagatgtcctgcaggtagctagacgatactggctggtaattcaggagagctgcttagtccaagggcgagctgcgtggagtcgttggactgggcagaactttggcgggcaaggagacaaacagccacactgtgctgccggggaagagaagaagaaggaaaggccagacacacaggcgtcgtgcagctgcggaaggattccgtttcctgcagggggcggagggatttgacagcacggtaacttccggaaaagtcctgaacctcagtggaaaagccttgcaagaaacaataacaaacgggaggaggaagcgattctggggtttctgtgttgaacggttcttgtccgcgaagatgcgcttcggcctctgtcaggggacttgaacgggcttagtgggcttcagccagcttttctccaccggttccccacggggaccccccccccccggccgttgcaatggcgggcgtggggccggggggctacgcggcggagttcgtgccaccgccagagtgccccgtctttgagccgagttgggaggagttcacagatccgctcagctttatcggccgcatccggcctttggcggagaaaaccggcatctgcaaaattcggccgcccaaggactggcagcctccatttgcctgtgaagtaaaaagctttcgtttcactccaagagtccagcgcctgaatgaacttgaggcaatgaccagagtgagattggatttcttggatcaactagcaaaattttgggaacttcaaggatctactctgaagatccctgtggtagagagaaaaatcctggatctgtatgctttgagcaagattgttgccagcaaaggaggttttgaaatggtcaccaaagagaagaaatggtctaaagtgggtagtcgcttgggatatctgccaggaaaaggaactgggtctcttttgaagtcacattatgaaagaattctctacccatatgagcttttccagtctggtgtgagccttatgggtgtgcagatgcctaatttagatcttaaagaaaaagtggagcctgaggttctcagcactgatacccaaacttccccagagccaggcacaaggatgaacattctgccgaagagaacaagacgtgtgaagactcagtcagaatctggagatgtgagtagaaacacggaactgaagaaacttcagatttttggggctgggcccaaggttgtgggcttggcaatgggaacaaaagataaagaagatgaggtcacccgaagacgaaaagttaccaacaggtcagacgcatttaacatgcaaatgagacaacggaaaggcactctctctgttaactttgttgatctctatgtttgtatgttttgtggtcggggaaacaatgaagataaattgcttttgtgtgatggatgtgatgacagctatcatacattttgtctaattcctccactacctgatgtgcccaaaggagactggaggtgtcctaaatgtgtcgccgaggaatgtagcaaacctcgagaagcctttggatttgaacaagctgtacgagagtatacacttcagagctttggagagatggcagataattttaagtctgattattttaatatgccagtccatatggttcccacagaactagtagaaaaggaattttggcggctggtaagcagcattgaagaagatgttattgtggaatatggagcagatatctcctcaaaagactttggaagtggatttccggtgaaggatgggcggagaaagattctgccagaagaagaggaatatgcactttctggttggaatttgaataacatgcctgtcctggaacagtctgttcttgcacatattaatgtggacatctctggtatgaaagtgccgtggctctatgtgggaatgtgcttctcttctttttgctggcacattgaggatcactggagttattccatcaactacttgcactggggggagccaaagacatggtatggtgtgccatctcatgctgcagagcaactggaggaggtgatgagagagctggcccccgagttatttgaatcccagcctgatcttctgcatcagttagttaccatcatgaaccccaacgtgctaatggagcatggtgtgcctgtgtacaggaccaatcagtgtgctggcgagtttgttgtgacatttcctcgtgcctatcactctggatttaaccagggctacaactttgctgaagctgtgaacttctgtactgctgactggttgcccattggacgtcaatgtgtaaatcattaccgacgcctaaggcgccactgtgtcttttcacacgaggaactaattttcaagatggcagcagatccagaatgcttagatgtggggctggctgccatggtctgcaaagaattgactctcatgactgaagaagaaacacgattaagagagtctgttgtacagatgggtgtcctgatgtcagaagaagaagtgtttgaacttgttcctgatgatgagcggcagtgttcagcatgcagaaccacatgttttctctctgctctcacatgttcctgtaatcctgagcggcttgtatgtctctaccatccaactgatctgtgcccctgccccatgcagaagaaatgtcttagatatcgctacccattagaagacctcccttctctgctatatggtgtaaaagtcagggcacagtcctatgacacttgggtcagtcgtgttacagaagcattgtctgctaacttcaaccacaaaaaagatttgattgaattgcgagtaatgctggaagatgctgaggataggaaatacccagagaatgatctctttcgaaaactcagggatgctgtaaaagaagctgagacctgtgcttctgtggctcagctgcttctgagcaaaaagcagaaacacagacagagcccagatagtgggaggactcggaccaaactgacagtggaagaattgaaggcctttgtccaacaactttttagtcttccgtgtgtcatcagccaagctcggcaagtaaagaatctgctagatgatgtggaagagtttcatgaacgtgctcaggaggccatgatggatgaaaccccagattcttccaaactccagatgttgatagatatgggctctagtctctatgtggaactccctgaattaccacgactgaagcaagagctacaacaggctcggtggttggacgaagtaagactgaccttatcagatccgcaacaagtcactttggatgtcatgaagaagctgatagactctggggtagggttggcaccccaccatgctgtggagaaagcaatggctgaactacaggagctccttacagtctctgaacgatgggaagaaaaggctaaggtctgcctacaggcaagaccgaggcacagtgtggcaagtttagaaagcattgtgaatgaagccaagaacattccagcctttctacccaatgtgttgtccttgaaagaagccttacaaaaggctcgagaatggaccgctaaagtggaagctattcagagtggcagcaattacgcttatttggagcagcttgagagcttgtctgcgaaaggacgccctattcctgtgcgtcttgaagcactgccgcaagtggaatcacaggtagcagcagcacgggcatggagagaacggactgggcggacgtttcttaagaagaattctagccatacattgttacaggtgctgagcccccggaccgacattggtgtatatgggagtggcaaaaataggaggaaaaaagtaaaagaactaatagaaaaagaaaaagaaaaggatctggacctggagcctctgagtgatctggaggaaggattggaggaaaccagagatacagccatggtggtggcagttttcaaagaacgggagcaaaaagagattgaagccatgcattctctcagagcagccaacctagccaagatgacaatggtggaccgcatagaagaagtaaaattttgcatttgccgcaagacagccagtgggtttatgctacagtgtgagctctgcaaagactggttccataacagctgtgttcctcttcctaaatcaagttcccaaaaaaaaggatccagctggcaagctaaagaagtaaaattcctttgccctctttgtatgcggtctcgaaggcccaggctagagactattctgtcactcctggtatcccttcagaagttgcccgtacggttgcctgaaggagaggccctgcagtgtttgacagaacgtgctatgagttggcaagatagagcgcggcaggctctagccacagatgaactatcctctgccctggccaaactatctgtgttgagccagcgtatggtggaacaggcggctcgagaaaaaactgaaaagatcatcagtgcagaactccaaaaagcagctgccaatccagacttacagggacacttacctagtttccagcagtctgcttttaaccgggtggtgagcagtgtgtcatcttctcctcgacaaacaatggactatgatgatgaagaaacagactctgatgaagacattcgagagacatatggctacgacatgaaggacacagccagtgtgaagtcctctagtagtcttgaacccaatcttttttgtgatgaagagattcccatcaaatccgaggaggtggtgacccacatgtggacagcaccttcattttgtgcagagcatgcttattcttctgcttctaagagttgttctcaagtattttttgggaaaggttctagcaccccaaggaaacaacctcggaagagccctttggtgccccgaagtttggaacctccagtgctggagttgtcacctggagctaaggcacaactggaagaacttatgatggttggagatctcctggaagtatctctggacgagactcaacacatatggcggattttgcaggccacacacccaccctctgaagacagattcttgcatatcatggaggatgacagcatggaagagaaaccactaaaagtgaaaggaaaggactcttcagagaagaaacggaaacggaagctagaaaaggtagagcaactttttggagaaggaaaacagaagtccaaggagttaaagaaaatggacaaacctagaaagaagaaattaaaattaggtgcagacaaatcaaagaagctgaataaactggccaagaaactagcaaaagaagaagagagaaagaaaaagaaggagaaggctgctgcagccaaagttgaacttgtgaaagagagcactgaaaagaaaagagagaaaaaggtgctggacatcccctcaaagtatgactggtcaggagcagaggagtctgatgatgagaatgctgtgtgcgcagaaccagactgccaaaggccctgcaaggacaagggagttgtatttgtaacgaagaagagagagataaaaaatattagttttaaaagtgtcctatgtgactgcttttctaaaaaggtagactgggtacaatgtgatggtggctgtgatgagtggtttcatcgggtttgtgtgggtgtatctccagaaatggctgaaaatgaagattacatctgtataaactgtgcaaagaagcaggggccagttagcccaggtccagcaccacctccttccttcataatgagctacaaactaccaatggaggatcttaaagagaccagttagcagatgcttggttagtttgggacatggggggacatggaccacattgagaccttagtcatcaagtagagtggtttatatcacttggaatgttgcttctaaagatgaatggccttcagagaaagtccccttagtgctggcttcctctttgcatggactctgtgggttacattgctctatcaacatatctatgcagagggtgtcttctttggtacaacagccaatatctcatgtctcctttgagtgtggtttactgcattaaggccagatgcttaattgagctctagggtggctggttagtattaatacattggtgtgctaacagggcatataggatgtggcttttgtccagctgatagtagttagaggcttacaacttaggagcagcaccaactgaaggtgctaattgcttggatctccttcattaggatagttggagagggattggagtaccactttcttccactgttaccaggtacttaatgccctaaagatacaactaggagtaacagggccaaagttatttctgttagacgtcaaggaatggtatcacagtctattgacctcagcgatttgtgcttgtttgtgctagaagaacatcccaaataggagaacctctcacaagctggggcaggtcaccttatctttgtaagatgaggatatcatctagatcagaaatctgactagattggattctgaggagaagaacctactacaaggcaaggagccgttttttggctttgaaaagtcttgctgtcttgggtctacattttagggaagagcaggtacatggatccaggcttctgccaaaaaaaaaaagagaagaagatgacgagtatgaccagtcgtactatcttactgagccacagtgatgcatgcttttcggggaaaacttcattcacaagtattccagacaccaggcttcaggcatggccatgagcaagaccagcaaataacagctttttgccttgcagccctgaccccaatgtctgctgtttccaacactggtgatttctaactacggcccacagcagatgctgttgaataacaccatggcttcatcagaggatgtggggttgtagtacctctgggtgatgaagttgttttagcaaatccatttttaaaaaaaaaaaaaaaacttgtttttacttttttctaaatgtctctgactactgactgttctatacatagattatttttccttttttaatatacatatatgaatatataaatatatatatttactgttaccagcagcatatgacagagtttcaacatcaaaaatccatttgggggcttgctttttcttttttgctttaaaaaaaaaaatcccattccttctttgtagtacaaggagttagcactccctcctccatcccagcctgaccagatcttccattttgcttttgttcatatagataattatatgtcctttgtgtgttgggacttgtccctgtctgttgggaaacttggtctcactctagtctgtgctggctcttttttcttttgtgtgtgaatgtttgaaactatggtgctgtgtcctcttccctcctgttgtgttctctgttcttcttaaggtattaggtaagctgtatgtaaactcttattagaaggggactaatttttttttaaaggacaaaaaaaaaatgactaaaaatagtgttttgtcatcactgtctggtgtctttattttggtttaaaaaaatctgtggtttgacttaaattcatcagttttcc

SEQ ID NO: 5428 - DNA, 1975 bp, Homo sapiens
gtccgcggaaatttgaaatggctgacgggtcgctgacgggcggcggtctggaggcagcggccatggcgccggagcgcacgggctgggcggtggagcaggagctggcgtctctggagaaagtttttcagaagaagtgaagtcaagatgaagaaccatttgcttttctggggagtcctggcggtttttattaaggctgttcatgtgaaagcccaagaagatgaaaggattgttcttgttgacaacaaatgtaagtgtgcccggattacttccaggatcatccgttcttccgaagatcctaatgaggacattgtggagagaaacatccgaattattgttcctctgaacaacagggagaatatctctgatcccacctcaccattgagaaccagatttgtgtaccatttgtctgacctctgtaaaaaatgtgatcctacagaagtggagctggataatcagatagttactgctacccagagcaatatctgtgatgaagacagtgctacagagacctgctacacttatgacagaaacaagtgctacacagctgtggtcccactcgtatatggtggtgagaccaaaatggtggaaacagccttaaccccagatgcctgctatcctgactaatttaagtcattgctgactgcatagctctttttcttgagaggctctccattttgattcagaaagttagcatatttattaccaatgaatttgaaaccagggcttttttttttttttgggtgatgtaaaaccaactccctgccaccaaaataattaaaatagtcacattgttatctttattaggtaatcacttcttaattatatgttcatactctaagtatcaaaatcttccaattatcatgctcacctgaaagaggtatgctctcttaggaatacagtttctagcattaaacaaataaacaaggggagaaaataaaactcaaggagtgaaaatcaggaggtgtaataaaatgttcctcgcattcccccccgctttttttttttttttgactttgccttggagagccagagcttccgcattttctttactattctttttaaaaaaagtttcactgtgtagagaacatatatgcataaacataggtcaattatatgtctccattagaaaaataataattggaaaacatgttctagaactagttacaaaaataatttaaggtgaaatctctaatatttataaaagtagcaaaataaatgcataattaaaatatatttggacataacagacttggaagcagatgatacagacttctttttttcataatcaggttagtgtaagaaattgccatttgaaacaatccattttgtaactgaaccttatgaaatatatgtatttcatggtacgtattctctagcacagtctgagcaattaaatagattcataagcaaaaaaaaaaaaaaaaaaaaaaaaaaaaaaaaaaaaaccaaaagataaatttatttaagtaagttaaattgttgttggtgaatggtttgtaagtatgatgtaatgaagcattaatcacagaactaatacatgtacatatttgaggtggctttgccattttatacccataattaaataaaagggcaaaatcccccctgataaataccatgtttatcatggcacataaaactttatggcagaaagccaaggccaattgacatatatatttaaaggtaccatggaaagtaaatgctaactctgaatttaaaacagtgggaagatgattagtaagagttggtttcttgaaaaggaattgttctggtaatagtcatctttaatgacttccacggattattcagtgtttctttagggatatgcataggacactggtgcttcagtagaaaccccagttttggtgtattaaagatacatccattcttgactgatctttaatctagagtgtggttttagccaagtctttgaatctcatttagtcagtaaacatttattaaatattaaccaaatgca

SEQ ID NO: 5429 - DNA, 791 bp, Homo sapiens
atattgtcggtggaaacattggaatttcagataaaatcaaatcctattgagaaacaacatcattcccagtgatataaatatggtgtccagtggcaatgatttgcttcgtttttcaacttaacagaatattttttagcgaaaatgtaaaggtggactgaaggtaggaataatttttaacactaaaaaatattatttaaaggaaagtataaaagacaaaccgatggtaatagttataaatttacacacttaaacctaagaatctatgcttatcataaactggctctttgtttgattataaaataaagtagcaattatataaaaggatcatagaatgtaaagtagcagaacacagtacaggtttcatatcaatgaaatatatggagacataattatgctgtaaagacataataaacctgatccctctactcactagctgtgggtgtatagtgacgctgtccaggcattctgattctcaacttcctatctgagaaggtgcaatgataagattctaccttccttacaatacaggtttatgttgagaagaaaaagatacgctgtcatccggtatctcatccatcagaagacgtttgtgggtctctctaggactcgtttacaaacactccaattctcctctcctgtaaggcacatagtaggaatgtactttctcaccccttttgaatgagaagtacccatgtgacatgtgttaacagtgaactgctgttcatcagtgtccctttccctgtcacatgagtcaatacggtgcctccctgagtctgggctccaacgtaatc

SEQ ID NO: 5430 - DNA, 760 bp, Homo sapiens
ggggaggcttctgagaagactggtgggagagaaggagagcctgcagacagaggcctccagcttggtctgtctccccacctctaccagcatctgctgagctatgagccaaaccagggatttacagggaggaaaagctttcggactgctgaaggcccagcaggaagagaggctggatgagatcaacaagcaattcctagacgatcccaaatatagcagtgatgaggatctgccctccaaactggaaggcttcaaagagaaatacatggagtttgaccttaatggaaatggcgatattgatatcatgtccctgaaacgaatgctggagaaacttggagtccccaagactcacctagagctaaagaaattaattggagaggtgtccagtggctccggggagacgttcagctaccctgactttctcaggatgatgctgggcaagagatctgccatcctaaaaatgatcctgatgtatgaggaaaaagcgagagaaaaggaaaagccaacaggccccccagccaagaaagctatctctgagttgccctgatttgaagggaaaagggatgatgggattgaaggggcttctaatgacccagatatggaaacagaagacaaaattgtaagccagagtcaacaaattaaataaattaccccctcctccaaaaaaaaaaaaaaaaaaaaaaaaaaaaacgctcataataaattcgccttacatttgcggcaattggaattatgttagggaaaaaaaaaaaaaaaaagaaaa

SEQ ID NO: 5431 - DNA, 1156 bp, Homo sapiens
ggaaggaaaaagagcaacagatccaggagcattcacctgccctgtctccaaacagccttgtgcctcacctacccccaacctcccagagggagcagctatttaaggggagcaggagtgcagaacaaacaagacggcctggggatacaactctggagtcctctgagagagccaccaaggaggagcaggggagcgacggccggggcagaagttgagaccacccagcagaggagctaggccagtccatctgcatttgtcacccaagaactcttaccatgaagaccctcctactgttggcagtgatcatgatctttggcctactgcaggcccatgggaatttggtgaatttccacagaatgatcaagttgacgacaggaaaggaagccgcactcagttatggcttctacggctgccactgtggcgtgggtggcagaggatcccccaaggatgcaacggatcgctgctgtgtcactcatgactgttgctacaaacgtctggagaaacgtggatgtggcaccaaatttctgagctacaagtttagcaactcggggagcagaatcacctgtgcaaaacaggactcctgcagaagtcaactgtgtgagtgtgataaggctgctgccacctgttttgctagaaacaagacgacctacaataaaaagtaccagtactattccaataaacactgcagagggagcacccctcgttgctgagtcccctcttccctggaaaccttccacccagtgctgaatttccctctctcataccctccctccctaccctaaccaagttccttggccatgcagaaagcatccctcacccatcctagaggccaggcaggagcccttctatacccacccagaatgagacatccagcagatttccagccttctactgctctcctccacctcaactccgtgcttaaccaaagaagctgtactccggggggtctcttctgaataaagcaattagcaaatcaaaaaaaaaaaaaaaaaaaaaaaaaaaaaaaattttggaaaaaaaaaaaaaaaaaaaaaaaaacgcggccggcgaatttagtagatggtgtaattcgacccgagaaattccggaaccggaactctgaggggtgacaagtttccccaagagcggcggattaaggcttgggcggacaaagggcgag

SEQ ID NO: 5432 - DNA, 2639 bp, Homo sapiens
gccgctcttcggcccagtgactgccctccctggctgctcccctcccggcctgcctttctcctccagctgttcttcctcctccagcactccccatcctcagcctatccccacccgcagcgtctcccctccccagctgttttacctctggtggctgcttcaccctcccccggtcctctccacttccagctgctccctccaaagtttgtcctagtttcccccttcccagctctccccattcgcagcctcttccatcttcaactcttcttccctgctagcctcttccctcctccgatggtctctccttggcttctctccaccccgcttgcttcttctctagtctttccctggccctggcattagtctccttaccctgtgccctgtcccaatgtgtgcccgggctttgctccttgcgtgcagttcgaggggaagacatcgtttggaatgtcagtgttcaacctcagcaacgccatcatgggcagcggcatcctggggctggcctatgccatggcccacacgggggtcatcttcttcctggccctgctgctgtgcattgcgcttctgtcgtcctactccatccacctcctgctgacctgtgctggtattgcaggcatccgagcctatgagcagctgggacagagggcattcgggcctgcggggaaggtagtggtggccacagtcatctgtctgcacaatgttggggccatgtccagttacctgttcatcatcaaatctgagctccccctggttatcggcaccttcctgtacatggacccccgagggggactggttcttgaagggaaacctcctcatcatcatcgtcagtgtgttaatcatcctgcccctcgccctcatgaaacacttgggctacctggggtacaccagtggtctctctctgacctgcatgctgtttttccttgtttcggtcatctacaagaagttccaacttggctgtgctataggccacaatgaaacagcaatggagagtgaagctctcgtgggactccccagccaaggactcaacagcagctgtgaggcccagatgttcacagttgactcacagatgtcctacacagtgcccattatggcttttgcttttgtctgccaccctgaggtgctgcccatctatacggagctctgccggccctccaagcgcaggatgcaggccgtggccaacgtgtccattggggccatgttctgcatgtatgggctcacagcaacctttggatacctcaccttctacagcagtgtgaaggcggagatgctgcacatgtacagccagaaggacccgctcatcctctgtgtgcgcctggccgtgctgctcgcggtgaccctcactgtgccagtcgtgctgttccctatccgccgggccctgcagcagctgcttttcccaggcaaggccttcagctggccacgacatgtggccatagctctgatcctgcttgttttggtcaatgtccttgtcatctgtgtgccaaccatccgggatatctttggagttatcgggtccacctcagcccccagcctcatcttcatcctccccagcatcttctacctccgcattgtaccctctgaggtggagcctttcttatcctggcccaagatccaggccctgtgctttggagtcctgggagtcctcttcatggccgtcagtctaggctttatgtttgccaactgggccacaggcagagccgcatgtctggacactgatcaggccctgctggcccaggtccctgtgcgcatgcacatggaggggtcagggccgctccctagggtccctcctgcccaacatgtggaggtggctggttcccatgaacgtggttgtcagaggcgggggacagcagaggctgcagactggcccacttccctcctccccagggatgccaagcttggatcatggccctaatcccaaccccaaccccatgggaggaggaggaggaggaagaagaggaggaggaggaggaggaggaggaggaggaggaggaggccaggtcctggtggagcctttgcccagcccagtcctctctgcctcctcctggctgaagctgtttgtcaggattaccctcgggctaaagaggaaaaataaagatgttgagctaccactctgaaaaaaaaaaaaaaaaaaaaaaaaaacccggggacacaccaacttcggggggcgcacaaaaacggttacaaacagcgcccactcgcaacacaaggttccggaaccacctccctgtcaccacggggggaaaactgcgcgggaccccccaaaggaacaccacataatcgaaaacaccgggaaaccgggataagtaaccgcaacgaggcccacgacagtaacaccgcagacagacggggcataagacgacgacacaacacagacgagcagccacgatacagaaaacatcacgctgcacaacaagacacccaaaaccgggaacggagaagacaaaagaaacaacagatccaaacgaacggtgcaagaacgcaacacaaacgacatactcgcgcgaacaacgaaaaaataagcaacgaacaaaacgaacacaacacgcggaacaaatactgcacaaacaaaaaagacgacgagggatacagagaagacaatcacacagagccgtcgtcatctggcctccgatggactgcggccgactcag

SEQ ID NO: 5433 - DNA, 1358 bp, Homo sapiens
  misc_feature (179)..(247): n is a, c, g, or t
  misc_feature (1037)..(1042): n is a, c, g, or t
aggacaaaaaggggtcgacttatcctcctccccactaaactgctgcccacacacagagtcctgttgcttatggcaaaagaataacaacaacaccattgtatttgttagtcggttcactaatgggtgaaactagagaacatcattctctttcagtccccagctctgtccaaatgttcatnnnnnnnnnnnnnnnnnnnnnnnnnnnnnnnnnnnnnnnnnnnnnnnnnnnnnnnnnnnnnnnnnnnnnggttttcagctgcaactctctttttattcttaccatatgcagcaggagcctgagattcagggaacagatattccaggattttattcaaagcaatgtctttaagctcctgtgttgcaattgaattaagtttcaaaatagctatattcaggtcaccttaaaggttttatcaggagccctaaagaaccaggaaattcagagaaaagtttagaaatatttgccattaagtctcccttggtgcaatacgtactatgaatatactgatgatctagagacccctgcaatactcaactcttccagagacatgtggaatgaaaattttgttcttgactaaatgatattttctgttaccaacaacacagaatgtgggaagttactggaggaaatcaaatgtgcactttgctctccacattctcaaagcctgttccactcacctgagagagaagtcttggaaagagacctagtacttcctctgctctgcaaagactattgcaaagaattcttttacacttgccgaggccatattccagcttcatctttctacaaatcaaaaacttgaagaggaaggtaccccgagggatgtattttgctaaaagaagccaaatgctggaagaattgggagagagaaatgattccagagacatcttcatttgttccctattgcccaatgccatattccaggtttccttcaaacaactgcggatgagttttgcttttactatgcaagaaaagatggtgggttgtgctttccagattttccaagaaaacaagtcagaggaccagcatctaactnnnnnngacctattggagaatatgacaaagtggaagagatcagcagaaagcacaaacacaactgcttctgtattcaggaggttgtgagtgggctgcggcagcccgttggtgccctgcatagtggggatggctcgcaacgtctcttcattctggaaaaagaaggttatgtgaagatacttacccctgaaggagaaattttcaaggagccttatttggacattcacaaacttgttcaaagtggaataaaggttggctttttaaattttaaaaaaaaaaaaaatggcgtgtttgtcactcatagggaacaaccaactaccaataa

SEQ ID NO: 5434 - DNA, 4149 bp, Homo sapiens
ttttttttaaacccccttttttttcccccctttaaaaaatatttcttatattttttccccctcggggaggctttacaaattctcttgagaggggagagttggtcccaactttattgtccccccccccaccaaagtaatggttctccttttcacaaaagttcccccaggtttggcgaggttttccccctttcccgaggggttgttaaaagagggggggccaggggccctagctttataaatgcggactcccagttaggggggccccttttttcaaaataaaagggggttttcggttcaacttggggccccccgaggggtatttttttagggcggccgcccccctgtttggcattgatgatgtcccggaatttggggcttgagggaaggccccacctttcttttttttttttttttttttttatagggaacattttatttggaaagattttgagcatcattctcttttcattttttattaaggcagtaacattctttcttcctggaggcggaggggggaaatcatctgaggctacagtaagttcaatctgaagtcaaaaccaaccaatttgtattcagaagcagcaaaaatactggttatgggctgggaggagccacatgttggctttctgagtccactgccaaggaacagatccagagcaatgcatttcaattgctttgaaaaatggctaagttccattacataccaccactaaagaagatacctcattgatggagcttttcaccatgatagagggcgtcttgcattggttcacaatggcctgttgctttttagccttcagttggtttagggggaaattgctcaacctatgagacctgctcaaattcatactgttctggttttgctttggaattctttgtccagtaaattagctcttcataacgcagttccaccatttcttatccagcatagattcattctgcccttgacagctggctaggtgtgtgtgtatgtgagtaggggtgctattgattggcacatattgtcccccctggagtttaggggtggcagaaagcttttatagtaccaaaaaagtaaacattgataatatggcctgacaacaatcagatatgctaagctctagaagcaaaagcaaggtaggattgcctccaaatgttgacaggtattagccataccacagtaactagatctaatgtgagggctaatgcctggagaggcagaaccctaaggatgcttagttatagctccatgcctgccgagtggcttgattccgattccattacacctccttggatccaaccttccattaaggctgaaggctctagagggcagagtattcaagatgttagatctggtccaagcccaaattctagagttaaaagcagaggggttcttagtggctgaaaaaaaacaaaacctgatgacatttgggactccagttttgaggaaaggctctgatgatgaggcttacttctgcaggctaccagagactcctgagacttcaacagcttgactgatttatcacacactccaagtggcccagagacaaggaccgccagaagagatgggcccccccggaaggcatggttccaaaagtgtgaggagcaaagtcatgggaggcagggtaggaagaggggacagaaagaggggcttgcaacagatcaaatgctgacctccaggaacagggtttagggcaggtgtgatgtttcccctcctggccctcatcttgaacaaagaaaagggaagccacaacaagctggtttgaaagattatatcaaaattaataccactgcagcttctatccttggctaatggcaaaagcgagaagggtacctggaaaataacttctttcttttcctctagattttcgaagaagcaaataaatcaagaatagaaacctatatataggaggttgggcctcctgcaaagaatgaagcactttttgttaaatacaggagaggctacttggctgcactaatatgtgctttttggaatcttatagagtgtcaccaagttgaactttggaatggcttgaatcatccctggagcatctgtgccgggcagtcaggagtgagtgcaccgcctcccacccagccccattggcctcacaccctcttcattcctttcccatgaaggccaggcaaacacggtccttgacccattttggggttcacttcaaaccaggtcttctggcagggcatacactcttgctccaatttttcgggccatagagatggcatattttgcattgttgagtttctcatcatcattcagattttctgtcttcagaaggtcatagttaatggaacctggttggatggcatcgatgaggtccagaacaggcagacttgtactaatcttcgggtccttgaaactagagatggatgaacttttctctgcttccctcaatgtttcattcacccagttgacaataatgtcatcattgaccttctggccaccaccaatttcttcgaggatattcagtgtataccttctcattagctgccaaatcaaggccagtgtgagagtgcggtttccttcattgagatcttgtccaccgatgccaaccagggagaacttcgcttgattcttccccaattctaccgcgtagttacaattctcaagcttcttcatattgcctcccagtttggggtatggcggtttgtttactctgttccagtcaacaggaactttgatcttttcatagagctggaagatgaccagggcatctgataagtcactgtacaaatgattgactcgagggttaacacccagggagttcatccagttcctaaatgtccgctcttctctggtttcacctttccaagagccccccagtcaatgtcctggttctctggtttgtgcagggcagggtatctgttaaagaggttggcaataaaagccaagttcaacttggggttccctcggacaacatctgtggctgtgacaaactgccgggcagcccagcctctccgcctgctgcagcatgcattctgccctctggatgtcatccttctcccgcagtcctgacatgtcaataacaacagcaggaacaccttcttcatctccttttggagccacctgctcaagcaggtggtaataagcttttgagtccttgatgtcagtactgaagttgccaattttgttgcagcctgcattttccaggtggtaattagcccacctcagcaagagctcttcaggggagagtttcatcaaatcctccaggctctcaccttctctcaaaagagcaatcagagcttcatttctgctgagttcaatgtcagcaaacaacccaatcttgatgacttgccacagaagtcccaggaccagataaggcttcccctccttcaggtcctcagcccctatgttgaccacatggcacccgatggctgaggcagagttcagagccaagttcagattttcctgaatggtgaaaggggttagcttctttttgttgattgttctttcatcaattgtgtctggcactgacaggttgatcattttacaaaggacaatgccatctccaacagcattaaagagatcattcgtgtttgggttcattgggatgacatgccgactatcaggatcattttccagggctttgtttatccagttgacaaaggcatacttttcttcctctgaataggagtgttgggtgccaacgctagactgctctgaagtaccaccgattgcacaaatcccttccttcttattgattgcttttctaaaggtcttggcaacatctgtgctttttaggccatggaaaatcttgataaactcatcaaagctgatccttccatcttggtccagatcacctgtagccatcaggttttctgtaatttctcgtactctatacccaggcaaaggcaagcaagcagccttgaacaagtcattcaactcattgaagctgatgtatccattgccatcagtatcaactttggcaaaagcttctctgagctccatcatttcctcatcggacactgatcctctggccattttttattgctttaggtaacagatcttgcaggaaaaaagctgtccttggtagtactggtgtatgaccaggaaccccttctttctgatctgcagaacagctttgtcaagcctgggtgtgtggtcacaaggcaggaagtgactagaatgacaaatcatcagccaggaaagaaaaa

SEQ ID NO: 5435 - DNA, 1163 bp, Homo sapiens
  misc_feature (49)..(49): n is a, c, g, or t
  misc_feature (97)..(97): n is a, c, g, or t
  misc_feature (142)..(144): n is a, c, g, or t
  misc_feature (198)..(198): n is a, c, g, or t
  misc_feature (1098)..(1098): n is a, c, g, or t
gacatcaatgaaaagtagcatattgtcttatgaaatagcatgagaaaanacagggcatttctaggacagtaaaacgttaaagtactggattaagaanacaacaaacaggctgggcgcagtggctcacacctgtaatcccagnnnctttgggaggctgaggcgggtggatcacctgaggtcaggagtttgtgaccagcntggccaacatagtgaaatcctgtttctactaaaaatacaaaaattagctggatgcgatagcacgtgcctgtagtcccagctactcgggaggctgaggctggagagttgctcaaacccgggaggcggagattgcagtgagccaagatcgcaccgctgcactccagcctgggtgacagagcgaccctctgtctcaaaaaataataataataataaataaaacaacaacaaaatgcatcagagagccaaaacattcagtattgcattttcacataggtgatgaaatgactttggaactttatctgtgttatagttatgagttgctttgggagacttggagctctctgtagctattgttcataacactttgctccataaccctgatgtccgcagtatctaagtatctcagccttcatccattaactctactagggagcccacagccaccatttccactaggaggtatcaatatttgtggtatgacataaggctcccttgaaataacaagacttttgagcaatctgaattaaaaatacatcaaaaaagtaatagcgctcatttgctaaatgcaaaaaataatcacctttgataccaatgtgcaccaatatgcctaactagctagccagctggagataatttaccagggaatgtttcaaagccctaaccttgaagtttggaaacaggtggtcttctatgctgcagagaaactatgcattaggtctcttttcaattagaaacctttactatttccaatgtatgtttgttaaaaataataataataaaaccaaaagcctttgtggaaacccaaaaaaaatagtccatgtgatgggattgttttatcgttttcaccgggtgccctccccactgcaggggtgcgcactgttgttgcaggcttgctacccnacctgtgtttcttagcatttcaggaattaaaccacattcagaaccccaaaaaaaaaaaaaaaaaa

SEQ ID NO: 5436 - DNA, 5903 bp, Homo sapiens
  misc_feature (2880)..(2883): n is a, c, g, or t
gtgaggagggccggcggcggggcggacccctggcggtcctcctggctggggtccgcgcgctcgcggcagctccccgtggaggtcactgtccgtgccagtccctcccgctgtcccgccctctcccgctgccgccgccgccgccgccgcgcccgcctcagcgcccccactccgcgcttgggagcgaggagccgccagcgcccccgccccgccgccgccgcagcgccctcaggccgccattcgccaccgaaactttccagcgcccgcgctctctccgggactcggcggcggcggggcgggggcggcccgggggcggcgcgcggctgctccggggcgccgggccctcttcggccgccgcacggccgggactcggaggctgccggctggagggaggttcggagcgcggccgggcgcgcggcgccgccacaagttgcgctgctcgcgacgagatttccgtgagggtggaagaaaatcataccatatcagatgcctcgcagagcaccaggcccaccgtgaaaggctggtccctgcagacggcttcccatttttatgaccggatgctgggaagcctgctggtccacaggtccatacatgaagtcaccataaggagccctggcctccttgcagaaacatcgaggtgacatgtagcatgaccgagctcgctggcgcctcttcatcgtgctgccaccgccctgcaggaagaggggccatgcagtcagtcttgcaccactttcaacgtttgcgagggagagagggtggttcccacttcatcaacacctcatcgccgcgaggtgaggctaagatgagcataaccagtgacgaggtgaactttctggtgtatcggtatctccaggagtcaggtttttcccactcggctttcacgtttgggattgagagccacatcagccagtccaacatcaatgggacgctagtgccaccggccgccctcatctccattctccagaagggcctgcagtatgtagaggccgagatcagtatcaacgaggatggcacagtgttcgacggccgccccatagagtccctgtcactgatagacgccgtgatgcccgacgtggtgcagacgcggcagcaggcattccgagagaagctcgctcagcagcaagccagtgcggcggcggcggcggctgcggccacggcagcagcgacagcagccaccacgacctcagccggcgtttcccaccaaaatccatcgaagaacagagaggccacggtgaatggggaagagaacagagcacattcagtcaataatcacgcgaagccaatggaaatagatggagaggttgagattccatccagcaaagccacagtccttcggggccatgagtctgaggtgttcatttgtgcctggaatcctgtcagtgatttgctagcctccggatctggagactcaactgcaaggatatggaacctgaatgagaatagcaacgggggctccacccagctcgtgttgaggcactgtatacgagaggggggccatgacgtcccgagtaacaaagacgtcacctcactggactggaataccaatggaacactcttggctacgggttcatatgacggttttgcaagaatatggacggaagatggtaacctggccagcaccttaggccaacataaaggccccatctttgccttgaaatggaaccgaaaggggaattacattttgagtgctggtgtagacaaaacaacaataatttgggatgcccacacaggagaagccaaacagcagtttccttttcattcagcccctgcccttgatgtggactggcagaacaacacgacctttgcctcctgtagcacagacatgtgtatccatgtgtgcaggctcggctgtgaccgcccagtcaaaaccttccagggacacacaaacgaggtcaacgccatcaaatgggatccgtctggaatgttgctggcatcctgctcggatgacatgacattgaagatctggagcatgaaacaggaggtgtgcatccatgatcttcaggctcacaataaagagatctacaccatcaagtggagccccactgggcccgccaccagcaacccaaactccaacatcatgttggcaagtgcttcgtttgattctacggtgcgactgtgggacatagaacgaggcgtctgcacccacacgctcacgaagcatcaggagcctgtctatagcgtagctttcagccctgatgggaagtacttggccagtggatccttcgacaagtgcgtccatatctggaatactcagagtggaaatcttgtccacagctaccgaggcactggcggcatcttcgaggtgtgctggaacgcccgaggagacaaagtgggtgccagcgcgtccgacggctctgtgtgtgttttggatctgcggaagtaaccacaaaatattatcgaaaaaagaaaagaattctaatgaccagccgtgaatgtgtagggttgcagctctattctccaaaactgtaggaacttgacttgcgttagagtgtactctgaaaccaactcgtctctggccgcaggagtctatatgttttcgtaatcttcatcaagaagtttttaaaaggcaagcaaaaacagaagcaaatcatatcaaacggggatagaatggtttccactgaggacattcagcctgggaaggaggaagtcaccagctcgaggcgtgtggattggtttccacccggaacaggctctgtgatggctgaatggaaagaaacgtaaaaagctgtgccaaaaaaaaagcaaaatgctgtgataaaccaaacagggaagggggaaaaaccctcctccttgggatttttttttttttgttttccctaacaatttggacactacaattgctctcacaaaggaggttcaaagaccagtttgtaccgatgaaannnncaactttgtaatcccaacactttctattttctagaatcttctttgttcattgggtggtttttcagtcggctggaattctatcttctgggggccttccgtctgagatggaagctgtcttgggcttgttgtctcttccttctgttgctccctgcccctccccctgtctttccactctgtctggtgagctctgctttttcagtgcaccatcaagagatgcagccccgtggacatgaagacacaatctcccacggacagctttcccccttccgccctctcccaccctctcctccccttgcgctcgcgctcgcgctcgctttctcactggcgtgctctctttctctctctctctccctctgtacctttctcatagttgcttcagatcttaggtctcaagggcactttggcgcgtagtaagtgctttatgtaagaaggcagggcaggggggcctttttacaggagaaaaaaaaatgacttataagagaaagagcctggagtatttttggaaaaaaaaataatatttttatgttaaaacaattttaaaatcttaaaatggccatcagacatagagagctttgtgtgattcatgttttaaaaagaaccgaagaagccacaggcagggcctgagggagcccctggctttcccctcagcctcaggaaaggtggtcaggaaaactctggctggacaagggtcagtcttcggggtcagcagcgagattgctctgcagccagtgagggaggtccccgccatgccggctggaagaagaacctcgcatcttttggtgtgtatgcaccttggcagccagcaggaaagcagcgaagagccgcgcgccctctggcctcaagggagcattggcagaaccataaggtactgcagaagccgtcgaaaccgactgctcggctggattaggcgtgttggctacatctttcccacaaccgtataacgaccgatggtcatttctccaagagcaggcttggcgagtccttgcagagctgacatagaggcgcccgcatgtcacttagtctaacgctgacagaaatgaatgcagaaggaagattttcagtcctgaacgtgaattatagaggtagaacgtcgctaataatttctgccatcttcataatttctttgtctcacagaagactaggagaaagatcttttttaaataatctttttgctgtttttaaaaaattaaacaaggctttgtgttcctagaagagcttcatttcagtgaatctggtgacctccatctgcttgctgtcataacccgacacggacttatttttgtcattagcaagggggaaaaggccaaaggacaagggcctcttctcccattggttttcctgtgggcagaagggctgaggaagatggcccagcccgtgggggctgctgggtcaccagcagcgggtagggtgcaatctggtgtgtgttccagcagtgagacggtgttattgtgaaggtggcattcatctgcggagccaaaacccagccatcggggaagggtcagggcttctgtggaacttggaacgtgccaggaccacctgcaaaagccagggtgcgttggatcattctcagatcattgattggcctccacttgggtatgtgaattattcatgtcccagaagaccaaaaagtgctctggttctgagatgagtattttattcgtgttctgtttccgaaacacttagcaaagaaggtcacagtgatgtggagtcgccgcacccatctttgaagatagccagtgtccctggatgaggtgatgatttcccgtcccaaggactctgtgaagtttagagtacagtttgttggggtccaaaagacaccatctctaccccacccaaataaaaatgcactcatctctgtagaacatctgctgtcaaaggccagcctgtcgttagggcatggcttatgcttgacaaaccagtaacaactgtgggatggcgatggtgggatgtgtcgcaagcaattcactagacaatcttcacatgaatgtcggtagccagggtctctcccgagggatggctttagtcttgatgaatgtgaaccatgtcggaattgttaggtagaaacctgggctgggaggcctcggaccccaggctccatccctggcttccccagcctgcggccgcaagcaaaaccaagcgcgagatgcagctagcacccttcatatccatccccgttctcagcgggacaacaccatggacagccgttttcagagcctccagcatttgcacaccactactcaccctctctgctgctggcatgttggtagagtcatccctgtaatcaagaaatggcctgtggaatgttattgttcaacgttgtttacagctcttaaaacatggtgaggaatgcctaagtcttagtgaccaaacgtgaccttgaaagcagacatagcatgacagaccttcctagagtgtttggtcgggttcacagtgaccgagagtcaggtccagcacacacctgggaaagggatgctgccccaagggggaccaaaagggccggacgttacagggtgaaaccctctgacccctcgcgacaccgtaggacttgacttttgtttagtctttctaagaaatagatcatggagccaagtgaagtgcactttgtcaaatgtaagggtctgctttgttcttgttgcttttctgttttttaaccttttgttccgccatttaaaaaaagaaaaaaaaaaagcttatgtttcttgtcaaatgcagaaatgttccttccgccactcactgaagttttgcattctggcttgtgcagtttttattgtctgtgtcagacgtacagccagacatgttctctattggcatttttccgattctgttcagatgacagcgaccgccttttcattccccccgccacctgtactcaccctcacgctctttgaagaaaaaaaaaaaaaatcaccttgtgtgttgtagctcatttgtttcaagagagaatcaacagatcatattcagtgtcttgaataaattgctctattttgatattaaaaaaaaaaaaaaaaaaaaaatacgcg

SEQ ID NO: 5437 - DNA, 1859 bp, Homo sapiens
acttgaatatctgctatatgctgggttctagagctgcaaaagagaacaagagtagtctttacctttaggattttccagggaactgggggagacagacagatacatacacatacaccccatcctcagtgtgtaggtgccatgacaaatcaaggcttttgatgcagatgctatgctttcacttctcatggtcgatactttttgaatcttaaagtctgattgttcagatatctagaaaaggagatgtctggctttgctctgccctctgactcactgtgttggtttatctttaggcgtggtggagggggccagaactactggctaatgagagaaggcagaccttgttagtgacatgtacaaatgggcacatctgctatattcactttcattactgattattaatagtttattaaatggagtttactgaattactattattttggcttaaaatatatatatataatttatgtagttctatgtttatagatgtgttttcagaggtgtatttgttttagaatttcactctgtcctggaagtgatttttcaaatgtggatattaaaatggataggacataatttcccaactagtacagtatgctagtgccaaccttataccactgttgtagtacccatgaaaaataatttttaaaaagctgtaaaagttcccagtgctttgaggcttcttcaaaattgagaatgatgaaaatttccaaaattatcagttgatgccataattatctctaagagatgttgtaataggaaattcatggttttcctttattttcctgtttctgaacacaaaattcaaaagaaaactctttcttccttgtcactgagactcttggtcagtgtaggctgtgaacttgtactttgtgaagagaagagtactgtgaggaagcttgaaaatactgtaggtttttgttggcatcttcttctggatggtattcatgtactctgcacgccactgaaaatatgctctgtttttcataaaatatgctcattcttttatactgagcactcggaaattggttttcccaaaccatcttagtggagaatggcctgcttttatcagttatgtgaagaagtaaattccaggctcctcagctgcaggatggctccttgttcacagctgctgctcttgcctctgtggaagacgcctgctgctaagagaatctttgtgtgttgtgtataaaatgaactttgtttggaccattccacaagcagcttaaactgcttaggagtccagccagacattcctccccagttgatcatttaaatggaggtcagatttagaacccaacttatattcgtttaaaaatagacattgcctttagaaaactgacctttggtacatttggggcctagggatctgataggctatctcttatgatgcacatcgctctgttttagactctgaaaggcagtatgcctttgaagctagataacgtcagtgtgcttgtaacttgggacccagtctgtgtgctatatgtctgcttcttcagtccacactcattacttccaggaaattcgtgagaagatgagagattattcgttatagaattgagtatggtttctctacactaattttattggatattttccagtttgactaggaaaggttagagaacatggaaagaaaatttaacaggttaattttaaggtaataagaccattgtattgatatattcttcagtgtgatttaggtgagtcaggaatttttcctctggagactgcataaatcagggatgtccaatcttttggcttccctgggccatactggaagaataagaattgtctcaggccacgcataaagtacactaacactaatgatagctgattagcttaaaaaaaaaaaaaaaaaa

SEQ ID NO: 5438 - DNA, 2499 bp, Homo sapiens
aaacctattacttactttgcaaagctcttttacataccttgtgttatttgattccaacaactcagagcggtccagtaggatggataatgttcttattttacagatgaggaaactgagatacaggaaggtgagttacagaactctggctactgttctgctcatctcccagccccgtgaattttcatctctctcttcccccagtttatttatggagattcttagttcctgttcagattgtgatgagatccaattcatggaagatggatcctggtgcccaatgaaacccaagaaggaggcatctgaggcctccagtacagcccagtccaggggggagatccatcagagaataagaagaaggtcgaagttattgacttgacaatagaaagctcatcagatgaggaggatctgccccctaccaagaagcactgttctgtcacctcagctgccatcccggccctacctggaagcaaaggagtcctgacatctggccaccagccatcctcggtgctaaggagccctgctatgggcacgttgggtggggatttcctgtccagtctcccactacatgagtacccacctgccttcccactgggagccgacatccaaggtttagatttattttcatttcttcagacagagagtcaggtaagtggttctttcttcagaaggtctcagatctctgaagcttcctttctagacactgatggggcccctccctctcttatgatctctggggatgtaaatctgctttcccgtgagggcagtggggtgtaggtatcttattatctcctcagccccactggtagttcctgagattcctacttaggcctccttcctagatcccctgttacttttctgccctggcctactcacccctacccccgtgtgcacttagagcaccatgcctgctctaaccggacattccacacatttcagacgcccacaaagccaagaacctaacaagttggaggagctctctcaaggcagggaaaggggaagggtgtagggaagtaggggaaagagggagaggctctcctgcttctcaagagaataccttcggatccacaggggttgattgctctcatacggcatttctgagatgagtgactgggaggtggggaagtcgggattgagatcttaaactatgcccttgattcttcctagcactatggcccctctgtcatcacctcactagatgaacaggatgcccttggccacttcttccagtaccgagggaccccttctcactttctgggcccactggcccccacgctggggagctcccactgcagcgccactccggcgccccctcctggccgtgtcagcagcattgtggcccctgggggggccttgagggaggggcatggaggacccctgccctcaggtccctctttgactggctgtcggtcagacatcatttccctggactgagttccctggattatggaaacttcgctgtcccccaacactgagcaagtatgctgtggagtcccaaccccagctactctgatccctctgggggctctggccaagggccagacagaccttcacagatgcctacttttggcctcatctctgcctgacaaggccagcacccaaagggttaatatttaacctctttttaaggacactggggtctgtttctggaaatgttctttagatggtggcacattcctttgggtatgttaacctaggcagtgggaggcaaatgggatggtatgtgagctaggagaagggctgaaccctcagccttgactatgtctagagcctcttggggaaggggcacctctcttgaaccccaaatgctctctcttcttattacccaaacccatggctctatttcttcttcacatccattgtctcttcatgtctattccattcccttcggccaaacagacaggtggaaaaactgagacaggcagtttcagagatggacagagaactttattttggattgtggatgtggacttttttgtacataaataagaaaaaccaaaatactccaaagatgacttcccctgcctcctactccagtatgacagaggaggatgtaaggccttagccatgatctgcaggggtctgggagtcaggcccggcctattgcttgggtctctctctatttatatatctaagttcacagtgtttcttattcccccctaagcttctagaggctcatggccctgtagttaggcctggctcattctgcacctttccagggaggtggaaggaccctgtgccctccttcccaatcttctttttcaggctcgccaaggcctaggacctatgttgtaattttactttttatttctaaagttgtagtgaagctctcacccataataaaggttgtgaatgttcaaaaaaaaaaaaaaaaaaaaaaaaaaaaaaaaaaaaaaaaaaaaaaaaaaaaaaaaaaaaaaaaaaaaaaaaaaaaaaaaaaaaaaaaaaaaaaaaaaaaaaaaaaaaaaaaaaaaaaaaaaaaaaaaaaaaaaaaaaaaaaaa

SEQ ID NO: 5439 - DNA, 1023 bp, Homo sapiens
ttttaagtctttattttcatcacttttaaaaattacccattgaccaaagcaagcccagttctaaagactgagaaatagattctaccttatgataagaggaatggcagttacatttcaaagaggcatgtgtgcagggaagagagggagggattgcagctgcctcgtaagccactacactacaatagtatgacaagctcactcagggaagagcgcaaacatgtaagggcagagctctgaggagtttctatcattaaacaacaacttgaggaagaggggtggctgagtaggtgaggagcagagagtaggattgagggaaatccaggagcgatggcttgtgcacactgaattgaagacagtatttcaaggagggaatagtcaacagaatggcaggaggtaaagttgggtcaagttggatgaggacagcaaaccctggggcatggctgatggggataggatttctgaggaggaaggcaaatcaaagaccaacaggctgtgttcacagaataaagtgactcaagctgcttctagctcccctaagccccattttcctgtccctcagattcctaaaatagctagggagacagagatgggcagcaccctgttatgccctcttttcctcctgctcctgcgtcttcccctacagtggccttgtgggcaggactttggggatggtttttggcatcaatgagttacttcccacacatccatggagctcctgctggggcccagacactatgccaggtgctaagggtgagggcagggatggagggatcatgtcctgttagggaaaaagggatctcagaatctaatccctattattcccccaaatccagcacaggccttgattctctcacctggatagcagctgctaccgtctgacatatttgcctctctgcttcatcctttatggtctacaacccacacaacagcaggaggccccttataaacatccagtctcagcctgttgcttcctgagttaaaatcactcaacagctcttccctggctaaggatcagctttaacc

SEQ ID NO: 5440 - DNA, 1161 bp, Homo sapiens
cgttggcagcggaattcttagtagatcgaggcggcgggctgcacattcccgttgttgcgttgcgtttccttcctctttcactccgcgctcacggcggcggccaaagcggcggcgacggcggcgcgagaacgacccggcggccagttctcttcctcctgcgcacctgccccgctcggtcagtcagtcggcggccggcgcccggcttgtgctcagacctcgcgcttgcggcgcccaggcccagcggccgtagctagcgtctggcctgagaacctcggcgctccggcggcgcgggcaccacgagcggagcctcgcagcggctccagaggaggcaggcgagtgagcgagtccgaggggtggccggggcaggtggtggcgccgcgaagatggtcgccaagcaaaggatccgtatggccaacgagaagcacagcaagaacatcacccagcgcggcaacgtcgccaagacctcgagaaatgcccccgaagagaaggcgtctgtaggaccctggttattggctctcttcatttttgttgtctgtggttctgcaattttccagattattcaaagtatcaggatgggcatgtgaagtgactgaccttaagatgttaccattctcctgtgaattttaacttgaactcattcctgatgtttgataccctggttgaaaacaattcagtaaagcatcctgcctcagaatgactttcctatcatgcttcatgtgtcattccaaggtttcttcatgagtcattccaagttttctagtccataccacagtgccttgcaaaaaacaccacatgaataaagcaataaaatttgattgttaagataaaaaaaacaacaaaaaaaaaagggccgggccggctcctagaggaattccttcgaggggggccaaagctttaccgcggtacccaggcttttccttggtaccaaaggtgggtccccttatagatgggagtcccgtatttattaaggctataggcaattggcccctccgttttcaaaccttcctggaactgggaaaaactggctaaccttggggaacccctttgggaaaggaaaccttacctctctggggggaggggaccataatttggggacaaactctccctcaccagaaaattttaaagcgcctcccggcgaacataataaaaaattttttacaa

SEQ ID NO: 5441 - DNA, 2852 bp, Homo sapiens
  misc_feature (1157)..(1171): n is a, c, g, or t
aaaaaaaagcccagtcgcgccgcgagcgggctgagggtaggaagtagccgctccgagtggaggcgactgggggctgaagagcgcgccgccctctcgtcccactttccaggtgtgtgatcctgtaaaattaaatcttccaagatgatctggtatatattaattataggaattctgcttccccagtctttggctcatccaggcttttttacttcaattggtcagatgactgatttgatccatactgagaaagatctggtgacttctctgaaagattatattaaggcagaagaggacaagttagaacaaataaaaaaatgggcagagaagttagatcggctaactagtacagcgacaaaagatccagaaggatttgttgggcatccagtaaatgcattcaaattaatgaaacgtctgaatactgagtggagtgagttggagaatctggtccttaaggatatgtcagatggctttatctctaacctaaccattcagagaccagtactttctaatgatgaagatcaggttggggcagccaaagctctgttacgtctccaggatacctacaatttggatacagataccatctcaaagggtaatcttccaggagtgaaacacaaatcttttctaacggctgaggactgctttgagttgggcaaagtggcctatacagaagcagattattaccatacggaactgtggatggaacaagccctaaggcaactggatgaaggcgagatttctaccatagataaagtctctgttctagattatttgagctatgcggtatatcagcagggagacctggataaggcacttttgctcacaaagaagcttcttgaactagatcctgaacatcagagagctaatggtaacttaaaatattttgagtatataatggctaaagaaaaagatgtcaataagtctgcttcagatgaccaatctgatcagaaaactacaccaaagaaaaaaggggttgctgtggattacctgccagagagacagaagtacgaaatgctgtgccgtggggagggtatcaaaatgacccctcggagacagaaaaaactcttttgccgctaccatgatggaaaccgtaatcctaaatttattctggctccagctaaacaggaggatgaatgggacaagcctcgtattattcnnnnnnnnnnnnnnntttctgatgcagaaattgaaatcgtcaaagacctagcaaaaccaaggctgagccgagctacagtacatgaccctgagactggaaaattgaccacagcacagtacagagtatctaagagtgcctggctctctggctatgaaaatcctgtggtgtctcgaattaatatgagaatacaagatctaacaggactagatgtttccacagcagaggaattacaggtagcaaattatggagttggaggacagtatgaaccccattttgactttgcacggaaagatgagccagatgctttcaaagagctggggacaggaaatagaattgctacatggctgttttatatgagtgatgtgtctgcaggaggagccactgtttttcctgaagttggagctagtgtttggcccaaaaaaggaactgctgttttctggtataatctgtttgccagtggagaaggagattatagtacacggcatgcagcctgtccagtgctagttggcaacaaatgggtatccaataaatggctccatgaacgtggacaagaatttcgaagaccttgtacgttgtcagaattggaatgacaaacaggcttccctttttctcctattgttgtactcttatgtgtctgatatacacatttccatagtcttaactttcaggagtttacaattgactaacactccatgattgattcagtcatgaacctcatcccatgtttcatctgtggacaattgcttactttgtgggttcttttaaaagtaacacgaaatcatcatattgcataaaaccttaaagttctgttggtatcacagaagacaaggcagagtttaaagtgaggaattttatatttaaagaactttttggttggataaaaacataatttgagcatccagttttagtatttcactacatctcagttggtgggtgttaagctagaatgggctgtgtgataggaaacaaatgccttacagatgtgcctaggtgttctgtttacctagtgtcttactctgttttctggatctgaagactagtaataaactaggacactaactgggttccatgtgattgccctttcatatgatcttctaagttgatttttttcctcccaagtcttttttaaagaaagtatactgtattttaccaaccccctctcttttcttttagctcctctgtggtgaattaaacgtacttgagttaaaatatttcgattttttttttttttttaatggaaagtcctgcataacaacactgggccttcttaactaaaatgctcaccacttagcctgtttttttatcccttttttaaaatgacagatgattttgttcaggaattttgctgtttttcttagtgctaataccttgcctcttattcctgctacagcagggtggtaatattggcattctgattaaatactgtgccttaggagactggaagtttaaaaatgtacaagtcctttcagtgatgagggaattgattttttttaaaagtctttttcttagaaagccaaaatgtttgtttttttaagattctgaaatgtgttgtgacaacaatgacctatttatgatcttaaatcttttttaaaaaaaaaaaaaaaaaaaaaaaggcacgaatttaaactttgggggcagggagaggcaccgtcagaacgggaggggttccacacggggggtgacaaggcggtgtcac

SEQ ID NO: 5442 - DNA, 779 bp, Homo sapiens
cgccgcttccctcccgccgcagcgcgggcgcaccggccgccgccccagccatggagcaagacaacagcccccgaaagatccagttcacggtcccgctgctggagccgcaccttgaccccgaggcggcggagcagattcggaggcgccgccccacccctgccaccctcgtgctgaccagtgaccagtcatccccagagatagatgaagaccggatccccaacccacatctcaagtccactttggcaatgtctccacggcaacggaagaagatgacaaggatcacacccacaatgaaagagctccagatgatggttgaacatcacctggggcaacagcagcaaggagaggaacctgagggggccgctgagagcacaggaacccaggagtcccgcccacctgggatcccagacacagaagtggagtcaaggctgggcacctctgggacagcaaaaaaaactgcagaatgcatccctaaaactcacgagagaggcagtaaggaacccagcacaaaagaaccctcaacccatataccaccactggattccaagggagccaactcggtctgagagaggaggaggtatcttgggatcaagactgcagtttgggaatgcatggacaccggatttgtttcttattccttcacttttggggaaaatctcttgtttttaaaaagtgataaatttggtgttaggtcaaaaaaaaaaacaacaaaaaaaacaaaaatgagcagtagtagaacctatgaccatcacaaacagacaaaaacaaaagacacacaa

SEQ ID NO: 5443 - DNA, 1447 bp, Homo sapiens
tctggactcactccccagcatgaaggcgctgagcccggtgcgcggctgctacgaggcggtgtgctgcctgttggaacgcagtctggccatcgcccggtgccgagggaagggcccggcagctgaggagcctgctgagcttgctggacgacagtgaaccactgctagctcccgcctgcgggaactggtaccctggaggtcccggagaggcactcagtcattagccgaggtggaaatcctacagcgcgtcatcgatctacattctcgacctgcatggtagtccttggccgagccagcccctggaccccctgatggcccccaccttcccatccagacagccgagctcgctccggaacttgtcatctccaacgacaaaaggagcttttgccactgactcggccgtgtcctgacacctccaggtgagtatctcctctcttggagagggaggtttaaacggcaagtcctggagttggcagacgttttgaaaaattgccactcactcggtttagggaaactgaggccagagagggacaagtgacttgcccatggttgcatcaaatgaatggcagagtcagtttccatgtgatgtgcatttaagccttaaatgcgcctgggccctgccctcccgcagtggccgagggtctggcaaagtagacatgggtccgactaaatacaagtctttctgttccatgttgtatagggagctgtcttcggcagccccctcccagctagtgtcaattccaagtaggaggggtagcgcaagctccgcctgtggtctttggcgccaactgggtgggggcagcgtggggcgcggagttatcagctggaggtacagaccaagtttcctccctggcgccggccagtctgcggacggcccccgcctcggcacgctcggcggaaactgactgctccttggtcttcctttcctcccccgcccagaacgcaggtgctggcgcccgttctgcctgggaccccgggaacctctcctgccggaagccggacggcagggatgggccccaacttcgccctgcccacttgacttcaccaaatcccttcctggagactaaacctggtgctcaggagcgaaggactgtgaacttgtggcctgaagagccagagctagctctggccaccagctgggcgacgtcaccctgctcccaccccacccccaagttctaaggtcttttcagagcgtggaggtgtggaaggagtggctgctctccaaactatgccaaggcggcggcagagctggtcttctggtctccttggagaaaggttctgttgccctgatttatgaactctataatagagtatataggttttgtaccttttttacaggaaggtgactttctgtaacaatgcgatgtatattaaactttttataaaagttaacattttgcataataaacgatttttaaacaattgtgtaaaaaaaaaaaaaaaaaaaaaa

SEQ ID NO: 5444 - DNA, 3280 bp, Homo sapiens
cggcacgaggcttctgtagctcgcgttgaagccgcacgtccggccccgatcccggcaccatgagcttcggctcggagcactacctgtgctcctcctcctcctaccgcaaggtgttcggggatggctctcgcctgtccgcccgcctctctggggccggcggcgcgggcggcttccgctcgcagtcgctgtcccgcagcaatgtggcctcctcggccgcctgctcctcggcctcgtcgctcggcctcggcctggcctatcgccggccgccggcgtccgacgggctggacctgagccaggcggcggcgcgcaccaacgagtacaagatcatccgcaccaacgagaaggagcagctgcagggcctcaacgaccgcttcgccgtgttcatcgagaaggtgcatcagctggagacgcagaaccgcgcgttggaggccgagctggccgcgctgcgacagcgccacgctgagccgtcgcgcgtcggcgagctcttccagcgcgagctgcgcgacctgcgcgcgcagctggaggaggccagctcggctcgctcgcaggccctgctggagcgcgacgggctggcggaggaggtgcagcggctgcgggcgcgctgcgaggaggagagccgcggacgcgaaggcgccgagcgcgccctgaaggcgcagcagcgcgacgtggacggcgccacgctggcccgcctggacctggagaagaaggtggagtcgctgctggacgagctggccttcgtacgccaggtgcacgacgaggaggtagccgagctgctggccacgctgcaggcgtcgtcgcaggccgcggccgaggtggacgtgactgtggctaaaccagacctgacctcggctctgagggagatccgcgcccagtatgagtccctggccgctaagaacctgcagtccgcggaagaatggtacaagtccaagtttgccaacctgaacgagcaggcggcgcgcagcaccgaggccatccgggccagccgcgaggagatccacgagtatcggcgccagctgcaggcgcgcaccatcgagatcgagggcctgcgcggggccaacgagtccttggagaggcagatcctggagctggaggagcggcacagtgccgaggtagctggctaccaggatagcattgggcagctggagaatgatctgaggaacaccaagagtgagatggcacgccaccttcgggaataccaggacttgctcaatgtcaaaatggctcttgacattgagatagcagcttacaggaaactgctggaaggcgaggagacacgttttagcaccagtgggttaagcatttcggggctgaatccacttcccaatccaagttacctgctcccacctagaatcctcagtgctacaacctccaaagtctcatccactgggctatcacttaagaaagaggaggaggaggaggaggcatctaaggtagcctctaagaaaacctcccagataggggaaagttttgaagaaatattagaggagacagtaatatctactaagaaaaccgagaaatcaaatatagaagaaaccaccatttcaagccaaaaaatataattccattgctttgaaaaagttaatgcttaagagggaatgatatgcatttgacttgttaaacagcctattcctgaactataacacctgccaccactataaaatgtcttcaaggcttcagtctcatatttagtattgaatacttacattctctaataagaaaaccaccccttagattgaagtaaactgcagtcctggagcaatcacagatgagttatctaagaatacagctttctgaccttcagctcacgcttcacagtgatcgatgattcaggtgcagaggaagtacaaactaaggtgctaaatctgcgatcatcgtcatttgctgtgaactgaaattaaaactattcatgctacccagccattacccagctaaataatcttactctagatacctaaaacataagatcactgccagagataaactaatggtccacacccaattccactctgatagaattatttcacaaataataggtgtttgtttaatggacacttttcacctccttcaattccatatatccttttcttctatgtaggaaaaaaatagtctagtgtagtattcttcccttttaaacacattttggttcttctcaaaagaacttacccccattcgcgctctgctcagtgggtaaaattagatgcatgttgaccatgtctatgattcgtgtaattacttatccctgcccatttcatattctttcaattctgtaggttaaaaaaatggcagtgatgaattttaagggtttcccccaacatataaaataatgcaaagaatccctagactttaggctttcagcttacacaaatctatttaattaggaaaaaaaactattaaggatgtagcttttcacctttactttagaagcacagtaaatatcccaaactgtgatgaagccgaccttagatttagtagtgtaagctagaagaagtgagtgtttctatgagtggaaaaagccaaggtgtcatttatgtgtcagttcatttgtggtgatatagaattagctttttcatccccttacccttagaatccacgtattccccttcccactagcctaggtcataaagaggcgttgctttcactctcctatgccttttacgagtgctaagtgtaggatattttgtcaccagaacacaatgctaccgccccaaagtaaaagaaaccacttctggtcaatcaacactaccagcgtatatataagaaagacatctttctcttttctaaaagacttccctaacacttaccccatggctgcacagttggtggggtcctgccggagaggaagagacactcagaccagagaaggggtgtgcatgcgcctactcgcttgctagaagtagattctggacagtcagctcttcatctgcccaactgtgtagcatctgcattgcccagtctttcatgtgtgccaaggctgatgcaggatttgttctctgtccagcagtcacttcggccagagctgaagagttgccccgtctctgttccatgtctcctttaagagctctggtgataaggacatgatgcttttactgaactttcttatcctagcacatgcttcaatagttcaaggaacttgaaaaatacttttccttacctttaccccatccctgtctttactcctcacacttactgtaagacattagtaacataataaattaaaagtcacacgaatctcaccaaaaaaaaaaaaaaaaaaaaaaaaaaaaaaaaaaaaagggaaaaa

SEQ ID NO: 5445 - DNA, 1349 bp, Homo sapiens
aactgccccaactgctcttcccgccccggtcacagtgaaaatgtagacggggtcgttgtccgtacgactgtgcgccaggctcggggaggggcgccctccgcgtgagcgcccccctgggaatattgaacataatcacctctcattccagactatgttaggtcttaatggtgggaggacgcccgagtgctcggcccgtttcaccccgaggaggaaggacactgggtcatgacgccatcagagggcgccagaggagggaccggacgcgagttggagatgttggactcgctgttggccttgggcggcctggtgctgcttcgggattccgtggagtgggaggggcgcagtctcttgaaggcgcttgtcaagaaatctgcactgtgtggggagcaagtgcatatcctgggctgtgaagtgagcgaggaagagtttcgtgaagggtttgactctgatatcaacaatcggctggtttaccatgacttcttcagagaccctctcaactggtcaaaaactgaggaggcctttcctggggggccgctgggagccttgagagccatgtgcaagaggacagatcctgttcctgtcaccattgctctcgattcactcagctggctgctacttcgccttccctgcaccacactctgccaggtcctgcatgctgtgagccatcaggactcttgtcctggtgagacccctccttcattgtttcccctcatacatctccctctgccaaggagtgtgccccttttcctttctaccctagaataaacatctgggttctccagtcagactttaaaaaaaaaaaaaaaaaaaacacaaacaacaacaaaaaaaaaacctgtgtgcgggcgcgagccgtgggcccgccgagacagcctcttgataagaaccacactcgcgatgggagccccgggcgcccccagaacgggacacggtaggcactctgtgccaccaaaaaggcggcgctaccccacaaggagaaagaactccggggggccacgagagcaatagcgccgccctggaggactcctccacccacatatagacaaccaaagcccaccggcgcgaggaacacacgagacggctccttggaacacaaaaaacccacacaattacgagataaccaagagggccacataaccgggagccccctacaaccaaccaaagaagggactacccacaagggaaaagcctgccgacgacacacaaaacaaaacagaccccagcacacaccaggtcgcccacccgccacagaacaacgcacacgacgaccccaaccaacccgcgacaaccagacagccacaaaacgaaaccaccgcgcacaccgagaacaccaaccgcacaacaccagc

SEQ ID NO: 5446 - DNA, 2484 bp, Homo sapiens
  misc_feature (70)..(70): n is a, c, g, or t
  misc_feature (862)..(881): n is a, c, g, or t
tgtgggtgagttggctgccggtgagttgggtgccggtggagtcgtgttggtcctcagaatccccgcgtancgctgcctcctcctaccctcgccatgtttcttacccggtctgagtacgacaggtccgtgcagctgggggacgtcgggtgggaattatgggtgggcaggcccgggacctggccgcgcggcttgggttctgccgtgtcatggggctccccagggaacccgagactggccggacctgggggatgttattgccctccttcagggcgcccgctttcctttccccaagttagaccacatcggcggcacttgtcctaccgctgagtcacccctgggtcctaactcggtgcggaagcgagaagctccggctggtgcttggtaaagaaggcgtgaggagccggaactcctaccttgaacccggagaaggccaagggtcactctttgctccgttcatcttttcgtgcctagtatgactgccttgaacaaacaaacaaaaagttaaacgtgcttcctggaagaaaaagcaactggtttgtagtagggcatgctgcggtgtatagtttcttcagaagcgcgaaggcagtcgtagctttggctggatatattgtctggagtctgattttataggaactggaatttagaatggttttcaagagatttctcatcatgccgattccaattgaccaaaattttttctgactttttaaaagtttaaagcaagttttaaaaaacttttgtggtatgaaaatgttcacaatattaagttgtacatatatatgctgtagacatttttactttcagtttctgttttcgtcagttaagtttttacatagctactcttttttaaagtcagggaagnnnnnnnnnnnnnnnnnnnntgagtggtatgagatgctgcatttcctgtcaagtatatgctgatcctgtcgaagttttaccacctgcagttaccactttttcatcttttttactgactcgtagaagatgtgtgtgaagttttgacatatttccccactgtcctataaagtgactttgttggtcgatatctgcctcctcctacccttgcagtgtttcttatccgggtacatgattacgacttaggggcgtgaatactttttctcccgaaggaagattatttcaagtggaatatgccattgaggctatcaagcttggttctacagccattgggatccagacatcagagggtgtgtgcctagctgtggagaagagaattacttccccactgatggacgaggagcagcattgagaaaattgtagagattgatgctcacataggttgtgccatgagtgggctaattgctgatgctaagactttaattgataaagccagagtggagacacagaaccactggttcacctacaatgagacaatgacagtggagagtgtgacccaagctgtgtccaatctggctttgcagtttggagaagaagatgcagatccaggtgccatgtctcgtccctttggagtagcattattatttggaggagttgatgagaaaggaccccagctgtttcatatggacccatctgggacctttgtacagtgtgatgctcgagcaattggctctgcttcagagggtgcccagagctccttgcaagaagtttaccacaagtctatgactttgaaagaagccatcaagtcttcactcatcatcctcaaacaagtaatggaggagaagctgaatgcaacaaacattgagctagccacagtgcagcctggccagaatttccacatgttcacaaaggaagaacttgaagaggttatcaaggacatttaaggaatcctgatcctcagaacttctctgggacaatttcagttctaataatgtccttaaattttatttccagctcctgttccttggaaaatctccattgtatgtgcattttttaaatgatgtctgtacataaaggcagttctgaaataaagaaaattttaaaataaaaaaaaaaaaaaaaaaaaaaaaaaaaaaaaaaaaaaaaaaaaaaaaaaaaagaggtaatgaaaatggccccttggtccatagcctggtttcctgaacccagctttttcttgtaacaaaggtggtaaaatcttgcccggtcctccccctataggcgagttcgttattaaattttccgaataagcccagggttaaacccttgccttttaatggaattccggggctgccaataacccccggggaaattttaacccccccccctaaatggaagccgggccctttttttttttgggggatccccaaaaaggagctctttcccttggaggaatcccctctttttttttctgggccgcaagtccattcttgggctggcctatggcccagaacacaaaaaaaaaaaccccccccgggttttacaccagaggccgggtggggggtcttgtgctttatgcgcccccgggatattccagataaagactctcctcgccgtgtcccttgcttccttttttctcccccgcgc

SEQ ID NO: 5447 - DNA, 2785 bp, Homo sapiens
  misc_feature (664)..(678): n is a, c, g, or t
  misc_feature (2304)..(2324): n is a, c, g, or t
acagacggtctttacaagcgactcgtgggcgtcaatactgggctgagtttgtggcgcgcttagtgatgggatggccctgtgcaggacgccgacacgaaaagatgaagagttcaatccgtgctgtctgaactcacagtgtagcaggcgagatagacgggaagatcggtagggtgggagatgccggaaaggcttcccgtgagactggataagaaatcaaaaatctggtgaaattgccggcaagagggagttaaggacattccaggcagaggcaagattcctaagatgaggacacagcatcctgggccactgtcactaatacaaatttgcctctggagggactctacggaagataattcccctgaaatttggagagttgaattaagctaggactgattctggctggaatttgtggtggctacgtaccctagagggcctcaaggaaacccacggttcaagacagccctgacagattctggagtctagaacagaaatggatttgaacatgggcaaggccaaccacccagttcacggcctgtgtacagcaaagattacgttacagcctgagagctaagcctggaagctctttcatccatccgtttgtccatctatccatccatctgctcatccatccctccatctgctcaacaaacgttagagaatcaannnnnnnnnnnnnnnctggggctgccctcaaggagcttttatagagttcagggtacagccaggtgggggagacagatcactataaaaacctaccactataatccaaaggacaagagcaaaaatagtaaagaggagagaagacccaaatttgcctggtgggtcagagagggctttctagaagaggtaaaaaatcttcggggctatcacttcaccttgcctggtggataaagggaggactttccagatacagtggacagaatgtgcagaggcaggagccatgagtggcagaggcaggggagggactgcagagacaggttggagccaaagcacgtggcactggagccatagccaaaggaacaaactgtgagacctgggacttgaatttggaggtggtgaaaagtgacaaggtcttcacagaagagtgattttttcaacttagggaaggctgaccccagaccaatgctgccaaaatgtggtctgtgggctgttagcagttcgtgacgatgtaagtacaggaattgagattaagcatttagaacacctacagcactttgatagtcattttactttttaaattttgagctggcattttatatgcctggtttttttttgtttttgtttttttattttttttgagacagtctcgctctgtcgcccaggctggagtgcagtggcgcgatctctgctcactgcaagctccgcctcccgggttcacgccattctcctgcctcatcctcccaagtagctgggactgcaggcgcctgccgcctcgcccagctaattttttgtatttttaatagagacggggtttcaccatgttagccaggatggtctcaatctcctgatctcgtgatctgcccgccttggcctcccaaaatgctgggattacaggtgtgagccaccacgcccagccttattctctttttctaatagttgcactttatcatattttacaaatgtgtgagtctgctatggattagaaattaataagagattttgccacagatagtttgagaagcccagcactgccactcaacaaatgctggtgcattcagatggtgaaatattctgcagctattaaaggagttaaaactgcctccacttacctggaggcccatctgtgacacctttttaggttaaaaggaaaagaaaaacttgcttaggactgaatatgagcggttgcaatttgtaacaatgatgtatatatacatatacattttcatgtatttgtatgaacataaaagtattgaaggatattcatcaaactgctaaaagggttgcttcagagtaacggactcggagaaggcagattaattttctcttaatggaactctgtattgtatcacttgtaaaaataagcatgtgttatctttatgataaaaaagtaaaaacctaaaaaagaaaaaaaaaaaaaaaaaaaaaaaaaaaaaaaaaaaaaaaaaaaaaaaaaaaaaaaaaaaaaaaaaaaaaaaaaaaaaaaaaaaaaaaaaaaaaaaagaaaaaaaaaaaaaaaaaaaaaaaaaaaaaaaaaaaaaaaaaaaaaaaaaaaaaaaagagaaggggggaaggaagaactaacatgaagacgcgggggccacaaacaatcaacacccgcgagcagaacaatctagtaaggaagannnnnnnnnnnnnnnnnnnnncagacaatataacaaaaatcgagcacgtcgcgcaaggcgctaggaaaacacatacagagaacgacaaacaaaaccgccaccggaacgataacacggcagcaaacacacaacccccatctggtgtgagtcaagcgaaaaacaccgagcagcacaacaaaacacgcacatcaagcgcaggagaaccacaaaaaaacaaacagtcagagtgaagagtagaacaaccaacacaagcctcagcgccagggacgaagaaaagagtccaagcagtcagcctaaacaaaaacaacaacggcacggacgcacatacacaccctgcccaactagaaaaggagaggagccagcgcagaccgacagacagagaacaggatgaggaccacaaacataaggccacacgccaccaagaccaaccacagcacccccaccgaacaccggcgccgcacgaacggacacgcgaaacaaca

SEQ ID NO: 5448 - DNA, 1590 bp, Homo sapiens
ggcacgaggggcaagcgcctgtggggcggcggcgccagagctgctggagcgctcggggtccccgggcggcggcggcggcgcagaggaggaggcaggcggcggccccggtggctcccccccggacggtgcgcggcccggcccgtctcgcgaactcgcggtggtcgcgcggccccgcgctgctccgaccccgggcccctccgccgccgccatggctcggccgctagtgcccagctcgcagaaggcgctgctgctggagctcaaggggctgcaggaagagccggtcgagggattccgcgtgacactggtggacgagggcgatctatacaactgggaggtggccatcttcgggccccccaacacctactacgagggcggctacttcaaggcgcgcctcaagttccccatcgactacccatactctccaccagcctttcggttcctgaccaagatgtggcaccctaacatctacgagacgggggacgtgtgtatctccatcctccacccgccggtggacgacccccagagcggggagctgccctcagagaggtggaaccccacgcagaacgtcaggaccattctcctgagtgtgatctccctcctgaacgagcccaacaccttctcgcccgcaaacgtggacgcctccgtgatgtacaggaagtggaaagagagcaaggggaaggatcgggagtacacagacatcatccggaagcaggtcctggggaccaaggtggacgcggagcgtgacggcgtgaaggtgcccaccacgctggccgagtactgcgtgaagaccaaggcgccggcgcccgacgagggctcagacctcttctacgacgactactacgaggacggcgaggtggaggaggaggccgacagctgcttcggggacgatgaggatgactctggcacggaggagtcctgacaccaccagaataaacttgccgagtttacctcactagggccggacccgtggctccttagacgacagactacctcacggaggttttgtgctggtccccgtctcctctggttgtttcgttttggctttttctccctccccatgtctgttctgggttttcacgtgcttcagagaagaggggctgccccaccgccactcacgtcactcggggctcggtggacgggcccagggtgggagcggccggcccacctgtcccctcgggaggggagctgagcccgacttctaccggggtcccccagcttccggactggccgcaccccggaggagccacgggggcgctgctgggaacgtgggcggggggccgtttcctgacactaccagcctgggaggcccaggtgtagcggtccgaggggcccggtcctgcctgtcagctccaggtcctggagccacgtccagcacagagtggacggattcaccgtggccgactcttttccctgctttggtttgtttgaaatctaaataaaactactttatgagaaaaaaaaaaaaaaaaaaaaaaacaacacacgacacaaaacgagcacacaacagcgaagacagcagaaaccgagcagaaacaaagcgaagaaacggcagaagaagacgaagaagacaacacgacagaacgcccgcca

SEQ ID NO: 5449 - DNA, 6827 bp, Homo sapiens
  misc_feature (2300)..(2316): n is a, c, g, or t
  misc_feature (3815)..(3928): n is a, c, g, or t
  misc_feature (4232)..(4286): n is a, c, g, or t
gggcggcccaagcggtttcaaacggcttagagcaggccgcttggttctgacccagctgaggaaatactcttaattctaaggaaaacctggaagcacaatgggagatgacagtgagtggttgaaactgccagttgatcagaaatgtgaacacaagctgtggaaagcaaggttaagtgggtatgaagaggccctgaagatcttccagaaaataaaggatgaaaagagcccagagtggtccaaatttttaggattgatcaaaaaatttgtcactgattccaatgcagtggttcaattgaaaggattagaagctgcacttgtttatgttgaaaatgcccatgtagcaggaaaaaccacaggagaagttgtgtcaggtgttgtaagtaaggtgttcaatcaacctaaagctaaagccaaggagctgggcatagagatctgtcttatgtacatagagattgagaaaggagaggctgttcaagaagagctcctgaaaggcttggacaataagaatcccaagatcatagtggcctgtatagagacactgaggaaagccttaagtgaatttggttccaaaatcatcttgcttaagccaattatcaaagtgttgccaaaactctttgagtctcgagagaaggctgttcgagatgaagccaaactaattgctgtggagatttacagatggattcgggatgctctgagacccccattaaaaaatataaaatatgttaagttgaaagaactagaagaagaatgggtcaaactgccaacaagtgctcctagacctactcgatttcttcgttcccaacaagaactagaagctaaattggaacaacaacagtctgctggtggagatgctgaaggaggtggtgatgatggtgatgaggtgccacaaatagatgcttatgagcttttagaagctgtagaaatcctttccaaacttcccaaagacttttatgacaaaattgaggcaaaaaaatggcaagagagaaaagaggccctggagtctgtagaagtactaataaaaaaccccaaactggaagctggcgattatgcagatttagtaaaagcattaaagaaggttgttggaaaggacaccaatgtcatgttggtggctttggcagcaaaatgtcttactggcctggctgttgggctaaggaagaaatttggacaatatgcaggacatgttgtgccaaccatcttggagaaattcaaagagaagaaacctcaagtggtacaagccctgcaggaggcaattgatgcaatcttccttactaccacactacagaacatcagtgaggatgttttagcagtaatggataataaaaatccaaccatcaagcagcagacatctctttttattgcaagaagtttccgccactgcactgcttctaccctgccaaagagcttgctaaagcccttttgtgctgcactacttaagcacatcaatgattctgctcctgaagtcagagatgccgcatttgaagcattgggtactgctttgaaggtggttggcgagaaagcagtaaaaccattcctagctgatgtggacaaactcaagcttgataagatcaaagaatgttcagaaaaggtagaactgatacatggtaagaaagctggactagctgctgataagaaggaattcaaacctctgcctggaaggactgctgcttcaggggctgcaggagataaggacacaaaggacatttctgcacccaaaccaggacctctaaaaaaggcacctgctgctaaggctggtgggccaccaaaaaaggggaaaccagctgcaccaggaggcgcagggaatactggaaccaagaacaagaaaggactggagactaaagaaatagtggagcctgagctctcgatagaagtatgtgaagaaaaagcttcagctgttcttccccctacctgtatacagcttcttgacagcagtaactggaaagaaaggctggcttgtatggaagagttccagaaggctgttgagctaatggaccgaactgaaatgccatgccaggcattagtgaggatgctagccaagaaacctggatggaaagaaactaattttcaggtgatgcaaatgaagcttcatatagttgctttgattgcccagaagggaaatttttccaaaacgtcagctcaggttgtattagatggccttgtggacaagattggagatgtgaaatgtgggaacaatgcaaaagaagctatgacagcaatagccgaagcctgtatgttaccatggactgctgaacaggttgtgtcaatggctttctcacaaaagaatcccaaaaatcagtcagaannnnnnnnnnnnnnnnnaaatgccataaaagaatttggtttttctgggttgaatgtcaaagctttcattagcaatgtgaagacagctcttgctgcaacaaacccagctgtgaggactgctgccataaccctgcttggcgtgatgtatctgtatgttggtccctctttgcgaatgttctttgaggatgagaagcctgccctcctatcccagatagatgcagaatttgagaagatgcagggacaaagtccacctgctccaaccagaggaatttccaagcatagcacaagtggtacagatgaaggagaagatggagatgaaccagatgacgggagcaatgatgtcgttgatcttttgccgaggacggagatcagtgataaaatcacttcagagttggtatctaagattggtgataagaattggaagattaggaaagaaggcctagatgaagtggcaggtattattaatgacgcaaaatttatccaaccgaatataggtgaacttccaactgccttgaagggtcgactcaatgattcaaataaaatcttggtacagcaaacgctgaatatcctgcaacaactggcagtagccatgggcccaaatattaagcaacatgtaaaaaatttaggcatccctatcatcacagtccttggagacagcaagaacaatgttcgagctgctgccctagcgactgtgaatgcttgggcagaacagactggcatgaaggaatggctggaaggagaagatctttctgaagagctcaaaaaggaaaatcctttcttgaggcaagagcttctgggctggctggctgagaaactacctactcttcgttccacccctacagaccttatcctttgtgttcctcatctctactcctgcctagaagatcgaaatggagatgtgcgaaagaaggcccaagatgccttgccattcttcatgatgcatttaggatatgaaaaaatggccaaggctactgggaaactaaagccaacttctaaagatcaggtattggccatgctagagaaagccaaagttaacatgccagccaagcctgctccacccactaaagcaacttctaaaccaatgggagggtccgctccagccaaattccagcctgcatcagcacctgctgaagattgtatttccagcagtacagaacccaaacctgatccaaaaaaggccaaagctccaggattatcctctaaagcaaagagtgcacaagggaagaagatgccaagcaaaaccagcttaaaggaggatgaagacaaatccgggcctatttttattgttgttccaaatggaaaagagcaaaggatgaaagatgaaaaaggattgaaggtgctaaagtggaattttactaccccacgggatgaatacattgagcaactaaagactcaaatgtctagctgtgtggctaaatggttacaagatgagatgtttcactcagactttcagcatcataacaaagcccttgctgttatggttgatcacttggagagtgaaaaagaaggagttattnnnnnnnnnnnnnnnnnnnnnnnnnnnnnnnnnnnnnnnnnnnnnnnnnnnnnnnnnnnnnnnnnnnnnnnnnnnnnnnnnnnnnnnnnnnnnnnnnnnnnnnnnnnnnnnnnngctcttcaccttgctaagtgaagaagaatatcatcttactgagaatgaagcatcttccttcatcccctatcttgtcgtcaaggttggagaaccaaaggatgtcattcgtaaagatgttcgtgccatcctgaaccggatgtgccttgtctacccagctagcaagatgtttccctttatcatggaaggaaccaaatccaaaaactctaagcagagagcagagtgcctggaagagctgggatgtctggttgagtcctatggcatgaatgtttgccaaccaaccccaggaaaagccttaaaggaaatnnnnnnnnnnnnnnnnnnnnnnnnnnnnnnnnnnnnnnnnnnnnnnnnnnnnnnnaccattgtaacggtgtacaatgtacatggggatcaggtgttcaaactgattggaaatctttctgaaaaggatatgagcatgctcgaggagaggattaagcggtcagcaaagagaccctctgctgcaccaataaaacaggtggaagagaaacctcagcgtgcacagaacataagctccaatgccaacatgttacgcaagggaccagctgaggacatgtcttccaaactcaaccaagcccgaagcatgagtgggcatcctgaggcagcccagatggtccgccgagaattccagctggatctagatgagattgagaatgacaatggtacagtccgatgtgaaatgccagaacttgttcagcacaaactggatgacatttttgagccagtccttattcctgaacccaagatccgggctgtttctccacacttcgatgacatgcacagtaatacagcatccacaatcaatttcattatctcccaagtagccagtggtgacatcaacacaagtatccaagctctgacacagatcgatgaggtcctgagacaggaagacaaagctgaagccatgtccggccatattgatcagtttctgatagccacttttatgcagctaagactcatctacaacacacacatggcagatgagaaattggagaaggacgagatcatcaagttgtatagctgtatcattggcaacatgatttcgctgtttcagatagagagccttgcccgggaggcctccactggagtactaaaagacctaatgcatggcctcatcaccttaatgctggattctcggattgaagatcttgaggaaggacaacaggtcatccgctctgtgaacctcttggtggtgaaggttctggagaagtcagaccagaccaacatcctgagtgccctacttgttttgctccaagacagcctgctagcaacagccagttctcccaaattctcagagcttgttatgaagtgtctctggagaatggttcgactgttgcctgataccatcaatagcattaacctagacagaattcttctggatatccacattttcatgaaggtcttccccaaagagaaactgaagcaatgcaaaagtgaatttcccataaggaccctaaagaccctgctacacaccttatgcaaattaaaagggcccaagatcctggaccacctaacgatgatcgacaacaaaaacgagtctgagctggaggcccatctctgccggatgatgaagcacagtatggaccagactgggagcaagtctgataaggaaacagaaaagggagcatctcgaatagatgaaaaatcatcaaaggccaaagtgaatgatttcttagctgagatttttaagaagattggctctaaagaaaacactaaagagggactagcagagttatatgaatataagaagaaatactcagatgctgacattgaaccatttctgaaaaattcctcacagttcttccagagctatgtcgaaagaggccttcgggtgattgagatggagagggagggcaaaggtcgtatttccacttcaacaggcatctcccctcagatggaagtcacatgtgtgcccacgcccacaagcacagtgtcctccataggtaacacaaatggggaagaagtggggccatctgtctacttggaaaggctaaagatcctccgacagcgatgtggtctggacaacacaaagcaagatgaccgacctcctttgacctctttgctctccaaaccagcagttcctactgtcgcctcttccacagacatgctccacagcaaactctctcagctccgggagtcacgggagcagcaccagcattcagacctggattctaaccagactcactcttcaggaactgtgacctcctcctcctccacagctaacatagacgacttgaaaaaaagactggagagaataaagagcagtcgcaaatgaagctgccccactcccccggcaccctgcagctttagtttactaaactagaagtcctcatagtttaaaatggcctcagcaggcctagtgtatacaaactggttgtatgtatcatgccgtggagctagggggaggagtcattgtggcacaagtatttgtacatactctgcttctctctgtcagcgtcctgctgctctagaagactgtccgtggatgagtttagtgtacagacttgtaaacagctgccccctctctgctcagtctagttcccagatccttttctttttaattgctcatttgtaaaattgtcctaatctttcctagctttttaatagttaatattagaaactctttaatagttttcctttcagtttgtgagctcttctctgtcgccctgaagggtcactgtattctgtatgaatgcatggcatgatacaactaatttaagagtcttttataaataaagtttgcattaactatacctgaaaaaaaaaaaaaaaaaaaaaaaaaattttgggggcgcgcccgggccccgaaaagatttttaaaacacatggtggggggcggggccccagggaagggaaccagggggacaaggggcccaaagga

SEQ ID NO: 5450 - DNA, 7386 bp, Homo sapiens
  misc_feature (3173)..(3190): n is a, c, g, or t
cccggaagtgggccagaggtacggtccgctcccacctggggcgagtgcgcgcacggccaggttgggtaccgggtgcgcccaggaacccgcgcgaggcgaagtcgctgagactctgcctgcttctcacccagctgcctcggcgctgccccggtcgctcgccgcccctccctttgcccttcacggcgcccggccctccttgggctgcggcttctgtgcgaggctgggcagccagcccttccccttctgtttctccccgtcccctccccccgaccgtagcaccagagtcgcgggtcctgcagtgccccagaagccgcacgtataactccctcggcgggtaactcattcgactgtggagttcttttaattcttatgaaagatttcaaatcctctggaagccaaaatgggacacagtaaacagattcgaattttacttctgaacgaaatggagaaactggaaaagaccctcttcagacttgaacaagggtatgagctacagttccgattaggcccaactttacagggaaaagcagttaccgtgtatacaaattacccatttcctggagaaacatttaatagagaaaaattccgttctctggattgggaaaatccaacagaaagagaagatgattctgataaatactgtaaacttaatctgcaacaatctggttcatttcagtattatttccttcaaggaaatgagaaaagtggtggaggttacatagttgtggaccccattttacgtgttggtgctgataatcatgtgctacccttggactgtgttactcttcagacatttttagctaagtgtttgggaccttttgatgaatgggaaagcagacttagggttgcaaaagaatcaggctacaacatgattcattttaccccattgcagactcttggactatctaggtcatgctactcccttgccaatcagttagaattaaatcctgacttttcaagacctaatagaaagtatacctggaatgatgttggacagctagtggaaaaattaaaaaaggaatggaatgttatttgtattactgatgttgtctacaatcatactgctgctaatagtaaatggatccaggaacatccagaatgtgcctataatcttgtgaattctccacacttaaaacctgcctgggtcttagacagagcactttggcgtttctcctgtgatgttgcagaagggaaatacaaagaaaagggaatacctgctttgattgaaaatgatcaccatatgaattccatccgaaaaataatttgggaggatatttttccaaagcttaaactctgggaatttttccaagtagatgtcaacaaagcggttgagcaatttagaagacttcttacacaagaaaataggcgagtaaccaagtctgatccaaaccaacaccttacgattattcaagatcctgaatacagacggtttggctgtactgtagatatgaacattgcactaacgactttcataccacatgacaaggggccagcagcaattgaagaatgctgtaattggtttcataaaagaatggaggaattaaattcagagaagcatcgactcattaactatcatcaggaacaggcagttaattgccttttgggaaatgtgttttatgaacgactggctggccatggtccaaaactaggacctgtcactagaaagcatcctttagttaccaggtattttactttcccatttgaagagatagacttctccatggaagaatctatgattcatctgccaaataaagcttgttttctgatggcacacaatggatgggtaatgggagatgatcctcttcgaaactttgctgaaccgggttcagaagtttacctaaggagagaacttatttgctggggagacagtgttaaattacgctatgggaataaaccagaggactgtccttatctctgggcacacatgaaaaaatacactgaaataactgcaacttatttccagggagtacgtcttgataactgccactcaacacctcttcacgtagctgagtacatgttggatgctgctaggaatttgcaacccaatttatatgtagtagctgaactgttcacaggaagtgaagatctggacaatgtctttgttactagactgggcattagttccttaataagagaggcaatgagtgcatataatagtcatgaagagggcagattagtttaccgatatggaggagaacctgttggatcctttgttcagccctgtttgaggcctttaatgccagctattgcacatgccctgtttatggatattacgcatgataatgagtgtcctattgtgcatagatcagcgtatgatgctcttccaagtactacaattgtttctatggcatgttgtgctagtggaagtacaagaggctatgatgaattagtgcctcatcagatttcagtggtttctgaagaacggttttacactaagtggaatcctgaagcattgccttcaaacacaggtgaagttaatttccaaagcggcattattgcagccaggtgtgctatcagtaaacttcatcaggagcttggagccaagggttttattcaggtgtatgtggatcaagttgatgaagacatagtggcagtaacaagacactcacctagcatccatcagtctgttgtggctgtatctagaactgctttcaggaatcccaagacttcattttacagcaaggaagtgcctcaaatgtgcatccctggcaaaattgaagaagtagttcttgaagctagaactattgagagaaacacgaaaccttataggaaggatgagaattcaatcaatggaacaccagatatcacagtagaaattagagaacatattcagcttaatgaaagtaaaattgttaaacaagctggagttgccacaaaagggcccaatgaatatattcaagaaatagaatttgaaaacttgtctccaggaagtgttattatattcagagttagtcttgatccacatgcacaagtcgctgttggaattcttcgaaatcatctgacacaattcagtcctcactttaaatctggcagcctagctgttgacaatgcagatcctatattaaaaattccttttgcttctcttgcctccagattaactttggctgagctaaatcagatcctttaccgatgtgaatcagaagaaaaggaagatggtggagggtgctatgacnnnnnnnnnnnnnnnnnncttaaatatgcaggtcttcaaggtttaatgtctgtattggcagaaataagaccaaagaatgacttggggcatcctttttgtaataatttgagatctggagattggatgattgactatgtcagtaaccggcttatttcacgatcaggaactattgctgaagttggtaaatggttgcaggctatgttcttctacctgaagcagatcccacgttaccttatcccatgttactttgatgctatattaattggtgcatataccactcttctggatacagcatggaagcagatgtcaagctttgttcagaatggttcaacctttgtgaaacacctttcattgggttcagttcaactgtgtggagtaggaaaattcccttccctgccaattctttcacctgccctaatggatgtaccttataggttaaatgagatcacaaaagaaaaggagcaatgttgtgtttctctagctgcaggcttacctcatttttcttctggtattttccgctgctggggaagggatacttttattgcacttagaggtatactgctgattactggacgctatgtagaagccaggaatattattttagcatttgcgggtaccctgaggcatggtctcattcctaatctactgggtgaagggatttatgccagatacaattgtcgggatgctgtgtggtggtggctgcagtgtatccaggattactgtaaaatggttccaaatggtctagacattctcaagtgcccagtttccagaatgtatcctacagatgattctgctcctttgcctgctggcacactggatcagccattgtttgaagtcatacaggaagcaatgcaaaaacacatgcagggcatacagttccgagaaaggaatgctggtccccagatagatcgaaacatgaaggacgaaggttttaatataactgcaggagttgatgaagaaacaggatttgtttatggaggaaatcgtttcaattgtggcacatggatggataaaatgggagaaagtgacagagctagaaacagaggaatcccagccacaccaagagatgggtctgctgtggaaattgtgggcctgagtaaatctgctgttcgctggttgctggaattatccaaaaaaaatattttcccttatcatgaagtcacagtaaaaagacatggaaaggctataaaggtctcatatgatgagtggaacagaaaaatacaagacaactttgaaaagctatttcatgtttccgaagacccttcagatttaaatgaaaagcatccaaatctggttcacaaacgtggcatatacaaagatagttatggagcttcaagtccttggtgtgactatcagctcaggcctaattttaccatagcaatggttgtggcccctgagctctttactacagaaaaagcagggaaagctttggagattgcagaaaaaaaattgcttggtccccttggcatgaaaactttagatccagatgatatggtttactgtggaatttatgacaatgcattagacaatgacaactacaatcttgctaaaggtttcaattatcaccaaggacctgagtggctgtggcctattgggtattttcttcgtgcaaaattatatttttccagattgatgggcccggagactactgcaaagactatagttttggttaaaaatgttctttcccgacattatgttcatcttgagagatccccttggaaaggacttccagaactgaccaatgagaatgcccagtactgtcctttcagctgtgaaacacaagcctggtcaattgctactattcttgagacactttatgatttatagtttattacagatattaagtatgcaattactgtattataggatgcaaggtcatcatatgtaaatgctatatgcacaggctcaagttgttttaaaaatctcatttattataatattgatgctcaattaggtaagattgtaaaagcattgattttttttaatgtacagaggtagatttcaatttgaatcagaaagaaatatcattaccaatgaaatgtgtttgagttcagtaagaattattcaaatgcctagaaatccatagtttggaaaataaaaatcatgtcatcttctatttgtacagaaatgaaaataaaatatgaaaataatgaaagaaatgaaaagatagcttttaattgtggtatatataatcttcagtaacaatacatactgaatacgctgtggttcattaatattaacaccacgtactatagtattcttagaatacagtgctcactgcatttaataaatatttaataaatgatgaatgatagaagtttccatctacaatatatgttcctaaatggagcacagatgttcaaactatgctttcattttttcactgatatattaatttttgtgtaatgaatgccaacagtatattttatatgatttacttatgtgaggaaacatgcaaagcattaggaaatttatttcctaaaaacagttttgtaaaattagtattgagttctattgagtattataagatagcttacattttcaaaatggaaattgtcggtcatatttctagaactttaaagaaaaaagaatgttatattagttttctaaaactcaactatctttagtcatgttcaaaaatctattgctagatcatagtagatactggttttctattaactcaaaacctacattgacaagtttaacattgagaagaatcttaacaaaaatatggatatgaattcagtagatatcttaaattcaataaaatcactggaagtttttcatgataacttattttaagatgccttaaaaatcttaaagtcacaaaaggaaaaaggtttttaacatttacatgagttaacattttttcatagaacttatttcctagatagaattttttactgttttttactgttttcttaagaaaacagttaaatcattatgcattcagttggaagaaagtagtggcaagaattctttcattgctatataatattcagtggctcatttatacctaataaaataatggtattttaaaataatgctactttcaaagtagcatttttttagttagtttacaggttacatacccaaaaccttaactatgactaagaaattaaagaagaaaaccagcaaactaaaacttctgggcagcaaaaatatataaatgcttcagatgtcaaatacccatgcttgaaagctcgtgtaatttactttaagattatctgcctgctcttcttcaaagctgaccttgctttagaaatagttttaactagcttagttttctggtttccaaaactaaaatagattaaatcctacaaatttaaggacagttgtgacagtaatctgaccactatctataaatacattggacattggtttccaaatctccctttctcttcagttccttccttgttcaatatatacccttctctaaactgtgcgggtaaaaggaatgactgtccttgagagaaccattagtttatcaaaggtttatgtagttttgttgctgtaccctaactttgatattcagggaggtaggaaaggtaacagaaaaccagcatatttaatcaaagcaagaagtaatcgctgacagttaaatgtgaccaaaaaaattaaaagttcacaatttttttaatgtagccatttggggttatctctagtaaggcagatacccacgttggtaaatttttaggatattgtgttgcactagaaaactaagtggttcatatttctaatgaggaagattaatgaaagaacattgttatattctgcgtggtatattttaaagtttaagaaggcatgttaaacattatttcctctatggtagttaaaatacagaattagatttttaacaggtgtcatttgactaaacgtttcggtagaatgcttcatacttgagtgatgctggataaggtattgtatttcaacaatggactatgccttggtttttcactaatcaaaatcaaaattactctttaacatgataaatgaatttaccagtttagtatgctgtggtattttaataagttttcaaagataattgggaaaacatgagactggtcatattgatgaatattgtaacatgtgaattgtgatccatttctgatatgtcttgaactactgtgtctagtgggcaaatgtcattgttacctctgtgtgttaagaaaataaaaatattttctaaaggtcgaaaaaaaaaaaaaaaaaaa

SEQ ID NO: 5451 - DNA, 2542 bp, Homo sapiens
ctttcaccgggtgcctcccccgggctgcatagtggtggggggcgggggtatggggagccagtccctggcagcgccaaagagtgggaggaggcggtgacagccgcggggagtggggcgggaggagagagtgccgctcgtgctcggctccgctgctcagtctccgatctgcctcctggctctgcgctcacctgctgcctagtgttccctctcctgctccaggacctccgggtagacctcagaccccgggcccattcccagactcagcctcagcccggacttccccagccccgacagcacagtaggccgccagggggcgccgtgtgagcgccctatcccggccacccggcgccccctcccacggcccgggcgggagcggggcgccgggggccatgcggggccagggccgcaaggagagtttgtccgattcccgagacctggacggctcctacgaccagctcacgggccaccctccagggcccactaaaaaagcgctgaagcagcgattcctcaagctgctgccgtgctgcgggccccaagccctgccctcagtcagtgaaaacagcgtggacgatgaatttgaattgtccaccgtgtgtcaccggcctgagggtctggagcagctgcaggagcaaaccaaattcacgcgcaaggagttgcaggtcctgtaccggggcttcaagaacgaatgtcccagcggaattgtcaatgaggagaacttcaagcagatttactcccagttctttcctcaaggagactccagcacctatgccacttttctcttcaatgcctttgacaccaaccatgatggctcggtcagttttgaggactttgtggctggtttgtccgtgattcttcggggaactgtagatgacaggcttaattgggccttcaacctgtatgaccttaacaaggacggctgcatcaccaaggaggaaatgcttgacatcatgaagtccatctatgacatgatgggcaagtacacgtaccctgcactccgggaggaggccccaagggaacacgtggagagcttcttccagaagatggacagaaacaaggatggtgtggtgaccattgaggaattcattgagtcttgtcaaaaggatgagaacatcatgaggtccatgcagctctttgacaatgtcatctagcccccaggagagggggtcagtgtttcctggggggaccatgctctaaccctagtccaggcggacctcacccttctcttcccaggtctatcctcatcctacgcctccctgggggctggagggatccaagagcttggggattcagtagtccagatctctggagctgaaggggccagagagtgggcagagtgcatctcggggggtgttcccaactcccaccagctctcacccccttcctgcctgacacccagtgttgagagtgcccctcctgtaggaattgagcggttccccacctcctacccctactctagaaacacactagacagatgtctcctgctatggtgcttcccccatccctgacctcataaacatttcccctaagactcccctctcagagagaatgctccattcttggcactggctggcttctcagaccagccattgagagccctgtgggagggggacaagaatgtatagggagaaatcttgggcctgagtcaatggataggtcctaggaggtggctggggttgagaatagaagggcctggacagattatgattgctcaggcataccaggttatagctccaagttccacaggtctgctaccacaggccatcaaaatataagtttccaggctttgcagaagaccttgtctccttagaaatgccccagaaattttccaaaccctcctcggtatccatggagagcctggggccagatatctggctcatctctggcattgcttcctctccttccttcctgcatgtgttggtggtggttgtggtgggggaatgtggatgggggatgtcctggctgatgcctgccaaaatttcatcccaccctccttgcttatcgtccctgttttgagggctatgacttgagtttttgtttcccatgttctctatagacttgggaccttcctgaacttggggcctatcactccccacagtggatgccttagaagggagagggaaggagggaggcaggcatagcatctgaacccagtgtgggggcattcactagaatcttcaatcaacctgggctctccccaccccaccccagataacctcctcagttccctagggtctcttcttgcttgactcaatctacccagagatgccccttagcacacctagagggcagggaccataggacccaggttccaaccccattgtcagcaccccagccatgcggccaccccttagcacacctgctcgtcccatttagcttaccctcccagttggccagaatctgaggggagagcccccagagagcccccttccccatcagaagactgttgactgctttgcattttgggctcttctatatattttgtaaagtaagaaatataccagatctaataaaacacaatggctatgcaaaaaaaaaaaaaaaa

SEQ ID NO: 5452 - DNA, 3253 bp, Homo sapiens
  misc_feature (672)..(700): n is a, c, g, or t
  misc_feature (1233)..(1275): n is a, c, g, or t
ctgagtatttcggcatgaggtggaggacgcggctgcttcaagtccttggctctgatccaggccacagattccaggattctacaggcaggaaacatcttagaaatcagggttgggcaggcaggagccaggagagtagctacaatgacttcaccagtactggtggacatacgagaagaggtgacctgccctatctgcctggagctcctaacagaacccctgagcatagactgtggccacagcttctgccaagcctgcatcacaccaaatggcagggaatcagtgattggtcaagaaggggaaagaagctgccctgtgtgccagaccagctaccagccagggaacctgcggcctaatcggcatctggccaacatagtgaggcggctcagagaggtagtgttgggccctgggaagcagctgaaagcagttctttgtgcagaccatggagaaaaactgcagctcttctgtcaggaggatgggaaggtcatttgctggctttgtgagcggtctcaggagcaccgtggtcaccacacgttcctcgtggaggaggttgcccaggagtaccaggagaagtttcaggagtctctaaagaagctgaagaacgaggagcaggaagctgagaagctaacagcttttatcagagagaagaagacatcctggaagaatcagatggannnnnnnnnnnnnnnnnnnnnnnnnnnnngagtttaatcagctgcgaaatatcctagacagagtggagcaacgggagctgaaaaagctggaacaggaagagaagaaggggctacgaattatagaagaggctgagaatgatctggtccaccagacccagtcgctgcgagagctcatctcggatctggagcgtcgatgtcaggggtcaacaatggagctgctgcaggatgtgagtgatgtcacagaaaggagtgagttctggaccctgaggaagccagaagctctccctacaaagctgagaagtatgttccgagccccagatctgaaaaggatgctgcgagtgtgtagagagctgacagatgtccaaagctactgggttgacgtgaccctgaatccacacacagctaatttaaatcttgtcctggctaaaaaccggagacaagtgaggtttgtgggagctaaagtatctggaccttcctgtctggaaaagcattatgactgtagtgtcctgggctcccagcacttctcctctggtaagcattactgggaggtagatgtggccannnnnnnnnnnnnnnnnnnnnnnnnnnnnnnnnnnnnnnnnnngacctacattctctttcaaccattttgctcaaaatcacagtgcttactccaggtatcagcctcagagtggatactgggtgattgggttacagcataaccatgaatatagggcctatgaggattcttccccttccctgcttctctccatgacagtgccccctcgccgtgttggggttttcttagattatgaggctggtactgtctccttttataatgtcacaaaccatggcttccccatctacactttctctaaatattactttcccactactctttgtccatattttaatccttgcaactgtgtaattcctatgaccctgcgtcgtccaagctcttgaatattcttctgttcccacccacttctgataagtaccctgaggcttatcagcatgtgattctcccttctgatcttctgtttttctgtgttctcaattcttttgttgttttttggtttttgaatcttttttgagatggaatctcgctctgtcgcccaggctggagtgcactggcgcaatctcggctcactgcaacctctgcctcctgggttcaagcgaacctcctgcctcagcatcccaagtagctgggattacaggcacccaccaccatgcccaactaatttttgtatttttatagagatagggtttcaccgtgttggccaggctgatctcgaactcctgaccgcaagtgatccacccgcctcggtctcccaaagtgctgggattacagatgtgagccgccgcgcccagacagttctttcgttttaaacagttactcagtactaggatgcacccagtggtgagagtaagcatctttgactgatgacaggtcttgaggtggatagggggcgctttcagtattttgccattaagcatagtatttgatgcaggttttttttgattgatgcaggggatcaaatttaggaagttctgatctgttaatttactacaagtttttgtataaaatgaaaactcgtattctacctatgtcttttctgtaaattattgagacaattgtgtatcatttttgttctgttaatgtggcttagtacattgatttacttcaatttgttaccacaacttgctgaaatacaccattattatttgttgtatgcaatactggatttattttgataacgtattgtttagattttgttctcatctatgttaatgaaagaaattggcctgtatttttacattcttgtaatatctttgccaggttctataaaatgcaataataagcaaataaattactttgtttttgtataagtatgtataggattgagctctaaaaccaaaccattataatgataatttgggtagcttcaaactcaaattgaagagagtcttcactacaatcttcactacaacctttggccttcctctctacatttaagagtagcaatagaacaataaaaaaaaatacgtctttcaaattaattgcagtaaaaacaaaagagtagtggggagagaaaaacaatccaatacatatttttctctcagaatagaaagaaaacacaaagagaaaatatgaacaatataaagcacttaaaggaagaggatgatttcttccagcttttccacactctctttatgcgcaggaacaaacagctgttgagtgagctgctatgactttggtagagaggtgcaatatgttttttgaaccagctataaaagaaattaagaggtacatgtgagggtagaaacaaatatcaaggatgagaatggcactggctgtcccatatggtatccaggagccaccaatgtctgttgagtacttcatacatgcctagtctgaattgagatgtgctcaatgtataaaatatataccagatttcaaatacctacttcaaaaaataatgtaaaatatctcactaataacttttcctttgtgtattgcaatgataatatgttggctctattggattaaataaagtatgttattcattttaaaaaaaaaaaaaaaaaaaaaaaaaaaaaaa

SEQ ID NO: 5453 - DNA, 1660 bp, Homo sapiens
  misc_feature (1250)..(1318): n is a, c, g, or t
  misc_feature (1381)..(1419): n is a, c, g, or t
ggagagagactcccccgtgggtggggggaaaatttccctcttttgggaggggggggcgccccttgtttttttgtttacacccggggggtgttgccccacattaaaagagtttgcacacacaaatgtggttaggggtccgacccctcaacaagcctttccccgggagtgtctttgggaacggcagggcccttttttccatttgccaagaggccgggctttttcccacccccatccaaatggccccgttgttcccttcttggggtggccggccaacccctgcccttagggggggttaaaaccctttcgccgccagccttgggggcaggaccttacagggttccctggttgcgcttgttttcccgggttttgccctcctttggctgattcaggacgggccggaccgagacaatgactacgggttggcccagcacatcacctatgtggcaccagcacagcgggcagcccccctcccagttttgacctctggacatgaagctcatgaggcgttacatagccatgtgccgcgagaagcagccccatggtgccagagtctctggctgactacatcacagcagcatacgtggagatgaggcgagaggcttgggctagtaaggatgccacctatacttctgcccggaccctgctggctatcctgcgcctttccactgctctggcacgtctgagaatggtggatgtggtggagaaagaagatgtgaatgaagccatcaggctaatggagatgtcaaaggactctcttctaggagacaaggggcagacagctaggactcagagaccagcagatgtgatatttgccaccgtccgtgaactggtctcagggggccgaagtgtccggttctctgaggcagagcagcgctgtgtatctcgtggcttcacacccgcccagttccaggcggctctggatgaatatgaggagctcaatgtctggcaggtcaatgcttcccggacacggatcacttttgtctgattccagcctgcttgcaaccctggggtcctcttgttccctgctggcctgccccttgggaagggaaagtgatccctttgaggggaaggaggagcccctctttctcccatgctgcacttactccttttgctaataaaagtgtttgtagattgtcaaaaaaaaaaaaaaaaaatgacttccattaaaacagggttttgtgcgttttttagattcctgttcgtttttatgctatttcatccactcagtaaattacctgagtaaagtgcannnnnnnnnnnnnnnnnnnnnnnnnnnnnnnnnnnnnnnnnnnnnnnnnnnnnnnnnnnnnnnnnnnnngagaaaacttaaagatggggctcccactttttgagccccccgactccccttatttggtcttannnnnnnnnnnnnnnnnnnnnnnnnnnnnnnnnnnnnnncgcccagaatgaaatgccaggggcctccttgggttttccccctttttccaagcagaaagggcccatacccttagtttccccaacttccccctcctaaaagttcctgggtctaacgggcggtaggacaaatccaccgccaagggggtctctcattacagcgcattcccccaacccttttagcaccaacttttccaaaacccggccccccccccccaaaccttatgtggcctcaccaaaccgg

SEQ ID NO: 5454 - DNA, 2913 bp, Homo sapiens
  misc_feature (216)..(244): n is a, c, g, or t
ttttcccgcgaaactcggcggctgagcgtggaggttcttgtctcccctggtttgtgaagtgcggaaaaccagaggcgcagtcatgtcgggattcgacgatcctggcattttctacagcgacagcttcgggggcgacgcccaggccgacgaggggcaggcccgcaaatcgcagctgcagaggcgcttcaaggagttcctgcggcagtaccgagtggnnnnnnnnnnnnnnnnnnnnnnnnnnnnnaatacagggatgaactcaagcggcattacaacctgggggagtactggattgaggtggagatggaggatctggccagctttgatgaggacctggccgactacttgtacaagcagccagccgagcacctgcagctgctggaggaagctgccaaggaggtagctgatgaggtgacccggccccggccttctggggaggaggtgctccaggacatccaggtcatgctcaagtcggacgccagcccttccagcattcgtagcctgaagtcggacatgatgtcacacctggtgaagatccctggcatcatcatcgcggcctctgcggtccgtgccaaggccacccgcatctctatccagtgccgcagctgccgcaacaccctcaccaacattgccatgcgccctggcctcgagggctatgccctgcccaggaagtgcaacacagatcaggctgggcgccccaaatgcccattggacccgtacttcatcatgcccgacaaatgcaaatgcgtggacttccagaccctgaagctgcaggagctgcctgatgcagtcccccacggggagatgcccagacacatgcagctctactgcgacaggtacctgtgtgacaaggtcgtccctgggaacagggttaccatcatgggcatctactccatcaagaagtttggcctgactaccagcaggggccgtgacagggtgggcgtgggcatccgaagctcctacatccgtgtcctgggcatccaggtggaccacgatgctctggcgcagctttgctggggccgtgagcccccaggaggaggaggagttccgtcgcctggctgccctcccaaatgtctatgaggtcatctccaagagcatcgccccctccatctttgggggcacagacatgaagaaggccattgcctgcctgctctttgggggctcccgaaagaggctccctgatggacttactcgccgaggagacatcaacctgctgatgctaggggaccctgggacagccaagtcccagcttctgaagtttgtggagaagtgttctcccattggggtatacacgtctgggaaaggcagcagcgcagctggactgacagcctcggtgatgagggacccttcgtcccggaatttcatcatggagggcggagccatggtcctggccgatggtggggtcgtctgtattgacgagtttgacaagatgcgagaagatgaccgtgtggcaatccacgaagccatggagcagcagaccatctctatcgccaaggctgggatcaccaccaccctgaactcccgctgctccgtcctggctgctgccaactcagtgttcggccgctgggatgagacgaagggggaggacaacattgacttcatgcccaccatcttgtcgcgcttcgacatgatcttcatcgtcaaggatgagcacaatgaggagagggatgtgatgctggccaagcatgtcatcactctgcacgtgagcgcactgacacagacacaggctgtggagggcgagattgacctggccaagctgaagaagtttattgcctactgccgagtgaagtgtggcccccggctgtcagcagaggctgcagagaaactgaagaaccgctacatcatcatgcggagcggggcccgtcagcacgagagggacagtgaccgccgctccagcatccccatcactgtgcggcagctggaggccattgtgcgcatcgcggaagccctcagcaagatgaagctgcagcccttcgccacagaggcagatgtggaggaggccctgcggctcttccaagtgtccacgttggatgctgccttgtccggtaccctgtcaggggtggagggcttcaccagccaggaggaccaggagatgctgagccgcatcgagaagcagctcaagcgccgctttgccattggctcccaggtgtctgagcacagcatcatcaaggacttcaccaagcagaaatacccggagcacgccatccacaaggtgctgcagctcatgctgcggcgcggcgagatccagcatcgcatgcagcgcaaggttctctaccgcctcaagtgagtcgcgccgcctcactggactcatggactcgcccacgcctcgcccctcctgccgctgcctgccattgacaatgttgctgggacctctgcctccccactgcagccctcgaacttcccaggcaccctcctttctgccccagaggaaggagctgtagtgtcctgctgcctctgggcgcccgcctctagcgcggttctgggaagtgtgcttttggcatccgttaataataaagccacggtgtgttcaggtaaaaaaaaaaaaaaaaaaaaaaaaaaaaaaaaaaaaaaaaaaaaaaaaaaaaaaaaaaaaaaataagtgtgagggaaccagggtctggaggcagactggcagcggtttctgacttggatcctgcactcagacttctgggtaagtcacgtgacttgagtgcttccggtttcttcatctgttaagcgggggtcataaagcatcccttgatgctggaatccagtggagaccccggatgggggaacggttctcaaagtgtgggatttgacccgctcactgttcccaaacttttgggcggccgcaccgcggcggggcgacgctcgttatggccctccgcgctatcccatgaccggggtcaacctccgtggtagcgagactgggga

SEQ ID NO: 5455 - DNA, 10600 bp, Homo sapiens
  misc_feature (2737)..(2753): n is a, c, g, or t
  misc_feature (2993)..(3016): n is a, c, g, or t
  misc_feature (3317)..(3349): n is a, c, g, or t
  misc_feature (4297)..(4323): n is a, c, g, or t
  misc_feature (4380)..(4411): n is a, c, g, or t
  misc_feature (5394)..(5430): n is a, c, g, or t
  misc_feature (6830)..(6843): n is a, c, g, or t
  misc_feature (6979)..(6996): n is a, c, g, or t
  misc_feature (7833)..(8011): n is a, c, g, or t
ggagaagcgggcgaattgggcaccggtggcggctgcgggcagtttgaattagactctgggctccagcccgccgaagccgcgccagaactgtactctccgagaggtcgttttcccgtccccgagagcaagtttatttacaaatgttggagtaataaagaaggcagaacaaaatgagctgggctttggaagaatggaaagaagggctgcctacaagaactcttcagaaaattcaagagcttgaaggacagcttgacaaactgaagaaggaaaagcagcaaaggcagtttcagcttgacagtctcgaggctgcgccgcagaagcaaacacagaaggttgaaaatgaaaaaaccgagggtacaaacctgaaaagggagaatcaaagattgatggaaatatgtgaaagtctggagaaaactaagcagaagatttctcatgaacttcaagtcaaggagtcacaagtgaatttccaggaaggacaactgaattcaggcaaaaaacaaatagaaaaactggaacaggaacttaaaaggtgtaaatctgagcttgaaagaagccaacaagctgcgcagtctgcagatgtctctctgaatccatgcaatacaccacaaaaaatttttacaactccactaacaccaagtcaatattatagtggttccaagtatgaagatctaaaagaaaaatataataaagaggttgaagaacgaaaaagattagaggcagaggttaaagccttgcaggctaaaaaagcaagccagactcttccacaagccaccatgaatcaccgcgacattgcccggcatcaggcttcatcatctgtgttctcatggcagcaagagaagaccccaagtcatctttcatctaattctcaaagaactccaattaggagagatttctctgcatcttacttttctggggaactagaggtgactccaagtcgatcaactttgcaaatagggaaaagagatgctaatagcagtttctttggcaattctagcagtcctcatcttttggatcaattaaaagcgcagaatcaagagctaagaaacaagattaatgagttggaactacgcctgcaaggacatgaaaaagaaatgaaaggccaagtgaataagtttcaagaactccaactccaactggagaaagcaaaagtggaattaattgaaaaagagaaagttttgaacaaatgtagggatgaactagtgagaacaacagcacaatacgaccaggcgtcaaccaagtatactgcattggaacaaaaactgaaaaaattgacggaagatttgagttgtcagcgacaaaatgcagaaagtgccagatgttctctggaacagaaaattaaggaaaaagaaaaggagtttcaagaggagctctcccgtcaacagcgttctttccaaacactggaccaggagtgcatccagatgaaggccagactcacccaggagttacagcaagccaagaatatgcacaacgtcctgcaggctgaactggataaactcacatcagtaaagcaacagctagaaaacaatttggaagagtttaagcaaaagttgtgcagagctgaacaggcgttccaggcgagtcagatcaaggagaatgagctgaggagaagcatggaggaaatgaagaaggaaaacaacctccttaagagtcactctgagcaaaaggccagagaagtctgccacctggaggcagaactcaagaacatcaaacagtgtttaaatcagagccagaattttgcagaagaaatgaaagcgaagaatacctctcaggaaaccatgttaagagatcttcaagaaaaaataaatcagcaagaaaactccttgactttagaaaaactgaagcttgctgtggctgatctggaaaagcagcgagattgttctcaagaccttttgaagaaaagagaacatcacattgaacaacttaatgataagttaagcaagacagagaaagagtccaaagccttgctgagtgctttagagttaaaaaagaaagaatatgaagaattgaaagaagagaaaactctgttttcttgttggaaaagtgaaaacgaaaaacttttaactcagatggaatcagaaaaggaaaacttgcagagtaaaattaatcacttggaaacttgtctgaagacacagcaaataaaaagtcatgaatacaacgagagagtaagaacgctggagatggacagagaaaacctaagtgtcgagatcagaaaccttcacaacgtgttagacagtaagtcagtggaggtagagacccagaaactagcttatatggagctacagcagaaagctgagttctcagatcagaaacatcagaaggaaatagaaaatatgtgtttgaagacttctcagcttactgggcaagttgaagatctagaacacaagcttcagttactgtcaaatgaaataatggacaaagaccggtgttaccaagacttgcatgccgaatatgagagcctcagggatctgctaaaatccaaagatgcttctctggtgacaaatgaagatcatcagagaagtcttttggcttttgatcagcagcctgccatgcatcattcctttgcaaatataattggagaacaaggaagcatgccttcagagaggagtgaatgtcgtttagaagcagaccaaagtccgaaaaattctgccatcctacaaaatagagttgattcacttgaattttcattagagtctcaaaaacagatgaactcagacctgcaaaagcagtgtgaagagtnnnnnnnnnnnnnnnnngaaatagaagaaaatctcatgaaagcagaacagatgcatcaaagttttgtggctgaaacaagtcagcgcattagtaagttacaggaagacacttctgctcaccagaatgttgttgctgaaaccttaagtgcccttgagaacaaggaaaaagagctgcaacttttaaatgataaggtagaaactgagcaggcagagattcaagaattaaaaaagagcaaccatctacttgaagactctctnnnnnnnnnnnnnnnnnnnnnnnnaaaccctaagcttggagaagaaagaaatgagttccatcatttctttaaataaaagggaaattgaagagctgacccaagagaatgggactcttaaggaaattaatgcatccttaaatcaagagaagatgaacttaatccagaaaagtgagagttttgcaaactatatagatgaaagggagaaaagcatttcagagttatctgatcagtacaagcaagaaaaacttattttactacaaagatgtgaagaaaccggaaatgcatatgaggatcttagtcaaaaatacaaagcagcacaggaaannnnnnnnnnnnnnnnnnnnnnnnnnnnnnnnntgaatgcactagtctttgtgaaaataggaaaaatgagttggaacagctaaaggaagcatttgcaaaggaacaccaagaattcttaacaaaattagcatttgctgaagaaagaaatcagaatctgatgctagagttggagacagtgcagcaagctctgagatctgagatgacagataaccaaaacaattctaagagcgaggctggtggtttaaagcaagaaatcatgactttaaaggaagaacaaaacaaaatgcaaaaggaagttaatgacttattacaagagaatgaacagctgatgaaggtaatgaagactaaacatgaatgtcaaaatctagaatcagaaccaattaggaactctgtgaaagaaagagagagtgagagaaatcaatgtaattttaaacctcagatggatcttgaagttaaagaaatttctctagatagttataatgcgcagttggtgcaattagaagctatgctaagaaataaggaattaaaacttcaggaaagtgagaaggagaaggagtgcctgcagcatgaattacagacaattagaggagatcttgaaaccagcaatttgcaagacatgcagtcacaagaaattagtggccttaaagactgtgaaatagatgcggaagaaaagtatatttcagggcctcatgagttgtcaacaagtcaaaacgacaatgcacaccttcagtgctctctgcaaacaacaatgaacaagctgaatgagctagagaaaatatgtgaaatactgcaggctgaaaagtatgaactcgtaactgagctgaatgattcaaggtcagaatgtatcacagcaactaggaaaatggcagaagaggtagggaaactactaaatgaagttaaaatattaaatgatgacagtggtcttctccatggtgagttagtggaagacataccaggaggtgaatttggtgaacaaccaannnnnnnnnnnnnnnnnnnnnnnnnnncattggacgagagtaattcctacgagcacttgacattgtcagacaaagaagttcaannnnnnnnnnnnnnnnnnnnnnnnnnnnnnnnatctttacaaagtgaacacaaaattttacatgatcagcactgtcagatgagctctaaaatgtcagagctgcagacctatgttgactcattaaaggccgaaaatttggtcttgtcaacgaatctgagaaactttcaaggtgacttggtgaaggagatgcagctgggcttggaggaggggctcgttccatccctgtcatcctcttgtgtgcctgacagctctagtcttagcagtttgggagactcctccttttacagagctcttttagaacagacaggagatatgtctcttttgagtaatttagaaggggctgtttcagcaaaccagtgcagtgtagatgaagtattttgcagcagtctgcagacctatgttgactcattaaaggccgaaaatttggtcttgtcaacgaatctgagaaactttcaaggtgacttggtgaaggagatgcagctgggcttggaggaggggctcgttccatccctgtcatcctcttgtgtgcctgacagctctagtcttagcagtttgggagactcctccttttacagagctcttttagaacagacaggagatatgtctcttttgagtaatttagaaggggttgtttcagcaaaccagtgcagtgtagatgaagtattttgcagcagtctgcaggaggagaatctgaccaggaaagaaaccccttcggccccagcgaagggtgttgaagagcttgagtccctctgtgaggtgtaccggcagtccctcgagaagctagaagagaaaatggaaagtcaagggattatgaaaaataaggaaattcaagagctcgagcagttattaagttctgaaaggcaagagcttgactgccttaggaagcagtatttgtcagaaaatgaacagtggcaacagaagctgacaagcgtgactctggagatggagtccaagttggcggcagaaaagaaacagacggaacaactgtcacttgagctggaagtagcacgactcnnnnnnnnnnnnnnnnnnnnnnnnnnnnnnnnnnnnnttgcttggcatcgacacagaagatgctattcaaggccgaaatgagagctgtgacatatcaaaagaacatacttcagaaactacagaaagaacaccaaagcatgatgttcatcagatttgtgataaagatgctcagcaggacctcaatctagacattgagaaaataactgagactggtgcagtgaaacccacaggagagtgctctggggaacagtccccagataccaattatgagcctccaggggaagataaaacccagggctcttcagaatgcatttctgaattgtcattttctggtcctaatgctttggtacctatggatttcctggggaatcaggaagatatccataatcttcaactgcgggtaaaagagacatcaaatgagaatttgagattacttcatgtgatagaggaccgtgacagaaaagttgaaagtttgctaaatgaaatgaaagaattagactcaaaactccatttacaggaggtacaactaatgaccaaaattgaagcatgcatagaattggaaaaaatagttggggaacttaagaaagaaaactcagatttaagtgaaaaattggaatatttttcttgtgatcaccaggagttactccagagagtagaaacttctgaaggcctcaattctgatttagaaatgcatgcagataaatcatcacgtgaagatattggagataatgtggccaaggtgaatgacagctggaaggagagatttcttgatgtggaaaatgagctgagtaggatcagatcggagaaagctagcattgagcatgaagccctctacctggaggctgacttagaggtagttcaaacagagaagctatgtttagaaaaagacaatgaaaataagcagaaggttattgtctgccttgaagaagaactctcagtggtcacaagtgagagaaaccagcttcgtggagaattagatactatgtcaaaaaaaaccacggcactggatcagttgtctgaaaaaatgaaggagaaaacacaagagcttgagtctcatcaaagtgagtgtctccattgcattcaggtggcagaggcagaggtgaaggaaaagacggaactccttcagactttgtcctctgatgtgagtgagctgttaaaagacaaaactcatctccaggaaaagctgcagagtttggaaaaggactcacaggcactgtctttgacaaaatgtgagctggaaaaccaaattgcacaactgaataaagagaaagaattgcttgtcaaggaatctgaaagcctgcaggccagactgagtgaatcagattatgaaaagctgaatgtctccaaggccttggaggccgcactggtggagaaaggtgagttcgcattgaggctgagctcaacacaggagggaagttgcatcagctgaagaaagannnnnnnnnnnnnnagagttcgcattgaggccgatgaaaagaagcagctgcacatcgcagagaaactgaaagaacgcgagcgggagaatgattcacttaaggataaagttgagaaccttgaaagggaattgcagatgtcagaagaaaacnnnnnnnnnnnnnnnnnntgatgccgagaattccaaagcagaagtagagactctaaaaacacaaatagaagagatggccagaagcctgaaagtttttgaattagaccttgtcacgttaaggtctgaaaaagaaaatctgacaaaacaaatacaagaaaaacaaggtcagttgtcagaactagacaagttactctcttcatttaaaagtctgttagaagaaaaggagcaagcagagatacagatcaaagaagaatctaaaactgcagtggagatgcttcagaatcagttaaaggagctaaatgaggcagtagcagccttgtgtggtgaccaagaaattatgaaggccacagaacagagtctagacccaccaatagaggaagagcatcagctgagaaatagcattgaaaagctgagagcccgcctagaagctgatgaaaagaagcagctctgtgtcttacaacaactgaaggaaagtgagcatcatgcagatttacttaagggtagagtggagaaccttgaaagagagctagagatagccaggacaaaccaagagcatgcagctcttgaggcagagaattccaaaggagaggtagagaccctaaaagcaaaaatagaagggatgacccaaagtctgagaggtctggaattagatgttgttactataaggtcagaaaaagaagatctgacaaatgaattacaaaaagagcaagagcgaatatctgaattagaaataataaattcatcatttgaaaatattttgcaagaaaaagagcaagagaaagtacagatgaaagaaaaatcaagcactgccatggagatgcttcaaacacaattaaaagagctcaatgagagagnnnnnnnnnnnnnnnnnnnnnnnnnnnnnnnnnnnnnnnnnnnnnnnnnnnnnnnnnnnnnnnnnnnnnnnnnnnnnnnnnnnnnnnnnnnnnnnnnnnnnnnnnnnnnnnnnnnnnnnnnnnnnnnnnnnnnnnnnnnnnnnnnnnnnnnnnnnnnnnnnnnnnnnnnnnnnnnnnnncctcattcaagaagtagaagatggcaagcagaaactggagaagaaggatgaagaaatcagtagactgaaaaatcaaattcaagaccaagagcagcttgtctctaaactgtcccaggtggaaggagagcaccaactttggaaggagcaaaacttagaactgagaaatctgacagtggaattggagcagaagatccaagtgctacaatccaaaaatgcctctttgcaggacacattagaagtgctgcagagttcttacaagaatctagagaatgagcttgaattgacaaaaatggacaaaatgtcctttgttgaaaaagtaaacaaaatgactgcaaaggaaactgagctgcagagggaaatgcatgagatggcacagaaaacagcagagctgcaagaagaactcagtggagagaaaaataggctagctggagagttgcagttactgttggaagaaataaagagcagcaaagatcaattgaaggagctcacactagaaaatagtgaattgaagaagagcctagattgcatgcacaaagaccaggtggaaaaggaagggaaagtgagagaggaaatagctgaatatcagctacggcttcatgaagctgaaaagaaacaccaggctttgcttttggacacaaacaaacagtatgaagtagaaatccagacataccgagagaaattgacttctaaagaagaatgtctcagttcacagaagctggagatagaccttttaaagtctagtaaagaagagctcaataattcattgaaagctactactcagattttggaagaattgaagaaaaccaagatggacaatctaaaatatgtaaatcagttgaagaaggaaaatgaacgtgcccaggggaaaatgaagttgttgatcaaatcctgtaaacagctggaagaggaaaaggagatactgcagaaagaactctctcaacttcaagctgcacaggagaagcagaaaacaggtactgttatggataccaaggtcgatgaattaacaactgagatcaaagaactgaaagaaactcttgaagaaaaaaccaaggaggcagatgaatacttggataagtactgttccttgcttataagccatgaaaagttagagaaagctaaagagatgttagagacacaagtggcccatctgtgttcacagcaatctaaacaagattcccgagggtctcctttgctaggtccagttgttccaggaccatctccaatcccttctgttactgaaaagaggttatcatctggccaaaataaagcttcaggcaagaggcaaagatccagtggaatatgggagaatggtggaggaccaacacctgctaccccagagagcttttctaaaaaaagcaagaaagcagtcatgagtggtattcaccctgcagaagacacggaaggtactgagtttgagccagagggacttccagaagttgtaaagaaagggtttgctgacatcccgacaggaaagactagcccatatatcctgcgaagaacaaccatggcaactcggaccagcccccgcctggctgcacagaagttagcgctatccccactgagtctcggcaaagaaaatcttgcagagtcctccaaaccaacagctggtggcagcagatcacaaaaggtcaaagttgctcagcggagcccagtagattcaggcaccatcctccgagaacccaccacgaaatccgtcccagtcaataatcttcctgagagaagtccgactgacagccccagagagggcctgagggtcaagcgaggccgacttgtccccagccccaaagctggactggagtccaagggcagtgagaactgtaaggtccagtgaaggcactttgtgtgtcagtacccctgggaggtgccagtcattgaatagataaggctgtgcctacaggacttctctttagtcagggcatgctttattagtgaggagaaaacaattccttagaagtcttaaatatattgtactctttagatctcccatgtgtaggtattgaaaaagtttggaagcactgatcacctgttagcattgccattcctctactgcaatgtaaatagtataaagctatgtatataaagctttttggtaatatgttacaattaaaatgacaagcactatatcaaaaaaaaaagaagacacaacacaccccacgcaccagcccccgcgccccccccccacgcccttcccccacgcgcaccctccgccccgcccatgcccctccctccccccgcaccgctccgaacccccggccgcggcccccatcaccatcttccgccgcgcgcccttgtccccctgcctttctatgcccgcgggcccgcgctgtcgggctctttccctccgccacggggccgttttccactcgccgtgtcagcacgcaccctttgccgctgttggagccaccctctggggggtggtcgctgccccccctggtcgtgcggtgcgcgacacaccccccgtccttgccgccacccctgcggtgcccgtggtccgttcttttttcgcgggtcacgggggcctcgcctcccggtcgcccctcgtctgcctctgccctgtccgtgtctgttcgcgcgtcctctcctccctgg

SEQ ID NO: 5456 - DNA, 2590 bp, Homo sapiens
agcggagtgagagagcggcgagggggcgcccggccggactctgagcctagtcctctcgcgctgcggccgcccgcgcctcctcggccgcctgtcgggcatgaaaaccaaattctgcaccgggggcgaggcggagccctcgccgctcgggctgctgctgagctgcggtagcggcagcgcggccccggcgcccggcgtggggcagcagcgcgacgccgccagcgacctcgagtccaagcagctgggcggccaacagccgccgctcgcgctgccccctccgccgccgctgccgctgccgctgccgctgccccagcccccgccgccgcagccgcccgcagacgagcagccggagccccggacgcggcgcagggcctatctgtggtgcaaggagttcctgcccggcgcctggcggggcctccgcgaggacgagttccacatcagtgtcatcagaggcggccttagcaacatgctgttccagtgctccctacctgacaccacagccacccttggtgatgagcctcggaaagtgctcctgcggctgtatggagcgattttgcaggtgggggctgaggccatggttctggagagcgttatgtttgccattctcgcagagaggtcacttgggccaaaactctatggcatctttccccaaggccgactggagcagttcatcccgagccggcgattagatactgaagaattaggtttgccagatatttctgcagaaatcgccgagaaaatggctacatttcatggtatgaaaatgccattcaataaggaaccaaaatggctttttggcacaatggaaaagtatctaaaggaagtgctgagaattaaatttactgaggaatccagaattaaaaagctccacaaattgctcagttacaatctgcccttggaactggaaaacctgagatcattgcttgaatctactccatctccagttgtattttgtcataatgactgtcaagaaggtaatatcttgttgctggaaggccgagagaattctgaaaaacagaaactgatgctcattgatttcgaatacagcagttacaattacaggggattcgacattggaaatcacttctgtgagtggatgtatgattatagctatgaaaaatacccttttttcagagcaaacatccggaagtatcccaccaagaaacaacagctccattttatttccagttacttgcctgcattccaaaatgactttgaaaacctcagtactgaagaaaaatccattataaaagaagaaatgttgcttgaagttaataggtttgcccttgcatctcatttcctctggggactgtggtccattgtacaagccaagatttcatctattgaatttgggtacatggactacgcccaagcaaggtttgatgcctatttccaccagaagaggaagcttggggtgtgactgtggggaggactccatccacctcatcactggactgcatggggaggcagcagagcggggtcccctctgtgcttcgactactgctcctgtggcaggaggctttgggtggctcactactgaacacatgtgtatgatactaaagacggtattaaaatggagcgacgtttaaaaaaaaaaaaaaaaaaaaaaaaaaaaaaaaaaaaaaaaaaagatcgggaagcagaaatatagtgcaatagtgcaacatctctgaatccttttaatctagagaaggcatttcatatttgggggctaaggtttccagtcagatgaggcaaacagcaagagtaagcagtgttacttgcaggtactttggttaatgttgatttaaattttcatgaatgtgctggtgaacactgtgaccaggcttttgtagatggcgatgtgttatagacggtgctcactcccaagggacagcaagtgagcagagatgtactgcaaagtcgccagtcactgctgcaaggtggcctctgcctggggcctccagaagctgctcctttaccctcttggtcccatggctgaagctggagcagcggattgctctggagcagccaaggccgccagcgtgtggagcagagctctcccctcctgctgggcgtgtgtgacactgatgagtttcactgtactgcatgtgacttctcccctgcccttcctcctgatggagtgtgcagacagccatgcgtggccacgggggcagtgtgaggacctccctgtctcccggctcccctcccaggggagccagctgcttgacctagctctttgggcctctcctgccctctgctctgcctggagtgtcggatcctgtgagtaggctgggcctcccctgggcagggttctccaagggcccggtttcccggcccttacctttcctgatgcccctgacatcatcattcttgtgggagacagcagcctgtatgtggtgtggggcgtggatcgagtgtagctgtgaaatccatatatatgaaatgtcctgcgggatacagtcttagctgacttttttttactctgaactcttatttgaattgttttttgtgcatatatttctgctaccacagagattgtactatacaaataaaaaaattaaaacccaaaaaaaaaaaaaaaaaaaaaaaaaaaaaaaaaaaaaaaaggtct

SEQ ID NO: 5457 - DNA, 1367 bp, Homo sapiens
tgtttctctacttttgctctgttctctttctttcttttttccttctttctctgcccttctttctgttgtgtttattttttttctgtttgttcctctttcttcttttttctttattgcttgtttgcttttgtcctcttgtttttttgtgctcttttgtttgttatgtacttgtctcctcttgtacatttggcctataggggtttggctagcatgtaggacccgcccctaatgtttgcttctttgtccgaatgtttcccttaacaagtgctttggctcattaataatgacctgtgagagactgtttaaaagctgtgaaagtctgaaacctataagccaaggtgttccctgcctaaacttattgctgttcccacaaaggactaagcctgttcataagttaccaaagttgccattttggagatggaaattgacgaggagggaaggtcttttattggagagtatacagtacaagcagatcattctgccttagaggtgctaattcccgaaattagaagaccctttcttttccagtaatgaagttataaatatcagcttgttcatccaagccactggctgaggtgttaggaagaggaagagggtggtagaggaggtaagacagtagggaaagacaagggcccatgctcttagtggggaaaactcttggagccgtttactttgagctttgaacactgaaaccattgttggcagggttcagtcactgacagcacaagtttcactgaattgatccaagagtttagtgatttcaaaagccttggtctcaggagaagattaaactttcatattgggcagtggttcactttaaaacacacacatacacacacaaaacaattttttaagaaatcctaataagtaacatacccaaaatgctctgtcttgagtcatgagaaccatcagttcttgatattgtctagacttgcatctagagctacgttgtaaaattcttttaggcatgtgttagatttctgtgtaaactttgtttaaatgtaaacttcatactacattgtcagtttttgtcttaataaaactatagatttataaaaaaaaaaaaaaaaaaaaaaaaaccctaccaaccacctgcaaaggaccgcgacacagagatccgacgagacgagactgaaaatgaagagtaacgaagacgcagagagacagctcgaagacataggccagccagccaacacagaccacgggcgctacatcaaaagcagcgacggagacaacagcaaagtatgagaagcgcggagtaaaaaaccggaggcgccacaaccgaggagcgcggaggcgaacccatggaaagccgaagcggcggaacaacgtgcacccgacggctaagacggagcgccaaagcggag

SEQ ID NO: 5458 - DNA, 2711 bp, Homo sapiens
caaataaaagcgatggcgattgggctgccgcgtttggcgctcggtccggtcgcgtccgacacccggtgggactcagaaggcagtggagccccggcggcggcggcggcggcgcgcgggggcgacgcgcgggaacaacgcgagtcggcgcgcgggacgaagaataatcatgggccagactgggaagaaatctgagaagggaccagtttgttggcggaagcgtgtaaaatcagagtacatgcgactgagacagctcaagaggttcagacgagctgatgaagtaaagagtatgtttagttccaatcgtcagaaaattttggaaagaacggaaatcttaaaccaagaatggaaacagcgaaggatacagcctgtgcacatcctgacttctgtgagctcattgcgcgggactagggagtgttcggtgaccagtgacttggattttccaacacaagtcatcccattaaagactctgaatgcagttgcttcagtacccataatgtattcttggtctcccctacagcagaattttatggtggaagatgaaactgttttacataacattccttatatgggagatgaagttttagatcaggatggtactttcattgaagaactaataaaaaattatgatgggaaagtacacggggatagagaatgtgggtttataaatgatgaaatttttgtggagttggtgaatgcccttggtcaatataatgatgatgacgatgatgatgatggagacgatcctgaagaaagagaagaaaagcagaaagatctggaggatcaccgagatgataaagaaagccgcccacctcggaaatttccttctgataaaatttttgaagccatttcctcaatgtttccagataagggcacagcagaagaactaaaggaaaaatataaagaactcaccgaacagcagctcccaggcgcacttcctcctgaatgtacccccaacatagatggaccaaatgctaaatctgttcagagagagcaaagcttacactcctttcatacgcttttctgtaggcgatgttttaaatatgactgcttcctacatccttttcatgcaacacccaacacttataagcggaagaacacagaaacagctctagacaacaaaccttgtggaccacagtgttaccagcatttggagggagcaaaggagtttgctgctgctctcaccgctgagcggataaagaccccaccaaaacgtccaggaggccgcagaagaggacggcttcccaataacagtagcaggcccagcacccccaccattaatgtgctggaatcaaaggatacagacagtgatagggaagcagggactgaaacggggggagagaacaatgataaagaagaagaagagaagaaagatgaaacttcgagctcctctgaagcaaattctcggtgtcaaacaccaataaagatgaagccaaatattgaacctcctgagaatgtggagtggagtggtgctgaagcctcaatgtttagagtcctcattggcacttactatgacaatttctgtgccattgctaggttaattgggaccaaaacatgtagacaggtgtatgagtttagagtcaaagaatctagcatcatagctccagctcccgctgaggatgtggatactcctccaaggaaaaagaagaggaaacaccggttgtgggctgcacactgcagaaagatacagctgaaaaaggacggctcctctaaccatgtttacaactatcaaccctgtgatcatccacggcagccttgtgacagttcgtgcccttgtgtgatagcacaaaatttttgtgaaaagttttgtcaatgtagttcagagtgtcaaaaccgctttccgggatgccgctgcaaagcacagtgcaacaccaagcagtgcccgtgctacctggctgtccgagagtgtgaccctgacctctgtcttacttgtggagccgctgaccattgggacagtaaaaatgtgtcctgcaagaactgcagtattcagcggggctccaaaaagcatctattgctggcaccatctgacgtggcaggctgggggatttttatcaaagatcctgtgcagaaaaatgaattcatctcagaatactgtggagagattatttctcaagatgaagctgacagaagagggaaagtgtatgataaatacatgtgcagctttctgttcaacttgaacaatgattttgtggtggatgcaacccgcaagggtaacaaaattcgttttgcaaatcattcggtaaatccaaactgctatgcaaaagttatgatggttaacggtgatcacaggataggtatttttgccaagagagccatccagactggcgaagagctgttttttgattacagatacagccaggctgatgccctgaagtatgtcggcatcgaaagagaaatggaaatcccttgacatctgctacctcctcccccctcctctgaaacagctgccttagcttcaggaacctcgagtactgtgggcaatttagaaaaagaacatgcagtttgaaattctgaatttgcaaagtactgtaagaataatttatagtaatgagtttaaaaatcaactttttattgccttctcaccagctgcaaagtgttttgtaccagtgaatttttgcaataatgcagtatggtacatttttcaactttgaataaagaatacttgaacttgtaaaaaaaaaaaaaaaaaaaaaaaaaaaaaaagaaaaaaaaaa

SEQ ID NO: 5459 - DNA, 3952 bp, Homo sapiens
  misc_feature (36)..(71): n is a, c, g, or t
  misc_feature (249)..(269): n is a, c, g, or t
gcgccgaggatgaggaggtgcaacagcggctccggnnnnnnnnnnnnnnnnnnnnnnnnnnnnnnnnnnnnctcgcggttcccggcgctaacgcggccccgcggtcggcgctctattcgccttccgacccgctgacgctgctgcaggcggacacggtgcgcggcgcggtgctgggctcccgcagcgcctgggccgtggagttcttcgcctcctggtgcggccactcgatcgccttcgccccgacgtggnnnnnnnnnnnnnnnnnnnnncaaacgctggaggccggccctgtatctcgccgccctggactgtgctgaggagaccaacagtgcagtctgcagagacttcaacatccctggcttcccgactgtgaggttcttcaaggcctttaccaagaacggctcgggagcagtatttccagtggctggtgctgacgtgcagacgctgcgggagaggctcattgacgccctggagtcccatcatgacacgtggcccccagcctgtcccccactggagcctgccaagctggaggagattgatggattctttgcgagaaataacgaagagtacctggctctgatctttgaaaagggaggctcctacctgggtagagaggtggctctggacctgtcccagcacaaaggcgtggcggtcgcgagggtcgtgaacacagaggccaatgtggtgagaaagtttggtgtcaccgacttcccctcttgctacctgctgttccggaatggctctgtctcccgagtccccgtgctcatggaatccaggtccttctataccgcttacctgcagagactctctgggctcaccagggaggctgcccagaccacagttgcaccaaccactgctaacaagatagctcccactgtttggaaattggcagatcgctccaagatctacatggctgacctggaatctgcactgcactacatcctgcggatagaagtgggcaggttcccggtcctggaagggcagcgcctgggtggccctgaaaaagtttgtggcagttctggccaagtatttcctgggcggcccttagtccagaactttctgcactccgtgaatgaatggctcaagaggcagaagagaaataaaattccctacagtttctttaaaactgccctggacgacaggaaagagggtgccgttcttgccaagaaggtgaactggattggctgccaggggagtgagccgcatttccggggctttccctgctcctgtgggtcctcttccacttctagactgtgcaggcagctcggatcaaaatgtagaccactcacaggaagcacgcaaggccaaggaggtcctcccagccatccgaggctagctgcactacttcttcggctgcgagactgggctagccacttcgagcagatggcgtggtgcctccatgcaccgggtggggagtcccaacgccgctgtcctctggctctggtctagccacaacagggtcaatgctcgcttgcaggtgcccccagcgaggacccccagttccccaaggtgcagtggccaccccgtgaactttgttctgcctgccacaatgaacgcctggatgtgcccgtgtgggacgtggaagccaccctcaacttcctcaaggcccacttctccccaagcaacatcatcctggacttccctgcagctgggtcagctgccggagggatgtgcagaatgtgcagccgccccagagctggcgatgggagccctggagctggaaagccggaattcaactctggaccctgggaagcctgagatgatgaagtcccccacaaacaccaccccacatgtgccggctgagggacctgaggcaagtcgacccccgaagctgcaccctggcctcagagctgcaccaggccaggagcctcctgagcacatggcagacgttcagaggaatgagcaggacgagccgcttgggcagtggcacttacgaagcgagacacaggggctgcattgctggctgagtccagggctgagaagaaccgcctctggggccctttggaggtcaggcgcgtgggccgcagctccaagcagctggtcgacatccctgaggccagctggaggcccgagctggacgggccgaggccagtggctgcaggtgctgggagggggcttctcttacctggacatcagcctctgtgtggggctctatccctgtccttcatgggcctgctggcatgtacacctacttccaggccaagataaggcccttgaagggcaatgcatggccaccctgcagcctgaaccacctggggaggaggcgggagagggagctgccatctctaggcacctcaagccccctgaccccattccctcccctcccaccccttgctccttgtctggcctagaagtgtgggaaattcaggaaaacgagttgctccagtgaagcttcttggggttgctaggacagagagctcctttgacacaaaagacaggagcagggtccaggttgcctcgtgcagggagggcacgcccggcgagtggcgatagggcagctcagtccctggcctcttagcaccacattcctgtttttcagcttatttgaagtcctgcctcattctcactggagcctcagtctctcctgcttggtcttggccctcaactggggcaagtgaagccagaggagggtccccagctgggtgggctggaatggaactcctcactagctgcctgcgcgcccaccctgctccttccggacaatgaagaagcctttgcaccctgggaggaaggaccaccccgggccctctatgcctggccagcctccagctcctcagacctcctgggtggggtttggcttcagggtggggtttggaagcttctggaagtcgtgctggtctcccaggtgaggaaagccatggttgctgggctgtagggtgagtggcttgcttggtgggacctgacgagttggtggcatgggaaggatgtgggtctctagtgccttgccctggcttagctgcaggagaagatggctgctttcacttccccccattgagctctgctccctctgagcctggtcttttgtccttttttattttggtctccaagatgaatgctcatctttggagggtgccaggtagaagctagggaggggagtgtcttctctctccaggtttcaccttccagtgtgcagaagttagaagggtctggcgggggcagtgccttacacatgcttgattcccacgctaccccctgccttgggaggtgtgtggaataaattatttttgttaaggcaaaaaaaaaaaaaaaaaaaaaaaaaaaaaaaaaaaaaaaaaaaaaaaaaaaaaaacaaaacaaaaaaaacaaacacaaacaacaaaacaaaaaaaaaaaaaaaaaaaaaaaaaaaaaaaggggggggccccctaaaaaatccccccgggggggcccattttaacgcaccccatttttttttaaaaaaggggccccctaaggggggcttttataaaacaggcgccttgggcgtcttttttacacactggagggggaaaaaaccgcacctggggcattttggaaaaaaacactttcttggggggggggtaattttggacacccccccccacaaattttttcccctccgggggaaaaaaaaaattttttaggggaaaagggggaaaaaaaaccccaaaatccctctctcgctaaaaaaaattttccttccgagggttctttttaaaaaaaattttcccccgggggcccgggggcccacaagtgggggggggggttttaaaaaaccccaccccccgagggtttttttttgggccctccataaccccaacgaggggtgtgtatatattattaaccccccccacccttttttttgtaggggtttttatattgtttttaaaaaaaatctcccaaactccctccccgtgtgggtgtgagaaaaaataaaagacggcgcccccgggggggggacaaaacttctttatataccgcgccctttaaaaag

SEQ ID NO: 5460 - DNA, 4301 bp, Homo sapiens
aacttcagtgagagatagaacaacatgttaaaggattatgtggaaggagttttgggggaggaattcctgaagttcataaagatgagactacttgaagaagaatttgattcctctctaaaaagattaatagaacttacgagcttaggaacttagaagttcagcaggactgttttatctgcagctgtctttggtcatagtcaatataaaactccacatgcttcacaaatgcgtttactcatctgtttatgtgacactaacactccatggaagagattgttacaggagatagagttattgagtcaaccccagacactaatcaggaactgactccactttacatggagatatcatcaacagaacatttgaaagtgtaggtattcagggagcactgaaggaaatacaataacattagagttggaagtaaaccatgcagggagaaaaagaccattttttctctttcaaggatgaacaactaaaactggtcgaggaaagtgtgtcagagggctcctccatcttgagagaataggaggaggggatatctgccaagaatgagaaaaagaaatgaagatttacaactcaggaaaaaatgatcagtaaaacattacaaagccttttaaagcaacgtgaagatcttgtttgctactagaaacatgaatttgtggcgggcaaggtacatgttattgtgctgcagcccagggaaggtaatggagaagtaggtgattttgtgtagtgagggacttgtgaccactgttggtaatagcacagaacataattatggaggggcagtaagggttacatgataatagttggctattaatattaggagaagcgcaggtagctagaaaggaacaaatgagttgagtcaattagaaagaaatttagtttgaagtttttgatgaatgtaaagaggcaaaaatgaattactttgtgagacatgggggcaaaaaaatatctgaaactttgggtttgaaatatgctatgtgatgacaagttacaaggcatggttatatgaagcgtaaacgagtgatagagagtgaatatgatcatcaatagcatgaaggagagaagcttttccttttttaaaaacaggatgatatggggtttcacaatgtattattagaggtagtatagatgtctgcatgtgtaagacagaaaagaaaagagaagagaagaaaagaaaagaaaaacaaaacatgcaaaccggtttttgaacttgtcgagtagggagaaagtggatcctagctttgaggatttgaaaagagggatataatcataaaatcatagagtaataggtttgggaagaaacttagaactaatattgtacaatactataacttatagatgaggaagatcataaccaagagaggaaatttcttgtccagaaacagctatctcttagataatggttgggactagaatgcaaggtagttaacctcccttgttcttggtaacagtaaagatgatggctgtggtggtagtgattttgaacatagtggtgtaggcatacataccaagagcttattaaataagaaaacttcgttcctagctaatacaaaatggaaaggtaaattaatgtttggctttaatgctccctccaaaatgttagctctgtaaggacaggggtttttcatctcttatttcttggtaacatatctgattgagttaatactcattatatatttgcagaatacatgaataaacacacctttttaaaatttagaatatgttgatcaattagatgctattgtagaactatgagtctgctaaagggaatgttattttatgaagcatttatcactccaagtattcactaagtattgatggaccatcagaatacataacacttactcagctcataatatgaaccacatgctgtacatacattattttttagtcctcgtaataactcttgaaagtaattattataccaatggggacctaagcttgtatttaaactgtcaatttcttactgctagagctcagaccaaaaatatatagtgaacttattgggcagatgttacaaaagataatttgtgtgataaagtctctcttgggacagaatacctctttaaacaaagaagatgtcaggccgaagtgggttcatcacaaagcattaattgatttgatattttcaaagatatttgagctaaatttacatgataaggagttagctaggcaaagaagaggaattaggatattccaaattggtggtgcagatgcctcacatatccaaaagaatccctgtaaccattcatccaggtgttgagaagatatgtagcagccgagcacccatcttttgacaccgtcctctgaaatcagctttggagatgctttcactctgtccgtcttctgcagcagccaggcagagtgccgactccttcacagccgtgaggaactcttcaggctccagaagctcttaaacctgatctacaatggaaaaaattcttttttatctgtttctcattggcatagcagtgaaagctcagatctgtccaaagcgttgtgtctgtcagattttgtctcctaatcttgcaaccctttgtgccaagaaagggcttttaattgttccaccaaacattgacagaagaactgtggaactgcggttggcagacaattttgttacaaatattaaaaggaaagattttgccaatatgaccagcttggtggacctgactctatccaggaatacaataagttttattacacctcatgctttcgctgacctacgaaatttgagggctttgcatttgaatagcaacagattgactaaaattacaaatgatatgttcagtggtctttccaatcttcatcatttgatactgaacaacaatcagctgactttaatttcctctacagcgtttgatgatgtcttcgcccttgaggagctggatctgtcctataataatctagaaaccattccttgggatgctgttgagaagatggttagcttgcatacccttagtttggatcacaatatgattgataacattcctaaggggaccttctcccatttgcacaagatgactcggttagatgtgacatcaaataaattgcagaagctaccacctgaccctctctttcagcgagctcaggtactagcaacctcaggaatcataagcccatctacttttgcattaagttttggtggaaaccccttgcattgcaattgtgaattgttgtggttgaggcgtctgtccagagaagatgacttagagacctgtgcttctcctccacttttaactggccgctacttttggtcaattcctgaagaagagtttttgtgtgagcctcctctcattactcgtcatacacatgagatgagagtcctggagggacaaagggcaacactgaggtgcaaagccaggggagaccctgagcctgcaattcactggatttctcctgaagggaagcttatttcaaatgcaacaagatctctggtgtatgataacggaacacttgacattcttatcacaactgtaaaggatacaggtgcttttacctgcattgcttccaatcctgctggggaagcaacacaaatagtggatcttcatataattaagctccctcacttactaaatagtacaaaccatatccatgagcctgatcctggttcttcagatatctcaacttctaccaagtcaggttctaatacaagcagtagtaatggtgatactaaattgagtcaagataaaattgtggtggcagaagctacatcatcaacggcactacttaaatttaattttcaaagaaatatccctggaatacgtatgtttcaaatccagtacaatggtacttatgatgacacccttgtttacagatgctttgctgactaatgttgaccagattgtccaggaaacacagaggctggagttaatctgaagagcaccacttctcctctctctcctgaaaaaatttgccactgatatttttactggataaaattcaaaaatgtttcaattcacaaaggctaattgttgaactggtgtcgtagaagaaattgtctacaggagccaaggtgaaagtctctgatgacggcggaactggctccattggggcgtggttcatcctcttttaaaaccaaatttttttttcttctggcctacaagtattttttttttaaaaaagaaaaaaagcctacattggcatcaagttctgtatcaatccatcttacattgccatccatgatttaacagactgtagaatcttgaataatctatatcactttaacaaataaatgttttactatgacaaaaaaaaaaaaaaaaaaaaaaaaaaaaaaaagaaaaaaaaaaaaaaaaaaa

SEQ ID NO: 5461 - DNA, 2655 bp, Homo sapiens
agcaatcagcatgacagcctccagccaagtaatctggagtcatgagagctgctaggggagcaacatgattcatgacggtccccgcagcgccgtcgcgccctcctgccgcaggccaccgaggccgccgccgtctagcgccccgacctcgccaccatgagagccctgctggcgcgcctgcttctctgcgtcctggtcgtgagcgactccaaaggcagcaatgaacttcatcaagttccatcgaactgtgactgtctaaatggaggaacatgtgtgtccaacaagtacttctccaacattcactggtgcaactgcccaaagaaattcggagggcagcactgtgaaatagataagtcaaaaacctgctatgaggggaatggtcacttttaccgaggaaaggccagcactgacaccatgggccggccctgcctgccctggaactctgccactgtccttcagcaaacgtaccatgcccacagatctgatgctcttcagctgggcctggggaaacataattactgcaggaacccagacaaccggaggcgaccctggtgctatgtgcaggtgggcctaaagccgcttgtccaagagtgcatggtgcatgactgcgcagatggaaaaaagccctcctctcctccagaagaattaaaatttcagtgtggccaaaagactctgaggccccgctttaagattattgggggagaattcaccaccatcgagaaccagccctggtttgcggccatctacaggaggcaccgggggggctctgtcacctacgtgtgtggaggcagcctcatcagcccttgctgggtgatcagcgccacacactgcttcattgattacccaaagaaggaggactacatcgtctacctgggtcgctcaaggcttaactccaacacgcaaggggagatgaagtttgaggtggaaaacctcatcctacacaaggactacagcgctgacacgcttgctcaccacaacgacattgccttgctgaagatccgttccaaggagggcaggtgtgcgcagccatcccggactatacagaccatctgcctgccctcgatgtataacgatccccagtttggcacaagctgtgagatcactggctttggaaaagagaattctaccgactatctctatccggagcagctgaaaatgactgttgtgaagctgatttcccaccgggagtgtcagcagccccactactacggctctgaagtcaccaccaaaatgctatgtgctgctgacccccaatggaaaacagattcctgccagggagactcagggggacccctcgtctgttccctccaaggccgcatgactttgactggaattgtgagctggggccgtggatgtgccctgaaggacaagccaggcgtctacacgagagtctcacacttcttaccctggatccgcagtcacaccaaggaagagaatggcctggccctctgagggtccccagggaggaaacgggcaccacccgctttcttgctggttgtcatttttgcagtagagtcatctccatcagctgtaagaagagactgggaagataggctctgcacagatggatttgcctgtggcaccaccagggtgaacgacaatagctttaccctcacggataggcctgggtgctggctgcccagaccctctggccaggatggaggggtggtcctgactcaacatgttactgaccagcaacttgtctttttctggactgaagcctgcaggagttaaaaagggcagggcatctcctgtgcatgggctcgaagggagagccagctcccccgaccggtgggcatttgtgaggcccatggttgagaaatgaataatttcccaattaggaagtgtaagcagctgaggtctcttgagggagcttagccaatgtgggagcagcggtttggggagcagagacactaacgacttcagggcagggctctgatattccatgaatgtatcaggaaatatatatgtgtgtgtatgtttgcacacttgtgtgtgggctgtgagtgtaagtgtgagtaagagctggtgtctgattgttaagtctaaatatttccttaaactgtgtggactgtgatgccacacagagtggtctttctggagaggttataggtcactcctggggcctcttgggtcccccacgtgacagtgcctgggaatgtattattctgcagcatgacctgtgaccagcactgtctcagtttcactttcacatagatgtccctttcttggccagttatcccttccttttagcctagttcatccaatcctcactgggtggggtgaggaccactcctgtacactgaatatttatatttcactatttttatttatatttttgtaattttaaataaaagtgatcaataaaatgtgatttttctgatgaaaaaaaaaaaaaaaaaaaaaaacaaagaaataaccacagagcacactcccacaagcacgccacaagcgaccagcagtaccgcgacgcccgggcgcagtcaccccaagccgcgccaccagcggcgcaccgctcgcacaccggcgcaccgaccacacccacgcgccagagccggggcacacaacaccggcgggagcggccgcgagcgcccggcacgcgaggcagccccccgcgagccgcggccacgcggccccagcgcggccacggcccgccca

SEQ ID NO: 5462 - DNA, 1393 bp, Homo sapiens
cccctgttaggcgcaattggtaacagatacaatgtgtagtgaggtcgtagtggcgtactcgttttctctcttgattcggtggccggctctaagctgctccacgattttgtgtacctactactcttgttgctaggttcattaattgtgttacatgatatatgaaccgctgctgtctgagctagcattcgaaaccccgtgttaactgaaaacgtggcacaaggggtccctaggaaacttcagggcgtatgggactcgagtggagtcccctggatgagttcatgagcaatggcaagcaggtagaggctagggcacttgggggtcatatttgagatcgtaagttcttgtttcgcacagaccgtggccgcgtcaggcagatcatcgcctgggggccttggccatcgtgggtctcttctaacttcagcactgacatcggtcaccggtgcagcgcggtgtgttgaagggaaacggtagctattcattcacagttgccaagagcagctccgcgcctgctggatcgtggatgcagcgtaaacatcttccttcagacgaggcattaaccccatggttaatggactggtcaccagtttttattttatttttatgaatctacctttccattgattgatttaagttcaggccacttttctgtcttttatttggttactgttgttatttgtttttaagttaggatgctttttaacagcctttagaagccgctgctgaaattgatactgggggaagggttccccttccttctagagcagaaaagggagagaggtgttgtattcctgtttggtaacctcagtctcctgtaagacctcctaccacatggcgagtatacaccaatcaggagagggtagctgcctgcataggagcctcgcttccgattattcccttcccaatattattcatccagacttagccacagtgcacaaaagcaaacctgctagagaggcagtgaacaccacagcttctccccagctaggtgccttttacatcgggtttgttctccttccatggtgtgttgctgacattgtcactgagtcccatgtgaggtgctggtgagtattacctttcatctgtgccatgctctagaaccttgaccttgatagttcaccacctctgatggatccctgttttaaataaaaacgattcactttaaagcctataaaaaaaaaaaaaaaaaaaaagaggccgcctctaaaaatatccccttcgagggggcccccaaagctaaacggcgtaccccaaactttttccttggtacaaaaggggggtccccctaataaggtgggggtccgtaattctataaagccctaaagggacactctgggcccccgtcccctttattttacacaacaccgctccccgtggaaaccctgtggggaaaaaa

SEQ ID NO: 5463 - DNA, 1188 bp, Homo sapiens
  misc_feature (22)..(37): n is a, c, g, or t
  misc_feature (893)..(893): n is a, c, g, or t
tgggcttgacccagaggatccnnnnnnnnnnnnnnnngacatgtatgcgtacccattcgtggtgatcaattaaatgtaagtatgaataagttcgaagctccgtgagtgaaccatcattataaacgtgatgatcagctgtttgtcatagggcagttggaaacggcctcctagggaaaagttcatagggtctcttcaggttcttagtgtcacttacctagatttacagcctcacttgaatgtgtcactactcacagtctctttaatcttcagttttatctttaatctcctcttttatcttggactgacatttagcgtagctaagtgaaaaggtcatagctgagattcctggttcgggtgttacgcacacgtacttaaatgaaagcatgtggcatgttcatcgtataacacaatatgaatacagggcatgcattttgcagcagtgagtctcttcagaaaacccttttctacagttagggttgagttacttcctatcaagccagtacgtgctaacaggctcaatattcctgaatgaaatatcagactagtgacaagctcctggtcttgagatgtcttctcgttaaggagatgggccttttggaggtaaaggataaaatgaatgagttctgtcatgattcactattctagaacttgcatgacctttactgtgttagctctttgaatgttcttgaaattttagactttctttgtaaacaaatgatatgtccttatcattgtataaaagctgttatgtgcaacagtgtggagattccttgtctgatttaataaaatacttaaacactgaaaaaaaaaaaaaaaaaaaaaaaaccgaaacccaaaaccaacaacacacacccacccacaccacaccaccaccatcaacccacccaacccanccacccaacccaaaaggggggcggcgcccaaaaaaatccccgcgggggggcccccattttccccccccccccctttttcttggaaaaaggggggccccatagggggggtcttttatataaaaggtggggcggggggcccggtttttttaacccctccgggccggggggaaaaaaaccgccccctcgggagaacattttgggggaaggaaaccctcctctcctctggggggggggcggcaaaaatttttggggaccacaccaccccctccccagaaaaattttaacagacgccccc

SEQ ID NO: 5464 - DNA, 2692 bp, Homo sapiens
aaagaatttctcaggctcaaaatccaatacaggagtgacttggaactccattctatcactatgaagaaaagtggtgttcttttcctcttgggcatcatcttgctggttctgattggagtgcaaggaaccccagtagtgagaaagggtcgctgttcctgcatcagcaccaaccaagggactatccacctacaatccttgaaagaccttaaacaatttgccccaagcccttcctgcgagaaaattgaaatcattgctacactgaagaatggagttcaaacatgtctaaacccagattcagcagatgtgaaggaactgattaaaaagtgggagaaacaggtcagccaaaagaaaaagcaaaagaatgggaaaaaacatcaaaaaaagaaagttctgaaagttcgaaaatctcaacgttctcgtcaaaagaagactacataagagaccacttcaccaataagtattctgtgttaaaaatgttctattttaattataccgctatcattccaaaggaggatggcatataatacaaaggcttattaatttgactagaaaatttaaaacattactctgaaattgtaactaaagttagaaagttgattttaagaatccaaacgttaagaattgttaaaggctatgattgtctttgttcttctaccacccaccagttgaatttcatcatgcttaaggccatgattttagcaatacccatgtctacacagatgttcacccaaccacatcccactcacaacagctgcctggaagagcagccctaggcttccacgtactgcagcctccagagagtatctgaggcacatgtcagcaagtcctaagcctgttagcatgctggtgagccaagcagtttgaaattgagctggacctcaccaagctgctgtggccatcaacctctgtatttgaatcagcctacaggcctcacacacaatgtgtctgagagattgatgctgattgttattgggtatcatcactggagatcaccagtgtgtggctttcagagcctcctttctggctttggaagccatgtgattccatcttgcccgctcaggctgaccactttatttctttttgttcccctttgcttcattcaagtcagctcttctccatcctaccacaatgcagtgcctttcttctctccagtgcacctgtcatatgctctgatttatctgagtcaactcctttctcatcttgtccccaacaccccacagaagtgctttcttctcccaattcatcctcactcagtccagcttagttcaagtcctgcctcttaaataaacctttttggacacacaaattatcttaaaactcctgtttcacttggttcagtaccacatgggtgaacactcaatggttaactaattcttgggtgtttatcctatctctccaaccagattgtcagctccttgagggcaagagccacagtatatttccctgtttcttccacagtgcctaataatactgtggaactaggttttaataattttttaattgatgttgttatgggcaggatggcaaccagaccattgtctcagagcaggtgctggctctttcctggctactccatgttggctagcctctggtaacctcttacttattatcttcaggacactcactacagggaccagggatgatgcaacatccttgtctttttatgacaggatgtttgctcagcttctccaacaataagaagcacgtggtaaaacacttgcggatattctggactgtttttaaaaaatatacagtttaccgaaaatcatataatcttacaatgaaaaggactttatagatcagccagtgaccaaccttttcccaaccatacaaaaattccttttcccgaagaaaagggctttctcaataagcctcagctttctaagatctaacaagatagccaccgagatccttatcgaaactcattttaggcaaatatgagttttattgtccgtttacttgtttcagagtttgtattgtgattatcaattaccacaccatctcccatgaagaaagggaacggtgaagtactaagcgctagaggaagcagccaagtcggttagtggaagcatgattggtgcccagttagcctctgcaggatgtggaaacctccttccaggggaggttcagtgaattgtgtaggagaggttgtctgtggccagaatttaaacctatactcactttcccaaattgaatcactgctcacactgctgatgatttagagtgctgtccggtggagatcccacccgaacgtcttatctaatcatgaaactccctagttccttcatgtaacttccctgaaaaatctaagtgtttcataaatttgagagtctgtgacccacttaccttgcatctcacaggtagacagtatataactaacaaccaaagactacatattgtcactgacacacacgttataatcatttatcatatatatacatacatgcatacactctcaaagcaaataatttttcacttcaaaacagtattgacttgtataccttgtaatttgaaatattttctttgttaaaatagaatggtatcaataaatagaccattaatcagaaaaaaaaaaaaaaaaaaaaaaaaaaaaaaaaaaaaaaaaaaaaaaagaatgtttaatagtaaatcttatatgtccttatttactttttagctttctctcaaataaagtgtaacactagttgagata

SEQ ID NO: 5465 - DNA, 2255 bp, Homo sapiens
  misc_feature (270)..(270): n is a, c, g, or t
gacagatttcactgctcccaccagcttggagacaacatgtggttcttgacaactctgctcctttgggttccagttgatgggcaagtggacaccacaaaggcagtgatcactttgcagcctccatgggtcagcgtgttccaagaggaaaccgtaaccttgcactgtgaggtgctccatctgcctgggagcagctctacacagtggtttctcaatggcacagccactcagacctcgacccccagctacagatcacctcttgccagtgttcantgacagtggtgaatacaggtgccagagaggtctctcagggcgaagtgaccccatacagctggaaatccacagaggctggctactactgcaggtctccagcagagtcttcacggaaggagaacctctggccttgaggtgtcatgcgtggaaggataagctggtgtacaatgtgctttactatcgaaatggcaaagcctttaagtttttccactggaattctaacctcaccattctgaaaaccaacataagtcacaatggcacctaccattgctcaggcatgggaaagcatcgctacacatcagcaggaatatctgtcactgtgaaagagctatttccagctccagtgctgaatgcatctgtgacatccccactcctggaggggaatctggtcaccctgagctgtgaaacaaagttgctcttgcagaggcctggtttgcagctttacttctccttctacatgggcagcaagaccctgcgaggcaggaacacatcctctgaataccaaatactaactgctagaagagaagactctgggttatactggtgcgaggctgccacagaggatggaaatgtccttaagcgcagccctgagttggagcttcaagtgcttggcctccagttaccaactcctgtctggtttcatgtccttttctatctggcagtgggaataatgtttttagtgaacactgttctctgggtgacaatacgtaaagaactgaaaagaaagaaaaagtgggatttagaaatctctttggattctggtcatgagaagaaggtaatttccagccttcaagaagacagacatttagaagaagagctgaaatgtcaggaacaaaaagaagaacagctgcaggaaggggtgcaccggaaggagccccagggggccacgtagcagcggctcagtgggtggccatcgatctggaccgtcccctgcccacttgctccccgtgagcactgcgtacaaacatccaaaagttcaacaacaccagaactgtgtgtctcatggtatgtaactcttaaagcaaataaatgaactgacttcaactgggatacatttggaaatgtggtcatcaaagatgacttgaaatgaggcctactctaaagaattcttgaaaaacttacaagtcaagcctagcctgataatcctattacatagtttgaaaaatagtattttatttctcagaacaaggtaaaaaggtgagtgggtgcatatgtacagaagattaagacagagaaacagacagaaagagacacacacacagccaggagtgggtagatttcagggagacaagagggaatagtatagacaataaggaaggaaatagtacttacaaatgactcctaagggactgtgagactgagagggctcacgcctctgtgttcaggatacttagttcatggcttttctctttgactttactaaaagagaatgtctccatacgcgttctaggcatacaagggggtaactcatgatgagaaatggatgtgttattcttgccctctcttttgaggctctctcataacccctctatttctagagacaacaaaaatgctgccagtcctaggcccctgccctgtaggaaggcagaatgtaactgttctgtttgtttaacgattaagtccaaatctccaagtgcggcactgcaaagagacgcttcaagtggggagaagcggcgataccatagagtccagatcttgcctccagagatttgctttaccttcctgattttctggttactaattagcttcaggatacgctgctctcatacttgggctgtagtttggagacaaaatattttcctgccactgtgtaacatagctgaggtaaaaactgaactatgtaaatgactctactaaaagtttagggaaaaaaaacaggaggagtatgacacaaaaaaaaaaaaaaaaaaaaaaaaaaaaaaaaaaaaaaaaaaaaaaaaaaaaaaaaaaaaaaaaaaaaaaaaaaaaaaaaaaaaaaaaaaaaa

SEQ ID NO: 5466 - DNA, 3762 bp, Homo sapiens
  misc_feature (993)..(1009): n is a, c, g, or t
tggagcgggaggagcaggagatgctgccagccctcccggggccgcgctcgctcagccgccgccaccacacggagcagacgcgcgccgggagccggcggccgggccagccggcgccggggcccagtgcgccgcgctcgcagccggtagcgcgccagccgtaggcgtcgctcggcagccgcggggccctaggcgtgccggggagggggcgagggcggccaggcgcctgccgccccggaggcaggatgagcatcgagatcccggcgggactgacggagctgctgcagggcttcacggtggaggtgctgaggcaccagcccgcggacctgctggagttcgcgctgcagcacttcacccgcctgcagcaggagaacgagcgcaaaggcaccgcgcgcttcggccatgagggcaggacctggggggacctgggcgccgctgccgggggcggcacccccagcaagggggtcaacttcgccgaggagcccatgcagtccgactccgaggacggggaggaggaggaggcggcgcccgcggacgcaggggcgttcaatgctccagtaataaaccgattcacaaggcgtgcctcagtatgtgcagaagcttataatcctgatgaagaagaagatgatgcagagtccaggattatacatccaaaaactgatgatcaaagaaataggttgcaagaggcttgcaaagacatcctgctgtttaagaatctggatccggagcagatgtctcaagtattagatgccatgtttgaaaaattggtcaaagatggggagcatgtaattgatcaaggtgacgatggtgacaacttttatgtaattgatagaggcacatttgatatttatgtgaaatgtgatggtgttggaagatgtgttggtaactatgataatcgtgggagtttcggcgaactggccttaatgtacaatacacccagagcagctacaatcactgctacctctcctggtgctctgtggggtttggacagggtannnnnnnnnnnnnnnnntgtgaaaaacaatgccaaaaagagaaaaatgtatgaaagctttattgagtcactgccattccttaaatctttggagttttctgaacgcctgaaagtagtagatgtgataggcaccaaagtatacaacgatggagaacaaatcattgctcagggagattcggctgattcttttttcattgtagaatctggagaagtgaaaattactatgaaaagaaagggtaaatcagaagtggaagagaatggtgcagtagaaatgcctcgatgctcgcggggacagtactttggagagcttgccctggtaactaacaaacctcgagcagcttctgcccacgccattgggactgtcaaatgtttagcaatggatgtgcaagcatttgaaaggcttctgggaccttgcatggaaattatgaaaaggaacatcgctacctatgaagaacagttagttgccctgtttggaacgaacatggatattgttgaacccactgcatgaagcaaaagtatggagcaagacctgtagtgacaaaattacacagtagtggttagtccactgagaatgtgtttgtgtagatgccaagcattttctgtgatttcaggttttttcctttttttacatttacaacgtatcaataaacagtagtgatttaatagtcaataggctttaacatcactttctaaagagtagttcataaaaaaatcaacatactgataaaatgactttgtactccacaaaattatgactgaaaggtttattaaaatgattgtaatatatagaaagtatctgtgtttaagaagataattaaaggatgttatcataggctatatgtgttttacttattcagactgataatcatattagtgactatccccatgtaagagggcacttggcaattaaacatgctacacagcatggcatcacttttttttataactcattaaacacagtaaaattttaatcatttttgttttaaagttttctagcttgataagttatgtgctgccttggcctattggtgaaatggtataaaatatcatatgcagttttaaaactttttatatttttgcaataaagtacattttgactttgttggcataatgtcagtaacatacatattccagtggttttatggacaggcaatttagtcattatgataataaggaaaacagtgttttagatgagagatcattaatgcatttttccctcatcaagcatatatctgcttttttttattttgcaattctctgtattctatgtctttaaaaatttgatcttgacatttaatgtcacaaagttttgtttttttaaaaagtgatttaaacttaagatccgacattttttgtattctttaagattttacacctaaaaaatctctcctatcccaaaaataatgtgggatccttatcagcatgcccacagtttatttctttgttcttcactaggcctgcataatacagtcctatgtagacatctgttcccttgggtttccgttctttcttaggatggttgccaacccacaatctcattgatcagcagccaatatgggtttgtttggtttttttaattcttaaaaacatcctctagaggaatagaaacaaatttttatgagcataaccctatataaagacaaaatgaatttctgaccttaccatatataccattaggccttgccattgctttaatgtagactcatagttgaaattagtgcagaaagaactcagatgtactagattttcattgttcattgatatgctcagtatgctgccacataagatgaatttaattatattcaaccaaagcaatatactcttacatgatttctaggccccatgacccagtgtctagagacattaattctaaccagttgtttgcttttaaatgagtgatttcattttgggaaacaggtttcaaatgaatatatacatgggtaaaattactctgtgctagtgtagtcttactagagaatgtttatggtcccacttgtatatgaaaatgtggttagaatgttaattggataatgtatatataagaagttaaagtatgtaaagtataacttcagccacatttttagaacactgtttaacatttttgcaaaaccttcttgtaggaaaagagagctctctacatgaagatgacttgttttatatttcagattttattttaaaagccatgtctgttaaacaagaaaaaacacaaaagaactccagattcctggttcatcattctgtattcttactcactttttcaagttatctattttgttgcataaactaattgttaactattcatggaacagcaaacgcctgtttaataaagaactttgaccaaggctataaatgccacgtacattattttcagtattgttggttatatttaaattttccttacaataaagcacacttttataataaaatacatgaattattgtttttcatacttttttgcttgtttctttaaagttttctgacgtgcataatgcataattcattgaaaagcatgatagcaatgtggcatgtggaagcgaacccccagggcataacatagtaagaaagtatggttctgtatggcaataggtttttaaaattattagctattcatcatgtgtgggagaaataattgtggtgtgttgcagatttatttggccatttagaataaccaaatcaatctggctaactaggaatttatgtgtaaaattatctgattaaaacagctcaagtttgaaaaaaaagaaaaaaaaaaaaaaaaaaaaaaaaaaaaa

SEQ ID NO: 5467 - DNA, 5306 bp, Homo sapiens
  misc_feature (3145)..(3160): n is a, c, g, or t
  misc_feature (5121)..(5121): n is a, c, g, or t
  misc_feature (5285)..(5285): n is a, c, g, or t
cgtccgcgtggggggggtgtgtgcccgccttgcgcatgcgtgttccctgggcatggccggctccgttccatccttctgcacagggtatcgcctctctccgtttggtacatcccctcctcccccacgcccggactggggtggtagacgcgcctccgctcatcgcccctcccaagtaactgggattagagctgaaccttcacctagccccaggattacaaggaaaagcaccaggcaaaccaccatcacatctcattttgcaaagggccctgccaaacggaaacctcaggaagagtctgaaagagccaaatcggatgagtccatcaaggaagaagacaaagaccaggatgagaagagacgtagagttacatccagagaacgagttgctagaccgcttcctgcagaagaacctgaaagagcaaaatcaggaacgcgcactgaaaaggaagaagaaagagatgaaaaagaagaaaagagactccgaagtcaaaccaaagaaccaacacccaaacagaaactgaaggaggagccggacagagaagccagggcaggcgtgcaggctgacgaggacgaagatggagacgagaaagatgagaagaagcacagaagtcaacccaaagatctagctgccaaacggaggcccgaagaaaaagaacctgaaaaagtaaatccacagatttctgatgaaaaagacgaggatgaaaaggaggagaagagacgcaaaacgacccccaaagaaccaacggagaaaaaaatggctcgcgccaaaacagtcatgaactccaagacccaccctcccaagtgcattcagtgcgggcagtacctggacgaccctgacctcaaatatgggcagcacccaccagacgcggtggatgagccacagatgctgacaaatgagaagctgtccatctttgatgccaacgagtctggctttgagagttatgaggcgcttccccagcacaaactgacctgcttcagtgtgtactgtaagcacggtcacctgtgtcccatcgacaccggcctcatcgagaagaatatcgaactcttcttttctggttcagcaaaaccaatctatgatgatgacccgtctcttgaaggtggtgttaatggcaaaaatcttggccccataaatgaatggtggatcactggctttgatggaggtgaaaaggccctcatcggcttcagcacctcatttgccgaatacattctgatggatcccagtcccgagtatgcgcccatatttgggctgatgcaggagaagatctacatcagcaagattgtggtggagttcctgcagagcaattccgactcgacctatgaggacctgatcaacaagatcgagaccacggttcctccttctggcctcaacttgaaccgcttcacagaggactccctcctgcgacacgcgcagtttgtggtggagcaggtggagagttatgacgaggccggggacagtgatgagcagcccatcttcctgacgccctgcatgcgggacctgatcaagctggctggggtcacgctgggacagaggcgagcccaggcgaggcggcagaccatcaggcattctaccagggagaaggacaggggacccacgaaagccaccaccaccaagctggtctaccagatcttcgacacttcttcgcagagcaaattgaaaaggatgacagagaagacaaggagaacgcctttaagcgccggcgatgtggcgtctgtgaggtgtgtcagcagcctgagtgtgggaaatgtaaagcctgcaaggacatggttaaatttggtggcagtggacggagcaagcaggcttgccaagagcggaggtgtcccaatatggccatgaaggaggcagatgacgatgaggaagtcgatgataacatcccagagatgccgtcacccaaaaaaatgcaccaggggaagaagaagaaacagaacaagaatcgcatctcttgggtcggagaagccgtcaagactgatgggaagaagagttactataagaaggtgtgcattgatgcggaaaccctggaagtgggggactgtgtctctgttattccagatgattcctcaaaaccgctgtatctagcaagggtcacggcgctgtgggaggacagcagcaacgggcagatgtttcacgcccactggttctgcgctgggacagacacagtcctcggggccacgtcggaccctctggagctgttcttggtggatgaatgtgaggacatgcagctttcatatatccacagcaaagtgaaagtcatctacaaagccccctccgaaaactgggccatggagggaggcatggatcccgagtccctgctggagggggacgacgggaagacctacttctaccagctgtggtatgatcaagactacgcgagattcgagtcccctccaaaaacccagccaacagaggacaacaagttcaaattctgtgtgagctgtgcccgtctggctgagatgaggcaaaaagaaatccccagggtcctggagcagctcgaggacctggatagccgggtcctctactactcagccaccaagaacggcatcctgtaccgagttggtgatggtgtgtacctgccccctgaggccttcacgttcaacatcaagctgtccagtcccgtgaaacgcccacggaaggagcccgtggatgaggacctgtacccagagcactaccggaaatactccgactacatcaaaggcagcaacctggatgcccctgagccctaccgaattggccggatcaaagagatcttctgtcccaagaagagcaacggcaggcccaatgagactgacatcaaaatccgggtcaacaagttctacaggcctgagaacacccacaagtccactccagcgagctaccacgcagacatcaacctgctctactggagcgacgaggaggccgtggtggacttcaaggctgtgcagggccgctgcaccgtggagtatggggaggacctgcccgagtgcgtccaggtgtactccatgggcggccccaaccgcttctacttcctcgaggcctataatgcaaagagcaaaagctttgaagatcctcccaaccatgcccgtagccctggaaacaaagggaagggcaagggaaaagggaagggcaagcccaagtcccaagcctgtgagccgagcgagccagagatagagatcnnnnnnnnnnnnnnnncggaccctggatgtgttttctggctgcggggggttgtcggagggattccaccaagcaggcatctctgacacgctgtgggccatcgagatgtgggaccctgcggcccaggcgttccggctgaacaaccccggctccacagtgttcacagaggactgcaacatcctgctgaagctggtcatggctggggagaccaccaactcccgcggccagcggctgccccagaagggagacgtggagatgctgtgcggcgggccgccctgccagggcttcagcggcatgaaccgcttcaattcgcgcacctactccaagttcaaaaactctctggtggtttccttcctcagctactgcgactactaccggccccggttcttcctcctggagaatgtcaggaactttgtctccttcaagcgctccatggtcctgaagctcaccctccgctgcctggtccgcatgggctatcagtgcaccttcggcgtgctgcaggccggtcagtacggcgtggcccagactaggaggcgggccatcatcctggccgcggcccctggagagaagctccctctgttcccggagccactgcacgtgtttgctccccgggcctgccagctgagcgtggtggtggatgacaagaagtttgtgagcaacataaccaggttgagctcgggtcctttccggaccatcacggtgcgagacacgatgtccgacctgccggaggtgcggaatggagcctcggcactggagatctcctacaacggggagcctcagtcctggttccagaggcagctccggggcgcacagtaccagcccatcctcagggaccacatctgtaaggacatgagtgcattggtggctgcccgcatgcggcacatcccttggcccccagggtcagactggcgcgatctgcccaacatcgaggtgcgggctctcagacggcaccatggccaggaagctgcggtatacccaccatgacaggaagaacggccgcagcagctctggggccctccgtggggtctgctcctgcgtggaagccggcaaagcctgcgaccccgcagccaggcagttcaacaccctcatcccctggtgcctgccccacaccgggaaccggcacaaccactgggctggcctctatggaaggctcgagtgggacggcttcttcagcacaaccgtcaccaaccccgagcccatgggcaagcagggccgcgtgctccacccagagcagcaccgtgtggtgagcgtgcgggagtgtgcccgctcccagggcttccctgacacctaccggctcttcggcaacatcctggacaagcaccggcaggtgggcaatgccgtgccaccgcccctggccaaagccattggcttggagatcaagctttgtatgttggccaaagcccgagagagtgcctcagctaaaataaaggaggaggaagctgctaaggactagttctgccctcccgtcacccctgtttctggcaccaggaatccccaacatgcactgatgttgtgtttttaacatgtcaatctgtccgttcacatgtgtggtacatggtgtttgtggccttggctgacatgaagctgttgtgtgaggttcgcttatcaactaatgatttagtgatcaaattgtgcagtactttgtgcattctggattttaaaagttttttattatgcattatatcaaatctaccactgtatgagtggaaattaagactttatgtagtttttatatgttgtaatatttcttcaaataaatctctcctataaaccaaaaaaaaaaaaaaaaaaaaaaaaaactcccaggcgtttttaatgctccggcggcgccggaacaaacagggtttacggcaaaaggggccacaccggggaccaagagcgtggtgtacccgggaacacaccacttttttctcagatacacaaaatgggggagaaatatttttcccaggttcctcccccctaataaaggggggagtctngaaactataattttgttcgcgatagaaaccccgcgggtttacacccccgggagaactatagaacggaagaaactgagccacttgatcacaaaaacgcccccggcggggaaataattgaaaaaccccgcgcgccaaagaaaaacgcgcgccgcgggggcttcttnttcgattttttagggcgcgcc

SEQ ID NO: 5468 - DNA, 1303 bp, Homo sapiens
  misc_feature (839)..(839): n is a, c, g, or t
  misc_feature (847)..(847): n is a, c, g, or t
  misc_feature (878)..(885): n is a, c, g, or t
  misc_feature (887)..(887): n is a, c, g, or t
  misc_feature (1216)..(1216): n is a, c, g, or t
tagatcgtcaggtgagggaggaagggatagccagcgcgaaggaagtgctggagtcgtgtgttttggctgcgcgtgatcctgcgtgggtcgggaggtgtttctgtgtaggtgtctggccctttcatcagtcgtgcggaggaccgcgtgatttccttccagttctcctctggtgtttcaggaaaagcctaaagattagactgtaagaaaagaaaatagaagccatgtttcgaagacctgtattacaggtacttcgtcagtttgtaagacatgagtccgaaacaactaccagtttggttcttgaaagatccctgaatcgtgtgcacttacttgggcgagtgggtcaggaccctgtcttgagacaggtggaaggaaaaaatccagtcacaatattttctctagcaactaatgagatgtggcgatcaggggatagtgaagtttaccaactgggtgatgtcagtcaaaagacaacatggcacagaatatcagtattccggccaggcctcagagacgtggcatatcaatatgtgaaaaaggggtctcgaatttatttggaagggaaaatagactatggtgaatacatggataaaaataatgtgaggcgacaagcaacaacaatcatagctgataatattatatttctgagtgaccagacgaaagagaaggagtagaaaggatgattcttcttaggccatcatttggtacagtctcatttccaagtcatgtataatctttatggcttccaaggacaagaattaaaatactcttttacgtaaaaaaaaaaaaaaaaaggggggggaaggggggggggggggggggggggggggggggggggggggggngggggggnggggggggggggggggggggggggggggggnnnnnnnngnggagaggggggcgccccccaaaaaagatcccctccggggggggcccccattattccccgcccccccctctttttttttgtaaagaggggggcgccctttagggggggtgcttttaaatagtaggggggggggcgcggccgcttttttcaacaccgctggtggtgggggaaaaaacccctcctcttgggcctatttgtgaggagaagacccctctttttggggggggggggggaatttgggcgacacccccctcccgaagttttatccccgctctgccgaggaattaaaatattttctttccggcgtcattggtgtaacaaaaacacccntcaaatatgtgtggggtttaatagaaattcttcttcccctgtggggcggttctttttagaaaacatattttccgggggggggggggg

SEQ ID NO: 5469 - DNA, 1202 bp, Homo sapiens
  misc_feature (1195)..(1196): n is a, c, g, or t
aattcgcggccgcgtcgacacggctgcgagagacgacagaaggggcctctcggggagggggggggggaagctgggtaaagctgggttggtagctcctacctactgtgtggcaagaaggtatgggtcatgaacagaaccaaggagctgcgctgctacagatgttaccacttctgtggctgctaccccactcctgggccgtccctgaagctcctactccaatgtggccagatgacctgcaaaaccacacattcctgcacacagtgtactgccaggatgggagtcccagtgtgggactctctgaggcctacgacgaggaccagcttttcttcttcgacttttcccagaacactcgggtgcctcgcctgcccgaatttgctgactgggctcaggaacagggagatgctcctgccattttatttgacaaagagttctgcgagtggatgatccagcaaatagggccaaaacttgatgggaaaatcccggtgtccagagggtttcctatcgctgaagtgttcacgctgaagcccctggagtttggcaagcccaacactttggtctgttttgtcagtaatctcttcccacccatgctgacagtgaactggcagcatcattccgtccctgtggaaggatttgggcctacttttgtctcagctgtcgatggactcagcttccaggccttttcttacttaaacttcacaccagaaccttctgacattttctcctgcattgtgactcacgaaattgaccgctacacagcaattgcctattgggtaccccggaacgcactgccctcagatctgctggagaatgtgctgtgtggcgtggcctttggcctgggtgtgctgggcatcatcgtgggcattgttctcatcatctacttccggaagccttgctcaggtgactgattcttccagaccagagtttgatgccagcagcttcggccatccaaacagaggatgctcagatttctcacatcctgcccaggatctcctcttagggtagaagaagtctctgggacatccctggggtgtgtgtgtagatttcccacctggggactctgctgtccctgggcttgcatcccagggatcccagagtggcctgcctatcacaaccacatcccttccccccacaaggcaataaatctcatttctttaaaaaaaaaaaaaaaaaaaaaaaaaaaaaaaaaaaaaaaaanntaaaag

SEQ ID NO: 5470 - DNA, 1726 bp, Homo sapiens
  misc_feature (1554)..(1554): n is a, c, g, or t
agggggactccacttaggctagttcgtgggataaggtgttgacgcgcggaggcggggcggagcctctcctgctgctgctgcgccccatccccccgcggcggccagtttcagcccgcaccccgcgtcggtgcccgcgcccctccccgggccccgccatgggcctcaccgtgtccgcgctcttttcgcggatcttcgggaagaagcagatgcggattctcatggttggcttggatgcggctggcaagaccacaatcctgtacaaactgaagttgggggagattgtcaccaccatcccaaccataggcttcaatgtagaaacagtggaatataagaacatctgtttcacagtctgggacgtgggaggccaggacaagattcggcctctgtggcggcactacttccagaacactcagggcctcatctttgtggtggacagtaatgaccgggagcgggtccaagaatctgctgatgaactccagaagatgctgcaggaggacgagctgcgggatgcagtgctgctggtatttgccaacaagcaggacatgcccaacgccatgcccgtgagcgagctgactgacaagctggggctacagcacttacgcagccgcacgtggtatgtccaggccacctgtgccacccaaggcacaggtctgtacgatggtctggactggctgtcccacgagctgtcaaagcgctaaccagccaggggcaggcccctgatgcccggaagctcctgcgtgcatccccgggatgaccagactcccggactcctcaggcagtgccctttcctcccacttttcctcccccatagccacaggcctctgctcctgctcctgcctgcatgttctctctgttgttggagcctggagccttgctctctgggcacagaggggtccactctcctgcctgctgggacctatggaaggggcttcctggccaaggccccctcttccagaggaggagcagggatctgggtttccttttttttttctgttttgggtgtactctaggggccaggttgggagggggaaggtgagggcttcgggtggtgctataatgtggcactggatcttgagtaataaatttgctgtggtttgaaaaaaaaaaaaaaaaaaaaaaaacaaaacatcacacacaccaacacaacctaacaacaacaaaaacaaaaaaaaaacacggggggggcgcgcgccataaaaattaccccccgggggggcccccaatttgcgcgccccccgttttttgttgtaacaaagggggcccccccacaggggggcgcgcaacaaaaccgggggccggcggcccgcgtaaccaacaccggcggtggcggggggaacaccgcgccgggggtcaatctgtggggcgaagacaccccactcggcgggccggtcgaccctgcggggcacaccaccacgcagaaattaaggcccccgccggcacaaacacaccctgcgcggttcgacggggccacccccggcacttgggtcgtcgtcggaacatgggctgcgtgcttgtttgtctactttagccggcggtcgctgtatacatagaacngatacagaactgcagctgcagtagagctgcttacctatcgatgacatgcaaccaagccgcaagaccaactactccaccacacgaccaaacgacacaagcagcaaagaaagcacacacaatgcaatcagaaccccgtcctgcagcataacagacactgcatcacacacgatcc

SEQ ID NO: 5471 - DNA, 1244 bp, Homo sapiens
tgaaagggatgccaaagtgggtgggagcgcgtgctgttgggagttgcttggaggttggcggcgcggggctgaaggctagcaaaccgagcgatcatgtcgcacaaacaaatttactattcggacaaatacgacgacgaggagtttgagtatcggttagtgctggcgcgggagcaatagcgagggtcgtgagctttggccgctgagggcacaaggaattagtaacaggaactgaggcgatagaattggcgcatgcgtacgagacatgtcatgctgcccaaggacatagccaagctggtccctaaaacccatctgatgtctgaatctgaatggaggaatcttggcgttcagcagagtcagggatgggtccattatatgatccatgaaccagaacctcacatcttgctgttccggcgcccactacccaagaaaccaaagaaatgaagctggcaagctacttttcagcctcaagctttacacagctgtccttacttcctaacatctttctgataacattattatgttgccttcttgtttctcactttgatatttaaaagatgttcaatacactgtttgaatgtgctggtaactgctttgcttcttgagtagagccaccaccaccatagcccagccagatgagtgctctgtggacccacagcctaagctgagtgtgaccccagaagccacgatgtgctctgtatccagaacacacttggcagatggaggaagcatctgagtttgagaccatggctgttacagggatcatgtaaacttgctgtttttgttttttcctgccgggtgttgtatgtgtggtgacttgcggatttatgtttcagtgtactggaaactttccattttattcaagaaatctgttcatgttaaaagccttgattaaagaggaagtttttataatctgaaaaaaaaaaaaaaaaaaaaaaaaaaaaactctgtgggcgcagcactagggcctcagaaaaggttttacacaacctctccgttggcagaccggagccccagaagggtaatgcaacactgggggccaacaaggggggaccccagagggaggatcccgtgggcacaaaaactacaggcagtggggatgtctcccgcattaaaaaacaacggcgcggggggggacaccccgacgagtctgttgtagaacacaatccccaagaggagaggtcccagaggagcacacacggaggtcctcacaacaggggaggtcacagagagaagcggcattcata

SEQ ID NO: 5472 - DNA, 3446 bp, Homo sapiens
  misc_feature (1250)..(1261): n is a, c, g, or t
tcgcccgtcgatcacggcaactgagccatgcattctttcgcttcacgtctctcctcccttcccctgtctctgcctgctcttgctggttctctcatctctcccgttctctctctcgtctcgtctctttttgttctcgtttctttctgtctcttctcttctctcctatccttgtcttcttcgttctctctgtccttcgcgggccctctcttgcctgctctctctcttcctcctctcttccccctccctgcgtgcccccgccatcgtcttgcggcgtatggtcttcttggttttgtactgtcttgagtttgctttccctgtagttgtagtatggttgtgcctccccttgattgtctccctcgtatcgcgtgctccgtcgtttgtgtgccgatgtgcgtcgcgccgcgcggctgttaccgcgtgtggttgttgaccggtggtaccaccattgttggtttgtgtgatgcctcagtgtcggcgtcggtgaaccatgggatgatagaagtgtttgcgctacatgtgtgtgacgcacgccgcaccggtggtattagggggtggcgcgtcgagacggtgtgttcgctggtgggtgcgcgctgtttgtccccttagtctcgcgtgtgatacctatctctcgaccgaccttcgcttttattatcctgcgctctctccacgtgggtccccgtctgtgtttcaccgattttactcgtgatctctctgctcgtttctttcctctcttgttgggaggtggtgttgtttctgtccctctgtttttttttttttttgttttttttttttttttttttttttttttttttttttttttttttttttttttttgttacataaattaacccatttattataggccagtgatgtctcaaagagtagaggagcgtctactggtctttcaactccttcagtcttctgatggcggactttaccgtgacagcggaagtggtattgtacgtccaggcaccgccagccactgtcttcatgcaggaaccacagtgccagatccccacagctcgtctcttcatcttggttttgccacagaaagagcaagtgtacttggcgtgctggctgatttcaattttcttcaccattttccggagggaggccccatagcgggtcccgtatttaccgacgatcccgactttcttggtacgtttggccatgtcgccgcgacctaggtccgagcccagaaaggcagcttttgtagtcttttcgcgtccgctttgattcggccgcaattnnnnnnnnnnnntggaaagccggggtccccggagttgcagctcccggagctccggcggcggctccaccggcgaaagagatcccggaggtcctagtggacccacgcagccggcggcgctatgtgcggggccgctttttgggcaagggcggctttgccaagtgcttcgagatctcggacgcggacaccaaggaggtgttcgcgggcaagattgtgcctaagtctctgctgctcaagccgcaccagagggagaagatgtccatggaaatatccattcaccgcagcctcgcccaccagcacgtcgtaggattccacggctttttcgaggacaacgacttcgtgttcgtggtgttggagctctgccgccggaggtctctcctggagctgcacaagaggaggaaagccctgactgagcctgaggcccgatactacctacggcaaattgtgcttggctgccagtacctgcaccgaaaccgagttattcatcgagacctcaagctgggcaaccttttcctgaatgaagatctggaggtgaaaataggggattttggactggcaaccaaagtcgaatatgacggggagaggaagaagaccctgtgtgggactcctaattacatagctcccgaggtgctgagcaagaaagggcacagtttcgaggtggatgtgtggtccattgggtgtatcatgtataccttgttagtgggcaaaccaccttttgagacttcttgcctaaaagagacctacttccggatcaagaagaatgaatacagtattcccaagcacatcaaccccgtggccgcctccctcatccagaagatgcttcagacagatcccactgcccgcccaaccattaacgagctgcttaatgacgagttctttacttctggctatatccctgcccgtctccccatcacctgcctgaccattccaccaaggttttcgattgctcccagcagcctggaccccagcaaccggaagcccctcacagtcctcaataaaggcttggagaaccccctgcctgagcgtccccgggaaaaagaagaaccagtggttcgagagacaggtgaggtggtcgactgccacctcagtgacatgctgcagcagctgcacagtgtcaatgcctccaagccctcggagcgtgggctggtcaggcaagaggaggctgaggatcctgcctgcatccccatcttctgggtcagcaagtgggtggactattcggacaagtacggccttgggtatcagctctgtgataacagcgtgggggtgctcttcaatgactcaacacgcctcatcctctacaatgatggtgacagcctgcagtacatagagcgtgacggcactgagtcctacctcaccgtgagttcccatcccaactccttgatgaagaagatcaccctccttaaatatttccgcaattacatgagcgagcacttgctgaaggcaggtgccaacatcacgccgcgcgaaggtgatgagctcgcccggctgccctacctacggacctggttccgcacccgcagcgccatcatcctgcacctcagcaacggcagcgtgcagatcaacttcttccaggatcacaccaagctcatcttgtgcccactgatggcagccgtgacctacatcgacgagaagcgggacttccgcacataccgcctgagtctcctggaggagtacggctgctgcaaggagctggccagccggctccgctacgcccgcactatggtggacaagctgctgagctcacgctcggccagcaaccgtctcaaggcctcctaatagctgccctcccctccggactggtgccctcctcactcccacctgcatctggggcccatactggttggctcccgcggtgccatgtctgcagtgtgccccccagccccggtggctgggcagagctgcatcatccttgcaggtgggggttgctgtataagttatttttgtacatgttcgggtgtgggttctacagccttgtccccctccccctcaaccccaccatatgaattgtacagaatatttctattgaattcggaactgtcctttccttggctttatgcacattaaacagatgtgaatattcaaaaaaaaaattaaaaaaaaaaaaaaaaaactcgaaactagttctctctctcccctcgtgccccacaaagggggcaccacaatcacggggtacccaaacacctgtacaccagggggccca

SEQ ID NO: 5473 - DNA, 3503 bp, Homo sapiens
agtctgaagtcatgcaatttgacttttcctttctggaaaccagcgagcagaaatgaaaccgaaactgaattgtccgggaaattcgcggtgggggcggagagcgcagggagaagtaagcccagtgcaggatcctgaggcccgtgtttgcaggaccagggccggccttccgattccccattcattccagaagcaccgaaccacgctgtgcccggatcccaagtgcagcggcacccagcgtgggcctggggttgccggttgacccggtccccagcctggtagcagaggccaggccagtgccacaaggcacctaagtccacctgggcctggagcaggacaggttgcaaaagaaaatatctcgggacccccaaactccttatgctaagggaaacatcgagcctgggaactgagccatcaacgctgccattctttttcccaaacagaaccctgttgtcagaggtacacccagagcaactccacaccgggtgcatgccacagcaactccatcttaaataggagctggtaaaacgaggctgatacctactgggctgcattcccagacggcatagcgaggaggtgctgaagagcgcaggtttggagaatgatcacctggattggaaccatagctctaccaatatggaacccagctccttaggcctcggtcttctcatggagaacatggagagcggaggccgcactccagcactgcgcagggaccgccttggaccgcagttgccggccaggaatcccagtgtcacggtggacacgcctccctcgcgcccttgccgcccacctgctcacccagctcaggggctttggaattctgtggccacactgcgaggagatcggttctgggtcggaggctacaggaagactcccactccctgaaatctggagtgaagaacgccgccatccagccaccattccaaggaggtgcaggagaacagctctgtgataccatttaacttgttgacattacttttatttgaaggaacgtatattagagcttactttgcaaagaaggaagatggttgtttccgaagtggacatcgcaaaagctgatccagctgctgcatcccaccctctattactgaatggagatgctactgtggcccagaaaaatccaggctcggtggctgagaacaacctgtgcagccagtatgaggagaaggtgcgcccctgcatcgacctcattgactccctgcgggctctaggtgtggagcaggacctggccctgccagccatcgccgtcatcggggaccagagctcgggcaagagctccgtgttggaggcactgtcaggagttgcccttcccagaggcagcgggatcgtgaccagatggcccgctggtgctgaaactgaagaaacttgtgaacgaagataagtggagaggcaaggtcagttaccaggactacgagattgagatttcggatgcttcagaggtagaaaaggaaattaataaagcccagaatgccatcgccggggaaggaatgggaatcagtcatgagctaatcaccctggagatcagctcccgagatgtcccggatctgactctaatagaccttcctggcataaccagagtggctgtgggcaatcagcctgctgacattgggtataagatcaagacactcatcaagaagtacatccagaggcaggagacaatcagcctggtggtggtccccagtaatgtggacattgccaccacagaggctctcagcatggcccaggaggtggaccccgagggagacaggaccatcggaatcttgacgaagcctgatctggtggacaaaggaactgaagacaaggttgtggacgtggtgcggaacctcgtgttccacctgaagaagggttacatgattgtcaagtgccggggccagcaggagatccaggaccagctgagcctgtccgaagccctgcagagagagaagatcttctttgagaaccacccatatttcagggatctgctggaggaaggaaaggccacggttccctgcctggcagaaaaacttaccagcgagctcatcacacatatctgtaaatctctgcccctgttagaaaatcaaatcaaggagactcaccagagaataacagaggagctacaaaagtatggtgtcgacataccggaagacgaaaatgaaaaaatgttcttcctgatagataaaattaatgcctttaatcaggacatcactgctctcatgcaaggagaggaaactgtaggggaggaagacattcggctgtttaccagactccgacacgagttccacaaatggagtacaataattgaaaacaattttcaagaaggccataaaattttgagtagaaaaatccagaaatttgaaaatcagtatcgtggtagagagctgccaggctttgtgaattacaggacatttgagacaatcgtgaaacagcaaatcaaggcactggaagagccggctgtggatatgctacacaccgtgacggatatggtccggcttgctttcacagatgtttcgataaaaaattttgaagagttttttaacctccacagaaccgccaagtccaaaattgaagacattagagcagaacaagagagagaaggtgagaagctgatccgcctccacttccagatggaacagattgtctactgccaggaccaggtatacaggggtgcattgcagaaggtcagagagaaggagctggaagaagaaaagaagaagaaatcctgggattttggggctttccaatccagctcggcaacagactcttccatggaggagatctttcagcacctgatggcctatcaccaggaggccagcaagcgcatctccagccacatccctttgatcatccagttcttcatgctccagacgtacggccagcagcttcagaaggccatgctgcagctcctgcaggacaaggacacctacagctggctcctgaaggagcggagcgacaccagcgacaagcggaagttcctgaaggagcggcttgcacggctgacgcaggctcggcgccggcttgcccagttccccggttaaccacactctgtccagccccgtagacgtgcacgcacactgtctgcccccgttcccgggtagccactggactgacgacttgagtgctcagtagtcagactggatagtccgtctctgcttatccgttagccggtgatttagcaggaagctgtgagagcagtttggtttctagcatgaagacagagccccaccctcagatgcacatgagctggcgggattgaaggatgctgtcttcgtactgggaaagggattttcagccctcagaatcgctccaccttgcagctctccccttctctgtattcctagaaactgacacatgctgaacatcacagcttatttcctcatttttataatgtcccttcacaaacccagtgttttaggagcatgagtgccgtgtgtgtgcgtcctgtcggagccctgtctcctctctctgtaataaactcatttctagcagaaaaaaaaaaaaaaaaaaaaaaaaaaaaaaaaaaaaaa

SEQ ID NO: 5474 - DNA, 3820 bp, Homo sapiens
ggggcgcccccacactgctcgcgtcaggagggacgggggcgcccccacactgctcgcgtcaggagggacgggggcgcccccacactgctcgcgtcaggagggacgggggcgcccccccacactgctcgcgtcaggagggacgggggcgaccccacactgctcgcgtcaggagggacgggggcgcccccccacactgctcgcgtcaggagggacgggggcgcccccacactgctcgcatccagtggacaagggtgatgaacggggatttcctggggacctcccttctctttattcgagagctcaggagatactgggaaccaaaggctactgagggccgttttgcagacacgtcaggcaggatccggtgtcctgggagcgcgctgtgccatatcccacatcgggtctcctgtaaatgagccgccgagccgacatgcgtggctgagggcttagctctggacactgtgcctgagagtttcgtgttgagaaggagcccacatgcagagcagtgtgcagtcacgggtgtgtgggcttcgcatccggaaggtgagcctcgtgcccccttcgactgagcacgctcccgagggcaccgtgggtcaggacgtaactcacgtggcatacgcggcgccccgcgcccagctgctttcgctctagcaagcctgtttgggaaacatcttgttgccatgatggtcttagtgctctgtgtgcacatgctcctgtgtaaggttagttgcttttcctgttcaaccctgtggctgtagtttgttgttgcttgggcgagtgtgcacgtgtgagcatatgagtgtgcgtgcaagggtgctgtgtgggcctgcacatgtgaacatgtgtgtgtgctcgtgcacacacatgtgcagccgctcaaggttggggtctgtgttttgttccctgctccatccctgtgtgtagaatgcactggcaggtggtaggtgtgctgtgcatagttgttgactgaatgggtgttggaggggacagagcttgctgcgtgtcccagggtctcctgtgggcgggcagagcagtcactgggccggggcggagggcaggggtgcaggtgctgtctgtgctggtcccgcagagttgacgggcgccgacctgaaggactgcgtcagcaacaacagcctgagcagcaatgccagcctccccagcgtgcagagctgccggcgcctgcgtgagaggagggtcgccagctgggccgtgtcctttgagcgcctgctgcaggaccccgtcggtgtccgctacttctctgattttctaaggaaagaattcagtgaagaaaacattttattctggcaggcctgtgaatattttaatcatgttcctgcacatgacaaaaaggagctttcctacagggcccgggagattttcagtaagtttctctgcagcaaagccaccaccccggtcaacatcgacagccaggcccagctagcagacgacgtcctccgcgcacctcacccagacatgttcaaggagcagcagctgcagatcttcaatctcatgaagtttgatagctacactcgctttctgaagtccccgctgtaccaggaatgcatcctggcggaagtggagggccgtgcactcccggactcgcagcaggtccccagcagcccggcttccaagcacagcctcggttcagaccactccagtgtgtccacgccaaaaaaggtttccatttgatgacagttaagtggaaaatcaaaatccggccgatccctgaatgaagagctgggggatgaggacagcgagaagaagcggaaaggcgcgtttttctcgtggtcgcggaccaggagcaccgggaggtcccagaaaaagagggagcacggggaccacgcagacggtttgtggggtggctcctgggctgtggtgtccaggccaggcagccgcgtccccgtcctggcgtcgctctggtggttggcggtgaccttgggccatgtgtgcagtgagaggccctgttggcgggtcgaggaagcttctctgaatgaataaggaatgccgctgtgtctggggacacgacctgtcagccagccagagggcagcagggctgctccagaatcttccagagaaaagggctcaatacatttcagcccatgcctacctcaggcctaccccacacagtggcggctgaacatctgtgtcctctcctgcttttcactatccaagtaataggtgtttttggtagaaaatttggaaaatacaatcaagtaaaaataggaacacacaaatgtgctattgggtgtctcccccaatggcagcttggttctctgccagggctttttcctaggtagatgtcagggtccatgtgccttttacatgtgtgtggttttttaaaatgtagtagcatagttggagtagtgagcatttttcaagttaagattggtatttgatattgggggctgcccattctggatgctctgtcccttttttcttcgcacatctgagacttcctgtaacaaaagttaggcagagagacggctcccagggcgccagggggtggggctgcagggcccttggcggctcctggccgagctccagacaccagccgggtggttttggcgggtggcagggcagagggcatggagatgcccatgctgaacgctggcgaagatgaggctgttctgtaccaggtgctgaaaagcacataggggagaactgggaagattttcttctctagagatttttgggaaagggattagttttcaggaatgagtgtcctgcctgaaggcaggggactggcacttagcctgtggtctccaagtttaaatcaggcagtgaggtgattgcgatagcaccagctggcatggccctggtggaggcaggtgagcagggtgctctgcgctccgtggctgcggctcctgtgtgtgccctgcagtgccaagcatttgtgcgtggctgctccccgcctgcagggggaagcgttgttcccggggcgctgaaggacgcgctggtgagggcttgacgtgggcagccctgagcttctggccatgctgtgaggtgctcttctccgagcaaaggcagctgagagttgcagagttcacctttgtcggaggccacctgggagatggacactatgttattaggtggggccaggcctcccgagtacctgggagatgggagtgttcgcttcagacagtccatccactcgtgcccatccccatacctggcagatctgcaaagggctttgaaaaccttgatagagccaggcgtgggagctcacgcctgtaatcccagcactttgggaggccgaggcaggcggattgcctgagctcaggagttggtgaccagcctgggcaacatggtaaggctctactaaaaatacaaaaaaaaaaaaaaaaaaaaaaaattaggggccaggcacggtggctcatgcctgtaatcccatcactttgggaggctgaggtgggcagatcaactgaggtcagaagttcgagaccagcctggccaacatgatgaaaccccgtctctactaaaaatacaaaaattagccagatgtgatggcacatgcctgtaatcccagctactcaggaggctgagacaggagaattagttgaacccgggaggtggaggttgcagtgagctgagattgtgccattgaactccagcctgggcaacagagcgagactccgtctcaaaaaaaaaaaaaaaaattagctgggtgtgatggtgggtactttcagtcccagttacttgggaggctgaggcatgagaatcgcttgaacccgggaggcagaggttgcagtgagtggagaactacactccagtttgtgtgacagaacaagactgtctcaaaataaataaatgaaaaaaaaaa

SEQ ID NO: 5475 - DNA, 687 bp, Homo sapiens
  misc_feature (7)..(7): n is a, c, g, or t
  misc_feature (13)..(13): n is a, c, g, or t
  misc_feature (26)..(26): n is a, c, g, or t
  misc_feature (34)..(34): n is a, c, g, or t
  misc_feature (45)..(45): n is a, c, g, or t
taccctntgcccnaggcatggtactngctaatcngaggcaccggngtctttggtttcccctcaattggaatgggaacgttcaccacattctcttaagttctaacaggaataccattgtggttatagaactcagggctgctaaagcaactactctagacccatagttctttttagttagatgtattgaaacagacaaaaatattaacatcagaaaaagctcttgccaattagaggatcttcttaatcctcagcaattaagtttggggtttgaggggggcaggtcattgttacaacagaagtaaatttggcatctatagaaatcaattatgatttttgaaagatttatctaaatatatcaatatagcatctctttaatgttagtcatttattagaaagatcctttatcctgatttgcttaaacctttcaataaattgcactttaaaggattataaataatccatttaaaaattcaagtacacacatcagtgttggttactatgcagagaatgtcattgtgtatagtttcatgtaatctgttatgtcagctgtattttttattaaaatcatgtcaagaaaaaaaaaaaaaaaaaaaaaaaaaaaaaaaaaaaaaaaaaaaaataaaaaaaaaaaaaaaaaaaaaaaaaaaaatatataaaaaaaaactaaaaaaataaaacactagtaac

SEQ ID NO: 5476 - DNA, 352 bp, Homo sapiens
aagctttgcagtgctctctggtgaagcccctgccctggcaccgcctgccgtagcttccctctgggaagtgacttcctggtaaggtaaaaagtgtgtcaccagctgcttctgcaaaacagatgcactggcagcccaggggagtgcttgtgaggtgggaaatggcttctgactgcttaatttagcttcaaaagcacacatattttcatgattaccccccagtggtctatgcacacagacgccctcaggtgctctccaggtacagaccactggggagggtggtgtgcgcacacgcatatgtgtgtgtgtaatttttttttttttttgagacagtcttgctctgtcacccaggctg

SEQ ID NO: 5477 - DNA, 1570 bp, Homo sapiens
gcctgggaggcccgggcagcctcggtccagagcgcgcgaggttcggggagctcggccaggctgctggtacctgcgtccgcccggcgagcaggacaggctgctttggtttgtgacctccaggcaggacggccatcctctccagaatgaagatcttcttgccagtgctgctggctgcccttctgggtgtggagcgagccagctcgctgatgtgcttctcctgcttgaaccagaagagcaatctgtactgcctgaagccgaccatctgctccgaccaggacaactactgcgtgactgtgtctgctagtgccggcattgggaatctcgtgacatttggccacagcctgagcaagacctgttccccggcctgccccatcccagaaggcgtcaatgttggtgtggcttccatgggcatcagctgctgccagagctttctgtgcaatttcagtgcggccgatggcgggctgcgggcaagcgtcaccctgctgggtgccgggctgctgctgagcctgctgccggccctgctgcggtttggcccctgaccgcccagaccctgtcccccgatcccccagctcaggaaggaaagcccagccctttctggatcccacagtgtatgggagcccctgactcctcacgtgcctgatctgtgcccttggtcccaggtcaggcccaccccctgcacctccacctgccccagcccctgcctctgccccaagtggggccagctgccctcacttctggggtggatgatgtgaccttccttgggggactgcggaagggacgagggttccctggagtcttacggtccaacatcaggaccaagtcccatggacatgctgacagggtccccagggagaccgtgtcagtagggatgtgtgcctggctgtgtacgtgggtgtgcagtgcacgtgagagcacgtggcggcttctgggggccatgtttggggagggaggtgtgccagcagcctggagagcctcagtccctgtagccccctgccctggcacagctgcatgcacttcaagggcagcctttgggggttggggtttctgccacttccgggtctaggccctgccccaaatccagccagtcctgccccagcccacccccacattggagccctcctgctgctttggtgcctcaaataaatacagatgtcccccaaaaaaaaaaaaaaaaaaaaaaaaaaaaaaaaaaaaaaaaaagagacacacgggggcgcgcccaaaaacacaccctgagggggcccatgacatcacggcccccccgctccggcaccgggcgccccaaaaaagagcagcacaacccacgcgggacaccggccccggaaaagaagcgccgagacggacacaccgcgccaacgcgcgcaaccggcgagaggccacaaccccccgcggggggaacaccgggcggcccgcacgccccgcgcaccggccgccccgcgcgcgcccgcgaggccaaccacacgcgcaccggccgcgggggcacacaggggccggccacacgcggcaaacccgcggccgcgacgcggacgcgggcccagcgggagcgaccccgacagcgcttatccacggg

SEQ ID NO: 5478 - DNA, 2641 bp, Homo sapiens
  misc_feature (162)..(178): n is a, c, g, or t
  misc_feature (857)..(878): n is a, c, g, or t
  misc_feature (1715)..(1732): n is a, c, g, or t
ttttcatgcttccatagaatcatccctgacctcaggaaaaaatacaaaaatggaacaaacaaaacagaatagtaaaacctgaagtaagaaaaaaagaaatgaatttgacattgtacagatcaggagaaagaaagttcattaacagtttcaagatccctgcgnnnnnnnnnnnnnnnnnacaaattaccatgagttaaggtggggaaattactggcaattcattgccttcttttaaagactttaaaaaaaaatgagtaaataattttagactattaccccctttccatgagagatacacagctagttaaactgccatgcatattaattttttgttttcattttattccacctaccaactacacagtgtctgctttccaaaattagtttgaaagccaatgacctgtgtttgaactgggtgaaatagcatagcagttcacacctggaataaaagaatgattgtgtgtgagtctgttaatggctgtgtagagctatatctctatatggagctatataaaaatatattttatacatgccagattcatttagacttgaattgaccctgtggtaaagcagcaggaataaaatatttttttgataaagcactcactcaaatagagaaatgagctcttgcagttaccatttaatctgtgacttctttttgagatgcagaaaaactccattataaagtgctcagttcatccagggacacagacacactgtgggttataacacaccctcatctgcatggtgaggtacatgagtcagctgctcttctctcaggagggtggctttaaagctccacagtcatgcatgctaccaattccagattgtccaaacctgtaggttagcaaggacannnnnnnnnnnnnnnnnnnnnntgttcataaaaagaaaaatatattttaatacaaaacttgtcaggggagtggagagtgtcaaattgaggacaggagagacctagattcaatgccatagttcttggctaatctctgagaagcttgttagtcaccctctttctccttcccttactctcctgtatcttcccttacatactgcatagtcccttgtaatttacaagacataaaatacttcctttgttcatctgtatactgaatgtaagaatgaacaaaaggtcatcataaggacagcctgtgagtttatgcactgcatactgcaaatgacccactccagcaatgggaagacacccctaacattgcttctctccttataacgaaaatattattcatcatcagctttaaaatggatcttctcactctgtgcagtctccgtggtaacgtcccataagcccagggttttaagacctttctcctgtgctctaagcctacatatctaactgcctaatggcctttccacttgaatgacacatcattcagtttcagtgtcctaaactgaagtttcaactccaagtctgtttttttctcttgtagtcttcatgtcagtcaatcagtcttttatcctaaccagaaatatgtgagttctcatggattcctccctctcactcacttttcagttctataatcacccagttcctacattgtttgcatcttaaatatctcttctagtcctcccttctcctttatacccactgccactgccacaatgttagctccttcagatctcatattttctcacttttattgctatagacataccccccgcagttatcctacctctaggcaaatcccttccaaaannnnnnnnnnnnnnnnnnctttgtaaaatgcttttatgataaagttcaaactcattagcaaagcacacaaagacctttgtgatgtggtattgctgaattaaactactggcagccctagaaaggtaaagtgtatttgatgcttctgtgctgttcccttagcccagaaagcccttccagtttctgtttagtaaagtcctattcatctttcactactcaatgagtcataagtaatcccattaggaaagcctgtgtgatctacctcctccctaatttgccaccttgagtttgcttcaccccttcataatactcagtcaatcataatgtcttataatccatcatagcacctcacacaatgaactccaatgtctggtttgttgggatgtccgccttactacattgtaagcttcttaagggtagaaaccagttctgataggcttagggcagtgaccaccaacagaaaaagtacttggtaaatgtctaacacaatctgttttactttttccagagcacgaggcatgcatgaaagagattaatttactccacatgggaagttactacccaggcttaccaaaaggtcaggtttatataaagtggcgttcctttttttcccccttagtaagacattaaaaaaagaaaccacaattgaaaagccaagagctatctgtgatacggaatatgaacacagaatcagattctcatagcagctaagctgttccccaggcagtggttctcaaggtgtgcttccaagaacagcagcagcagcggcatcacacatgcaaattactggactctgccccagatccacagaattggagactggggatggggcttagcattctgttttaacaagtcctccagatgattctgttgtgtatctagcttgagaatcactgccctggagaatggaaaaaaaaaaaaaaagtcgac

SEQ ID NO: 5479 - DNA, 1813 bp, Homo sapiens
  misc_feature (1166)..(1183): n is a, c, g, or t
aggccccccaacggctgacccctgcacactccaccctggccccccagccagtccagcaatgatggaaaaaaacacctccgagggccctgcctgcagtccagaggagaccgcatctgaatctgccaaggtgcccacagcagagcctcccggagaagtggcagtatcagagtccaccagagaagagcaggtgcccaagccgcacggccctgccccacaggcccctacagcctccacagccactaagcctgcacccccaagtgaagatgtccccagtgccccactgctgctgaccctggatgatgtgagcagcagctctgtgactgtgagctgggagcccccagagaggctggggaggctgggcctccagggctatgtgctggagctctgcagagagggagcctcggagtgggtgcctgtgagtgcccggcccatgatggtgacccagcagactgtgcggaacctggctctgggagacaagttcctcctgcgcgtgtctgcagtgagttctgcaggggctggcccgccggccatgctggaccagcccatccacatccgagagaacattgaggcccccaagatccgtgtcccccgccacctccgtcagacctacatccgccaggtgggagagacggtcaacctgcaaatccccttccaggggaagcctaagcctcaggccacatggacccacaacggccatgccctggacagccagcgggtgagcatgcgcaccggggaccaggactccatcctcttcattcgctcggcccagcgctccgactctggccgctacgagctcactgtgcgcgtggaagacctggaggccaaggcagtcattgacatcctggtgattgagaaacctggaccccccagcagcatcaggctcctggacgtctggggctgcaatgctgctcttcagtggacgccaccccaggacacaggcaacacagagctcctgggctacatggtgcagaaggcagacaaaaagacagggcaatggttcacagtgctggagcgctaccacccaaccacctgcaccatctctgacctcatcatcggcaactcgtactccttccgggtcttctcagaaaacctgtgtggactcagcacctcggccaccgtcaccaaggagctcgcccacatccagaaggcagatattgctgccaaannnnnnnnnnnnnnnnnncgagacttctcagaagccccctcattcacccagcccctggctgaccacacctccacccctggctacagcacccagttgttctgcagtgtcgagcttcaccaagccaagatcatctggatgaaaaacaagatggagatccagggcaaccccaaataccgcgccctctctgagcaaggcgtctgcaccctagagatccggaaacccagcccctttgattctggggtctacacctgcaaggccataaatgtgctgggggaggcatctgtggactgccggctggaggtcaaagcctcagccgcacactgaagagtcacgggaggaggctgtgatgagagccaggtgctgcagcctgaggggccaggtccaccaggcctacagtcaaactccagagatgcccaagacccccgcttccatagcgacggctgatggaaccgcccctggtacctgctggcctcccttccccagaggctggtgtccagaactcaggaatgggcctggtaggccccaggccagactaactgggctcaaggggtgctggaaggcgcagagattggagtgccctgcggagttgcactctgggtgggaagcactcaaataaagatgcgtggtgttaacagtgaaaaaaaaaaa

SEQ ID NO: 5480 - DNA, 2556 bp, Homo sapiens
atttttagtttgttgaagttcgtgactgcttcactctctcattcttagcttgaatttggaaatgacttttgatgacctaaagatccagactgtgaaggaccagcctgatgagaagtcaaatggaaaaaaagctaaaggtcttcagtttctttactctccatggtggtgcctggctgctgcgactctaggggtcctttgcctgggattagtagtgaccattatggtgctgggcatgcaattatcccaggtgtctgacctcctaacacaagagcaagcaaacctaactcaccagaaaaagaaactggagggacagatctcagcccggcaacaagcagaagaagcttcacaggagtcagaaaacgaactcaaggaaatgatagaaacccttgctcggaagctgaatgagaaatccaaagagcaaatggaacttcaccaccagaatctgaatctccaagaaacactgaagagagtagcaaattgttcagctccttgtccgcaagactggatctggcatggagaaaactgttacctattttcctcgggctcatttaactgggaaaagagccaagagaagtgcttgtctttggatgccaagttgctgaaaattaatagcacagctgatctggacttcatccagcaagcaatttcctattccagttttccattctggatggggctgtctcggaggaaccccagctacccatggctctgggaggacggttctcctttgatgccccacttatttagagtccgaggcgctgtctcccagacatacccttcaggtacctgtgcatatatacaacgaggagctgtttatgcggaaaactgcattttagctgccttcagtatatgtcagaagaaggcaaacctaagagcacagtgaatttgaaggctctggaagaaaagaaaaaagtctttgagttttattctggaatttaagctattctttgtcacttgggtgccaaacatgagagcccagaaaactgtcatttaactgggttgcaaaaactcctttgcagaaactggggttccaggtgcctggcacctttatgtcaacatttttgattctagctatctgtattatttcacctagcttgtcccaagcttccctgccagcctgaagtccattttcccctttttattttaaaatttgactcctcttcaagcttgaaaaccctctgaactcagtcttctttacctcattatcaccttcccctcacactcctaaaattgcatgaaagacagaacatggagaacttgctcaagtgcaggcagagagcaaaaaggggaaatatgtctgggaaaaagtgcacgtgaagaaacaaagaaggacagaggccattccgaaatcaagaaactcatgttcttaactttaaaaaaggtatcaatccttggtttttaaactgtggtccatctccagactctaccacttacggacagacagacagacagacacacacacacacacacacacacacattttgggacaagtggggagcccaagaaagtaattagtaagtgagtggtcttttctgtaagctaatccacaacctgttaccacttcctgaatcagttattatttcttcatttttttttctaccagaggacagattaatagatttaacccttcacaacagttcttgttagaatcatgggatgtgtggcccagaggtaagaatagaatttctttccctaaagaacataccttttgtagatgaactcttctcaactctgttttgctatgctataattccgaaacatacaagacaaaaaaaatgaagacactcaatctagaacaaactaagccaggtatgcaaatatcgctgaatagaaacagatggaattagaaatatatcttctatttttaggcttctatttcctttccacccactcttcacaggctattctactttaaaggaagcctttttattttgctgcacacaatctagcaggaatcttttttttttttttaagagctgtgtcatccttatgtaggcaagagatgtttgcttttgttaaaagctttattgagatataattaacataaaataaactgaacatatttaaagtgtactatttgataagttttcacaccttgtggagaacatgcatactacaattaagagagtgaacatatccatcatccctcaaagtgtcacaatgctcctcctgatgactcctccccagaaaaccaccaatcggctttcattttgcattttgtagttttatgtgaatggaatcatatagtatgtcttttttttttgtctggcttctttcactttgcataattattttgagattcatatgtctccatcttgatgctcgtatgaattcattcttttaaatgttgaatattcccttgtatggatataccacaattcatttacccatttacttgttgatgacatttgggttgttttagttttgggatattacaaataaagctgctgtgaacatttgtgtacaaaaaaaaaaaaaaaaaaaaaaaaaacaaacacaacaccacacttcgcggcgccccttcgctccccctccgaaaaagctctccaaaaacac

SEQ ID NO: 5481 - DNA, 2245 bp, Homo sapiens
actacctggtgagtgccggcgcgcgggagggcgggtgagtccggccgggcgggagccggggtgaccatccgtgcccctcgcagcccgacgccgagggtgccttccgccgcggcccgggcctgaacttgaccagcggccagtacagggcgcccgtggctggcttctacgctctcgccgccacgctgcacgtggcgctcggggagccgccgaggagggggccgccgcgcccccgggaccacctgcgcctgctcatctgcatccagtcccggtgccagcgcaacgcctccctggaggccatcatgggcctggagagcagcagtgagctcttcaccatctctgtgaatggcgtcctgtacctgcagatggggtagtggacctccgtgttcttggacaacgccagcggctgctccctcacagtgcgcagtggctcccacttcagtgctgtcctcctgggcgtgtgagcggccaccacaggcccttcctctcaggggcaaatggagcacagatctagacaatgtgtggacagtgtcagagtagcagtggccacatggaggaggaggcccacccggaactctgcccacactggccactgcagttcagcccacagagccactgcaggcaggcctacggacgtgacacgcacgctggtggtcccggagccagggttgattcaggacaccatcttggactctttcctggcctgctcagcacctgcccagatggcctctgcgtctttcctgtgcccagccccaccttttccacctctcttcatgttctcatggagtgcaaagtgcaccagccagggcccctacctgggagagggtcagctgacgcagggctgagggggctgccacagggacgtacgctgtgtgttcttactgcttagaagggacggggtcactcaccactcccctggtctccatctgggctccttggtcttccctgcccctcccctaaccgtgttctacctgccagtggagctgagcactgcctagcctgggccagaggggcactggacaagggcctttgggggacagtaagtctgggcccagcttctagttctaatgtgtgcaagattaactcacaaattcacctcagaaggcctttccaaatgggagctccactcttcccctcctctgcaaatcttcacagccaaggccccttccaccctctccagaggtggatgagatcccttttcccctcccctctgaggtgctgactcactggtaggagccacccaccagaggaaagatctagaacgtctttacagattggagacagccgggcctgctgacccatcatccgaatagctgaagcagagtcttccaccaggggtgccagggcctggctgggtccagcggctctgggatgagcctcccaagcatctttcccacttgggtggccatgcggcgctgacattggacaggtggtggacgagagatggtcccgagaaagggtggtcttgggagggctggtcccaagcctgctgtgctcctgtggcagtgatggggcctggggatggggacggcagctctcatgaggacacacaggctgtgagcccgcagcctcctcaaatgtagcctcccacattttccccaaagtacaggactgtcccagagtaggtagtgaagaggacaaggccctcggcagcgacctccagggcctcctacctgctgaggaagagttaacccactgcctccccacacaacaggctacgaagaacctggtgcctcaggacctcctgggagccaagctggtctggcaagggcgctcaggcctgggagacaagggagcaatggccagtcaccttcaccttctaactaactagcctccggatgaggtggctgccaccaggcccgaatgatccccaggagcccggcttccaaaccccaacatcgaatcaaacatctccatccccaagtgcagtaacacacaaaaaccaaacactctgccctgggaaaggcctggtgcgattctcagtaggactcacacccaccctacctagaagtactgggctggcctgggtactgcatccgtgtgttttgataagggggtgatgtggccacgcccttatctagatttcactttgtatccactgggcacagatattctagagaacttatctttcactcttgtaaaagccacatatccacatctctttcattttctcagtgtgttatgcagcaatttattaaagtatttattgtctaataaaaaaaaaaaaaaggaaaaaaaaaaaaaaaaa

SEQ ID NO: 5482 - DNA, 3262 bp, Homo sapiens
ggtccggaattttcggcttctggagggaggcggcagcgacggaggagggggcttctcagagaaagggagggagggagccacccgggtgaagatacagcagcctcctgaactcccccctcccacccaggccgggacctgggggctcctgccggatccatgggggcggccagctgcgaggatgaggagctggaatttaagctggtgttcggggaggaaaaggaggcccccccgctgggcgcggggggattgggggaagaactggactcagaggatgccccgccatgctgccgtctggccttgggagagccccctccctatggcgctgcacctatcggtattccccgacctccaccccctcggcctggcatgcattcgccaccgccgcgaccagccccctcacctggcacctgggagagccagcccgccaggtcggtgaggctgggaggaccaggagggggtgctgggggtgctgggggtggccgtgttctcgagtgtcccagcatccgcatcacctccatctctcccacgccggagccgccagcagcgctggaggacaaccctgatgcctggggggacggctctcctagagattaccccccaccagaaggctttgggggctacagagaagcaggggcccagggtgggggggccttcttcagcccaagccctggcagcagcagcctgtcctcgtggagcttcttctccgatgcctctgacgaggcagccctgtatgcagcctgcgacgaggtggagtctgagctaaatgaggcggcctcccgctttggcctgggctccccgctgccctcgccccgggcctcccctcggccatggacccccgaagatccctggagcctgtatggtccaagccccggaggccgagggccagaggatagctggctactcctcagtgctcctgggcccaccccagcctccccgcggcctgcctctccatgtggcaagcggcgctattccagctcgggaaccccatcttcagcctccccagctctgtcccgccgtggcagcctgggggaagaggggtctgagccacctccaccacccccattgcctctggcccgggacccgggctcccctggtccctttgactatgtgggggccccaccagctgagagcatccctcagaagacacggcggacttccagcgagcaggcagtggctctgcctcggtctgaggagcctgcctcatgcaatgggaagctgcccttgggagcagaggagtctgtggctcctccaggaggttcccggaaggaggtggctggcatggactacctggcagtgccctccccactcgcttggtccaaggcccggattgggggacacagccctatcttcaggacctctgccctacccccactggactggcctctgcccagccaatatgagcagctggagctgaggatcgaggtacagcctagagcccaccaccgggcccactatgagacagaaggcagccgtggagctgtcaaagctgcccctggcggtcaccccgtagtcaagctcctaggctacagtgagaagccactgaccctacagatgttcatcggcactgcagatgaaaggaacctgcggcctcatgccttctatcaggtgcaccgtatcacaggcaagatggtggccacggccagctatgaagccgtagtcagtggcaccaaggtgttggagatgactctgctgcctgagaacaacatggcggccaacattgactgcgcgggaatcctgaagcttcggaattcagacattgagcttcggaagggtgagacggacatcgggcgcaaaaacacacgtgtacggctggtgttccgggtacacgtgccccagggcggcgggaaggtcgtctcagtacaggcagcatcggtgcccatcgagtgctcccagcgctcagcccaggagctgccccaggtggaggcctacagccccagtgcctgctctgtgagaggaggcgaggaactggtactgaccggctccaacttcctgccagactccaaggtggtgttcattgagaggggtcctgatgggaagctgcaatgggaggaggaggccacagtgaaccgactgcagagcaacgaggtgacgctgaccctgactgtccccgagtacagcaacaagagggtttcccggccagtccaggtctacttttatgtctccaatgggcggaggaaacgcagtcctacccagagtttcaggtttctgcctgtgatctgcaaagaggagcccctaccggactcatctctgcggggtttcccttcagcatcggcaaccccctttggcactgacatggacttctcaccacccaggcccccctacccctcctatccccatgaagaccctgcttgcgaaactccttacctatcagaaggcttcggctatggcatgccccctctgtacccccagacggggcccccaccatcctacagaccgggcctgcggatgttccctgagactaggggtaccacaggttgtgcccaaccacctgcagtttccttccttccccgccccttccctagtgacccgtatggagggcggggctcctctttccccctggggctgccattctctccgccagccccctttcggccgcctcctcttcctgcatccccaccgcttgaaggccccttcccttcccagagtgatgtgcatcccctacctgctgagggatacaataaggtagggccaggctatggccctggggagggggctccggagcaggagaaatccaggggtggctacagcagcggctttcgagacagtgtccctatccagggtatcacgctggaggaagtgagtgagatcattggccgagacctgagtggcttccctgcacctcctggagaagagcctcctgcctgaaccacgtgaactgtcatcacctggcaaccccagccccagcctcagccctgccccctttccctccttcctggagtggtggctacagaagcttggggccaaccctggctcctctttccccagcttctgtctgtctcactgtcttccctcccctcccccagctgaggtgtggccctcaggcctggtgctgccttggagggctgggggaaggagtgtgtggaggagggaggagggtgaagactgaggctaggtgccagaatggactggagtgaaggcgtgtctagagtgtgggctggctgttgtgctggaaagctggggacaggttgatggtaataaactgctcaatgcccagtaaaaaaaaaaaaaaaaaaaaaaaaaaaaaaaaaaaaaaaaaaaaaaa

SEQ ID NO: 5483 - DNA, 623 bp, Homo sapiens
taagcgaaagggggctagccactggggggtggggacaaaatgcgtgtttgttagggcattgttggggccgaaatcccgagtaaagcttgggtttaaaacctgattttcccgtctcggggtattgatcccaaacgcgcagaggcgttgcttgaacgttgtttgaactcctaggcattccagggggcaaaagcacctcggcaaaaacgtgcaggactgcatgttactttggttcgcggctgacacgccgactgtgcgccggcctgtcaatcaccgggagcagcaacagggagcacatggcaacgggctgcgggcgagctggccagcggcccgcccggggtcccagcccttcgaagaaagggacattcacgagcttctatctctaattctctgtcgcaggcatttcggccgtggaaccccaggctcggaggactgggtgtgagcgctgcccgggagaggctgacctgccgggaccggagtgcccggggacgctgtgcccccacttgcccaacgtgcggaatcggctaagcgcgtcggcctgcgcggggcacaagggacgacgcccgcctttctctctccgagaaggatccccaaacctcactctcttcactcctccccgctaaaaa

SEQ ID NO: 5484 - DNA, 531 bp, Homo sapiens
  misc_feature (518)..(518): n is a, c, g, or t
ttttttttgagatatgcagctattttatttctctaaattctctattgccttgacaattatgctccagttggatgttccttctccattcttgtgtaaatattccaaagccgaaagaacaaatgtccaaaagtcattgtcacacaattctgtaaaagacacaaataaatggaagtctcaaaacttctaatgtaaaacttgctggccaagacataatttggatgagcaaatttggggtttggattattttaaatatagactttgttcttaaaatttagtgtaacatacagaaaaacttggtttctgatatggctttacttagattatgtgaggcaaaaatggaaactggaattatcaaatgagtaatagttgtgctggagaagtctatcttatcttcttcactgcagacccttctcagcattatacatgcatagacaaactattcccaaagttctaaaactttccctgtttagctgggatatgatgtctacttccagtttagaatacagaagcagacaccnaaggaaagctttg

SEQ ID NO: 5485 - DNA, 2481 bp, Homo sapiens
  misc_feature (282)..(286): n is a, c, g, or t
gagtttgcatgtggtcaactctgggctcctaagccagcccccagctcacgttacactctatttataacttctcagagccatttccccctgaaagcagttctctgggaccaccttcttttggcttcaacctctcccactcttgacatctgagtagctcagggaagctcttccaggtccgactgttcatatgtaaaggagactggccgctggggctcaggaccgggattatccgagctctgcagaagtgcaccgctattgctttgggagggtaaaaaaaaaaannnnncggcacgagggtgaaaaagtgacagagggtggtggcctttggaaccgtcgtgaagtcttctgcctggaacccgaaacttgcatgctatggaacacccgctctttggctgcctgcgcagccctcacgccacggcgcaaggcttgcacccgttctcccaatcctctctcgccctccatggaagatctgaccatatgtcttaccccgagctctctacttcttcctcatcttgcataatcgcgggataccccaacgaagagggcatgtttgccagccagcatcacagggggcaccaccaccaccaccaccaccaccatcaccaccatcagcagcagcagcaccaggctctgcaaaccaactggcacctcccgcagatgtcttccccaccgagtgcggctcggcacagcctctgcctccagcccgactctggagggcccccagagttggggagcagcccgcccgtcctgtgctccaactcttccagcttgggctccagcaccccgactggggccgcgtgcgcgccgggggactacggccgccaggcactgtcacctgcggaggcggagaagcgaagcggcggcaagaggaaaagcgacagctcagactcccaggaaggaaattacaagtcagaagtcaacagcaaacccaggaaagaaaggacagcatttaccaaagagcaaatcagagaacttgaagcagaatttgcccatcataattatctcaccagactgaggcgatacgagatagcagtgaatctggatctcactgaaagacaggtgaaagtctggttccaaaacaggcggatgaagtggaagagggtaaagggtggacagcaaggagctgcggctcgggaaaaggaactggtgaatgtgaaaaagggaacacttctcccatcagagctgtcgggaattggtgcagccaccctccagcaaacaggggactctatagcaaatgaagacagtcacgacagtgaccacagctcagagcatgcgcacttatgatataaacagaggaccagctccattctcaggaaagaaatgttgtgatggcaagccttacccaaatatcgtttacacagagagatgactatggcagtgatgtttaatattattaaatccaggcatttcgaatctgtttttcatgatttatagagggtttacacaaagtgccacttattaaagagcttccacagtgaagatggagaaggtgaacttgctttgaatattccagatgtgtttggtcgtgcgtatggcagtgagcaggtatgtgtttgcttttgcttgcactgaaaattaaattgctatcaagagcaaactatgaacggttttttattcaagatgtctccagagtgaagatgccgaggatgaacttgcattgaacattccagatgtgtgagatcatgtgtattacagtgggcaggtatttgcttttgcttgcactgaaaattaaattgctatcaagaataaaccatgaaacattttatcctgaacagccacagtgcctgaattcactcaagtggataaaaagtgtattttaactctgtatatattacccttaagtcattttcctgtcttcactaatttagcaatgcattcatattagctgatgaaaataggcactcacaatgacaaccagagccagtttcttgtcttttttatacattttgtcatcccagagacaatcagtatgtgcttacctgtgttcaagtagagaaaaatacagtagagtctgataggacatattcttgtaccacagacaaaacaaatcttatgttgcatttactatcaactgctgctaatacgttattataaaacttacctagctcctgaattcttcctatcttatagcttaaaaaaattaggatcataggcaaatcagttaccttgcagaaagagctttgtatgacagacattgtcttattttatttctgtaaaatattagctgtatgaatatgatttaattaacaagaaaacatttcttcctgattgacaacagtgttagacaaggtgcaaagcgaaactggttgctcaagttgatagaaaacaaaattctgaatatcttcaaattaaattcggtaaaaacacattattttttcatatgtgatgtattcatgcagaacaactatctttgtattttgtttttaaaatgtgtttaataaatgatcctttgtaaataaaaaaaaaaaaaaaaaaaaaaaa

SEQ ID NO: 5486 - DNA, 1057 bp, Homo sapiens
  misc_feature (281)..(281): n is a, c, g, or t
cgtttcctcgttcctggtctcttttccttggctgtattccaagtgccttgatgggtattgcttagtgtcctaatttcccagccttacctaacatggtgatctcaatgtagtagcacccaaaaaaatttgtgaatttagttaaatgaactggaccagtgttcggccatgtgtataattaatatcatgtgtaaccaaatctgtttagtgtcccacatatatgtactatgtatatttttaatggactataatgtaataaagtttatatcatgcttggtgtatanaaacaataggaatcatggtttctaaaaggagtgaattctaagttttagggaaaaaaatgcaatttattttcagactcccaaagtaagaattaacatatcatgctaagaaaatagtgactattttgaagtatgctacttccctttcagaaatatagaatacacgtttctgttattaaagtatttgattactaattcaaatcatatggcaattataattcttctaaaatgctatcatttgtaactgtatcccctgtattaaatctcattaaccacaggcagctgttacagaaagctgcattgtttcacattgagctgttacattagttcaggctaaatgttgggagctccaaccacatccaagaataaatctggaaacacactgctgggatactgctgttagagcccttcttggccttgtattcccagaaatgagctccctttccttagcttagaagaatgtgattatatccaggacatcatgttcagaaaacttagtttactttcagcatagaatgcattactgttggaataattggcctctagctcttaaatgtctctgataacttattaatatctatctttataaaatagagtgcaactacttttgtgtaaaaatgtttgcctttaaatttagtatttcatatcagcacatcgatatatgtataaatgttccatgttaatgtgtaaaagagtctgtaataaattatttttttcacgtgtctctataaagtttttatttcaataaaaatattaacattaaaaaaaaaaaaaaaaaa

SEQ ID NO: 5487 - DNA, 2592 bp, Homo sapiens
gcaacttccacctcccagccccatctcattttcatcctagcggatgatcagggatttagagatgtgggttaccacggatctgagattaaaacacctactcttgacaagctcgctgccgaaggagttaaactggagaactactatgtccagcctatttgcacaccatccaggagtcagtttattactggaaagtatcagatacacaccggacttcaacattctatcataagacctacccaacccaactgtttacctctggacaatgccaccctacctcagaaactgaaggaggttggatattcaacgcatatggtcggaaaatggcacttgggtttttacagaaaagaatgcatgcccaccagaagaggatttgataccttttttggttcccttttgggaagtggggattactatacacactacaaatgtgacagtcctgggatgtgtggctatgacttgtatgaaaacgacaatgctgcctgggactatgacaatggcatatactccacacagatgtacactcagagagtacagcaaatcttagcttcccataaccccacaaagcctatatttttatatattgcctatcaagctgttcattcaccactgcaagctcctggcaggtatttcgaacactaccgatccattatcaacataaacaggaggagatatgctgccatgctttcctgcttagatgaagcaatcaacaacgtgacattggctctaaagacttatggtttctataacaacagcattatcatttactcttcagataatggtggccagcctacggcaggagggagtaactggcctctcagaggtagcaaaggaacatattgggaaggagggatccgggctgtaggctttgtgcatagcccacttctgaaaaacaagggaacagtgtgtaaggaacttgtgcacatcactgactggtaccccactctcatttcactggctgaaggacagattgatgaggacattcaactagatggctatgatatctgggagaccataagtgagggtcttcgctcaccccgagtagatattttgcataacattgaccccatatacaccaaggcaaaaaatggctcctgggcagcaggctatgggatctggaacactgcaatccagtcagccatcagagtgcagcactggaaattgcttacaggaaatcctggctacagcgactgggtcccccctcagtctttcagcaacctgggaccgaaccggtggcacaatgaacggatcaccttgtcaactggcaaaagtgtatggcttttcaacatcacagccgacccatatgagagggtggacctatctaacaggtatccaggaatcgtgaagaagctcctacggaggctctcacagttcaacaaaactgcagtgccggtcaggtatccccccaaagaccccagaagtaaccctaggctcaatggaggggtctggggaccatggtataaagaggaaaccaagaaaaagaagccaagcaaaaatcaggctgagaaaaagcaaaagaaaagcaaaaaaaagaagaagaaacagcagaaagcagtctcaggtaaaccagcaaatttggctcgataatatcgctggcctaagcgtcaggcttgttttcatgctgtgccactccagagacttctgccacctggccgccacactgaaaactgtcctgctcagtgccaaggtgctactcttgcaagccacacttagagagagtggagatgtttatttctctcgctcctttagaaaacgtggtgagtcctgagttccactgctgtgcttcagtcaactgaccaaacactgctttgaattataggaggagaacaataacctaccatccgcaagcatgctaatttgatggaagttacagggtagcatgattaaaactacctttgataaattacagtcaaagattgtgtcacctcaaaggccttgaagaatatattttcttggtgaatttttgtatgtctgtcatatgacacttgggttttttaattaattctattttatatatataaatatatgtttcttttcctgtgaaaagctgtttttctcacatgtgaacagcttgcacctcattttaccatgcgtgagggaatggcaaataagaatgtttgagcacactgcccacaatgaatgtaactattttctaaacactttactagaagaacatttcagtataaaaaacctaatttatttttacagaaaaatattttgttgtttttataaaaagttatgcaaatgacttttatttttatttcctgcataccattagaagaattttatttcatttcttcaaattatcaagcactgtaatactataaattaatgtaatactgtgtgaattcagactataaaaaacatcattcagaaaactttataatcgtcattgttcaatcaagattttgaatgtaataagatgaatatattccttacaaattacttggaaattcaatgtttgtgcagagttgagacaactttattgtttctatcataaactatttatgtatcttaattattaaaatgatttactttatggcaaaaaaaaaaaaaaaaaaaaaaaaaaaaaaaaaaaaaaaaaaaaaaaaaaaa

SEQ ID NO: 5488 - DNA, 428 bp, Homo sapiens
ttaaaataaagattaaattaaatgtcttatgagactaaaactctgatctctgaatattgaaatttccattatatgaagtaatttttgcccaaaatataatttcataacacagttccccgaactgattgaatgaatctagattcagtcagtcttctatggttaataaaatctatagtgaacccaaagaaatgctggtctgcataaagtcacattaatgcaggctgcctattgttaataaaagtactttcaagatattaaatcattagtaatgttttaagatttttgtattatgtcaaaccaaatgggtaaatacataaaggaaaatcaaaaatgtgcatattttctaaaacaaaagaaatccttcccagctaagactttattggataattccattgggatgcaactctcatcaagaactcaccaggggg

SEQ ID NO: 5489 - DNA, 2305 bp, Homo sapiens
caagagttcggcgcgaggggctgggtccctctagccggcgccgctcctcctcctggcaggccggccgcggagtcagctgacgccggcgctccagcctcgcctccccgcgccgcgctctgcgctccccgaaagtggctgcaagccggccgcccactgtcagggttggggggacagagaaagtgatgtgcgccttctaaagcctcgcccagcgccgccgaagcagcttcacctctccaactttctcccaccgactgcttgtcttgaccctgccctccaccctccccagagccacttcgggtgcgcgctcttggttaaagggggggtcaccggctgtctgggatggcttccaattttaatgacatagtgaagcaagggtacgtgaggatccggagcagacgcctcgggatttatcagcgatgctggttagtattcaagaaagcttcaagcaaaggtccaaaaagactggagaaattttctgatgaacgtgctgcatatttcaggtgttatcataaggttacagaactcaataatgtgaagaacgtagctcgattgccaaaaagcaccaagaaacatgccatagggatttatttcaatgacgatacctccaagacttttgcttgcgaatcagatcttgaggctgatgagtggtgcaaagtactccagatggagtgtgtaggaacacggatcaatgacatcagccttggagagcctgacttactggccactggggttgagagagaacagagtgagagattcaatgtgtatttgatgccatctcctaacttagatgtacatggcgaatgtgccttgcagattacatatgagtatatctgtctttgggacgtccagaatcccagagtcaaactcatctcttggccgctaagcgccctgcggcggtatggacgtgatactacgtggttcacttttgaggcagggaggatgtgtgagactggtgaagggctgtttatctttcagacccgagacggggaggccatctatcagaaagtccactctgctgccttggccatagccgagcagcacgagcgcttgctacagagtgtgaaaaactcgatgctccagatgaagatgagtgagcgggccgcctcgctgagcaccatggtgcccctgcctcgcagcgcctactggcagcacatcacacggcagcacagcacgggacagctctaccgcttgcaagatgtttccagccctctgaagcttcatcgaacagagacttttccagcctacagatctgagcactgacagtaactgccaagaattgttaacacacttgtgatgtgtcagccacagattcacccaggaggtcacagaatgacagcaagggaaatgacgaccaagagaagaagcttaaagtcctggctaattgtgtggtcattggaaaactctgcaatacaataattttctttattttctttttcttttttaaattcttagtgtaattgaaacgtgctctatagatattgactctgtgttccctcttttacagctggacagaaagaagtcaatgtcacgaaatgattttctattgtagatactttgtcccttgcacttctctgaatctgtccttttgtggattcttgtgattttccttccaagtgtttcagttgtatgacagtcagtattgacaataaaatggcttttaattatttgttatttgtttacaccctattcctcagttattattactgtggttctgattaactactggaaattatatttgattatatcaccaattagttaaatcagtgcttcgactcactcttatctgttctgttcaaaactatttgttcaaagaacccgttagtattgtttacagggttacagtttctctcacatgctttcctcacccctttacccccctttttgaaagcctttattttgttcggagtctcttcataaaacatttgaaaataaaagatcattcttcacccataaaaaaaaaaaaaaaaaaaaaaaaaaaaaaaaaaaaaaaaaaaaaaaaaaaaaaaaggaggggggggcgcccccaaaaaaacccccacggggggccgcccaaaaaaaagagccacccccccttttgaggaaaaaagggggtccccactatgaaggaggcgcgctaataaaaccggagagagacgaggagcgacacataataaacaagctgtggacagagagaaacaagagctacctagggaggagcacattagtagagcagaagcccacacaatgagcgggggacgaaaaaaagaggggaaacaaacccaaagcgataacaaaccccgcaaggacataatacacgcagagaaac

SEQ ID NO: 5490 - DNA, 2613 bp, Homo sapiens
agccagtctcctccctcctagggtctggtcttgacgatagcatctcgtgttttggggatgcctttccttaccagattcttctaaagcccagctgcacccacccttaagtgggagataaggcttctgcccgcgggctctgcgttcgtccacccggccccgcgtttgctgtggactaaacaggagccactggactagagtacacttgactctcggctctgcggaccaaaaattccaggactaaggaatagcaaggttaggctgaaacagtccacacagggcttgcggtaaacgtcttttcaggagccactcgcccagtgcagtaagtcgtgtacttagttgactcgagcgctccagggagacgcccgaccctactctgcgccgccccggggcaccagctctgcttcctccaggtccactgaggcaggcacgaccagctctgggacagtcagtaaacaagccacgaaccgcgccagggatcagagcacccagagtccccgcccagctgccggcacagccaatcgcagcgcagccaggcggcggggcggtgccggccgaacccagacccgaggttttagaagcagagtcaggcgaagctgggccagaaccgcgacctccgcaaccttgagcggcatccgtggagtgcgcctgcgcagctacgaccgcagcaggaaagcgccgccggccaggcccagctgtggccggacagggactggaagagaggacgcggtcgagtaggtgtgcaccagccctggcaacgagagcgtctaccccgaactctgctggccttgaggtggggaagccggggagggcagttgaggaccccgcggaggcgcgtgactggttgagcgggcaggccagcctccgagccgggtggacacaggttttaaaacatgaatcctacactcatccttgctgccttttgcctgggaattgcctcagctactctaacatttgatcacagtttagaggcacagtggaccaagtggaaggcgatgcacaacagattatacggcatgaatgaagaaggatggaggagagcagtgtgggagaagaacatgaagatgattgaactgcacaatcaggaatacagggaagggaaacacagcttcacaatggccatgaacgcctttggagacatgaccagtgaagaattcaggcaggtgatgaatggctttcaaaaccgtaagcccaggaaggggaaagtgttccaggaacctctgttttatgaggcccccagatctgtggattggagagagaaaggctacgtgactcctgtgaagaatcagggtcagtgtggttcttgttgggcttttagtgctactggtgctcttgaaggacagatgttccggaaaactgggaggcttatctcactgagtgagcagaatctggtagactgctctgggcctcaaggcaatgaaggctgcaatggtggcctaatggattatgctttccagtatgttcaggataatggaggcctggactctgaggaatcctatccatatgaggcaacagaagaatcctgtaagtacaatcccaagtattctgttgctaatgacaccggctttgtggacatccctaagcaggagaaggccctgatgaaggcagttgcaactgtggggcccatttctgttgctattgatgcaggtcatgagtccttcctgttctataaagaaggcatttattttgagccagactgtagcagtgaagacatggatcatggtgtgctggtggttggctacggatttgaaagcacagaatcagataacaataaatattggctggtgaagaacagctggggtgaagaatggggcatgggtggctacgtaaagatggccaaagaccggagaaaccattgtggaattgcctcagcagccagctaccccactgtgtgagctggtggacggtgatgaggaaggacttgactggggatggcgcatgcatgggaggaattcatcttcagtctaccagcccccgctgtgtcggatacacactcgaatcattgaagatccgagtgtgatttgaattctgtgatattttcacactggtaaatgttacctctattttaattactgctataaataggtttatattattgattcacttactgactttgcattttcgtttttaaaaggatgtataaatttttacctgtttaaataaaatttaatttcaaatgtaaaaaaaaaaaaaaaaaaaaaaaaaaaaaaaaccccccccaccggaggacccccccacaagccgccccccccgcccaacccaaaaaaacagggggcccaggggggggcgccccccttaaaaagatccccccccgggggggcgcccaagttttaaccgcccaccccccttttttttctgtgaaaaaaaggggggccccccctaaagggggggcgccctatttaaaaaaacctctggggccctgggccccccgcccctcttttatcaccaaccccccgggggacgggggagagaaaaaaccgtcgcctacctccttggtgggggataaatttttgtgttgggcagggagggacaaccttttctttcttcttgtgtggggggggggcggcgaccacaacaaagtgttgttgggagacacaaacacatcatcccccctcc

SEQ ID NO: 5491 - DNA, 2257 bp, Homo sapiens
  misc_feature (1227)..(1229): n is a, c, g, or t
agcggcatcctctctctagcttctggcgctgcccactgtaacccgactccggcatttgcgtttggggcgccctccctgcgccgggggcgggagcccagcgagcgcagagccccggccccgcgcggcccgagtgccacatcactgcgctggccgtccaaggtccgccgccccaccatgccgcccccgccgctgctgctgctccttacagtcctggtcgtcgccgctgcccggccggggtgcgagtttgagcggaaccccgccgccacctgcgtggacctgcagctcaggacctgcagcgatgccgcctacaaccacaccaccttccccaacctgcttcagcaccggtcgtgggaggtggtggaggccagctccgagtacatcctgctgagcgttctacaccagctcctggaaggccagtgcaacccggacctgcggctgctgggctgtgctgtgctggccccccggtgtgagggcggctgggtgcgcagaccctgccggcacatctgcgagggcctgcgggaggtctgccagcccgccttcgacgccattgacatggcctggccctacttccttgactgccaccgctacttcacgagagaggacgagggctgctatgacccgctggagaagcttcggggaggcctggaggctgacgaggcactgccctcagggctgccgcccaccttcatccgcttcagccaccactcctacgcccagatggtgcgtgtgctgaggcggacggcctcccgctgtgcccacgtggccaggacctacagcatcgggcgcagcttcgacggcagggagctgctggtcatcgagttctccagccgccccggccagcacgagctgatggagcccgaggtgaagctcatcggcaacattcatggcaacgaggtggcgggccgggagatgctcatctacctagcccagtacctgtgctctgagtacctgcttggtaacccccgcatccagcgcctgctcaacaccacccgcatccacctgctgccctccattaaccctgacggctatgaggtggcagctgccgagggtgccggctacaacgggtggacgagcgggaggcagaacgcgcagaacctggatctgaaccgaaatttcccggacctgacgtccgagtactaccggctggcggagacccgcggcgcacgcagcgaccacatccccatcccccagcactactggtggggtaaggtggccccggagacaaannnctgcacggaggggatgcagaccataccctttgtgctctcagccagccttcatgggggcgacctggtggtgtcctaccccttcgacttctccaagcacccccaggaggagaagatgttttctcccacgcccgacgagaagatgttcaagctgctgtccagagcctacgctgacgtccaccccatgatgatggacaggtcggagaataggtgtggaggcaatttcctgaagagggggagcatcatcaacggggcggactggtacagcttcacgggaggcatgtccgatttcaactacctgcacaccaactgctttgagatcacggtagagctgggctgtgtgaagttcccccccgaggaggccctgtacacactctggcagcacaacaaggagtcactcctgaatttcgtggagacggtgcaccggggcatcaaaggtgtggtgacagataaattcggcaagccagtcaaaaacgcccggatctcagtcaaaggcattcgccacgacatcaccacagccccagatggtgactactggagactgctgcccccaggtatccacattgtcattgcccaagcccctggctacgccaaagtcatcaagaaagtcatcatccccgcccggatgaagagggctggccgtgtggacttcattctgcaacctctggggatgggacccaagaactttattcatgggctgcggaggactgggccccacgacccgctgggaggtgccagctctttgggggaggccacggagcccgacccgctccgggcgcgcaggcagccctcggccgacgggagtaagccctggtggtggtcctacttcacatcgctgagcacccacaggccacgctggctgctcaagtactagccccggccccagcacccgccaggatgtggagaccgaggcccatctccgcatcccgggctcctggctcttgattttgtctgccacagacatcccacaaagccgctgccattttattaaagtgttttgatccacaaacaaaaaaaaaaaaaaaaaaaaa

SEQ ID NO: 5492 - DNA, 1149 bp, Homo sapiens
agcggggggcttgaggccgacggggcgccgtacggcggaggcggggtttcagtggcttctggtgctctagggtgagctctgcccggctgcagggatggcggggaggggtaagctcatcgcagtgatcggagacgaggacacggtgactggtttcctgctgggcggcataggggagcttaacaagaaccgccatcccaatttcctggtggtggagaaggatacaaccatcaatgagatcgaagacactttccggcaatttctaaaccgggatgacattggcatcatcctcatcaaccagtacatcgcagagatggtgcggcatgccctggacgcccaccagcagtccatccccgctgtcctggagatcccctccaaggagcacccatatgacgccgccaaggactccatcctgcgcagggccaggggcatgttcactgccgaagacctgcgctaggggactcctcatagccctcagcccttccctcgtttccaggcctctccccaggcttgccatcagccttctttactttttgagcctctgatttccaattccctgctccttcccactccattaagaggctaggtgaggcgcttctaggttgctggggctctgctggttaaggaacaggaagcctgaccatctccctccactacctcttccctgtgctgttacacagtgtcattgttgatgttaaattaaagtcatattcttgcttctctccagaaaaaaaaaaaaaaaaaaattcaacacttttagggtgctccaccctcctgaagcgcttcccgccagcaacttttcaaagatagacaaaaaaggggcgggcccccctcttaaaaataccccccccgggggggccccagagtttaccccgtaacccccactttttttttgtacacaaggggggcccccaattgagggggcccgcattttataagtctaggcgcccggggcccccctttttaccccacctcccggggcctggggaaaaacccgcctaaacttgggggaactttttggggaagggaaccctttccctcccgggggggggggaaaataaattgggaaaaaactcctcctttcggaagattttttaagccttctaggggggaaaaaaataaaatttttttaaggggggataaaggggggta

SEQ ID NO: 5493 - DNA, 355 bp, Homo sapiens
ctacagttctgggtattcatatttgtttcagtcagctaatgttggactctgttagcacagctgtttggaatttaaacttttcaagaattctttcatccttattattcattcctgttttattcttggatatcctaagtgcatacccagactaatgataatatcaacacttgttcagtatggttggtcatttttaaaaataaacaggcaatttatgggtgacccacacaaagaacagctgctgccatcactcacgccctctccattgttgatggcctctgcaactgacattgtcccaagcagctgctgacagagctgccagtacctgtttccacgtccaacctttattctattcgtt

SEQ ID NO: 5494 - DNA, 1092 bp, Homo sapiens
ttgtttcctttgtattgtttctcccgtctttgcctctctggttgcaccctagggtcaaaatcttgggcacaatcatacgggtcccaatagtgtgccataacaatgaggggccgtgtgtctgcccttctagcatccatggcatgtgtaagagaagacaattctaccactcaactggggtcactttcatgaaccgagtgtccgacagccttgaaactcactgaaaaagctcaatggactatgtgacctctatcgtattcattctccatggtctctaaagccaggctgaggactttcaccagacagatgaatatggataagttaatatttgacatagtggatctctgtaccacctgggaggccatggagaagtgtaaggatgcaggattggccaagtccattggggtgtcaaacttcaaccgcaggcagctggagatgatcctcaacaagccaggactcaagtacaagcctgtctgcaaccaggtagaatgtcatccgtatttcaaccggagtaaattgctagatttctgcaagtcgaaagatattgttctggttgcctatagtgctctgggatctcaacgagacaaacgatgggtggacccgaactccccggtgctcttggaggacccagtcctttgtgccttggcaaaaaagcacaagcgaaccccagccctgattgccctgcgctaccagctgcagcgtggggttgtggtcctggccaagagctacaatgagcagcgcatcagacagaacgtgcaggtttttgagttccagttgactgcagaggacatgaaagccatagatggcctagacagaaatctccactattttaacagtgatagttttgctagccaccctaattatccatattcagatgaatattaacatggagagctttgcctgatgtctaccagaagccctgtgtgtggatggtgacgcagaggacgtctctatgccggtgactggacatatcacctctacttaaatccgtcctgtttagcgacttcagtcaactacagctgagtccataggccagaaagacaataaatttttatcattttgaaataaaaaaaaaaaaaaaaaaaaaaaattaaa

SEQ ID NO: 5495 - DNA, 3132 bp, Homo sapiens
  misc_feature (228)..(247): n is a, c, g, or t
  misc_feature (1278)..(1310): n is a, c, g, or t
  misc_feature (2866)..(2866): n is a, c, g, or t
agcttccaacacacagtccacaacacagcttgggaaccaaaaaagctacagatccagccactcagcccaagcatgggagaactaccagcattgcctcattgcaaaaaagaggaggaaaacaacgtgatccatgtttaacaaaagagtctgtggactaggaggtgggagggtaactacctgctgaaagtgaactttctttgatatccatgcatatatataaactcagcnnnnnnnnnnnnnnnnnnnnactgattcactgatcagattacaggcatttcatctccctgctcgtctgcctttgatctgcatggttaattttattttcctggcatttgaagtttcgtctgggcttgtgctgacatacatttttgggaaggtagaagcatttggcacagcaagtgcggacctgcagcctcccaggtggctgggaagaactctccaacaataaatacatttgataagaaagatggctttaaaagtgctactagaacaagagaaaacgtttttcactcttttagtattactaggctatttgtcatgtaaagtgacttgtgaatcaggagactgtagacagcaagaattcagggatcggtctggaaactgtgttccctgcaaccagtgtgggccaggcatggagttgtctaaggaatgtggcttcggctatggggaggatgcacagtgtgtgacgtgccggctgcacaggttcaaggaggactggggcttccagaaatgcaagccctgtctggactgcgcagtggtgaaccgctttcagaaggcaaattgttcagccaccagtgatgccatctgcggggactgcttgccaggattttataggaagacgaaacttgtcggctttcaagacatggagtgtgtgccttgtggagaccctcctcctccttacgaaccgcactgtgccagcaaggtcaacctcgtgaagatcgcgtccacggcctccagcccacgggacacggcgctggctgccgttatctgcagcgctctggccaccgtcctgctggccctgctcatcctctgtgtcatctattgtaagagacagtttatggagaagaaacccagctggtctctgcggtcacaggacattcagtacaacggctctgagctgtcgtgttttgacagacctcagctccacgaatatgcccacagagcctgctgccagtgccgccgtgactcagtgcagacctgcgggccggtgcgcttgctcccatccatgtgctgtgaggaggcctgcagccccaacccggcgactcttggttgtggggnnnnnnnnnnnnnnnnnnnnnnnnnnnnnnnnncaggcccagccggggagatggtgccgactttcttcggatccctcacgcagtccatctgtggcgagttttcagatgcctggcctctgatgcagaatcccatgggtggtgacaacatctctttttgtgactcttatcctgaactcactggagaagacattcattctctcaatccagaacttgaaagctcaacgtctttggattcaaatagcagtcaagatttggttggtggggctgttccagtccagtctcattctgaaaactttacagcagctactgatttatctagatataacaacacactggtagaatcagcatcaactcaggatgcactaactatgagaagccagctagatcaggagagtggcgctgtcatccacccagccactcagacgtccctccaggaagcttaaagaacctgcttctttctgcagtagaagcgtgtgctggaacccaaagagtactcctttgttaggcttatggactgagcagtctggaccttgcatggcttctggggcaaaaataaatctgaaccaaactgacggcatttgaagcctttcagccagttgcttctgagccagaccagctgtaagctgaaacctcaatgaataacaagaaaagactccaggccgactcatgatactctgcatctttcctacatgagaagcttctctgccacaaaagtgacttcaaagacggatgggttgagctggcagcctatgagattgtggacatataacaagaaacagaaatgccctcatgcttattttcatggtgattgtggttttacaagactgaagacccagagtatactttttctttccagaaataatttcataccgcctatgaaatatcagataaattaccttagcttttatgtaaaaaaaaaaaaaaaaaaaaaaattctatttgagaaggacactttttcatcatctaaactgattcgcataggtggttagaatggccctcatattgcctgcctaaatcttgggtttattagatgaagtttactgaatcagaggaatcagacagaggaggatagctctttccagaatccacacttctgacctcagcctcggtctcatgaacacccgctggatctcaggagaacacctgggctagggaatgtggtcgagaaagggcagcccattgcccagaattaacacatattgtagagacttgtatgcaaaggttggcatatttatatgaacaattagttgctatagaaacatttgttgcatctgtccctctgcctgagcttagaaggttatagaacaaagggtatttataaacataaatgaccttttacttgcttgtgatcttatactaaaggctttagaaatttcacatatcaggttcccctactactggaagtagccttccgtgagaacacaccacatgtttgactttaggaaatgccactgtcgcgttggttaacctgactgccccatggttggcgaatatttggcccccacggtgaaattgccatccccttacccggggtaaaagggcgcgtataaccacaatcccaaatgcttcataaacccccgaaagcgttncttttcgtaacgctttgacttttctatacttatatcaaaccacctccaggagcgccacccacacccccccccgcccgacagcggcgcacggcagcgagccaccgcgacgcaccacgcagccgcacgcgacccagcacaccacgccaacacacccacaacccgcgcgcgcgccagagccccgcacagcgacacccgccccagcaccaagcacgcgacacccccgcccccccccccaaccgaacccgcagcgcggccagcaacccacc

SEQ ID NO: 5496 - DNA, 5685 bp, Homo sapiens
cgccgcggtgctgagggggaggggagccggcgagcgcgcgcgcagcgggggcgcgggtggcgcgcgtgtgtgtgaagggggggcggtggccgaggcgggcgggcgcgcgcgcgaggcttcccctcgtttggcggcggcggcggcttctttgtttcgtgaagagaagcgagacgcccattctgcccccggccccgcgcggaggggcgggggaggcgccgggaagtcgacggcgccggcggctcctgcaggaggccactgtctgcagctcccgtgaagatgtccactccagacccacccctgggcggaactcctcggccaggtccttccccgggccctggcccttcccctggagccatgctgggccctagcccgggtccctcgccgggctccgcccacagcatgatggggcccagcccagggccgccctcagcaggacaccccatccccacccaggggcctggagggtaccctcaggacaacatgcaccagatgcacaagcccatggagtccatgcatgagaagggcatgtcggacgacccgcgctacaaccagatgaaaggaatggggatgcggtcagggggccatgctgggatggggcccccgcccagccccatggaccagcactcccaaggttacccctcgcccctgggtggctctgagcatgcctctagtccagttccagccagtggcccgtcttcggggccccagatgtcttccgggccaggaggtgccccgctggatggtgctgacccccaggccttggggcagcagaaccggggcccaaccccatttaaccagaaccagctgcaccagctcaaagctcagaatacttggcctacaagatgctggccagggggcagcccctccccgaccacctgcagatggcggtgcagggcaagcggccgatgcccgggatgcagcagcagatgccaacgctacctccaccctcggtgtccgcaacaggacccggccctggccctggccctggccccggcccgggtcccggcccggcacctccaaattacagcaggcctcatggtatgggagggcccaacatgcctcccccaggaccctcgggcgtgccccccgggatgccaggccagcctcctggagggcctcccaagccctggcctgaaggacccatggcgaatgctgctgcccccacgagcacccctcagaagctgattcccccgcagccaacgggccgcccttcccccgcgccccctgccgtcccacccgccgcctcgcccgtgatgccaccgcagacccagtcccccgggcagccggcccagcccgcgcccatggtgccactgcaccagaagcagagccgcatcacccccatccagaagccgcggggcctcgaccctgtggagatcctgcaggagcgcgagtacaggctgcaggctcgcatcgcacacgaatttcaggaacttgaaaacctccccgggtccctggccggggatttgcgaaccaaagcgaccattgagctcaaggccctcaggctgctgaacttccagaggcagctgcgccaggaggtggtggtgtgcatgcggagggacacagcgctggagacagccctcaatgctaaggcctacaagcgcagcaagcgccagtccctgcgcgaggcccgcatcactgagaagctggagaagcagcagaagatcgagcaggagcgcaagcgccggcagaagcaccaggaatacctcaatagcattctccagcatgccaaggatttcaaggaatatcacagatccgtcacaggcaaaatccagaagctgaccaaggcagtggccacgtaccatgccaacacggagcgggagcagaagaaagagaacgagcggatcgagaaggagcgcatgcggaggctcatggctgaagatgaggaggggtaccgcaagctcatcgaccagaagaaggacaagcgcctggcctacctcttgcagcagacagacgagtacgtggctaacctcacggagctggtgcggcagcacaaggctgcccaggtcgccaaggagaaaaagaagaaaaagaaaaagaagaaggcagaaaatgcagaaggacagacgcctgccattgggccggatggcgagcctctggacgagaccagccagatgagcgacctcccggtgaaggtgatccacgtggagagtgggaagatcctcacaggcacagatgcccccaaagccgggcagctggaggcctggctcgagatgaacccggggtatgaagtagctccgaggtctgatagtgaagaaagtggctcagaagaagaggaagaggaggaggaggaagagcagccgcaggcagcacagcctcccaccctgcccgtggaggagaagaagaagattccagatccagacagcgatgacgtctctgaggtggacgcgcggcacatcattgagaatgccaagcaagatgtcgatgatgaatatggcgtgtcccaggcccttgcacgtggcctgcagtcctactatgccgtggcccatgctgtcactgagagagtggacaagcagtcagcgcttatggtcaatggtgtcctcaaacagtaccagatcaaaggtttggagtggctggtgtccctgtacaacaacaacctgaacggcatcctggccgacgagatgggcctggggaagaccatccagaccatcgcgctcatcacgtacctcatggagcacaaacgcatcaatgggcccttcctcatcatcgtgcctctctcaacgctgtccaactgggcgtacgagtttgacaagtgggccccctccgtggtgaaggtgtcttacaagggatccccagcatgcaagatcggccctttgtcccccagctccggagtgggaagttcaacgtcttgctgacgacgtacgagtacatcatcaaagacaagcacatcctcgccaagatccgttggaagtacatgattgtggacgaaggtcaccgcatgaagaaccaccactgcaagctgacgcaggtgctcaacacgcactatgtggcaccccgccgcctgctgctgacgggcacaccgctgcagaacaagcttcccgagctctgggcgctgctcaacttcctgctgcccaccatcttcaagagctgcagcaccttcgagcagtggtttaacgcaccctttgccatgaccggggaaaaggtggacctgaatgaggaggaaaccattctcatcatccggcgtctccacaaagtgctgcggcccttcttgctccgacgactcaagaaggaagtcgaggcccagttgcccgaaaaggtggagtacgtcatcaagtgcgacatgtctgcgctgcagcgagtgctctaccgccacatgcaggccaagggcgtgctgctgactgatggctccgagaaggacaagaagggcaaaggcggcaccaagaccctgatgaacaccatcatgcagctgcggaagatctgcaaccacccctacatgttccagcacatcgaggagtccttttccgagcacttggggttcactggcggcattgtccaagggctggacctgtaccgagcctcgggtaaatttgagcttcttgatagaattcttcccaaactccgagcaaccaaccacaaagtgctgctgttctgccaaatgacctccctcatgaccatcatggaagattactttgcgtatcgcggctttaaatacctcaggcttgatggaaccacgaaggcggaggaccggggcatgctgctgaaaaccttcaacgagcccggctctgagtacttcatcttcctgctcagcacccgggctggggggctcggcctgaacctccagtcggcagacactgtgatcatttttgacagcgactggaatcctcaccaggacctgcaagcgcaggaccgagcccaccgcatcgggcagcagaacgaggtgcgtgtgctccgcctctgcaccgtcaacagcgtggaggagaagatcctagctgcagccaagtacaagctcaacgtggaccagaaggtgatccaggccggcatgttcgaccagaagtcctccagccatgagcggcgcgccttcctgcaggccatcctggagcacgaggagcaggatgagagcagacactgcagcacgggcagcggcagtgccagcttcgcccacactgcccctccgccagcgggcgtcaaccccgacttggaggagccacctctaaaggaggaagacgaggtgcccgacgacgagaccgtcaaccagatgatcgcccggcacgaggaggagtttgatctgttcatgcgcatggacctggaccgcaggcgcgaggaggcccgcaaccccaagcggaagccgcgcctcatggaggaggacgagctcccctcgtggatcatcaaggacgacgcggaggtggagcggctgacctgtgaggaggaggaggagaagatgttcggccgtggctcccgccaccgcaaggaggtggactacagcgactcactgacggagaagcagtggctcaaggccatcgaggagggcacgctggaggagatcgaagaggaggtccggcagaagaaatcatcacggaagcgcaagcgagacagcgacgccggctcctccaccccgaccaccagcacccgcagccgcgacaaggacgacgagagcaagaagcagaagaagcgcgggcggccgcctgccgagaaactctcccctaacccacccaacctcaccaagaagatgaagaagattgtggatgccgtgatcaagtacaaggacagcagcagtggacgtcagctcagcgaggtcttcatccagctgccctcgcgaaaggagctgcccgagtactacgagctcatccgcaagcccgtggacttcaagaagataaaggagcgcattcgcaaccacaagtaccgcagcctcaacgacctagagaaggacgtcatgctcctgtgccagaacgcacagaccttcaacctggagggctccctgatctatgaagactccatcgtcttgcagtcggtcttcaccagcgtgcggcagaaaatcgagaaggaggatgacagtgaaggcgaggagagtgaggaggaggaagagggcgaggaggaaggctccgaatccgaatctcggtccgtcaaagtgaagatcaagcttggccggaaggagaaggcacaggaccggctgaagggcggccggcggcggccgagccgagggtcccgagccaagccggtcgtgagtgacgatgacagtgaggaggaacaagaggaggaccgctcaggaagtggcagcgaagaagactgagccccgacattccagtctcgaccccgagcccctcgttccagagctgagatggcataggccttagcagtaacgggtagcagcagatgtagtttcagacttggagtaaaactgtataaacaaaagaatcttccatatttatacagcagagaagctgtaggactgtttgtgactggccctgtcctggcatcagtagcatctgtaacagcattaactgtcttaaagagagagagagagaattccgaattggggaacacacgatacctgtttttcttttccgttgctggcagtactgttgcgccgcagtttggagtcactgtagttaagtgtggatgcatgtgcgtcaccgtccactcctcctactgtattttattggacaggtcagactcgccgggggcccggcgagggtatgtcagtgtcactggatgtcaaacagtaataaattaaaccaacaacaaaacgca

SEQ ID NO: 5497 - DNA, 3783 bp, Homo sapiens
  misc_feature (299)..(316): n is a, c, g, or t
  misc_feature (1056)..(1065): n is a, c, g, or t
cggggtagttatgggaaagaacctagagagcaagaagaaaagaggaatggtgcccgaatctgggagagatagacttcaggatggccagtcattgaatgggggataggtgaagaacagagcctctcaatcagacgggtgtaaataagagacggaggggagtccaaaagaaaaggaagaggaggaaaaacaagtgtgtgttggggggaacagggggaaaagcatttttggtggatggtatgaagccagccatggaaactgcagccgaggaaaatactgaacaaagccaagagagaaaaggnnnnnnnnnnnnnnnnnnatcaagtgtctgggaggagtcccctacgcctccctggtggccaccatcctctgcttctccggggtggccttattctgcggctgtgggcatgtggctctcgcaggcaccgtggcgattcttgagcaacacttctccaccaacgccagtgaccatgccttgctgagcgaggtgatacaactgatgcagtatgtcatctatggaattgcgtcctttttcttcttgtatgggatcattctgttggcagaaggcttttacaccacaagtgcagtgaaagaactgcacggtgagtttaaaacaaccgcttgtggccgatgcatcagtggaatgttcgttttcctcacctatgtgcttggagtggcctggctgggtgtgtttggtttctcagcggtgcccgtgtttatgttctacaacatatggtcaacttgtgaagtcatcaagtcaccgcagaccaacgggaccacgggtgtggagcagatctgtgtggatatccgacaatacggtatcattccttggaatgctttccccggaaaaatatgtggctctgccctggagaacatctgcaacacaaacgagttctacatgtcctatcacctgttcattgtggcctgtgcaggagctggtgccaccgtcattgccctgctgatctacatgatggctactacatataactatgcggttttgaagtttaagagtcgggaagattgctgcactaaattctaaattgcataaggagttttagnnnnnnnnnntgctctgtagcatgaaatatcactgacactccagactaaagcagagtctaggtttctgcaattttgttacagtaatttgtaaatagctttagtaaactcaccttgcatggtagattaataagatgacttactgtacatgaattacacaataatgagatctggtggctatttccacattttgaaaaggattcagttatttactgacagtggtgagcatcctttttaaaataatgttctcatacttaaacattagagagcagtatctttaaatgaattattaacactttggaatacttacattttctgttatttttgattgcctgataaccagtttcaatgatgaaaatgaaaacaagtgctgaagatgaaatggaagagaaccgttttaatctggattttgttttgtcacacctggaaaatactttgcaaatatgttctaaattgaaaacaatttttttatgatcacatggttcactaccaaatgaccctcaaataagccagatgaaaatttgaagaaaaaggtcacccagttctctggaaaaaaaaaaaaaaaaaaaaaaaaaaggatttatatgtgggtagtttttttttttggtacaacacaatcattctgttagagcccacaaaattggtaaccttaaattgtgtgttttggtaagtaaataactaactgtttcctcaatagctagtttttaagctgcatgtaagattttaacgggaagagaaaataggcctggacctgaaggtctcaaatatgttgagaagaaagtatgaactataaggaacttgagatgtagatttattttgcaggaaatacgaggaaaatagggaaagaagtgtttgccgcatcaagtgtaaagaatgatactgaggatttttacattttatgaaatgaaataatggcatttacaaaatgaaaaatgtagtttcacaactaagttttgttaaccagagactggcatgctttgcttatagttcttaattttggttttgacattcatttaattttttccatgttaaatatgtagtttaattatttactcaaaataaacattgttcatgcttttaggcctttgggggaattgatttttatccacaggtagaaaatggtctttgcacacactacacttatttcaaatatacaatgtgctcccgaactttcgcattagtctttaaaattactctcaaaatggtattaaaaaaaaaaaaaaaagcaccctctcgtatttcattttggctttttcttaacaatacctttgggccattttttcccagttcactatgttggtatactaacttttcttcagccttttaatgcgaagccaactagtagagcatgctttcagggatctgacagctctgctagtagagcgagtatttattaatacagaattaaccttcgccccttttaagtcaagtctggtctaatctaactagcgcctcgcttggccttctcacaatggctcactagccatcatgctcacccttctcttccagatccacttcctcatgatactgtcttctaactggggcttacttaaagggatgcgagcaaaatgcaggcttaccaggatatcaaagcaaagggaagaacaggaactgcaagatatccagtctcggtcaaaagaacaactcaattcttacacataaatgtttgccagagtgtttcggccgacgtatttacagctctgacaaatcatcagacagctgctctgcagtacagatgtgtatcccaccaaactaatgtagatgtacaaacacttcactgtctgtctcaagctgctgggatgtatctctaggaaaaccttccagtgggtaaatctttttctttagaacaaatattggaggtttcatgttagccattttaaaaggcaacactttgacaaaatgatcgttcatactttgggaatttgtggcatgttcacatttattgctagggcaattctaccaagacactcaatggaatatgtcacactccttaatagggacctgtgactccttaataaggacctgtgacatgcccagcatcaagggataagaccgtaaattcacatatatgccatctgtcctcaagtgttatctacataggaaataaaatggaattgatgtaaagttccatttctgacagctgacatttattaaactttggatcaaagataatgtgattcttatgattgatttctcaaactagcttttccctcccaagtccagggacccattaatttcctgagccaatcagaaatatatttttcaataatgctaaaattagctacaattctgctgaccctactattaaagaatctggatgctggactcactgacaagctttccagaagcaattttataacagatttcattttaacaaaatactgatccaattttcattattcttgagaaatgtcagctttgccttaatgagtatttgctttaaatttctaagaatttatatcataacttagagaaccaaatatcttttcacagaattttgtgtcctaaatgtttcttcttaattattaagaagtggtacctttttaaaatgaccaccattctaaacacattttcgtggtcctggtaccagatacgtcttcccctttttcccattgggtggcgcgaacctacccctttttagagcatacaaacagggggggcactctactatcgcaaaagtgacgacgacgacacacacctcttatattataggggggcatctctagacag

SEQ ID NO: 5498 - DNA, 420 bp, Homo sapiens
  misc_feature (410)..(410): n is a, c, g, or t
tttttaagggaatgtcatagtgtagctgctgaagtggatattatcaatatggcagacaaagtaaattctaccaaggaacaatgcatgccaactccatatactgtgaggaaggaaacaggatgactatgcatggttacagcagaatgactgacggagcataatggctcattaccaaaggctctggcacacctgcaggaaggcacctctgcctgcattaggtactaccacagaatctgtctgttatgcaccatggaatacaccatgatcagtgagctcttcaaagaccattctgggaaacccggggcagaaatactatccacctatgtgatgggccacctgaaggcaacatgtcagcatgtttaaggcctccccaatttgacggtaggggcattcatggggttccaattccnggttttgttc

SEQ ID NO: 5499 - DNA, 2471 bp, Homo sapiens
  misc_feature (1527)..(1527): n is a, c, g, or t
ttccacccctactcgccctctctctctctgcttctttccttttctctctcatggtagggttatgagtcagttgccaaaaggtggggacatttcctgatgcatttgcaacactgagaagttatcttaagggaggctgggccccattctactcatctggcccagaaagtgaacaccttgggggccactaaggcagccctgctaggctagtctttcagccttcaggctgtttttggcttgaagctctcttggcctcctagtttctacctaatcatgtccctggtggaggccatcagcctctggaatgaaggggtgctggcagcggacaagaaggactggaagggagccctggatgccttcagtgccgtccaggacccccactcccggatttgcttcaacattggctgcatgtacactatcctgaagaacatgactgaagcagagaaggcctttaccagaagcattaaccgagacaagcacttggcagtggcttacttccaacgagggatgctctactaccagacagagaaatatgatttggctatcaaagaccttaaagaagccttgattccagcttcgagggaaccagctgatagactataagatcctggggctccagttcaagctgtttgcctgtgaggtgttatataacattgctttcatgtatgccaagaaggaggaatggaaaaaagctgaagaacagttagcattggccacgagcatgaagtctgagcccagacattccaaaatcgacaaggcgatggagtgtgtctggaagcagaagctatatgagccagtggtgatccctgtgggcaggctgtttcgaccaaatgagagacaagtggctcagctggccaagaaggattacctaggcaaggcgacggtcgtggcatctgtggtggatcaagacagtttctctgggtttgcccctctgcaaccacaggcagctgagcctccacccagaccgaaaaccccagagatcttcagggctctggaaggggaggctcaccgtgtgctatttgggtttgtgcctgagacaaaagaagagctccaggtcatgccagggaacattgtctttgtcttgaagaagggcaatgataactgggccacggtcatgttcaacgggcagaaggggcttgttccctgcaactaccttgaaccagttgagctgcggatccaccctcagcagcagccccaggaggaaagctctccgcagtccgacatcccagctcctcctagttccaaagcccctggaagaccccagctgtcaccaggccagaaacaaaaagaagagcctaaggaagtgaagctcagtgttcccatgccctacacactcaaggtgcactacaagtacacggtagtcatgaagactcagcccgggctcccctacagccaggtccgggacatggtgtctaagaaactggagctccggctggaacacactaagctgagctatcggcctcgggacagcaatgagctggtgcccctttcagaagacagcatgaaggatgcctggggccaggtgaaaanctactgcctgactctgtggtgtgagaacacagtgggtgaccaaggctttccagatgaacccaaggaaagtgaaaaagctgatgctaataaccagacaacagaacctcagcttaagaaaggcagccaagtggaggcactcttcagttatgaggctacccaaccagaggacctggagtttcaggaaggggatataatcctggtgttatcaaaggtgaatgaagaatggctggaaggggagtgcaaagggaaggtgggcattttccccaaagtttttgttgaagactgcgcaactacagatttggaaagcactcggagagaagtctaggatgtttcacaaactacaaagctgaagaaaatgaagccctattacttgtttgtaagatttagcacccttctgctgtatactgtactgagacattacagtttggaagtgttaactatttattccctgttaaaatttaacctactagacaatgatgtgagtacccaggatgatttcctggggcacagtgggtgaggagatggggacaggtgaatggaggagttaggggagaggaaaagtggatggaagtgtctggaaagggcacgagagagtcttccaggtactgatcctgtttcttgctctgagtgctagctagccagctgtgttcacactgtaaacattcatcaagctgtacatttggtgcacttttctgtgtcataccacaataaaaaaaaacctatcatcttacaaaaacaagacacccaagtccaggcccaaggagtaagtacaaatattcctgtttctgaaccattactgtaattggctcttaaggcttgaagtaaccttataggttactcataaggcatatacaaataaacttgtttgttttcttttttcaaaaaaaaaaaaaaaaaatttttttatttttttttttttttttttttttatttattttatatct

SEQ ID NO: 5500 - DNA, 521 bp, Homo sapiens
  misc_feature (327)..(327): n is a, c, g, or t
  misc_feature (462)..(462): n is a, c, g, or t
  misc_feature (472)..(472): n is a, c, g, or t
  misc_feature (508)..(508): n is a, c, g, or t
ggtctccctttgttgttcaggctcatcttgaactcctggtgtcaagcgatcctcccacctcgacctcccagggtgctgggattataggcatgagcccccacacctggacacaaaatacattatatactctaaagtataggattactttaagagaaggaaactaaaagtatgatggcttactttctaatccataacttcacagttttcccttcctgcagctttcacagaaaaaaccaggtgcctggtactgggtccttctctctgccaagcaggagtaaggcggcagagcaaccctgcatctgcagttagaagctcattgacggacanggacgcagcttctcacccaactgtttgcagccttctcctttccacctactgattgactcctgagctgaagcctggtgttatgcctgtttgcatgtaagttttgccatggagttgagaacagttgagtaaaagctntgcttttttnaaagcttgttgcagaaaaggattcaaaaactttttngaaaaggctttct

SEQ ID NO: 5501 - DNA, 421 bp, Homo sapiens
  misc_feature (346)..(346): n is a, c, g, or t
  misc_feature (373)..(373): n is a, c, g, or t
  misc_feature (391)..(391): n is a, c, g, or t
  misc_feature (407)..(407): n is a, c, g, or t
gaaatcagtacacaaataacagttgccacagtgtaccagtatttcaatttctaaagaataccatagagtctgaattagaacctttaactagattgcaaaggaatatactaaattgaaaacttgtaaaagggaagtaataaacaccataatcctagataagatcctatggtctttcagagtttttccatatacagtaattatttgatgtacagtaattattgataaccaaaatgacaaaaactgaatctactcttcaaattcaaccatgtatcttaaaaaggagtaaaatgtactgttttcagtgtttcccttgggtttcttacaggttattatttttataaatttnacttccatggggacctttttttataantgttccggtctcttcccnaaccaaaaattttggntttttaccccttgg

SEQ ID NO: 5502 - DNA, 1781 bp, Homo sapiens
caccaatatggcttctactctatggtggtgttggtatctgtgttggtctgtgggtttggggaagaagagttatccagaccatggggaaggatctgacaccgatcacaccctctagtggcttcagtattgaactggcatctgccctcactgtggtgattgcatcaaatattggccttcccatcagtacaacacattgtaaagtgggctctgttgtgtctgtggctggctccggtccaagaaggctgttgactggcgtctctttcgtaacatttttatggcctggtttgcgcacagtccccatttctggagttatcagtgctgccatcatggcaatcttcagatatgtcatcctcagaatgtgaagctgtttgagattaaaattgtgtcaatgtttgggaccatcttaggtattcctgctcccctgaagaatgattacagtgttaacagaagactgacaaggagtctttttatttgggagccagaggagggaagtgttacttgtgctataactgcttttgtgctaaatatgaattgtctcaaaattagctgtgtaaaatagcccgggttccactggctcctgctgaggtcccctttccttctgggctgtgaattcctgtacatatttctctactttttgtatcaggcttcaattccattatgttttaatgttgtctctgaagatgacttgtgatttttttttcttttttttaaaccatgaagagccgtttgacagagcatgctctgcgttgttggtttcaccagcttctgccctcacatgcacagggatttaacaacaaaaatataactacaacttcccttgtagtctcttatataagtagagtccttggtactctgccctcctgtcagtagtggcaggatctattggcatattcgggagcttcttagagggatgaggttctttgaacacagtgaaaatttaaattagtaacttttttgcaagcagtttattgactgttattgctaagaagaagtaagaaagaaaaagcctgttggcaatcttggttatttctttaagatttctggcagtgtgggatggatgaatgaagtggaatgtgaactttgggcaagttaaatgggacagccttccatgttcatttgtctacctcttaactgaataaaaaagcctacagtttttagaaaaaaaaaaaaaaaaaaaaaaaaaaaaaaaaaaaaaaaacacgaacagaaagaacaagaaaaacaaaagaagcggaaggacgcaccagcaagaagacgacccacgcagaggggacgcaacaggcttcgcacggcaccgagcacaggctgtggtggtgacaacaagaggaccctccacaaagcgagggacgcaacatgcaacacaagaccagagcgagccgagtgtgcaaacaacacccacagcgcatagactaacaccgcccagacgggactaccatgttggagaggacaaccctcaactatgagaggggaccaccagggaccacaatccaccaccgaactagcatcgggagcaacaaaaaaagaaatcacacatggaagagcacagacacaactgcgggtcagcgcgcacaacggacacgcgcgtagctgacccacatatcggcacaacctggatgcaaaacagaagggagcacgacagcaccacaacaaacaacgagaagcgaggaggagaagagaaggacgcgccgcgagccaagatgacccaacggcgggagcgacgccgcggcgaagagacacgaagcgcacagagagcagcgaagaaacagaaacgagccatccca

SEQ ID NO: 5503 - DNA, 2115 bp, Homo sapiens
  misc_feature (1426)..(1450): n is a, c, g, or t
cgggcatccaggcacctctcagcacagcagagctttccagaggaagcctcaccaagcctctgcaatgaggttcttctgtgcacgttgctgcagctttgggcctgagatgccagctgtccagctgctgcttctggcctgcctggtgtgggatgtgggggccaggacagctcagctcaggaaggccaatgaccagagtggccgatgccagtataccttcagtgtggccagtcccaatgaatccagctgcccagagcagagccaggccatgtcagtcatccataacttacagagagacagcagcacccaacgcttagacctggaggccaccaaagctcgactcagctccctggagagcctcctccaccaattgaccttggaccaggctgccaggccccaggagacccaggaggggctgcagagggagctgggcaccctgaggcgggagcgggaccagctggaaacccaaaccagagagttggagactgcctacagcaacctcctccgagacaagtcagttctggaggaagagaagaagcgactaaggcaagaaaatgagaatctggccaggaggttggaaagcagcagccaggaggtagcaaggctgagaaggggccagtgtccccagacccgagacactgctcgggctgtgccaccaggctccagagaagtttctacgtggaatttggacactttggccttccaggaactgaagtccgagctaactgaagttcctgcttcccgaattttgaaggagagcccatctggctatctcaggagtggagagggagacaccggatgtggagaactagtttgggtaggagagcctctcacgctgagaacagcagaaacaattactggcaagtatggtgtgtggatgcgagaccccaagcccacctacccctacacccaggagaccacgtggagaatcgacacagttggcacggatgtccgccaggtttttgagtatgacctcatcagccagtttatgcagggctacccttctaaggttcacatactgcctaggccactggaaagcacgggtgctgtggtgtactcggggagcctctatttccagggcgctgagtccagaactgtcataagatatgagctgaataccgagacagtgaaggctgagaaggaaatccctggagctggctaccacggacagttcccgtattcttggggtggctacacggacattgacttggctgtggatgaagcaggcctctgggtcatttacagcaccgatgaggccaaaggtgccattgtcctctccaaactgaacccagagaatctggaactcgaacaaacctgggagacaaacatccgtaagcagtcagtcgccaatgccttcatcatctgtggcaccttgtacaccgtcagcagctacacctcagcagatgctaccgtcaactttgcttatgannnnnnnnnnnnnnnnnnnnnnnnnctgaccatcccattcaagaaccgctataagtacagcagcatgattgactacaaccccctggagaagaagctctttgcctgggacaacttgaacatggtcacttatgacatcaagctctccaagatgtgaaaagcctccaagctgtacaggcaatggcagaaggagatgctcagggctcctggggggagcaggctgaagggagagccagccagccagggcccaggcagctttgactgctttccaagttttcattaatccagaaggatgaacatggtcaccatctaacacgagaggaattgtagtctgagggcgtagacaatttcatataataaatatcctttatcttctgtcagcatttatgggatgtttaatgacatagttcaagttttcttgtgatttggggcaaaagctgtaaggcataatagtttcttcctgaaaaccattgctcttgcatgttacatggttaccacaagccacaataaaaagcataacttctaaaggaagcagaatagctcctctggccagcatcgaatataagtaagatgcatttactacagttggcttctaatgcttcagatagaatacagttgggtctcacataaccctttacattgtgaaataaaattttcttacccaaaaaaaaaaaaaaaaaaaaaaaaaaaaaa

SEQ ID NO: 5504 - DNA, 2478 bp, Homo sapiens
acctgaagtccaaggcactgcgggagcgctggctgctggaggggacgccgtcctcggcctcagagggggatgaggacctgaggaggcagatgcaggacgacgagcagaagacacggctgctggaggactcggtgtccaggttggagaaggaaattgaggtgctggagcgtggagactccgccccagccgctgccaaggagaacgcggcggccccgagcccagtccgggccccagccccgagtccagccaaggaggagcgcaagacagaggtggtgatgaattcacagcagacgccggtgggcacgcccaaagacaagcgagtctccaacacgcccctgaggacggttgacggctcccccatgatgaaggcagtggtccatgctgtggacggcaccgccgagaacgggatccaccccctgagctcctccgaggtggacgaactcatccacaaagcggacgaggtcacgctgagcgaggcagggtccacggccggggcggcagagacccggggggctgtggagggggcagcccggaccacgccctcccggcgggagatcaccggtgtgcaggcacagccaggcgaggccacgtccggcccgccggggatccagcccggccaggagcccccggtcacaatgatcttcatgggttaccagaacgtggaggatgaggccgagaccaagaaggtgctgggccttcaagataccatcacggcggagctggtggtcatcgaagacgcggctgagcccaaggagcctgcaccacccaacggcagtgctgccgagcctcccacggaggccgcctccagggaagagaatcaggcggggcccgaggccaccaccagcgacccccaggacctcgacatgaagaagcaccgttgtaaatgctgctccatcatgtgagccggcccccgagaccccggcccccaccccacaccacagacacccaccagcccggcccctcccggcgcctgcccaccctccacccacagcctcacgggtccaggacttggcgtgttgttacatgttccttccgagttttctttcgctggaaagagggacaggggcccccacccgtcaccacgccccaacactccccccgaaccagagccgtgcacttgtgcctggtaggagagagacaggacagacccgcttttcccgagacaaggaccccccatgtcacggcagcttcacagacgcggctcgcgcccaccggggtcctggcgggtgggacccgcggcctccacgcggcccaggccagcctgccaccctctgggcctcctacctgtgcctttctctgaggggacaccccgccagagagggccccgggagccgggggtgggtactgaggcctgctcaggccctggaagtgaggctctatggggttccctggccaaggcgctggccccccaatctcaggcagttggggtgaggccgtgcctctttgggggctaaaggtcttgggtggaggacaggcccctctgctgtgcccctatgccctgtgtgggcccaaccagtggacaatggagtctgggggagggggaaccccggggacatgccctcacccgggaggggccggtaacccctgggctatcttctagacggggcgaaccaggggtcattgacctgccccctgcacagggcagggaccgagtgagccactccttgtcccgagctcccgcccccactgggccctccttcctcctggtgctaatttggggaccccaggggccgcccccggcctcttctccatcctgcttggaccagggtcctgggtcttcccaaccataccccgagatcaggccccacctgccagctctactgggcttggagcacgtccgggcagtggagggagggacacagcctgggacaggaagcctcttgggttggagcaggagaccctcatttgccacccagaccaatgtgagcctgcccccagccccctctcattggaagtggcaaggggcttccctcctgggggcagctacactcgtccccagaggcacattcgtgcacattctcacagacaccgtctcacacgttggctttggacaaccaggccccaacttggtccctgccctagggacctccagcctggtgcccagtgctcaggccacctcctggtccagtcaccacctgcagcctcggcagggcaggtacaggggccacctcggatgggagcctgggtccctgcctccgctctgcccctgggtggctgggaggagaggccctctcgggggtgacctgggcgtcagccgtggaaccccctcctcctccctggagtctgcctgagtccctcgagccgcgagccttcgctgaagtgcccttgctataaccccctctgcttctggtgtgtgacgaggcccccgatgttcttgattttcccagagaagcaaataaacagcgtgaacagccccaaaaaaaaaaaaaaaaaaaagataatagaaaaaagggggggagcaaaaaaaaaacaaaagga

SEQ ID NO: 5505 - DNA, 492 bp, Homo sapiens
  misc_feature (408)..(408): n is a, c, g, or t
  misc_feature (466)..(466): n is a, c, g, or t
  misc_feature (476)..(476): n is a, c, g, or t
ggcagagcaatcatttacctatattctttggggtgtatgccaaggtaaggtctctaggtagcccagttgctttgtctaaaacagaagactcttaaaagaagctcctgtattctccctgagctgacctttcctgtcttgtccctcgatattaagcttatgctatcgagcctcatctcagttagatatctgtggcttcctttgccagctgacctagctggagctgctaatggagtaatcaagtatgaattcctgtataaatcaagtctggctcttattccagggatctagactactacaggcctacacaatttaggaaaccctcattaggatagatgcaagtagttgtaaatataaacctaggctaggggccttctgacttaatgtgtctcccggggaagccctccaggnttgggaagccttcttcagtttcacaggggaaaggaaaattcatttccctccctcttgnccttcccttngcccattttcaaggtg

SEQ ID NO: 5506 - DNA, 1500 bp, Homo sapiens
ctcaggccctgcgtatgtggtgcagcctctcttcaatccctaagaactggttctttcaaagcatgtattttctgaagaaactttagaaccacgtttattttaaaagaacgaattggagaaaacaaatcgattaatgctcacagcttcttgggtgctttctcacgggtaaagccatggcatccgtaccttccattggttgccttctagccagaaatcagtattatcgaaagtccagtgtttcttcagttagttctttaactagctctgattctgttaacttcatagatgacgacaaaccacagcaagggttgcctgaagtggcagaatccacctggtggtttaaatcgtttttccattctgaacctgtgctttcaaatgtgagaataaaagatctgtctgctactgggtcgctgtcaggaagatcatagcaccctttccagttcaatcactcaagagtggtggagaagtcatatgccaaactgtgtcattgtttggcgggggatggactgagaatcagaggaaagggtctaaatttgttttgctcataccttcaggaaaagaataaccattgtctagttgttgtcttaaataaccttaggataacactgctgattttgattagcttctgtgtggtgcaaattactagacaggttgaattgggagtttgtgtgcagttgttttcagacattttgaactcaaacacactgactagcacagttgtaatttaatatatttaaactacttattttggattttagacatttgaatgcctagtaactaaatggaatagaaagaatctataataaagggattcatagatgccaatgttgaaatatagtgattctgatgaatttcctatctaagacaaatttagaatcattatttaaaattagaatcattatttaaagtatttttaaaagccaatgcaagattgattgttggaaagatgttttcttgacactctttatcaagtttattcatttgaattatctggacagtgtttcatttatttatcccctcctctctgactactataaaatcaacccagattacagatgagcactttgtagctgatcatctttgcactgccatttgatgaacatgttggtaacggttgcctgccttatgtagcatgaacagttgattctgacaatcaagatcctctgcctgctgcagtggtccatacatgaacagctccccttcagcgccccagctattccaggactcttctccattgtaagaagacaaaaatgtgtctgagatctcatttatgagacaagatcacagcagccactgatataacaaaagtttaggcatttttctcaacacaaagactatcgctggaagtggcacttgctacctggtgcatctttgaaaagtgtgcctttagaaacaagacacccttttaaagtaatatgtcttcaaatgttgtgacttacataaagtagctctttcattacttatatcatttttattaaaaaaacttaagttagactctta

SEQ ID NO: 5507 - DNA, 6621 bp, Homo sapiens
  misc_feature (1323)..(1338): n is a, c, g, or t
  misc_feature (1920)..(1937): n is a, c, g, or t
  misc_feature (2906)..(2932): n is a, c, g, or t
  misc_feature (4584)..(4599): n is a, c, g, or t
tacggctgcgagaagacgacagaaggggacagtctgcagtctacggcgaggcacaggccagcccagctccacgaggactgaacaaggtgctgtctcactgccaccatgccggaagtcgagagaaaacccaagatcactgcctcccgcaaactcttgctgaagagcctgatgctggccaaggccaaggaatgctgggagcaggagcacgaggagcgcgaggctgagaaggtgcgctacctggcagagcgcatccccacgctgcagacccgtggcctgtccctcagtgccctgcaggacctgtgccgggagctgcacgccaaggtggaggtggtggatgaggagcgatacgacattgaggccaaatgcctccacaacaccagggagattaaggacctgaagctgaaggtgatggacctccgtgggaagttcaagcgcccgcccctgcgtcgagtccgtgtctcggctgacgccatgctccgggccctgctgggctccaagcacaaggtgtccatggatctgcgggccaacctcaagtctgtgaagaaggaagacacagagaaggagcggcctgtggaggtgggtgactggaggaagaacgtggaggccatgtctggcatggaaggccggaagaagatgtttgatgccgccaagtctccgacctcacaatagaggccagcttgctgtgctgcgctctgagctcctgcttcatgcttcttctccaacccagctcactcacctctctgcctgtgtctggagcatcccttcccacctctcccccacttcttccctccagcctgcatgccctcctctggaactgggattaaacagatacccaagaggcaggaaaaacgcgagtgtctgaagacctcaccctggcagggtgggcttctatccacccatgaggcacctggggcttctcagccaccccgtggtgtaacaagtggaggaggaggagggggtgagaacacctttcctccagccctgtgccacactccttctatgtgtgtacagtgtccacaggcatcacaccttcttcattaaaaacccagtttcctggtcaaaaaaaaaaaaaaaaaaaaaaaaaaaaagaagaaagggaagacttggggtttgggaagagggggctgtgctgggctccagtcaccctgtctgcagacctgagcttgggatctgaagggagggctaaggaattggtggctgcttgccagggtcccctggggccccttctgcccagtccctgtgacgtcacactgcacacactcaccacccaggatgctcagctcaccagagccctgacctccgagaaatgaccccgtcctgccnnnnnnnnnnnnnnnnagaagaggcctctccattaagagccgcttctcctgccggctttcatactctccttcctctgcaaacctggattaactctccctgatgtgtgctgggttgagaggtcagggcactttcaatccctcacctagtcctgctgcacagggcaggaggcctcacagaagagatacttgcagttccaggcctggccaccaggtgacgccttccttctctcctgggctctcctgtccctccggcctctgctctccccacgttcacccaccctcctcccaactgtttccccttcacactcctgcactggtcctatcccccaggactgattctttcccggagatggggtggccacttatctgtcctctggatcaggtcctttctccatcccactacctcctgggtccaaagcctggtgagagcatagggccttctggggtggaaggggggtctggggcagcctctcttcccccaacatactcactagagtggctcctgtgaagcagagaccaaagttctgacttttctttttcctttttttttttttttgagatggagtctcgctgtgtcacccaggctggagtgcagtgnnnnnnnnnnnnnnnnnngcaacctccgcctcccaggttcaagcgattctcctgcttcaacctcctgagtagctgggattacaggtgcgtgccaccacaccccgctaatttttgtatttttagtagagacagggtttcaccatgttggtcaggctggtctcgaactcctgacctcgtaatctgcccacctcggcctcccaaagttctgggattacaggtgtgagcgaccacatccggtcaagttctgacttttcagggcagtgggatggtgacttctgagctaagcctgcaagggaagtggctgttcccagacctggggtcccttggcttttcgaccaccctagcactggccctaggaggggctgagttatcagagcagcaacccttctacccaccctactgagtccccattctaccttcgaatcccatgtattatcttccataagtgccagaaattggtacaaagtgcagtgccagctgctccccagggcatggtctggctctctgggctgctgggctgccagcccctttcagaaagcatggcagtgggaaccagcaacttgggctaccttaggggaagcagcactctgcccagggttcttgctataaataggtcagtgggcagagaggcagatgtgtgcaaaaagcacaaccccaatcacacacagaaacccgtaggcacggacacacccagtctcaatgcacgaagttggagaacctgacagggctggtccaggccacagaggatggggttaggcttcatgccttcatgcccaggcagccacagaaacccactcttccccgcctcacagggctcctccggttggcctggatccaaagcgatctccttgtttcacctctttccagctcttccctagagcctggccccaagttccagagtcaaatcccagttttgcagtcaactattaacctggggccctggcagattggggtatccacccagtcatgtaaaggcaggagacctgnnnnnnnnnnnnnnnnnnnnnnnnnnnaacacgtgggtgcagaagacccatgggaggaggaggtggggcccactcaacacacctaagccagtggccctctaggaggggcagaagagccaaccagagggttcctggaggtcatggggttcctccttctgcttccaggcagcaacagacctaattcatctcctgtgaggatggagcaagggcgaatataggcatagacatatctggagcgcaaggattgagaggccctgtggacaaggggaaggagagcttgggggtgggagagggatctatggaaggggctgttgtagccaagaatggggcctgggctgggggcctggcctctggagagccctgattctactccagtcttctctcaccatggagacaacaccagtagagctgggagctggggcctgccactgagtaacagctcacacatgtagcacacttatgcgtcaggcaccagcatgtacaccttaatttatttaactttcacaacaaccctaggagaaaggtacagctactattctcatggtacagtggggaaaactgaggcacagagaggttagggacttttcatgatcacacagctaataagtggtggtcccaggattcaacccaagaagtctgttagaatccatactcttatcgactattttaataacagcatttcaataatagtaatatgtgatgttaaatgctttatctgagttatatcattgcattctcacaaaaatggtacatttgttagctcaaatttacagatgaggaaatggaggcctggagagttcaagtagctcactctaagttacagggtttgctagctgcagactggagactagatctcaggtcactctgccttggggttgcccttttctgagatcagactggccttaacagagcccaactttcttggaaggacacagctgggggtcgagggtcctgcatatgcacctggggagtccccacacacccgcaccaaaggggaaacattcaaaggagatgcaggtgacatacagatgggctaaggtgaggccttcctccaacatggggccctggctgagagtggagggatagggtgctacttgggggatatctattactaatcagcacacaatagctgggtgggcaccccctctctctgcagctggtggagatgggcctggtgctcctctctgcttggtaggaatgaccagggcaggatgccacctgctacactcttgcctgtcccagagcccttgggagaccagctgttgctcccacctttccccacagggtgcccggtccccacggcgcaaggaggccaagctcagctgtgtgtctgagcccactcagcagcaggcatgatcagggcagggcccagcgctaagggctgctggggctaaagtgccttgctgaaggaggggcagagttaaacattagccacaatggccccccgcgaagtgagtcatactccccacaagtctctgggctgggcagccgggggcgggggggttagcttcgttccaggtgggtgaccaagctgcggaagcccaggacagttcgctgggaccagtgctaatggcagcttctgctcctgacccccatcaggtctctttcctcagacatccccaaagcttgtctgcctgtgggtctttcattaaaggtgacgggcaagggttttctcttcnnnnnnnnnnnnnnnnctaggctggcttgtgggtcccctgagacgaaggctgagcagggtgagcctcgaaaaccccatagcactggcccagagcactgcggtcaatgtccgaaggaccagagagggagggtgacttgctcaaggtcacaaacctaactggagctaggaagtaggtccccagactcccagtctgaggaaattggatgtggacagggctttggtctcctggccagaggcaaacgcccagggatctgaacaggctgcccatctctggcctcaactcagcaccccaactggctccagtgccaaccattggcctctctcactggttggcacaggctgggtgagcctggccctttgccctgggttcaggagagaggtatggctttgcctggcagtcaggggaggtgttccaacctgggagcccctgggggaggagcgtgtgtgtgaacgcttgtgcctgttcatcagaaggggtgagcatggtgtgtatgcgtgggcatgcagaatgcagggtgatgacctgtctgcccgccctgagtgtcacagacacctgtgtgtcccctgtactagtgcctcccagatgctcttctcctgactggctctttgtgacctaaatttcaactgctccaccccacaaggaggaaaccagggccacaaatgtagtgagattttcataaagctaaatgtattcagtggaaacgaccttcctctgatctaaaagcatgcatgcctttgttttattactggagtattaaattagcccttacttatggaataggaggacagtaggtggcaattgttttctaatgctcttacttcacaaaataaaatggtggcagcacaaaaaaaaaaaaaaaaaaaaaaaatattattagtttgtaaaaaccgaaagccagggagcttactgccctggattctttagggcgtgggtcttatcacctcattcatttcttcccttcccctaagagcgccacaagcatggcagttgctcagctgagacacatgaatgggaacagaactgaaatatcaggatgtgacctcgagccagctggttggggctggggatccccctggatctccactctgtcctgtccgagaaaggggaagctgccctatgagtcttttttctgggggattccagaggttgaacgtctgttctgaggctcctcagaacctcgagggaggggacgagagagatgaccccttgcccaaccactggctgaaaaatcttgaaattccctgactttgaccagggaattcccagttgtgctaagccctgcctggtggaatgtccctggaggaagtaaccaggacacgcatacgtttttaatgtacgtataaagaatcgtaaagtgaacacccatctgccaaccactcattttaagaactaggatatggcacatacttttgaagcccttatgcgtccctccccaatcacaaccccttcctctccacaaaggtaaatacaatcctcaattttgtgtttgttattctcttggttctcttcataatgttactacgtatttatgaattcctaatacatcattcagttttggatctttttgtaaaccttaaaaaaaaaaaaaaaaaaaactttttccccttcaatgttaaggttgtaaattcatccctattgataattgtagttcattcattttcactgccatgaaatgatgaaatgatgaaaacaccattcattccctttcctgctgatagacatttagatctctgccactaccaattgtgctgatttgaatattcatgagtctcacttctgatgctcatgttcaagagcttctctacccaggagtgcaactgttgggtcgacaagaatgacatccccacctttgctagttgtaccacttacactcccatcaacaactatgacagttgctgatgctccacatcctggttttggcagatcctggagaccagagatcctggatacttaacctcacctgatctcagcttcttcctgactcagcttccaaatgttactcttggcaggggctctcaggctatttgggttttcctg

SEQ ID NO: 5508 - DNA, 1876 bp, Homo sapiens
  misc_feature (1688)..(1705): n is a, c, g, or t
gtaggcagaatgtagactgagcgctcctgctactgctgcctgttgctgagaggaagaccgcagaaaattctggattcaaacatttattgctttttttgttttgctttgtttttgttttctttccttttgccttcagaagatgaacaatgaaaccacaaccctgatatccttgaaggaggcaatgaaaaggttgctgagggctatagggagggagcaagcatgggtctgctattctgggaagatggagtagaccacaaactccaagcgttagaaacacagttcaaagaactagacttcaccaaggataacctgatgcagaaattcgaacatcatagtaaggctttggcaagccaagcagcccaagatgagatgtggacagcagttcgggcactccagctcacttcaatggaattgaatattttatacagctacgtcattgaagtacttatctgcttgcatactcgtgtgcttgagaagctgccagacctggtgagaggtcttccaaccttagcctctgtactcagaagaaaagttaagaacaagcgcgttagagttgtatgggagtccatactggaggagtgtgggctgcaagaaggagacatcacagcactttgtaccttctttattgcacgtggtaacaaggcagaacactatactgctaaagtgaggcagatgtacatcagggatgtcacgttcctaattactaacatggtaaagaaccaggctctgcaggacagtttgctgagggctgtgcaggtaattgagaaggggaaagcagttaggacccctgaaaagcaaaagtcatccctcgaagagttgataccatctgtcaaaaactaacctgttaccctatgacccagtgattccacctacagtaatttatcttggaaacagcaaaaagtatgcacaatttattatagtcttatttttatagcaaagagtgagaggatgttaaataaattatgacaaattgatacaatagatactttctttgcagccatataaaagaatgaagaagctctttgtgtaatgatatgaagtgatcaccaaatgtattgttgttttcaaatgtttatttccaatatacattgctaagtggaaaaaaggtgacaaatatatatatataaatatatatataacacatattagtttacatatccataaacttcttctgcagagatacacaagacagtgataacattagttgtcaggaaagaaagctaagaggctaggggtcaaagacaagaggaagtcttttcactgttaatccattttttacattttcaattttgaaccatgtgaatgtattacctatttaaaaaataaacaaggccggacatggtggctcatgcctataatccaagcaccttaggaggccaaggtaggaggatcacttgagctcaggggtttcagaccagcctgggcaacacagtgatagcaataggaggcaggtaaattcctaggcagacagggaggggtccctggtgaaactcaaccttcaagccaaggacagtctaaagcctgaaaaccaagctatgagttctggataaatccatgagccagactgagagctcccattctcgtctggcaccctctctcctgattggtccttacccttcacctattttatacatacctacccttccgcgattggtcctctacactatcgtgcctatttctgaatggtnnnnnnnnnnnnnnnnnnacagaccaatcaggatgcacttgcccatttctagcccacaaaaacccatagactcaggctcgtggccagcaacccaccttcgggtcccctctcactgccaagagccgttctgtcactcaataaattctactttgccttacccaaaaaaaaaaaaaaaaaaaaaaaaaaaaa

SEQ ID NO: 5509 - DNA, 4421 bp, Homo sapiens
  misc_feature (4034)..(4053): n is a, c, g, or t
ctttggcttcctgggcgcacgctactctgtcagccgccggcacgaggcggaattgccggtgccgccgccaccgctgtctgtgcgcccacctctgctgctaccatggggatcttagagaagatctcggagatcgagaaggagatcgctcggacacagaagaacaaggccactgagtatcatctgggcctgctgaaagctaagctcgccaagtatcgggcccagctcctggaaccgtccaaatcggcctcgtccaaaggagagggctttgatgtcatgaagtcgggtgatgcccgtgtggcgctgattggatttccctctgtgggtaagtccacattcttgagtctgatgacctccacggccagcgaggcagcgtcctatgagttcaccactctgacgtgtattcctggggtcattgaatacaaaggtgccaacatccagctcctggaccttcctggaatcattgaaggcgcagcccaaggaaaaggccgtggccggcaggtgatcgctgtggcgcgcacggctgacgtcatcatcatgatgctggatgccaccaagggagaggtgcagaggtctctgctggagaaggagctggagtctgtgggcatccgcctcaacaagcacaagcctaacatctacttcaagcccaagaaaggtggtggcatctcctttaactcgacagtcacgctgacccagtgctcggaaaagctggtgcagctcatcctgcacgaatacaagatcttcaatgcagaagtgcttttccgagaagactgctccccggacgagttcatcgatgtgatcgtgggcaaccgggtgtacatgccctgcctgtatgtttataacaaaatcgaccagatctccatggaagaggtggaccgcctggcccgaaaacccaacagtgtggtcatcagctgcggcatgaagctgaacctggactatctgctggagatgctttgggagtacttggccctgacctgcatctacaccaagaagagaggacagaggccagacttcacagacgccatcattctccggaaaggggcctcagtggagcacgtgtgccaccgcatccaccggtcactcgccagccagttcaagtacgccctggtgtggggcaccagcaccaagtacagtccgcagcgggtgggcctgacccacaccatggagcatgaggacgtcatccagatcgtgaagaagtaacggcgcctgccgggcctcccgcccacctgcctcgtctccctggggaggtggtcccactgggacacacaaacacccaaacagaaaaatacaaatacacgtaccccaggaaggggtccctcaagtctctgctatttacagaagtttcttcagtaggcagacgaagagtgtgttggggcaaaggggctcggttggaggcatttcccataagactgagccctctcatgggggttttgagtttgtagtgctgagcctgcatctgtgcctcccagccccctgcactgagggagcaagttgcccacatgcccgccagccagggcctaaagcagatggcatgctcagtgccaggctggtagctgggcctgtttgggtccctggaggctgtggctgctgtcatggcacctcactccctcagctcttgccagcttctctgacacttgggttgggggcccttccaggaggaaacccccttgggtgccccacacagggctctccatgatgggaaccagtggttagtggcttcaaaggcccagctgacaccctccacagcctaaggggtgtcctaaagtgcctccccctgtattccccctcccagggcagcccctgcccagcacaaaaccccaggaccctggctctgcacgcctggggcagggacttttgagtttaggatctgtattttctaagtccccagttctcctggctctcctttctgaaataaaggattgaaaacggttcctgttcaaaaaaaaaaaactttgtaaacttgctgaacagtagccaggttgagtcaggtgggcacaggtcaggcattgggcctgggggtcggagagggtgcagcctgggccccaaggcagacccaggccttgtgtggcaaggagactgcagggttcctcacccaggcacaggcaggctctgcccagggggttggtgttcgggggtgtcaggcccagactggcccctccggaggggcctggctgccaaggtgggcagcatcccaggaggcccttgtgaccatctgggctggcagggaggctctgtgagaacaaggtggcgggtcatttcctgttgcctcagaagtcaggagtagaggggctggcaggggctcgatgagtgcctaccgtgtgccagggactgtgccaggccccccacagtgttctgctgtcccccagaagctggtgtaggctgcacagtttgtgagcgcagaccccggatttaagacctctgagcagcggggaaggcttcctggaggaggtatgccttttgagatggatgcagcaggttctgtgaggctgccaggaggggtagagttcccgggggcctcgggccccgctggagtgtggagcaggcccatgctcagctctccaggctgttcgtggctcccctgtcagctgctcactcctttccagagacaaaacaggaataatagacatcattaaatatacatagggccccaggcggtcggcgtggtgggctgggcctcccttccccataacactgagctgctctgctgggccaaccgtgctcctgggccagccagaggacccccatgaggcggcatgcaggcggggagcaggccacagaacgcaggtaaggagaccttagcctagagtccttggggtctgtcactggccaccctcgcatcccaggctgcaggggtgataagggaaggggcagcagcagagctggggcctcgcccccaactcatcttgaggcccttctctgcctcactttgttcatctgtgaggggtgtgatgcccatgcagtcccctcctggcgatggtgggataccaagacaggcagggcctctgtggcttacctcggcccctctcctgactgtcctgatgcctggccatgaggccctaagtgagggtttctgcctggctggtggccattcccacttccactttacaggtaggggctctgggcccagggtgaggtagggaaggccttgagttcacagggtgtcagggtgagtccagaccttggattagatccagacctgttttgtccccaaggctggctggcaaagggtgggaaatgaggccagaggctgggggtcctcaggcagtgagggctcaggtgagaggctccagccactgggccacaagttcctcaccgtggatgggcttgttcctgggctagatctgtgtgcgcgtggatcagggcaggcactgcggccctgttatgtcctgggctttctggatctgtggtcaggatggttgcacagtctacatttgcttgtgagagagcgagcaagggatcctgcagctgcgtatgcccaggtcagtgtgaagtggcagcttgcggtgcctttagggctggggaagctccctaagaccccccaaaggtctctgaccctcccatccccgcacctgggtaagctccaggcttgggcctcaccctgtcagccaccttgttctcatcaccctccctgatgatcacaggcaggggtctgcaccctcactcaggcccatgcccaggcagcagagttgcattcatctcccagctggcatccctgcagcctcccgggggtagtatggcctgcagctttagaagactcaggtacataggagccaaagacatgaatattcatctatctgtcccacacgtgtgcgttcactcattctccgtctttcttcctctccagcttagattccacagtttctcatttcggaaccctcctttggcaagaaagccgagtcgagaccctctccttcccactctgtccctctcctagacagctcacctgacctccagcttccatctcgccagacctgggtccgagcagcctttttgactctccactgcactgtcctgtagccatcccaagcccaccgtgnnnnnnnnnnnnnnnnnnnnttcccatacccccggcctcacctcagagacactccccgcaccccccagctgcaccaagccaaccccaagactacttgtctccaccctcatcccagccccatctagcctctcaccagggccagcctgtttcacctcatcctgaatgtgtccactgtacaccatcacagcatgctcccagctgtgtcattgtcccctctccattcttttccacatggcagcccgagcttctttttataatattttctaagaagccatgtgaggcagtggttgagactgtggacactctgaagccagactgcccaggcttaactccaccttcaagctgtgtcactcacataacctctctgggcccatgtcctcatctgtaa

SEQ ID NO: 5510 - DNA, 1238 bp, Homo sapiens
attgtggatagagaagggaggagttactgcaccgttctgtgaacttctgaattcctgtttggtattcttggactagatgatcatgtcttgtgtttcttcatgtttctgtatgtctctatggtccagtctttgtgtcttgtttaatatcatcaatgatgtctcctacgatattgtccttcacttatgtctttgcctatgaatatgtcttcggtttctcaattgagtcctcctttgaatgaaccacgtgattcctcgtagtctgctacataaatccgggatttatgagttctcagttttcctatggatgattaatggctcagtcccccattaacggtggtgctttgtcaatgtcctgtggaggaatataggtacagaggaccaagatacacagtcagttagttgctagtctctctgtctaggagctcaaagcaacacaaccttgtatcaaaatcacaactggcagagaagctggtgtgatccaatccgttcttcatctgtcttttatttagaactcacctctcacactcttgttctttagtgtcctacctgtatcttaccacacacatgggtgtttctattatccttggaagcacagacctcgggcatccccttattgcctgatgggccaacaccatacagttacggatgtgcttgagaaggggcaagtttcacagaaatggccagatagggccttcctacagagcagcaagagtagtccaagcagaaagactgtctgaggtaacacggaccccagcccctgtcagggcctctgccaaggaaataatatggaccatttacctggcaggcagtctgctctctctcaggatcaccacgcatctcaggattggtctaaacttcaagtctcaaccaagtgtctgaagtgaactttgcattgaataaatttttgccatggaaagaacatcaaacaagccactcatctctacagagataagaaaacaagtttggcagagcaagagacagaagaccgtggagaaatcagaagggggaacagtcagtttagttaaggatggaacctgggaaaggccaccattcctgcttgatggggctctgatttgctcttgctcaagtggaataaaaccccatggtcttcttgacatgattcttgatcttttctccactgagacacacttaagtgatgatccttacaggactgacaccctaatgccaataaaagttgctcattatggactgctacaaagaccaaaaaaaaaaaaaaa

SEQ ID NO: 5511 - DNA, 363 bp, Homo sapiens; identical to SEQ ID NO: 937
  misc_feature (357)..(357): n is a, c, g, or t

SEQ ID NO: 5512 - DNA, 644 bp, Homo sapiens
  misc_feature (627)..(627): n is a, c, g, or t
tggaggtcctattatattgaatttttttttttttttttaggttgtactaattgttctattttattatgagttattgtttttaatctcctgtgcctagtttatacactcactttatgataggtaaggatgtacaggaaaaatcataggatacatagagtttgttattatctgtggtttcaagcatcctctgggggtcttgggatacatcctccatggatatggggaaactactatatataaaaagtcggtaaaatgacaaatagagaagaaaagcagacatcattttacatatgctgaagaaggctaatcacgagttcaatccatccttcattgctcaggtccttcactcacaggatttgagtctacaggtgatgccaatgtttttattattttacgtctttcttccctgtgtagccaaatgttggcactttctatgcctccttttttgtctctccacttctaaagccaatcaccaattccaggtttctgcaagtctggccatcctttttctccagcgcacatggtctgtttcctttggccacgtactgcctctccatctggaatactcactcccctccatttcgtttattcaactcgtccatttatatgttccaagcgaagaagtcngtggtttgctttttcgt

SEQ ID NO: 5513 - DNA, 2988 bp, Homo sapiens
ggactgccgctgcggtgcatgagggcgcatgcgcagcggggccgtgggtgtacgcggcgcagcgcggcagtcctgatggcccggcatgggttaccgctgctgcccctgctgtcgctcctggtcggcgcgtggctcaagctaggaaatggacaggctactagcatggtccaactgcagggtgggagattcctgatgggaacaaattctccagacagcagagatggtgaagggcctgtgcgggaggcgacagtgaaaccctttgccatcgacatatttcctgtcaccaacaaagatttcagggattttgtcagggagaaaaagtatcggacagaagctgagatgtttggatggagctttgtctttgaggactttgtctctgatgagctgagaaacaaagccacccagccaatgaagtctgtactctggtggcttccagtggaaaaggcattttggagcagcctgcaggtcctgggctctggcatccgagagagactggagcacccagtgttacacgtgagctggaatgacgcccgtgcctactgtgcttggcggggaaaacgactgcccacggaggaagagtgggagtttgccgcccgagggggcttgaagggtcaagtttacccatgggggaactggttccagccaaaccgcaccaacctgtggcagggaaagttccccaagggagacaaagctgaggatggcttccatggagtctccccagtgaatgctttccccgcccagaacaactacgggctctatgacctcctggggaacgtgtgggagtggacagcatcaccgtaccaggctgctgagcaggacatgcgcgtcctccggggggcatcctggatcgacacagctgatggctctgccaatcaccgggcccgggtcaccaccaggatgggcaacactccagattcagcctcagacaacctcggtttccgctgtgctgcagacgcaggccggccgccaggggagctgtaagcagccgggtggtgacaaggagaaaagccttctagggtcactgtcattccctggccatgttgcaaacagcgcaattcccaagctcgagagcttcagcctcaggaaagaacttccccttccctgtctcccatccctctgtggcaggcgcctctcaccagggcaggagaggactcagcctcctgtgttttggagaaggggcccaatgtgtgttgacgatggctgggggccaggtgtttctgttagaggccaagtattattgacacaggattgcaaacacacaaacaattggaacagagcactctgaaaggccattttttaagcattttaaaatctattctctccccctttctccctggatgattcaggaagctgacattgtttcctcaaggcagaattttcctggttctgttttctcagccagttgctgtggaaggagaatgctttctttgtggcctcatctgtggtttcgtgtccctctgaaggaaactagtttccactgtgtaacaggcagacatgtaactatttaaagcacagttcagtcctaaaagggtctgggagaaccagatgatgtactaggtgaagcattgcattgtgggaatcacaaagcaaatagtactccagaaagacaaatatcagaagcttcctattctttttttttttttttttttttttgagacagggtctttctctgttgcccaggctagagtgcactggtgatcacggctcactctagccttgaattcctgggcccaagcaattctcccacctcagcctcctgagtagctgggactacaagtgtgcaccaccatgcctggctaattttttgaatttttgtagtgatgggatctcgctctgttgcccagggtggtctcgaactcctggcctcaagcgatcctcccacctcgacctcccaaagtgctgggattacaggtgtgagccacctcgcctgggcccccttctccatatgcctccaaaaacatgtccctggagagtagcctgctcccacactgtcactggatgtcatggggccaataaaatctcctgcaattgtgtatataaaaaaaaaaaaaaaaaaaaaaaaaaaaaaaaaaaaaaaaaaaaaaaaaaaaaaaaaaaaaaaaaaaaaaaaaaaaaaaaaaaaaaaaaaaaaaaagggggggccccctaaaaaatccccccggggggcccaaatttaccccaccccctttttttttaaaaaaggggcccccaaagggggcccaatttaaaaaaagggccggggcggctttttacaaccccgggaggggaaaaaattttatttgggaattttttgaaaaaaaccctatctctggggggggaaatattgggaaaacctccccaacaaaatttaagccccccagggaaaaaaaaaatttttaaggggaaaagggggaaaaaacaacccaaaaacttcgcgtcttaaaaatttcctctccggggaatgttttttaaaaaatttttacccccggggacccggggacccaaaggtggcgggggttttaaaaaaaaccccccccccagggtctttttttagggcccccccagatattcttcaaaaggcgtgggcctgcggaaaacaaaaaaaaaccacaaaaacaacacactttttgaaaagagaggtttaaaaccgtgggcttaaaaaaaaaattcctcccaaaacattcccccttgggaaacccgaaaaaaaataaaaaaaggcggggcgccctcggcgtgtgtgtttacaactcttgtaatatttgcgcccccataaaaagagggggaacacaaaaagaaccgcaaagacacccccccacaatattttcctaaaaaaaaaaaaacgattcttttcttacccggggaaattttaaaagagggggggtttgccccaacaacaccccccgaggggcctccctaccaacggggcgggagaacaacccctgcgaaataaaaaaagaggcgccacacacccccccgaaaaaaacaaaactatctcacaaaacatacggg

SEQ ID NO: 5514 - DNA, 1588 bp, Homo sapiens
agcggagtctccgcttaggcggcccgtgggggtcggggtcgcggtcgcggtcgcggaccggggacagagcaatggggcgggcgcgcagcgccggctgcactcccagagcctcccaccgccgccccacggccgcctagcgcgcgccgggactgcatttcccagaggcccacgctgcggagcaccgcccacccgagtctcacgcgagtgcgctgccgcgaggtgtccctgccgcagcccccgcccgcccgcagagcttttgaaaggcggcgggaggcggcgagcgccatggccagtccgggctgcctgctgtgcgtgctgggcctgctactctgcggggcggcgagcctcgagctgtctagaccccacggcgacaccgccaagaagcccatcatcggaatattaatgcaaaaatgccgtaataaagtcatgaaaaactatggaagatactatattgctgcgtcctatgtaaagtacttggagtctgcaggtgcgagagttgtaccagtaaggctggatcttacagagaaagactatgaaatacttttcaaatctattaatggaatccttttccctggaggaagtgttgacctcagacgctcagattatgctaaagtggccaaaatattttataacttgtccatacagagttttgatgatggagactattttcctgtgtggggcacatgccttggatttgaagagctttcactgctgattagtggagagtgcttattaactgccacagatactgttgacgtggcaatgccgctgaacttcactggaggtcaattgcacagcagaatgttccagaattttcctactgagttgttgctgtcattagcagtagaacctctgaattccaatttccataagtgaagcctctccgtgaagaattttacaatgaatgaaaagttaaagaagtttttcaatgtcttaactacaaatacagatggcaagattgagtttatttcaacaatggaaggatataagtatccagtatatggtgtccagtggcatccagagaaagcaccttatgagtggaagaatttggatggcatttcccatgcacctaatgctgtgaaaaccgcattttatttagcagagttttttgttaatgaagctcggaaaaacaaccatcattttaaatctgaatctgaagaggagaaagcattgatttatcagttcagtccaatttatactggaaatatttcttcatttcagcaatgttacatatttgattgaaagtcttcaatttgttaacagagcaaatttgaataattccatgattaaactgttagaataacttgctactcatggcaagattaggaagtcacagattcttttctataatgtgcctggctctgattcttcattctgtatgtgactatttatataacattagataattaaatagtgagacataaatagagtgtttttcatggaaaagccttcttatatctgaagattgaaaaaaataaatttactgaaatacaaaaaaaaaaaaaaaaaaatggggggggggtttgttggggggtgggggaaaaaaaaaaaaaaaaaaaaaaaaaaaaaaaaaaaaaaaaagggggga

SEQ ID NO: 5515 - DNA, 12010 bp, Homo sapiens
  misc_feature (2709)..(2798): n is a, c, g, or t
  misc_feature (5028)..(5048): n is a, c, g, or t
  misc_feature (6639)..(6654): n is a, c, g, or t
  misc_feature (11815)..(11819): n is a, c, g, or t
gggggcaattcatagcagccaggttggcacttcaagaagcagccaggaaatggcaagaaatgaacaagaagggtccaaagtacagaaaattgatgttcatggaacagaaatggtctctcatcttgaaaagcacaccgaggaagtaaaccaagcatctcagtttcatcaatatgttcaagaaactgtcattgatacacctgaggatgaagagattccaaaggtttcgactaagttgttaaaagagcagtttgaaaagtctgcccaggaaaagatcctttattctgacaaagagatgacaaccccagccaagcagattaagactgaaagtgaatatgaagagactttcaagccatcatcagttgtgagtacctcttccacttcttgcgtttcaaccagccagaggaaggaaacatcaactacaagatatagtgatcacagtgtcacttcctcaactctggcacaaattaatgctacttcttcaggaatgacagaagagtttcctcctcccccacctgacgtacttcaaacttcagtagatgtgacagcattttcccagtcccctgaactgcccagtcctcctagaagactaccagtccccaaagatgtatattccaagcaaagaaatttgtatgaattaaaccgtttatataaacacatccatcctgagttaagaaaaaacttagaaaaagattatatcagtgaagtttctgagattgtttctagtcaaatgaactcagggagttcagtctcagcagatgtgcaacaagcccggtatgtttttgaaaacacaaatgacagttctcaaaaagatctgaactcagaaagagaatacttggaatgggatgaaattctgaagggagaggtgcagtccattagatggatctttgagaatcaaccattggattccatcaacaatggctctcctgatgaaggtgatatttccaggggcattgctgatcaagaaatcattgctggtggtgatgtgaaatataccacatggatgtttgaaacccaacccatcgacacacttggggcttattcttctgacactgtagaaaatgcagagaaaattcctgagctagccagaggagatgtctgcacagctcggtggatgtttgaaacaaggccattggactcaatgaataaaatgcatcaaagtcaagaagaatcagcggtaactatcagtaaggacataactgggggggatgtcaagactgtgagatacatgtttgaaactcaacatctagatcaacttggacagcttcattcagtggatgaggttcatttactgcagcttaggtctgagctcaaagaaattaagggaaatgttaaaagaagtataaaatgtttcgaaactcaaccattatatgttattagagatggttcgggccaaatgctggaaattaaaactgttcacagagaagacgttgaaaagggagatgtaagaacagcacggtggatgtttgaaacacagccgttggacacaattaacaaagatatcacagaaattaaagttgtccgaggaatatccatggaagaaaatgtcaaaggtggggtgagtaaggcaaagtggttatttgaaacccaacctttggagaaaatcaaagagtcagaagaggtcatcattgaaaaggaaaaaataataggtacagatgtctccagaaagtgttggatgtttgaaacccagccattagacattctaaaagaagttcctgatgcagattctctacaacgtgaggagataataggtggtgatgtacaaactactaagcatctatttgaaacacttccaattgaagcattaaaagacagtcctgatataggaaagcttcaaaaaatcactgcctctgaagaagaaaaaggggatgttaggcatcaaaaatggatttttgaaacccaacctctggaagacattagaaaagataaaaaggagtaaaaaagaacagtgaaacttgaagaagttgacagaggagatgtgaagaattacacacatatctttgaatcaaacaatttaattaaatttgatgcatcacataaaatagaggtggaaggagttacaagaggtgctgtagagttaaataaatctctcttcgagacaacaccactgtatgccattcaagatccccttggaaaatatcatcaagtaaagacagtccagcaagaagaaatcgtaagaggtgatgtaagaagctgtaggtggctttttgaaacaaggcccattgaccagtttgatgaaagcattcataaatttcaaataattagaggaatatctgctcaagaaatacagactggaaatgtgaaatctgccaaatggttgtttgaaacccaacctcttgattcaattaaatattttagtgatgtggaagaaacagaaagtaaaactgaacaaactagagatattgttaaaggggatgtcaaaacctgtaaatggctttttgagaccctgccaatggagtctctttatgaaaaagtttcgttaatgaccagcagtgaagaaattcataagggagatgtcaaaacttgtacttggctctttgaaactcagccacttgataccataaaagatgactctgaaacagcagtcaaattgcaaactgtaaaacaggaggagatccaaggtggggatgttcgtacagcatgttttctttttgagacagaaaatttggacagcatacaaggagaagaagtgaaggaaatcaagcctgttgnnnnnnnnnnnnnnnnnnnnnnnnnnnnnnnnnnnnnnnnnnnnnnnnnnnnnnnnnnnnnnnnnnnnnnnnnnnnnnnnnnnnnnnnnnttttgaaaaagatcaaaaccttaaaaactgaagatattcagaaaggcaatgttttaaattgtaggtggctttttgaaaaccaaccaattgataagataaaagaaagccaagaaggtgatgaatgtgttaagacggtgacagacatacaaggtggggatgtaagaaaggggtgctttatttttgagactttttctttagatgagattaaagaagaatctgactatatcagcaccaagaaaacaattactgaagaagtaatacagggtgatgtaaaaagctacagaatgctctttgaaacccggccactctatgcaattcaagaccgagaagggtcctatcatgaagtgaccacagttaaaaaagaagaggtaattcatggagatgtgcgaggaacaaggtggctttttgaaacaaagccattagactctattaataaatcagaaactgtgtatgttattaaatctgtcacacaagaagacattcagaagggagatgttagttctgtcagatacagatttgaaactcagccactggatcagatttctgaagaatcacataatattatgcccagtattgaccatatacaaggtggcaatgtaaagacaagtagacaattctttgagtctgaaaattttgataagaataactatatacgaacagtaagtgtcaatgaaatacaaaagggcaatgttaaaacatctacttggctatttgaaacccacactatggatgaactgagaggagaagggttagaatatgaaaatatcaagacagtcactcaggaagatgtgcagaaaggtgatgttaagcaggctgtgtggctttttgaaaatcgaactttcgattctattatggaagcacataaaggtatcacaaaaatgaccaaggaagaaatccctccttctgatgtcaaaacaaccacatggctctttgaaacaacaccacttcatgaatttaatgaaactagagtagaaaagatagaaattattggcaagagcattaaagaaaccttagaagatctctactctcaaaaagttatccaggctcctggaatcatcattgaagctgatgaaataggggatgttcgaatggcaaaatacaagctaatgaaccaagcatctcctgagatacagaaagaagaaattatcagggctgatctcagaaatataatggtgaacctactttccaaaagggactgtactgaaagagagattttgattagtgaagaagagaagggaaatgttaatttgactaaaactcaattattaaacagatcaactgaatttcatgctgaaaaagaagagatagtgaaaggtgatgtacaacaagcaataaaaaacctgttctctgaggaaagatctgtaaagaaaggcatcttaattcaggaagatgaaaaaggagatattaacatgactatctattgtcttcttcatgaaaatgatggtgacacaattgagcgtgaagaagtaataggtggtgatgtcaaacgtaccattcataatttattgtcttccacatcaaacaataaaatatctgaaagggctaaaattgatgcctctgagagaggaaatgttcagtttttcacaacctgcatagaagctggagctttggattatctgaaacaactccacacagagtcaaatgaaacactgacagctaagaaacaagaaggagagaaagaaatcattggtggtgatgttgaaggtacaaaactgttactgaagaaaaggcagtctctggttgaacgtactgttagtgaaactgacatcatccctggagatgtgcataacacagttaaggtttttatgaccgagcctcagagtacatttggtaagatacccaaagaagagattataaaaggtgatttgacatcaaccctaaattccctcagccaggctgtaaatcagaaaacagtgacgaaaacagaagaaattataaaaggtaacatgctagccacactcaagtcacttaaagaatcaagccatcgatggaaagaatctaaacagcctgatgccatccctggtgatattgaaaaagctattgaatgccttgaaaaagctacaaatacaaagacagaaattctgaaaaaggagcttctcaaagatgacctggaaacatcactaaggtctttgaaagaagcacaaagaagtttcaaagaggtacataaagaaggtgtaataaaaaaagatgctaaagctgtgatggcaggatcctcgggagagcagaaaannnnnnnnnnnnnnnnnnnnntccagaggaacaaaaatagtcttcttcagccaaagccaggtccatttgagccagcggccaagtggcaagggggagcagatactctcagtcaaactatggggaaatcttgccatggcaatttagtagaagaaagaactgaggttaatcttccaaaagcccccaaaggcactgtaaagattgtcatagatcgtgaacaaaacaatgatgctctggagaaaagccttagaagactatctaattcacaccataaatctaatgttttggaatcaggagacaaaacgggtgtctggactgatactacaggagaacagcatcttagagatgaatatatgagcagacaattaacttcaactgtgtcagttaagaataatctaacaactaaagaatcagacagggcagtgagagagctgaagaaggatgatgtctttaattccatccaatctgctggtaaaaccgttggaaagcaacagacatatgaactgagaaatgaccaccagaaaatggagggttttcatataaagagtcctaaaaagaccaaaaatattaaaatattaactgatacacaaagctccaagcccagtcccacccagcatccagtcagcatgccagttggaggaacttacgacctttcaggggactttcagaagcaaactttgttaaagcaagaaacaaaatattctaataaggatataaagaaaaagaatataaaccttcaaccaatgtggcagcttttgcctgtagagcaagacacatccaatgtaacagaaatgaaagtctctgaaaaaagtcacaatacatttaaggcaaccaacaaaaagcgggagactgatgttcacttgaaaagccaggactttctaatgaaaacaaatacttccacaggcttaaaaatggcaatggaaaggtccttgaatccaatcaactttaaccctgagaataatgtaaaagaaagtgagtgcccccttccacctccatctccacctcctccaccaccttctaatgcatcatctgaaattgaatttcctcttcctcctccactcctttgatgatgttcctgaaaaaaatgggtttcttccctcactgtccacagagaagataaaggctgaatttgaaagttttccaggcctccctcttcctccacctccagtagatgagaaatctgaaagagaaagttcatcgatgtttctgccgcctcctcctcctccaactccatctcaaaagccagcacatctcctttcctcctctgctccggaaaagcacagtggagacttcatgcaacaatattcccaaaaagaagcctcgaactctcagaattctcaggctaaaatcataacaggaaaaaccggtgtgttgccacctcccacattgcccaaacccaaacttcccaagcatataaaagataataagaacgatttttcccccaaagttgaactggcaacctccctgtcagatatggaatgtaaaattactacctcaaaggatcagaaaaaagtaatggtgatgaccagcagtgaacacacggagacaaagcagaacgttattagtaagagtcttgatgaaagaaaacaattatctattgactctgcaaactgtnnnnnnnnnnnnnnnncaggaacttcagcacccaggaaaaaacagattgcgcctcttataaaatctcattcatttccagagagttcaggacaacaaaatccaaaaccttatatgagaaaatttaagacacctttaatgattgctgaagaaaaatatagacaacaaaaagaagaaattgaaaaacagaaacaggagagttcttactacaacattgttaaaactcaaagccaaaatcaacacataacagaggtggaaaaggaaatgccattacaaaaaaccaatgaggaggtttccctatctggaattgattcagaatgcactgtggttcaacccagcccaggctctcaaagtaatgctcggatactaggagtgtgttctgataaccaactctccacaacatcgccagaaacagtcgctgccaagaggctccaccatgttttagcagcttcagaagacaaagataagatgaaaaaggaagttttacaaagctcaagggacattatgcaatccaaatcagcttgcgaaattaaacaaagtcaccaagaatgtagtacccaacaaacacaacagaagaagtatttggagcagttgcacttgccccaaagcaaaccaatttccccaaatttcaaagttaaaaccatcaaacttccaactctagatcatacattaaatgaaacagaccacagctatgaaagtcataaacagcaatctgagattgatgttcaaacctttaccaaaaaacaatatctgaaaaccaagaaaactgaagcaagcactgaatgtagtcataagcaatctctggctgaaagacattatcagttacctaagaaggagaaaagagtgacagtacaattgcctacagaatccatacagaagaaccaggaagataagctcaagatggttcccaggaagcaaagagaatttagcggatctgacagagggaaacttccaggaagtgaagaaaaaaatcagggaccatcaatgattggtcgaaaagaagagagattaataactgaaagaaaacacgaacatctgaagaataaatcagcaccaaaggtcgtcaagcaaaaggttatcgatgcacatcttgattcacagactcagaattttcagcaaacacaaatacagaccgctgaaagtaaagctgaacataaaaaattgccccagccatataatagtctgcaggaagaaaaatgtctcgaagtcaagggcatacaagagaaacaagtcttctctaatactaaagattcaaagcaagagattacacagaacaaatctttcttttcctctgtgaaagaatcccagcgggatgatggaaaaggtgccttaaatatagtggaattcttgagaaaacgtgaagaactgcaacagattttgtcgagagtgaaacagtttgaagcagagccaaataaaagtggccttaaaacatttcagacactattaaatactatcccaggatggctgataagtgaagataagagagaatatgcagttcacattgccatggagaataatttagaaaaagtaaaagaagaaataacacatattaaaactcaagcggaagatatgcttgtgtcctatgaaaatataattcagacagccatgatgtcctccaaaacaggaaaaccgggaaataaacccactagtcttgatgaaacatcatccaaagtatctaatgttcatgtcagcaataataacaaatagtgaacagaaagaaaataaaattgccaaagagaaaacagtacagcaccaagtagcagctcatcatgaagcaactgttcgtagtcacgtgaaaacccatcaggaaattaaacttgatgatagcaacattcctcctccctctttaaaaacacgcccaccgtcaccaacttttatcacaatagaatctactgcccgacgaacagaaaaccctactaagaacgagctttctcagtcccctaaaaaggacagttatgttgaacccccaccaagaaggcccatgtcgcaaaaatctgaaattcacagagcaaacacttccccttctccacccaggagtcgctctgaacaacttgtcagactcaaagacaccactgcaaagttatccaaaggggccatcccatgtccagcagcaaccccggttccaattgtagagaagaggtctgaaatcatcatgtctcctgtaaaactcgacgacaaaattaagatagaaactcgtggtagggactctccacctacaatcacaataccagtaaatataaatcatgctgctagtggttccttcagagaatctgtggacgctcaagaggaaatcaggaaagtggagaagagagctacttatgttcataaagatggactaaattccactgatcacatggtgcccgacactgaaagttatgatgcagttgaaatcatccgcaaggttgcagtgcctcctcgcctgtcagagcacacacagagatatgaagcggccaaccgaactgttcaaatggctgaaaatttcgtgaatgaccctgaaaatgaaataaacagatggttcagggaatttgagcatggcccagtttctgaagcaaagtcaaatagaagagtttatgcaaagggagaaacaaaccataacatacaacaagaaagtcgtacattttgtaaggaggaatttggattaacatctttaggaaacacgagttttacagacttttcttgcaaacatcctagagaactgcgagaaaagattcctgttaagcagcccaggatctgctctgaaaccaggtctctaagtgaacatttctcaggcatggatgcatttgagagtcaaattgttgagtcgaagatgaaaacctcttcatcacatagctcagaagctggcaaatctggctgtgacttcaagcatgccccaccaacctatgaggatgtcattgctggacatattttagatatctctgattcacctaaagaagtaagaaaaaattttcaaaagacgtggcaagagagtggaagagtttttaaaggcctgggatatgcaaccgcagatgcttctgcaactgagatgagaaccaccttccaagaggaatctgcatttataagtgaagctgctgctccaagacaaggaaatatgtatactttgtcaaaagacagtttatccaatggagtgcctagtggcagacaagcagaattttcataagtcctgcttccgatgccaccattgcaacagtaaactaagtttgggaaattatgcatcacttcatggacaaatatactgtaaacctcactttaaacaacttttcaaatccaaaggaaattatgatgaaggttttggacataagcagcataaagatagatggaactgcaaaaaccaaagcagatcagtggactttattcctaatgaagaaccaaatatgtgtaaaaatattgcagaaaacacccttgtacctggagatcgtaatgaacatttagatgctggtaacagtgaagggcaaaggaatgatttgagaaaattaggggaaaggggaaaattaaaagtcatttggcctccttccaaggagatccctaagaaaaccttaccctttgaggaagagctcaaaatgagtaaacctaagtggccacctgaaatgacaaccctgctatcccctgaatttaaaagtgaatctctgctagaagatgttagaactccagaaaataaaggacaaagacaagatcactttccatttttgcagccttatctacagtccacccatgtttgtcagaaagaggatgttataggaatcaaagaaatgaaaatgcctgaaggaagaaaagatgaaaagaaggaaggaaggaagaatgtgcaagataggccgagtgaagctgaagacacaaagagtaacaggaaaagtgctatggatcttaatgacaacaataatgtgattgtgcagagtgctgaaaaggagaaaaatgaaaaaactaaccaaactaatggtgcagaagttttacaggttactaacactgatgatgagatgatgccagaaaatcataaagaaaatttgaataagaataataataacaattatgtagcagtctcatatctgaataattgcaggcagaagacatctattttagaatttcttgatctattacccttgtcgagtgaagcaaatgacactgcaaatgaatatgaaattgagaagttagaaaatacatctagaatctcagagttacttggtatatttgaatctgaaaagacttattcgaggaatgtactagcaatggctctgaagaaacagactgacagagcagctgctggcagtcctgtgcagcctgctccaaaaccaagcctcagcagaggccttatggtaaaggggggaagttcaatcatctctcctgatacaaatctcttaaacattaaaggaagccattcaaagagcaaaaatttacactttttcttttctaacaccgtgaaaatcactgcattttccaagaaaaatgagaacattttcaattgtgatttaatagattctgtagatcaaattaaaaatatgccatgcttggatttaagggaatttggaaaggatgttaaaccttggcatgttgaaacaacagaagctgcccgcaataatgaaaacacaggtttgatgctctgagccatgaatgtaccagctaagcctttgtttcccagagtggaggtgcagtcagaacaactcacggtggaagagcagattaaaagaaacaggtgctacagtgacactgagtaaaatatctatggccactgacagtccacacttaggcactgagagatattgatgttctgaaataagattttatgaatttggatacccttttgaggaacttgatgtaaacatggtgttcagaaatctcgtgtctatctcaatgggatatttcttgtattacaccttgtcatttttttcacaatttatttacatctacttttgtttgaactggaatgaagagatgaaacactatggatatgttttccattcaaatggcactttagcatattgttctgttttcctgtaaaacatcatgggtgtgatttttatactgctgctgcttgtcacaattattataacttctctgtaatttcctctgaaataaaattgaatcacctgaggtgcaaaccaaaaaaaaaaaaaaaaaaaaaaaaaaaaaaaaaaaaaaaaaaaaaaaaaaaaaaaaaaaaaaaaaaaaaaaagaaaaaaaaaaaaaaaaannnnngaggccaggtattaaccacccacacattaaaattatggtgggcaacattacatactaaacggagggccgcgtttctgaagggggtcacctttccattcccttgcccccacttacagatccgcggttggtctcgacaatccctttactccgaaaggtctcctggaaagggttccgcaaaagggactccgcaa

SEQ ID NO: 5516 - DNA, 2665 bp, Homo sapiens
atctggggggcttccgttgagcaccaagcaagatggcagcttccgagacggttaggctacggcttcaatttgattacccgccgccagctaccccgcactgtacggccttctggcttctggtcgacttgaacagatgccgagtcgtcacagatctcattagtctcatccgccagcgcttcggcttcagttctggggccttcctaggcctctacctggagggggggctcttgccccccgccgagagcgcgcgccttgtgagagacaacgactgcctcagagttaaattagaagagagaggagttgctgagaattctgtagtcatcagtaatggtgacattaatttatctcttagaaaagcaaagaagcgggcatttcagttagaggagggtgaagaaactgaaccagattgcaaatattcaaagaagcattggaagagtcgagagaacaataacaataatgagaaggtcttggatctggaaccaaaagctgtcacagatcagactgtcagcaaaaaaaacaagagaaaaaataaagcaacctgtggcacagtgggtgatgataacgaagaggccaaaagaaaatcaccaaagaaaaaggagaaatgtgaatataaaaaaaaggctaagaatcccaagtctccgaaagtacaggcagtgaaagactgggccaatcagagatgtagttctccaaaaggttctgctagaaacagccttgttaaagccaaaaggaaaggtagtgtaagcgtttgctcaaaagagagtcccagttcctcctcggagtctgagtcttgtgatgaatctatcagtgatggtcccagcaaagtcactttggaggccagaaattcctcagagaaattaccaactgagttatcaaaggaagaaccctctaccaaaaatacaactgcagacaaactggctataaaacttggctttagccttacccccagcaagggcaagacctctggaacaacatcttccagttcagactctagtgcagagtcagacgaccaatgcttgatgtcatcgagcaccccggagtgtgctgcgggtttcttaaagacagtaggcctttttgcaggaagaggtcgtccaggcccagggctgtcatcacagactgcaggtgctgctggatggaggcgttctggctcaaatggtggtggacaggctcctggtgcttctcccagtgtgtctctccctgctagtttaggaagaggatggggtagagaagagaaccttttttcttggaagggagctaagggacggggcatgcgggggagaggtcgaggacgagggcatcctgtttcctgtgttgtaaatagaagcactgacaaccagaggcaacagcaattaaatgacgtggtaaaaaattcatctactattatccagaatccagtagagacacccaagaaggactatagtctgttaccactgttagcagctgcccctcaagttggagaaaagattgcatttaagcttttggagctaacatccagttactctcctgatgtctctgactacaaggaaggaagaatattaagccacaatccagagacccagcaagtagatatagaaattctttcatccttacctgccttgagagaacctgggaaatttgatttagtttatcacaatgaaaatggagccgaggtagtggagtacgctgtgacacaggagagcaagatcactgtattttggaaagagttgattgacccaagactgattattgaatctccaagtaacacatcaagtacagaacctgcctgagtatgacctctccaccttatagtttatgaatgtcttgtttgtgaaagtgactataacccaaactttttttttttttaaagaggatttggaagttgtatggatttttttgttatcttcactttactgcataggaaacaatctacctcatcatttaaaatgacatgggtgtcggttttgtagatctttggtttttttgtcaggtttaattaccattaacaaatgtaaaacatgacattccctgcagatattgttgtataccagtatggtttattatctttctttaaatcttattggccatcaagtatgcagtcgtcagtatgtgatgtttataataccaatgaatgtgctgcgtatcttgtctcaataagttttaagtaacatttaaaaatattaaagcatgttatttgacctaattttttagcatttgagttgttccattaaatggagcatcttgtaaatttcaagtattttatacttgcaattgttaagagttaacaggtagttggatttgtcgcagacaatgagttaaggaatcctttcacgtttttcccaactttaaaattaaggattctcaggtccctgtgtagagcagtgaaaataagatgtgcgtatgtgtgtgtatgcctggagaattggtgtttcacttcagtgagaggattggctgtgagcttcagaccaggaaatgtgtcatcttgccaggcacctggctgagtgtgctggagtgaggatcttgaacagaaacttccttttctgttattattcactacgaagctaaaatggccaaatatataccgtgaaaattggtttcatttaacaaaagatcagatccctccttcagctgtacacatttttaaataaaatcatattgaactaaaaaaaaaaaaaaaaaaaaaaaaaaaaaa

SEQ ID NO: 5517 - DNA, 1893 bp, Homo sapiens
cgccgctcggagccgccgggcaggtcccccagcgctcgcgtctgggcccgccccccgctgcggggcggattgacaggagcccggcggccaatcggacgccgtggggcggggcgaggcggggcggtgcaggccggctcccggcgcggggcgctatttacggcgcggagccggagagacctgggctggcgcgggcgggagctgcggcggatacccttgcgtgctgtggagaccctactctcttcgctgagaacggccgctagcggggactgaaggccgggagcccactcccgacccggggctagcgtgcgtccctagagtcgagcggggcaagggagccagtggccgccgacgggggaccgggaaacttttctgggctcctgggcgcgccctgtagccgcgctccatgctccggcagcggcccgaaacccagccccgccgctgacggcgcccgccgctccgggcagggcccatgccctgcgcgctccgggggtcgtaggctgccgccgagccggggctccggaagccggcgggggcgccgcggccgtgcggggcgtcaatggatcgccactccagctacatcttcatctggctgcagctggagctctgcgccatggccgtgctgctcaccaaaggtgaaattcgatgctactgtgatgctgcccactgtgtagccactggttatatgtgtaaatctgagctcagcgcctgcttctctagacttcttgatcctcagaactcaaattccccactcacccatggctgcctggactctcttgcaagcacgacagacatctgccaagccaaacaggcccgaaaccactctggcaccaccatacccacattggaatgctgtcatgaagacatgtgcaattacagagggctgcacgatgttctctctcctcccaggggtgaggcctcaggacaaggaaacaggtatcagcatgatggtagcagaaaccttatcaccaaggtgcaggagctgacttcttccaaagagttgtggttccgggcagcggtcattgccgtgcccattgctggagggctgattttagtgttgcttattatgttggccctgaggatgcttcgaagtgaaaataagaggctgcaggatcagcggcaacagatgctctcccgtttgcactacagctttcacggacaccattccaaaaaggggcaggttgcaaagttagacttggaatgcatggtgccggtcagtgggcacgagaactgctgtctgacctgtgataaaatgagacaagcagacctcagcaacgataagatcctctcgcttgttcactggggcatgtacagtgggcacgggaagctggaattcgtatgacggagtcttatctgaactacacttactgaacagcttgaaggccttttgagttctgctggacaggagcactttatctgaagacaaactcatttaatcatctttgagagacaaaatgacctctgcaaacagaatcttggatatttcttctgaaggattatttgcacagacttaaatacagttaaatgtgttatttgctttaaaattataaaaagcaaagagaagactttgtacacactgtcaccagggttatttgcatccaagggagctggaattgagtacctaaataaacaaaaatgtgccctatgtaagcttctacatcttgatttattgtaaagatttaaaagaaatatatatattttgtctgaaatttaatagtgtctttcataaatttaactgggaaacgtgagacagtacatgttaattatacaaatggccatttgctgttaataatttgttctcaactctaggatgtggcttggtttttttttttctcttttcttttttaaacaagaccaagatcttgcttattcttcaaaaaaaaaaaaaaaaaaaaa

SEQ ID NO: 5518 - DNA, 2358 bp, Homo sapiens
gtggtgccgtcctagctctgggctgcagcgtgagactcaggcggcagtcttggataggacccatcttcctgagcccccacaatcccccggcacactctgctcattggggcatgaggctcaggcagcaggctcaggattctgtcatgccttcccaagagcctccagtagacgacaagaacgaggacgccgaccttccttccgaggagacagatggaattgcttacatttcctcatcccggaagcatgacagcattaaagacgactcggaggaccttaagccagttatcgatgggatggatggaatcaaaatctctcaggggcttgggctgcaggactttgacctaatcagagtcatcgggcgcgggagctacgccaaggttctcctggtgcggttgaagaagaatgaccaaatttacgccatgatagtggtgaagaaagagctggtgcatgatgacgaggatattgactgggtacagacagagaagcacgtgtttgagcaggcatccagcaaccccttcctggtcggattacactcctgcttccagacgacaagtcggttgttcctggtcattgagtacgtcaacggcggggacctgatgttccacatgcagaggcagaggaagctccctgaggagcacgccaggttctacgcggccgagatctgcatcgccctcaacttcctgcacgagagggggatcatctacagggacctgaagctggacaacgtcctcctggatgcggacgggcacatcaagctcacagactacggcatgtgcaaggaaggcctgggccctggtgacacaacgagcactttctgcggaaccccgaattacatcgcccccgaaatcctgcggggagaggagtacgggttcagcgtggactggtgggcgctgggagtcctcatgtttgagatgatggccgggcgctccccgttcgacatcatcaccgacaacccggacatgaacacagaggactaccttttccaagtgatcctggagaagcccatccggatcccccggttcctgtccgtcaaagcctcccatgttttaaaaggatttttaaataaggaccccaaagagaggctcggctgccggccacagactggattttctgacatcaagtcccacgcgttcttccgcagcatagactgggacttgctggagaagaagcaggcgctccctccattccagccacagatcacagacgactacggtctggacaactttgacacacagttcaccagcgagcccgtgcagctgaccccagacgatgaggatgccataaagaggatcgaccagtcagagttcgaaggctttgagtatatcaacccattattgctgtccaccgaggagtcggtgtgaggccgcgtgcgtctctgtcgtggacacgcgtgattgaccctttaactgtatccttaaccaccgcatatgcatgccaggctgggcacggctccgagggcggccagggacagacgcttgcgccgagaccgcagagggaagcgtcagcgggcgctgctgggagcagaacagtccctcacacctgggcccgggcaggccagcttcgtgctggaggaacttgctgctgtgcctgcgtcgcggcggatccgcggggaccctgccgagggggctgtcatgcggtttccaaggtgcacattttccacggaaacagaactcgatgcactgacctgctccgccaggaaagtgagcgtgtagcgtcctgaggaataaaatgttccgatgatgtggaaaaaaaaaaaaaaaaaattttccgtgagtggcgcctgccccacatctcagacgcaacccacacgtaggggggcagcttaggagccagcgggacacaggtgggggcgggagttgaagtacctgggggcgaactccttctggcacatggggcagctgcgcagggccgcggcaccctccacagacggctgctgctccaccctgggggccctgcagggatcaggtgccgggcgctggggcagggacctggcgggggattccaggtgccctcctgccccgtgaagcagccggtaggaacggcccgggccccacaggtccggcggaaagggtgtccaggaaaaggtcttgggtccgacagtgaagacttcagtgggctccgggccgcacctgggctcctgcaacacagagttgttgggccttgcccagcgatggctcccgccctggaaaccccttcatcgctaagatgggcccagtgggcacacctgtcctgggaaggcgggcagtgaaggcacctcgtgatccaggatcagctccgggctcaccgtgcgcagtagctcggcccagagccgctcccgctcatcaccccccaggagaaaccaggggcggccgcaagctt

SEQ ID NO: 5519 - DNA, 866 bp, Homo sapiens
  misc_feature (687)..(687): n is a, c, g, or t
  misc_feature (693)..(695): n is a, c, g, or t
  misc_feature (721)..(739): n is a, c, g, or t
gacgaatggaaaggctggatgcaacttgtgattttgatttatcacatttctggagcaagtacagtaagtatttggaatttaagttcagaaagtataggaagtgatgtcattttaatgtttctttaagggcaccagcttttttgtgttttataatctctaccagttatagacccttcttatttcccacttaatctttccgcctttccatttttctcctctttgagaaaatgtaattttcaaagcaaaattttttttaaaaaagataagggcaataattgctttgtatttgcttgggccttaatttttaacataatagaaatagctgatatctaagggtattattttatggccatcttattgaacagctaatttgaagttatcaggaaactttgaagaggcccaggtgtagtggctcatgcctgtaatcctagcactttcggaggccgaggtgggtggatcacctgaggtcaggagttcaagaccagcctagccaacatggtgagaccctgtctctactaaaaatacaaaaactagcccaggcatggcggtgcatgcctgtaatcccagctactcggaaagctgaggcaggagaaacacttgaacccaggggatagaggttgcaatgagccgattttcaccactgtactccagcctgggttgcagagtgagactccctcgtaaaaaaanaaaaannnaaaaaaacatgtgggccgcttgggcnnnnnnnnnnnnnnnnnnngcagcttatgcttcggccgcaattcgggtcacttggcaattgcctatagggaggcgataacaatcacgggccgcggtttcaacacgggactgggcctggcgttccaacttgcttgcggacccccttt

SEQ ID NO: 5520 - DNA, 1617 bp, Homo sapiens
cagcatttgtgccttgaacagtggttttttttggtagaatgcgccaggctttgagagaaggctgtgactgctgtgctctgggcgccaggtcgctccagggagtgatgggaatcctgtcattcttacctgtccttgccactgagagtgactgggctgactgcaagtccccccagccttggggtcatatgcttctgtggacagctgtgctattcctggctcctgttgctgggacacctgcagctcccccaaaggctgtgctgaaactcgagccccagtggatcaacgtgctccaggaggactctgtgactctgacatgccgggggactcacagccctgagagcgactccattcagtggttccacaatgggaatctcattcccacccacacgcagcccagctacaggttcaaggccaacaacaatgacagcggggagtacacgtgccagactggccagaccagcctcagcgaccctgtgcatctgactgtgctttctgagtggctggtgctccagacccctcacctggagttccaggagggagaaaccatcgtgctgaggtgccacagctggaaggacaagcctctggtcaaggtcacattcttccagaatggaaaatccaagaaattttcccgttcggatcccaacttctccatcccacaagcaaaccacagtcacagtggtgattaccactgcacaggaaacataggctacacgctgtactcatccaagcctgtgaccatcactgtccaagctcccagctcttcaccgatggggatcattgtggctgtggtcactgggattgctgtagcggccattgttgctgctgtagtggccttgatctactgcaggaaaaagcggatttcagccaatcccactaatcctgatgaggctgacaaagttggggctgagaacacaatcacctattcacttctcatgcacccggatgctctggaagagcctgatgaccagaaccgtatttagtctccattgtcttgcattgggatttgagaagaaaatcagagagggaagatctggtatttcctggcctaaattccccttggggaggacagggagatgctgcagttccaaaagagaaggtttcttccagagtcatctacctgagtcctgaagctccctgtcctgaaagccacagacaatatggtcccaaatgaccgactgcaccttctgtgcttcagctcttcttgacatcaaggctcttccgttccacatccacacagccaatccaattaatcaaaccactgttattaacagataatagcaacttgggaaatgcttatgttacaggttacgtgagaacaatcatgtaaatctatatgatttcagaaatgttaaaatagactaacctctaccagcacattaaaagtgattgtttctgggtgataaaattattgatgatttttattttctttatttttctataaagatcatatattacttttataataaaacattataaaaacaaaaaaaaaaaaaaaaaacaaggctgaattggcttggagtgtagactgaactgctctggcgtctgtatctcttcagtgatgagactctaaagaagccggagtggtatcccactaggggaagaaaagatgttttcggg

SEQ ID NO: 5521 - DNA, 4109 bp, Homo sapiens
  misc_feature (366)..(385): n is a, c, g, or t
  misc_feature (3641)..(3700): n is a, c, g, or t
cgccgtcttcttgtctactctccagaacggccatgatttcccaattcttcattctgtcctccaagggggacccgctcatctacaaagacttccgcggggacagtggcggccgggatgtggccgagctcttctaccggaagctgacgggactgccaggagacgagtccccggttgtcatgcatcaccatggccgtcatttcattcacatcagacacagcggcctctatttggtggtcacaacttcagaaaacgtttctcccttcagcctcctagaactgctctccaggttggccacccttctgggcgattactgtggctccctgggcgaggggaccatctcccgcaatgtggctctggtatactccnnnnnnnnnnnnnnnnnnnnggctatgtacagagcacatccacggagatgctgaggaattgtcatccagtacggaagctgtggtcagcaagcccttcagcctctttgacctcaggcaggcgttggcttgtttggggctgagacacaacagagcaaagtggcccccagcagtgcagccagccgccccgtcctgtccagtcgctctgaccagagccaaaagaatgaagttttttttggatgtggtcgagagattgtctgtactgatagcatctaatggatccctgctgaaggtggatgtgcagggagagattcggctcaagagcttccttcctagcggctctgagatgcgcattggcttgacggaagagttttgtgtggggaagtcagagctgagaggttatgggccaggaatccgggtcgatgaagtctcgtttcacagctctgtgaatctggacgaatttgagtctcatcgaatcctccacttgcaaccacctcagggcgagctgactgtgatgcggtaccaactctccgatgacctcccctcaccgctccccttccggctcttcccctctgtgcagtgggaccgaggctcaggccggctccaggtttatctaaagttgcgatgtgacctgctctcaaagagccaagccctcaatgtcaggctgcacctccccctgcctcgaggggtggtcagcctgtctcaggagctgagcagcccagagcagaaggctgagctggcagagggagcccttcgctgggacctgcctcgggtgcaaggaggctctcaactctcaggccttttccagatggacgtcccagggcccccaggacctcccagccatgggctctccacctcggcctctcctctggggctgggccctgccagtctctccttcgagcttccccggcacacgtgctctggcctccaggtccgattcctcaggctggccttcaggccatgcggcaatgccaacccccacaagtgggtgcgacacctaagccacagcgacgcctatgtcattcggatctgaggctccccaaacgaggacacgacggccaaggtggcagtttgtcccacgggaggacagtcgtttcttttccagcctcctggccttcggactctgaatctgggcaggaagagtcctcagtcccaagaccaggagggggcaatgggcccagcctttctgtggtatctgatgcaggaaggactgcagtggatcagaacttacaaaccaaacttttattctgagaaactggctgtacaatatctaaaaagaaagtgacatgaaggaagcaatctacaacttccttccgcttagcgagcatgcatgtgtgtacgtgcacgtgtgtacatgtctgcatgtgtgggaatccgggggctggcaggtggagcatcacggagcaggctgaggggagccggagttgggctgggagccattggcttttggagtccctggagctggagggggactgtccccagcctcctgcttccccccacaaagggcactgccgctgagtggggacggggacgatgccgggggaggaactggagaaggatgggaggtggggcctcctttgccctcccctgttgggggaagtgagaccacgatgtacttctggacactcccaggaccagagggagcagtgctggggggtgcggtggtggcggtggagaccaacttgacgatgggctgcacgctggggacggtggtggtgacgggcgaagtggtggtggaacctgagccgggggccgaggtgctgagggacaggacctgctgggtggatggggcgctggaggacgatgacattacaataaacttggttggaggaggggaaggctgtggtggggcagccgctcgtgcagacaccagtgtctggacaggaagtgcgatggagccaggaaccttcagcaagccaggggtgcgagggccaggctgtggggcctgcgagagggtcagcgtgggccggggctgcgtgatggtcagagtggtcctgttgacctgctgagcctgcagagcagcctgggcccgagccttgaccacctgggagcagaggaggggcccaagggacccgaattctgcccgataggcgtcctgattgtcaggcggtgggcgcagctttgccagaacaggagcacagtgtttcagcaggaggctctgcacatggtctgctccaatccggtcaatgttgctcagcacagggccgtccagcacactgcggatccgctccccttcctgctgcagccggggcagaatcagagtcttgataacatcgtgtcccagctcagccaagcctgcgatggagccataacgagtcgtccagggcgtcttctcgtccacccagctcttggtgaaggtcttggtgatccgggactggatgttgttagtggttgtgctaaaatgcttgcagatctgggccaccaggcgggcagcaaagtctcggagtgcccagtgattgtccacatctggtcgcaggcacaactgtctgctcacgatgcaggtcatcacagctggaatcagctcatggacgtatttttctagatagagcgtggggttgtccatcagcgctttcaccatacgcatcaggtagatgagtagggccaggttgttctgaaccacgttcacacggaccccctccgagataaaggtactgaaccgtggcagcatctgatacagtccagggtccgtggcaatgctttgcagggcttccgccctcttggcctcgcaggagcccacgcaggcctcggtgatctccttgtagtagagctgctgctccacagacaactcgtggatgctccggggcttcagtcgcaagggggccccctccagcaagggcggcgccttcttctctttccctttgccgtcggctgtggtggccccttgacctttgcccttcaggggtccgtcttcctcctggcctggcttggctgacttcaggggttctgtggcttcagccttctgttgctctttgggagctgggggcgggttctcggggatagctggctggcagccctcgatgctcagccaatgagctttgaggcagacgtccaggggcacccggggcagaggggtattgatgatgtcgctcagatcaacctccttctcctcatagaagtaaagctcccggcccccaccagaggcgaagcggaaaggaatgaactcctgggcgtggaagccatagagtggctcgacattctttagcttcaaggcgtagtcaatgtcactggtggtgagcttctgccgcttccccatgtgcatgaacttcaaggcatcctgtnnnnnnnnnnnnnnnnnnnnnnnnnnnnnnnnnnnnnnnnnnnnnnnnnnnnnnnnnnnntcctcctgaatctgggcgatgcccatggattcagccaccaccttcatggactccgagggcagcacagtgttgctaagcttcagcttcttctcctcagccattctggagtccctcttctcctccctggaaggatgaagcccccggtggagagacggagaccctggcagaggaacggggcaggcagaagaaaaagaaacgtgagacacagggagagggccaacaaagggaggacagtggagacaggggaggaactccgagtgtcttatgtccatccccacgtgagtcagccctgaggtgtaacagagaaagatacaaatctgggctggggccaggttcagtggctcacgcctgtaatcccaccagcaccttgggaggacgaggcgggcggatcacttgaggtcaggaattc

SEQ ID NO: 5522 - DNA, 8292 bp, Homo sapiens
  misc_feature (2786)..(2800): n is a, c, g, or t
  misc_feature (3739)..(3763): n is a, c, g, or t
  misc_feature (4598)..(4695): n is a, c, g, or t
  misc_feature (8204)..(8290): n is a, c, g, or t
gactgaggcttcgctgctctcggagcgctcagaccgctgcaggaattccccggcgaaagaggcaaagtcccgcacgccggaggacatgcgcctcggttagcggccccgggccccaccaccgtgcggctttctccagattattcctctctcgctgtctctgactgtctctctctgtctctgtctctgtctctctctctctcacacacacacacacacacacaaacacacatacgcacgcacgatctcacttcgatctatacactggaggattaaaacaaacaaacaaaaaaaacatttccttcgctccccctccctctccactctgagaagcagaggagccgcacggcgaggggccgcagaccgtctggaaatgcgaatcctaaagcgtttcctcgcttgcattcagctcctctgtgtttgccgcctggattgggctaatggatactacagacaacagagaaaacttgttgaagagattggctggtcctatacaggagcactgaatcaaaaaaattggggaaagaaatatccaacatgtaatagcccaaaacaatctcctatcaatattgatgaagatcttacacaagtaaatgtgaatcttaagaaacttaaatttcagggttgggataaaacatcattggaaaacacattcattcataacactgggaaaacagtggaaattaatctcactaatgactaccgtgtcagcggaggagtttcagaaatggtgtttaaagcaagcaagataacttttcactggggaaaatgcaatatgtcatctgatggatcagagcatagtttagaaggacaaaaatttccacttgagatgcaaatctactgctttgatgcggaccgattttcaagttttgaggaagcagtcaaaggaaaagggaagttaagagctttatccattttgtttgaggttgggacagaagaaaatttggatttcaaagcgattattgatggagtcgaaagtgttagtcgttttgggaagcaggctgctttagatccattcatactgttgaaccttctgccaaactcaactgacaagtattacatttacaatggctcattgacatctcctccctgcacagacacagttgactggattgtttttaaagatacagttagcatctctgaaagccagttggctgttttttgtgaagttcttacaatgcaacaatctggttatgtcatgctgatggactacttacaaaacaattttcgagagcaacagtacaagttctctagacaggtgttttcctcatacactggaaaggaagagattcatgaagcagtttgtagttcagaaccagaaaatgttcaggctgacccagagaattataccagccttcttgttacatgggaaagacctcgagtcgtttatgataccatgattgagaagtttgcagttttgtaccagcagttggatggagaggaccaaaccaagcatgaatttttgacagatggctatcaagacttgggtgctattctcaataatttgctacccaatatgagttatgttcttcagatagtagccatatgcactaatggcttatatggaaaatacagcgaccaactgattgtcgacatgcctactgataatcctgaacttgatcttttccctgaattaattggaactgaagaaataatcaaggaggaggaagagggaaaagacattgaagaaggcgctattgtgaatcctggtagagacagtgctacaaaccaaatcaggaaaaaggaaccccagatttctaccacaacacactacaatcgcatagggacgaaatacaatgaagccaagactaaccgatccccaacaagaggaagtgaattctctggaaagggtgatgttcccaatacatctttaaattccacttcccaaccagtcactaaattagccacagaaaaagatatttccttgacttctcagactgtgactgaactgccacctcacactgtggaaggtacttcagcctctttaaatgatggctctaaaactgttcttagatctccacatatgaacttgtcggggactgcagaatccttaaatacagtttctataacagaatatgaggaggagagtttattgaccagtttcaagcttgatactggagctgaagattcttcaggctccagtcccgcaacttctgctatcccattcatctctgagaacatatcccaagggtatatattttcctccgaaaacccagagacaataacatatgatgtccttataccagaatctgctagaaatgcttccgaagattcaacttcatcaggttcagaagaatcactaaaggatccttctatggagggaaatgtgtggtttcctagctctacagacataacagcacagcccgatgttggatcaggcagagagagctttctccagactaattacactgagatacgtgttgatgaatctgagaagacaaccaagtccttttctgcaggcccagtgatgtcacagggtccctcagttacagatctggaaatgccacattattctacctttgcctacttcccaactgaggtaacacctcatgcttttaccccatcctccagacaacaggatttggtctccacggtcaacgtggtatactcgcagacaacccaacccggtatacaagtggtgagacacctcttcaaccttcctacagtagtgaagtctttcctctagtcacccctttgttgcttgacaatcagatcctcaacactacccctgctgctacaagtagtgattcggccttgcatgctacgcctgtatttcccagtgtcgatgnnnnnnnnnnnnnnntcctgtcttcctatgatggtgcacctttgcttccattttcctctgcttccttcagtagtgaattgtttcgccatctgcatacagtttctcaaatccttccacaagttacttcagctaccgagagtgataaggtgcccttgcatgcttctctgccagtggctgggggtgatttgctattagagcccagccttgctcagtattctgatgtgctgtccactactcatgctgcttcagagacgctggaatttggtagtgaatctggtgttctttataaaacgcttatgttttctcaagttgaaccacccagcagtgatgccatgatgcatgcacgttcttcagggcctgaaccttcttatgccttgtctgataatgagggctcccaacacatcttcactgtttcttacagttctgcaatacctgtgcatgattctgtgggtgtaacttatcagggttccttatttagcggccctagccatataccaatacctaagtcttcgttaataaccccaactgcatcattactgcagcctactcatgccctctctggtgatggggaatggtctggagcctcttctgatagtgaatttcttttacctgacacagatgggctgacagcccttaacatttcttcacctgtttctgtagctgaatttacatatacaacatctgtgtttggtgatgataataaggcgctttctaaaagtgaaataatatatggaaatgagactgaactgcaaattccttctttcaatgagatggtttacccttctgaaagcacagtcatgcccaacatgtatgataatgtaaataagttgaatgcgtctttacaagaaacctctgtttccatttctagcaccaagggcatgtttccagggtcccttgctcataccaccactaaggtttttgatcatgagattagtcaagttccagaaaataacnnnnnnnnnnnnnnnnnnnnnnnnntctctcaagcatctggtgacacttcgcttaaacctgtgcttagtgcaaactcagagccagcatcctctgaccctgcttctagtgaaatgttatctccttcaactcagctcttattttatgagacctcagcttcttttagtactgaagtattgctagaagcttcctttcaggcttctgatgttgacaccttgcttaaaactgttcttccagctgtgcccagtgatccaatattggttgaaacccccaaagttgataaaattagttctacaatgttgcatctcattgtatcaaattctgcttcaagtgaaaacatgctgcactctacatctgtaccagtttttgatgtgtcgcctacttctcatatgcactctgcttcacttcaaggtttgaccatttcctatgcaagtgagaaatatgaaccagttttgttaaaaagtgaaagttcccaccaagtggtaccttctttgtacagtaatgatgagttgttccaaacggccaatttggagattaaccaggcccatcccccaaaaggaaggcatgtatttgctacacctgttttatcaattgatgaaccattaaatacactaataaataagcttatacattccgatgaaattttaacctccaccaaaagttctgttactggtaaggtatttgctggtattccaacagttgcttctgatacatttgtatctactgatcattctgttcctataggaaatgggcatgttgccattacagctgtttctccccacagagatggttctgtaacctcaacaaagttgctgtttccttctaaggcaacttctgagctgagtcatagtgccaaatctgnnnnnnnnnnnnnnnnnnnnnnnnnnnnnnnnnnnnnnnnnnnnnnnnnnnnnnnnnnnnnnnnnnnnnnnnnnnnnnnnnnnnnnnnnnnnnnnnnnatgtcatgctcatcctatagagaatcacaggaaaaggtaatgaatgattcagacacccacgaaaacagtcttatggatcagaataatccaatctcatactcactatctgagaattctgaagaagataatagagtcacaagtgtatcctcagacagtcaaactggtatggacagaagtcctggtaaatcaccatcagcaaatgggctatcccaaaagcacaatgatggaaaagaggaaaatgacattcagactggtagtgctctgcttcctctcagccctgaatctaaagcatgggcagttctgacaagtgatgaagaaagtggatcagggcaaggtacctcagatagccttaatgagaatgagacttccacagatttcagttttgcagacactaatgaaaaagatgctgatgggatcctggcagcaggtgactcagaaataactcctggattcccacagtccccaacatcatctgttactagcgagaactcagaagtgttccacgtttcagaggcagaggccagtaatagtagccatgagtctcgtattggtctagctgaggggttggaatccgagaagaaggcagttataccccttgtgatcgtgtcagccctgacttttatctgtctagtggttcttgtgggtattctcatctactggaggaaatgcttccagactgcacacttttacttagaggacagtacatcccctagagttatatccacacctccaacacctatctttccaatttcagatgatgtcggagcaattccaataaagcactttccaaagcatgttgcagatttacatgcaagtagtgggtttactgaagaatttgagacactgaaagagttttaccaggaagtgcagagctgtactgttgacttaggtattacagcagacagctccaaccacccagacaacaagcacaagaatcgatacataaatatcgttgcctatgatcatagcagggttaagctagcacagcttgctgaaaaggatggcaaactgactgattatatcaatgccaattatgttgatggctacaacagaccaaaagcttatattgctgcccaaggcccactgaaatccacagctgaagatttctggagaatgatatgggaacataatgtggaagttattgtcatgataacaaacctcgtggagaaaggaaggagaaaatgtgatcagtactggcctgccgatgggagtgaggagtacgggaactttctggtcactcagaagagtgtgcaagtgcttgcctattatactgtgaggaattttactctaagaaacacaaaaataaaaaagggctcccagaaaggaagacccagtggacgtgtggtcacacagtatcactacacgcagtggcctgacatgggagtaccagagtactccctgccagtgctgacctttgtgagaaaggcagcctatgccaagcgccatgcagtggggcctgttgtcgtccactgcagtgctggagttggaagaacaggcacatatattgtgctagacagtatgttgcagcagattcaacacgaaggaactgtcaacatatttggcttcttaaaacacatccgttcacaaagaaattatttggtacaaactgaggagcaatatgtcttcattcatgatacactggttgaggccatacttagtaaagaaactgaggtgctggacagtcatattcatgcctatgttaatgcactcctcattcctggaccagcaggcaaaacaaagctagagaaacaattccagctcctgagccagtcaaatatacagcagagtgactattctgcagccctaaagcaatgcaacagggaaaagaatcgaacttcttctatcatccctgtggaaagatcaagggttggcatttcatccctgagtggagaaggcacagactacatcaatgcctcctatatcatgggctattaccagagcaatgaattcatcattacccagcaccctctccttcataccatcaaggatttctggaggatgatatgggaccataatgcccaactggtggttatgattcctgatggccaaaacatggcagaagatgaatttgtttactggccaaataaagatgagcctataaattgtgagagctttaaggtcactcttatggctgaagaacacaaatgtctatctaatgaggaaaaacttataattcaggactttatcttagaagctacacaggatgattatgtacttgaagtgaggcactttcagtgtcctaaatggccaaatccagatagccccattagtaaaacttttgaacttataagtgttataaaagaagaagctgccaatagggatgggcctatgattgttcatgatgagcatggaggagtgacggcaggaactttctgtgctctgacaacccttatgcaccaactagaaaaagaaaattccgtggatgtttaccaggtagccaagatgatcaatctgatgaggccaggagtctttgctgacattgagcagtatcagtttctctacaaagtgatcctcagccttgtgagcacaaggcaggaagagaatccatccacctctctggacagtaatggtgcagcattgcctgatggaaatatagctgagagcttagagtctttagtttaacacagaaaggggtggggggactcacatctgagcattgttttcctcttcctaaaattaggcaggaaaatcagtctagttctgttatctgttgatttcccatcacctgacagtaactttcatgacataggattctgccgccaaatttatatcattaacaatgtgtgcctttttgcaagacttgtaatttacttattatgtttgaactaaaatgattgaattttacagtatttctaagaatggaattgtggtatttttttctgtattgattttaacagaaaatttcaatttatagaggttaggaattccaaactacagaaaatgtttgtttttagtgtcaaatttttagctgtatttgtagcaattatcaggtttgctagaaatataacttttaatacagtagcctgtaaataaaacactcttccatatgatattcaacattttacaactgcagtattcacctaaagtagaaataatctgttacttattgtaaatactgccctagtgtctccatggaccaaatttatatttataattgtagatttttatattttactactgagtcaagttttctagttctgtgtaattgtttagtttaatgacgtagttcattagctggtcttactctaccagttttctgacattgtattgtgttacctaagtcattaactttgtttcagcatgtaattttaacttttgtggaaaatagaaataccttcattttgaaagaagtttttatgagaataacaccttaccaaacattgttcaaatggtttttatccaaggaattgcaaaaataaatataaatattgccattaaaaaaaaaaaaaaaaaaaaaaaaaaaaaaaaaaaaaagaaaaaaaaaaaaaaaaaaaaaaaaaaaaaaaaannnnnnnnnnnnnnnnnnnnnnnnnnnnnnnnnnnnnnnnnnnnnnnnnnnnnnnnnnnnnnnnnnnnnnnnnnnnnnnnnnnnnnntg

SEQ ID NO: 5523 - DNA, 3615 bp, Homo sapiens
cacaaaaggacatttattaaatttagtcataatcatctcaaggacatggtaagtgaaagagtgtacataaagtacttaagtgtaatgttgctacttaatgttcaataactcaaagagaccaccaccactacgtacattttacttttattagtaattaataataattaataattagtaattcagtggtaattagtatactaccaaagaaagtacttgagcagaagagccaaaattcaaaccatagaatcattttactgtgcttttattctacctcaaacactaatctccaggcctgggataaagggattatttctctgaaggggaaagttatcctcttttgcccaagtcacacttgtgtcatttcttatactgtaaacatgtggttccaattctgaggtattttcccggcttgtaggacccaaaaagaagttaggcttgagaaattttaagtgaagagaacaattctagttcagagtgattggctcttcctaaaagctgacatttgactgaaaattttgaggggagggaaagaaacaataccttttacggcatgtaataggaagaagacctggattttagttgctgctctgatgtcccaacttgggtaaggcaacataacataaatgtcagtttcttcagatttgtgatgaagctgataatccatgctcagcttcctttatgggtctcttgcctatcaaataaggtacagtatgtgaagatacattgcagattatcttatgcattgcttcaggggatgattaaaccatcctttattatagccagagtctagtctaagggaagaaggtcattctctataccagtgaaggctccatccaaaccagtgtttgggggcatagtcataattgaaaaatgattgttttccttatctgtaaaacaggtaaatggtattaatcctcaggtggttgtgaggattaagtgatacatgtaaaaaaaagaaagctttggatagtacctattataagaaactcagtgttgctgcaatgtatgaattataatggatttgaaatttgccctaaccaagagtcacagacagaaaaaaggaagttaatgtatctcttgatcactgtcaagatgtggtattgaaccttcaagatccttttcagggaatatgtgagatcaaaatttttatactggcactatgatgttatttgccttttcctcatattcacaagtgaacagtggagttttacagaagctatataatgtcatgacatcactgatgggtaatagaatgtgtgcttgtatattccgaaactttcagttccaatttcttcgatcaatgtaatcctcataagtaaaagttatttgaggacctcagacatttttaaaaatgtaaagggggtggggtcaggctcagtggctcatgcctgtaatcccagcattttggaaggccgaggcgaacggatcacttgaggccaggagtttgaaactagtctggtcaacatggtgaaaccccgtctccactaaaacaaaaagttttctggatgtggtggcacacatacctgtaatcccagctacttggtggctgaggcatgagaatcacttgaacccagaagacaggttgcagtgagccaagattgtgcccctgcattctagcctgggtgacagtgagactgtctcaaaaaataaaggtgtacagggattgtatatttgacaacttggtatgtaggatgtgctacctctaatgttccatgctgttacttagttttcactcactactatattttggagatttgttcatattgctctgtgtacatttaattcttcagtgtgtatccaccacatttaacttattcacttacagaactatgcaagaatttctctggtaaatttcactaagtacttatgtacttttcagaacgattgtgagtttacacccctaccagcaggactgagttgagtacccatttcctcacatccttgccagtacttcatttgcctaatttttgccattctcataatgtggcaattgttcaattttgcatttcttccattttatttttttgcatctctgcttttcttttggttagctttgccagttctgcctattatattaatctcccagaatcagcttttagttttgttaaatctctgacatgtttcgttgattcctgctttcatcttaaacatttcttcgttgttaatttgtgtttgctataaaataagcaacatcttaaatgcttgatttgctttcgatgtttattctgtaataagatatttaaagatataattttttccctaaatgctttattagacttttctcataagttttgactggtactgttttcattgttatttaattttgtgtcttttaacttctttcatgatttccttttaactgaaggttttcttagatatttagtttgctggtatattcttttaaaattgtatcattgctttctttctatattggattattgtcagagaacatgatttgcatgatattaactttttggagtatattgttgcatctttgtggcctagtacatagttaatttagtgaatgcttccagttgtacttgaaaagaatgtatattttctgattattgagggtaaatttctctatatatgttttcctgtttaataaatatgtagctatgtgcttaaaaaaaaaaaaaaaaaaaaaaaaaaaaaaaaaaaaaaaaaaaaaaaaaaaaaaaaaaaaacaagccacacacaaagagacacaacgctacacccacaaaaaacaccaacagggacgaccacagacgcacccgccataacctaccgccagatctttgccacccccatgggccgcgccacatctcagcaccgaccaccaaagaccaaggcgacagtcgctcacacagacgcaacgtaacaccgaaggaatggccgagagagacaaccactgagcacacgcggaggacaacacaccacgagagagacgcgacccaagccggtaccggagacatcacacacaagacccgacgacccaactcaaccacatcaaggtcataaagacggaagaccaaacagcgaaagcaacacacaacgagactacagacgcccagacacagacctcagcaaaaccacaacgcccaagcaacacagggcagcgtccgcaggagaaaaacccagcctcgacacagacgacgccagcctcgcatcacaccaaccgcccaacaaccgaccagcaccgacgcccacaaaccacccaacccaacgagcagaccgacaaagagccaacccacacatcgaaacaaaggggcgcagcggacgacgacgaagacaacagacgagcacacgaagagggggacgagaaggaagcagaaaaggcgagcagagcgacgcagactaacaagcgaaaggacacgaagacacgagaaccgaacgcgagcccgggagacagactagggcagcagaccggagcaaacgacaccgagacacagcagggacgaacggacagacgcaccgagcgaggcgacggcgcagccacggcacaccgcagagcgccaccgcaccgaccgagacgagccaagccgagagcaacccctagatgctccgaggcacgacgcaccacacagcgcaaggcccaaggcagaagacgcccacgagacgacgcgaccgcgc

SEQ ID NO: 5524 - DNA, 5710 bp, Homo sapiens
  misc_feature (3277)..(3291): n is a, c, g, or t
  misc_feature (3516)..(3534): n is a, c, g, or t
  misc_feature (4432)..(4443): n is a, c, g, or t
gcctgggtggcgatctcggacgaggcggcaggcgggaggcggcagggctggcattgcagtgcgggccgtgcgggctgcgcgggcgcggggaggcgcgggcggcaaactgcgggcacccggcaccccgcagccagtaccgggcggaggcgtcagagccgcgcaccgcggacgagcaggcccaggcatccagtaccctgctgactctgacatgcccccagcctcccccagctctgcagggagccctggtgccagagaccttctcccatttctccctatgggtgcctgacctgagggcagagacatctgagtgtgtataagcacagcaggacaccaggacctggcctgaagacatttcctctcctcccctctggatttctcagagactgttctgcgatgaccacagcaaggtaccggcccacctgggacctggccctcgacccgctggtgtcttgcaagctctgtcttggggagtacccagtggagcagatgacaaccatagcccagtgccaatgcatcttctgtactctgtgcctgaaacagtatgttgagctcttgatcaaagaaggattagaaaccgcaattagctgcccagatgctgcctgccctaaacagggccacctacaggagaacgagattgagtgcatggttgcagctgaaattatgcaaagatataaaaagctacaatttgaaagagaggtgctgtttgatccctgtcggacttggtgcccggcgtccacctgccaagctgtgtgtcagctccaggacgtggggctgcagaccccccagccagtgcagtgcaaagcctgccgtatggaattctgctccacctgcaaagccagctggcaccctggccagggctgcccggagaccatgccgatcaccttcctccccggggagaccagtgctgctttcaaaatggaagaagatgacgcgcccatcaagcgctgccccaagtgcaaagtctacatcgagcgagacgaaggctgcgcgcagatgatgtgcaagaactgcaagcacgccttctgctggtactgcctggagtctctggacgatgatttccttctgatacactacgataagggaccctgccggaacaagctgggccactcccgggcatctgtgatctggcatcggacacaggttgtgggcatttttgcaggatttgggctgctgctcttggtggcctcacctttcctactcctggccactccctttgtactttgctgcaagtgcaagtgcagtaaaggtgacgacgacccgttacccacctagaggaagcgcgatgctggaacacatccctgcctccgggaagtgtggctctcccccaaccctccccaccgtccccccttcactaaacatctttcttgccttatgtgccccattgagcttcacagtgtcaggctggacgccgtgatttcagggacctatgtcacaatgttcgctgaggccccaggtgtggtggggaggggaggcaggtgtgggtagcgcacatccccacagatcaatctctgcagatgacagggaggtgctgtgagaagtgcaccaggcagctttctctctgtggtagactaggcatgtctggggatggcctaagagactttctgctccttggcttctagatggcaccatgttgtcagagaagtcttttaaggactgccactctcttcagacagaatctgattattccagcttgagagaagcactctgtttatgacaactgtttttattactaatggcatttagtaaaatcctttttagaaggtattttttttccaactgagtagtgaaaatcaacaaggtgcatataaaccatcctatgcctttcttgaaatgtgcattttaagaagttatagttaaacgacttttcaggagatttagaaagccttatgcactctttgtgtttttcttgaaacttgctgtagtaactttttgaacgctgtaagctgtgtactgttataagtgtgcttcctatattgttgcatttccttgataatattgacgtgtttaaaggaacatctcatctccattagatttgccttttgttgttttctctctttggtgattcagctcagctcatgggcctcatcccttctctcccaggtagcagaaaacgctttttattgcattcaatcccactgctttgctcggcaatggttctcctccgaattgctgccgtctggcctctggcctcagtcttcagatagacagtaagaagaaagcagcctcattgatccgcagatgtaggggcctcttggcagaggctggaggactctgggggctagggaagagcctgccagattttcacatttttaaaatgttctagtcattttgagaaatcatatatcttacacagttccaagtcctgttgctaaccgttttgctcttgttggggaaaagaacctcccatttcacttcgttttaacgtggggattttaccacttgatcttttacagggctgtctgtgaccatttccatggcagcaggatgcagggattaataaggacacatacacattattccaccaattgactttgaaaagtggagaaagtgtattctttaaagagaatttacttctaaaagccacaggtgcttttacaaagcaaactgcattgaatttaaaacttctaaaaataacaggcaaatattgtagctatattacagtgggattttaaaaatcttgttaaacattctataaagaagtaaaacaaaatccttttatctcagttatttgcccatcacaagcacatttttaaaatgttgctttgtgtgtgtttgacttctgcatttgagtatcagtctcaggtcctagtttactttccctggttggaaatttatttcttatttcctaacattgaattcgttagaaaaaacagcgtcacctcactcttcacctgtcatgttgattttccttatgaacccgaagccatttagaaaatccctgtgtgtcaaaattacattcaaaaagctctccttgtaattgcaagtttagtaactcagtaagaacatgcctgcgactccctttctggatggaacctgggctgtggctctctgtcgtttgtggtgctgtgatggtgtctactgttagaatagcttttctggaggtgggtggcaactccacgcgggagtcattggctgggcttgagccctcagcctgtgatatgtggatgcagctgtccagccactgccctttaacatgcccagcacacatgggaggcctgtggccctgtgcccagtggcccacaggacacgcctccaccatatgctcatccttcctgcnnnnnnnnnnnnnnncccatcgcatgagcccacacagtagcacccccgtccttaggatgagagtcagagcctttggaaaggctgcatccccagggctagagctcagatgaccttatttctagagggacaggctgttctgttggaagagtctctggcccagtcatgcacatctgtagccccagccatccttgtgccttcacctctgatgtgtttcacaagcacgtagttcaacccagatannnnnnnnnnnnnnnnnnnggggccagccaggggcagtcaaattagcacctactggctctgactttttgtatgaagcatgcctcagtttcctcattttgatctagatataaaattaaaattgtccatttcctatataaataccagcaagatcactctgagatacataaactcgcatttccttctgttttagtaaggagtgccagacttatctttgatgggaatacagtatgaaccctgcttgatgtaaaatggaaatagcacacaggcagatggccctgggtttggactttgatcttgccatcattccccagtaaaacctggggagttctgcgttgagtggacggacttattcctgtgaagcggcataatttgtctccattgaaaaatggcattcactcttacagatggtgttcactgcaagccccagaagcatatggcatgtgttcactaagaggcctttaatcctggggagtaaggggcgaaggcccttagacaaccatggctgctgtaccgccgcccagggtgggtggccagtgaggactggccttagcccagtggacctgtggcttctctgaggcccttgagtaactgaccacatttggaggttttgctggaaatgcctgacctctcagtctggctctgctgtgtagtccatagcccagccagatgagcttgcagcctcataggaggtcagcaccttgcaaagatgcagtcaccatagatgtccacgtagcagagactgacttaggatctgagataaagcatcggattgcaggaataactgtccaaattagttcttcctcctcaactcataggagtagctgtggacagaggaaccaacatctgccacctctggcattttctttcttttttttctttttgagacggagtttcgcttttgtcccccaagctggannnnnnnnnnnnggatctcggctcactgcaagctctgcctcccgggttcaagcgattctcctgcctcagcctcccaagtagctgggattacaggcacccaccacctcacccagctaatttttgtattttcagtagagacggggtttcaccatgttggccaggctactctcaaactcctgacctcaggtgatctgcccacctcggcttcccaaagtgctggaattacaggcctgagccaccccacccggcctattttcttaaaggggaacaaatgatcttgacaacatattattccataaaaccagtttagggcacaggccagttcctgattagaacacaggacctgtgggagggactatcagagatgcaaaaattacttcaagatgagtttattgttttcatttgtattgcaaaagttagaagtcattttacaaattaaaaaaacatttttttcttggtagtctttaaaaattaggggattgaaaggatccaggatgggctttgtgtgtgtgtctcagattctcatttattagtgagcacacctgtgtatatatataaatcacaaggagatcatcaagggaaaacattttgcatgtgtaaagcttcatgaagttctctttaaaaaataccaaagcttgtttatttctgataattaacctaagcccttatgaaaataaacaaaatgaagggattatgacaggtattaccaaaaacaccaaaaggaacaaaggggcctgcgttaaaacctaattgctaatgcttcacaactaggagagcatgccgtcttgatgtttaaaaaacccagggtctccacccttcctttgatttgtgcaattctgtcttccacagttccggagccttcagtgaggggtagctacatgccccatgcctgccctttctttccttctttgctcactttactatgggtgtattttaatcttgtataaaaatatgcatgaatgagtcatgcacatgtatacgttatgtatttgacaagtggtggtgaaacaaaatcaaaacagatttgatttgtgtttttgaaatgtcagtacattttgtgccactaacactgtgatgtataaaagagctgtttgaatgccttttaatgttgtgttttgtactctggaatcatatggaaaaagtttgatttgtaatttcaatacatattttaaatgtattgtgtcttacgtagtttgtccccccctttagcagggattcctttttaaagctattttggctggaatacaggtgacttttgtaaaaaaaaaaaaaaaaaagc

SEQ ID NO: 5525 - DNA, 1067 bp, Homo sapiens
  misc_feature (1023)..(1023): n is a, c, g, or t
  misc_feature (1049)..(1050): n is a, c, g, or t
  misc_feature (1066)..(1066): n is a, c, g, or t
gatgtgatcggcccaaaactgctgcagcgtctgccacaggcggctggcatggctcgtagccgagcactcgaaggttgccagggcgtggaccttgtagggcacgcaggtgtcgaaggggagcctcgggagcgctggcgactcgtgctgcgctcttgtctcgggagcccggatgtccagaatgatgaaggcgagccagggggcgctgcatccccaagatctggttcagggagatggtctctggaagcccacatccaggcccacccttgagattgtatcttctcggaggatgtttccccgttagtcctcactgtatgttgttcctcacctggaagatggggtggagttgctgagctgctgtccacagggctagtcccatctctgacccactcagctcttgtccacctgctatgactcacaatgcctccaggccaggccaccccaggacaagaaggggtgctgaccgctgagctgtcagatagactctgggctctccccatgcatgcattcagtgcatcattgagcacctactgtgttctaggaacagttctagggaagtgaagaacatattccctcactgagctgtcattcttggcaggggaatgaagggagtgatcataagcagagtcccaagacaggaatttgttcctaggggaactaacaagatagtctctcaggaagctaacagagcgtgtcatgggtccaggttccctagaagcagagcctaagctgagcattcttgttcaagtgaattattggggaaatgctctcaggagaagggggtgagggaagcaagacagggcgagaaaaaggctaaggctgagccagagtgtggtctcacgtggagacctagcttccgcttgctctcatggggaactctgagcacaaatggcaccacagttaggcctccttaaagcaagggagcccgtcttttgtacccctccttctacatgtcagttattggccagggcagctgagagttaccaaacagcttctacagcaactatgggatgggtgcacaccagnggatagggatctcagtagggcgccannctgaggagggaggaana

SEQ ID NO: 5526 - DNA, 2445 bp, Homo sapiens
gaaagactttaacaaaatatttttttaaaaaatccactagaatagaaaatacattatttagatatactttatgctgagagtgagtatatatgctgtcctatttaaactgtgagaaaaagtggtatcccttgatacatttagaaatatgggggctatcttgtttcattgtgggggtggggcagaaggagaataaatgcaggatgaccctgttgaaggaatcttagcatggccaacaggggacgtttccagtcgattaccaggaaatgcaagccttggggtttctactggtggtggggctgtcatgaactttaaaatccaaagcctagacaaggaaaagtgttagaccaattgaaaagcaatccagccctttttttttttttttttttggctttgcacgacatgtcaacagaaaccatgcctttcaatataagaaataaatgtgatgatcatgtaaaatgtgaaaaattgaaagcattccagcaaaataagaattttttatatatttgttttttaagatgtatatgttaaaaaaagagaaggtcgcattatggacagacttcgtgaatgggaatttgcttagaattgtgagtagttctgaattagaaaagtatgtgaaggaaaggcagctgtaaacgtattgtgccctggagagttgtacacatgttgaaatgtaatctgggcttacctgatccatttggagtggatgtcactgccgagtctgttctcacatggaaccatgtgtgtggggttgccagcctcacagatacaatcaatcctattcccctctgacataaggaactcctctggagtggcagagtcttatcacagaaggcagccaccatttcaccaaaacaaaagttcacggcattcaattcctttttcctttagctatttatatatgcagtactctcagtcatatgcagaaatactttttttttttaattaatagttacaggcttgttggtccagtgggatttgggtagggggagaaagataccttctaaaatggatcaatagaaccaaaataatacagcatgttctataaccacaaggaaatcaaatgatcctgtcatgattccagttagtcataactatgttagcagtgctaaatgcattttagaaatggtgacttctgtggttttcttagcatttgtctctaacaaatggtgaaataattactcatggccctctctgccattgtctttcattttttcacagtgaaattagacccctttacttcaccattctgccactgcaaattaagtataaagaaaatagcaagagtgtccacaccagtagacagtaagcttctctacctgtaagtgatgaaatcatagctaatgcacttgccatggagttttcaagatgattggtgtcagacagttttcactttgtttaaaaagtgttggtggccttttgtggtggtgttacaatcctctgggggcttaggaggatgttgatgcaacttttagaagcttttaatttcaaaaacaactcaaaaatctgaaggacagtcatagctgccactcagccccagttagtcaaaccccagtgacctttgcccctggttgccaagggctttgcaacatcaagcagggaaataaggatctgtctgtttagtggataccgtgtatcctttaatagaccaggtaacagttcgtgttagtttagactattgttttgtactgtactttcttgggtggcagaggaaagaaaagtaaaacattaaaaaaaaaaaaaaaaactgcgttctttaaattctgtattattagcaacctctgttgtacatagtgtttgataataaagtattaatttgaaaaaaaaaaaaaaaaaaaaaaaaaaaaaaaaaaaaaaaaaaaaaaaaaaaaaaaaaaaaagaggggggcccaccaaagaagcacccgcggaagggcacacagacgcccaaacaccccaccagaaggaacagaggggccccacaacacgacgcccaaaaatgagaccaacggcgacgggaggaaaaacgcaccaacaacccgcaccgggaggacaaacacggacagcaagaggcaaacagggacgaaagggaacacaagaacgcgagggggaaaacacaaaaaagaagaccaaaaccacacccagacaagcacaacaaacaccacaaccgaagatcacagaaaccacctacaaagaacacacaaccgcggaccaacaaagagcaccacacacaacgcgcagcacacacaagacacaaaaaatgcagaacaaacagagaagcacacaaacacccagaaacgcaccaacataatacaaagtagccagcgacagccggcgcacagacttcaaaaaagagcgagaaaaaacaagcaaccgaccgcggacacccgacaaagaacaagaaccagcgaacgcgcaacaccaacgagagaggacaagcgcagaggagggcgcgggggcgggcggacc

SEQ ID NO: 5527 - DNA, 3174 bp, Homo sapiens
  misc_feature (23)..(39): n is a, c, g, or t
  misc_feature (3131)..(3157): n is a, c, g, or t
actcgtctctggtaaagtctgannnnnnnnnnnnnnnnnggggcagatccagaggttcccttggcagtccacgccaggccttcaccatggatcagttccctgaatcagtgacagaaaactttgagtacgatgatttggctgaggcctgttatattggggacatcgtggtctttgggactgtgttcctgtccatattctactccgtcatctttgccattggcctggtgggaaatttgttggtagtgtttgccctcaccaacagcaagaagcccaagagtgtcaccgacatttacctcctgaacctggccttgtctgatctgctgtttgtagccactttgcccttctggactcactatttgataaatgaaaagggcctccacaatgccatgtgcaaattcactaccgccttcttcttcatcggcttttttggaagcatattcttcatcaccgtcatcagcattgataggtacctggccatcgtcctggccgccaactccatgaacaaccggaccgtgcagcatggcgtcaccatcagcctaggcgtctgggcagcagccattttggtggcagcaccccagttcatgttcacaaagcagaaagaaaatgaatgccttggtgactaccccgaggtcctccaggaaatctggcccgtgctccgcaatgtggaaacaaattttcttggcttcctactccccctgctcattatgagttattgctacttcagaatcatccagacgctgttttcctgcaagaaccacaagaaagccaaagccattaaactgatccttctggtggtcatcgtgtttttcctcttctggacaccctacaacgttatgattttcctggagacgcttaagctctatgacttctttcccagttgtgacatgaggaaggatctgaggctggccctcagtgtgactgagacggttgcatttagccattgttgcctgaatcctctcatctatgcatttgctggggagaagttcagaagatacctttaccacctgtatgggaaatgcctggctgtcctgtgtgggcgctcagtccacgttgatttctcctcatctgaatcacaaaggagcaggcatggaagtgttctgagcagcaattttacttaccacacgagtgatggagatgcattgctccttctctgaagggaatcccaaagccttgtgtctacagagaacctggagttcctgaacctgatgctgactagtgaggaaagatttttgttgttatttcttacaggcacaaaatgatggacccaatgcacacaaaacaaccctagagtgttgttgagaattgtgctcaaaatttgaagaatgaacaaattgaactctttgaatgacaaagagtagacatttctcttactgcaaatgtcatcagaactttttggtttgcagatgacaaaaattcaactcagactagtttagttaaatgagggtggtgaatattgttcatattgtggcacaagcaaaagggtgtctgagccctcaaagtgaggggaaaccagggcctgagccaagctagaattccctctctctgactctcaaatcttttagtcattatagatcccccagactttacatgacacagctttatcaccagagagggactgacacccatgtttctctggccccaagggcaaaattcccagggaagtgctctgataggccaagtttgtatcaggtgcccatccctggaaggtgctgttatccatggggaagggatatataagatggaagcttccagtccaatctcatggagaagcagaaatacatatttccaagaagttggatgggtgggtactattctgattacacaaaacaaatgccacacatcacccttaccatgtgcctgatccagcctctcccctgattacaccagcctcgtcttcattaagccctcttccatcatgtccccaaacctgcaagggctccccactgcctactgcatcgagtcaaaactcaaatgcttggcttctcatacgtccaccatggggtcctaccaatagattccccattgcctcctccttcccaaaggactccacccatcctatcagcctgtctcttccatatgacctcatgcatctccacctgctcccaggccagtaagggaaatagaaaaaccctgcccccaaataagaagggatggattccaaccccaactccagtagcttgggacaaatcaagcttcagtttcctggtctgtagaagagggataaggtacctttcacatagagatcatcctttccagcatgaggaactagccaccaactcttgcaggtctcaacccttttgtctgcctcttagacttctgctttccacacctgcactgctgtgctgtgcccaagttgtggtgctgacaaagcttggaagagcctgcaggtgccttggccgcgtgcatagcccagacacagaagaggctggttcttacgatggcacccagtgagcactcccaagtctacagagtgatagccttccgtaacccaactctcctggactgccttgaatatcccctcccagtcaccttgtggcaagcccctgcccatctgggaaaataccccatcattcatgctactgccaacctggggagccagggctatgggagcagcttttttttcccccctagaaacgtttggaacaatgtaaaactttaaagctcgaaaacaattgtaataatgctaaagaaaaagtcatccaatctaaccacatcaatattgtcattcctgtattcacccgtccagaccttgttcacactctcacatgtttagagttgcaatcgtaatgtacagatggttttataatctgatttgttttcctcttaacgttagaccacaaatagtgctcgctttctatgtagtttggtaattatcattttagaagactctaccagactgtgtattcattgaagtcagatgtggtaactgttaaattgctgtgtatctgatagctctttggcagtctatatgtttgtataatgaatgagagaataagtcatgttccttcaagatcatgtaccccaatttacttgccattactcaattgataaacatttaacttgtttccaatgtttagcaaatacatattttatagaacttcaaaaaaaaaaaaaaaaaaaaaaaaaaaaannnnnnnnnnnnnnnnnnnnnnnnnnncgtacccagctttcttg

SEQ ID NO: 5528 - DNA, 4065 bp, Homo sapiens
  misc_feature (78)..(93): n is a, c, g, or t
  misc_feature (1293)..(1307): n is a, c, g, or t
  misc_feature (2032)..(2051): n is a, c, g, or t
agcgtgacttacacaggcccctgaggatgaaggtaacagtcctgtgagcactgaggctgggctgggaccaacagctgnnnnnnnnnnnnnnnnactctgattcatggcccagccatgctgctgagggtgcacagcccaggcctaccatcgcccccacccttggtggcagaaccgagcactacccagcaaggtgtaattacttcaagcctccaggatggcaatccagttccgttcgctcttccccttggcattgcctgggatgctggcgctcctcggctggtggtggtttttctctcgtaaaaaaggccatgtcagcagccatgatgagcagcaggtggaggctggtgctgtgcagctgagggctgaccctgccatcaaggaacctctccccgtggaagacgtctgtcccaaagtagtgtccacaccccccagtgtcacagagcctccagaaaaggaactgtccaccgtgagcaagctgcctgcagagcccccagcattgctccagacacacccaccttgccgaagatcagagtcctcgggcattcttcctaacaccacagacatgagattgcgaccaggaacacgcagagatgacagtacaaagctggagctagccctgacaggtggtgaagccaaatcgattcctctagagtgccccctttcatccccaaagggtgtactattctccagcaaatcagctgaggtgtgtaagcaagattcccccttcagcagggtgccaaggaaggtccagccaggctaccccgtagtccccgcagagaagcgtagctctggggagagggcaagagagacaggtggggccgaagggactggtgatgccgtgttgggggaaaaggtgcttgaagaagctctgttgtctcgggagcatgtcttggaattggagaacagcaagggccccagcctggcctctttagagggggaagaagataaggggaagagcagctcatcccaggtggtggggccagtgcaggaggaagagtatgtagcagagaagttgccaagtaggttcatcgagtcggctcacacagagctggcaaaggacgatgcggcgccagcacccccagtcgcagacgccaaagcccaggatagaggtgtcgagggagaactgggcaatgaggagagcttggatagaaatgaggagggcttggatagaaatgaggagggcttggatagaaatgaggagagcttggatagaaatgaggagggcttggatagaaatgaggagattaagcgggctgccttccagataatctcccaagtgatctcagaagcaannnnnnnnnnnnnnnccaccacggttggcaaggttgcaggtcgtgtgtgtcaggccagtcagctccaagggcagaaggaagagagctgtgtcccagttcaccagaaaactgtcttgggcccagacactgcggagcctgccacagcagaggcagctgttgccccgccggatgctggcctccccttgccaggcctaccagcagagggctcaccaccaccaaagacctacgtgagctgcctgaagagccttctgtccagccccaccaaggacagtaagccaaatatctctgcacaccacatctccctggcctcctgcctggcactgaccacccccagtgaagagttgccggaccgggcaggcatcctggtggaagatgccacctgtgtcacctgcatgtcagacagcagccaaagtgtccctttggtggcttctccaggacactgctcagattctttcagcacttcagggcttgaagactcttgcacagagaccagctcgagccccagggacaaggccatcaccccgccactgccagaaagtactgtgcccttcagcaatggggtgctgaagggggagttgtcagacttgggggctgaggatggatggaccatggatgcggaagcagatcattcaggagttgcagctccacccccgggaaagcggggcactttgataacgaggtgtcctgggtttttcgagtgctgaccccagcgtagacagttcagaccgctaacttacagnnnnnnnnnnnnnnnnnnnngattccgtggatagctgttgcagtctcaagaagactgagagcttccaaaatgcccaggcaggctccaaccctaagaaggtcgacctcatcatctgggagatcgaggtgccaaagcacttagtcggtcggctaattggcaagcaggggcgctatgtgagttttctgaagcaaacatctggtgccaagatctacatttcaaccctgccttacacccagagcgtccagatctgccacatagaaggctctcaacatcatgtagacaaagcgctgaacttgattgggaagaagttcaaagagctgaacctcaccaatatctacgctcccccattgccttcactggcactgccttctctgccgatgacatcctggctcatgctgcctgatggcatcaccgtggaggtcattgtggtcaaccaggtcaatgccgggcacctgttcgtgcagcagcacacacaccctaccttccacgcgctgcgcagcctcgaccagcagatgtacctctgttactctcagcctggaatccccaccttgcccaccccagtggaaataacggtcatctgtgccgcccctggtgcggacggggcctggtggcgagcccaagtggttgcctcctacgaggagaccaacgaagtggagattcgatacgtggactacggcggatataagagggtgaaagtagacgtgctccggcaaatcaggtctgactttgtcaccctgccgtttcagggagcagaagtccttctggacagtgtgatgcccctgtcagacgatgaccagttttcaccggaagcagatgccgccatgagcgagatgacggggaatacagcactgcttgctcaggtgacaagttacagtccaactggtcttcctctgattcagctgtggagtgtggttggagatgaagtggtgttgataaaccggtccctggtggagcgaggccttgcccagtgggtagacagctactacacaagcctttgacccccatgctgcttcctgagagtctttttttgcactgttgaaattgggcttggcactcaagtcaaagatgaacatcggaataacaaacattgtcctctccagaaagtcctttctttctccatactgtagtcctattgagaagacatttcgtctctgagaaaaaaggatggaactatgggttctcttcgcaaagccaaaggatagtgtttaacaagccagctggcttatcctggttctcagctgtttaaaaaaaaaaaaaaaaaggaatagaaacagtttcaaccagattgtcctattccccctgttccattcccctcttcttccttctatctccttccccggcaaaaaccaaacaaactggcagacaggccagggatgtatgttgcttgcttgagagggtttcttttacttcaaaatctttcttcagggagcaagacatgaactgactaattggtatccactacttgtacagcttacataaatgagttgatgatatttaaccagtttttataaacttcatttaggtctctaaacacagactttttaaattgcaactgtaaatatgaaatgggtcatcacatctgaccttggtcagtggggaggggaactggtatcctgccaagcctggttgtaatttgtaaccattttctatttgtgcaaactctgtaaatatgtgtttaaacaaatgtaatattttgtacaagatacactggagaacaaagggaactcaagattcttccagccacatgtcacctgtaggtagaagtaaactctgcagtgcagcttctgctcttggcccctctggccagggcccctgtggcttcctgcacactggacaggtgactgtatggtagagactgtgatctgggaactttttgctgtacaaatctgtttaaaaaaaaaaaaaagtaactcattgaattaacttgcagtggtgtgtttgattcttttttagactggcttcagcattgtgcagtttaaaaataagtaagtaacttacataaatcttcaattgtatgaaaaaaaaaaaaaaaag

SEQ ID NO: 5529 - DNA, 3352 bp, Homo sapiens
agcgggggggaggcgggaaacagcttagtgggtgtggggtcgcgcattttcttcaaccaggaggtgaggaggtttcgacatggcggtgcagccgaaggagacgctgcagttggagagcgcggccgaggtcggcttcgtgcgcttctttcagggcatgccggagaagccgaccaccacagtgcgccttttcgaccggggcgacttctatacggcgcacggcgaggacgcgctgctggccgcccgggaggtgttcaagacccagggggtgatcaagtacatggggccggcaggagcaaagaatctgcagagtgttgtgcttagtaaaatgaattttgaatcttttgtaaaagatcttcttctggttcgtcagtatagagttgaagtttataagaatagagctggaaataaggcatccaaggagaatgattggtatttggcatataaggcttctcctggcaatctctctcagtttgaagacattctctttggtaacaatgatatgtcagcttccattggtgttgtgggtgttaaaatgtccgcagttgatggccagagacaggttggagttgggtatgtggattccatacagaggaaactaggactgtgtgaattccctgataatgatcagttctccaatcttgaggctctcctcatccagattggaccaaaggaatgtgttttacccggaggagagactgctggagacatggggaaactgagacagataattcaaagaggaggaattctgatcacagaaagaaaaaaagctgacttttccacaaaagacatttatcaggacctcaaccggttgttgaaaggcaaaaagggagagcagatgaatagtgctgtattgccagaaatggagaatcaggttgcagtttcatcactgtctgcggtaatcaagtttttagaactcttatcagatgattccaactttggacagtttgaactgactacttttgacttcagccagtatatgaaattggatattgcagcagtcagagcccttaacctttttcaggggtcggtggaagaaaccccgggctctcagtctctggctgccttgctgaataagtgtaaaacccctcaaggacaaagacttgttaaccagtggattaagcagcctctcatggataagaacagaatagaggagagattgaatttagtggaagcttttgtagaagatgcagaattgaggcagactttacaagaagatttacttcgtcgattcccagatcttaaccgacttgccaagaagtttcaaagacaagcagcaaacttacaagattgttaccgactctatcagggtataaatcaactacctaatgttatacaggctctggaaaaacatgaaggaaaacaccagaaattattgttggcagtttttgtgactcctcttactgatcttcgttctgacttctccaagtttcaggaaatgatagaaacaactttagatatggatcaggtggaaaaccatgaattccttgtaaaaccttcatttgatcctaatctcagtgaattaagagaaataatgaatgacttggaaaagaagatgcagtcaacattaataagtgcagccagagatcttggcttggaccctggcaaacagattaaactggattccagtgcacagtttggatattactttcgtgtaacctgtaaggaagaaaaagtccttcgtaacaataaaaactttagtactgtagatatccagaagaatggtgttaaatttaccaacagcaaattgacttctttaaatgaagagtataccaaaaataaaacagaatatgaagaagcccaggatgccattgttaaagaaattgtcaatatttcttcaggctatgtagaaccaatgcagacactcaatgatgtgttagctcagctagatgctgttgtcagctttgctcacgtgtcaaatggagcacctgttccatatgtacgaccagccattttggagaaaggacaaggaagaattatattaaaagcatccaggcatgcttgtgttgaagttcaagatgaaattgcatttattcctaatgacgtatactttgaaaaagataaacagatgttccacatcattactggccccaatatgggaggtaaatcaacatatattcgacaaactggggtgatagtactcatggcccaaattgggtgttttgtgccatgtgagtcagcagaagtgtccattgtggactgcatcttagcccgagtaggggctggtgacagtcaattgaaaggagtctccacgttcatggctgaaatgttggaaactgcttctatcctcaggtctgcaaccaaagattcattaataatcatagatgaattgggaagaggaacttctacctacgatggatttgggttagcatgggctatatcagaatacattgcaacaaagattggtgctttttgcatgtttgcaacccattttcatgaacttactgccttggccaatcagataccaactgttaataatctacatgtcacagcactcaccactgaagagaccttaactatgctttatcaggtgaagaaaggtgtctgtgatcaaagttttgggattcatgttgcagagcttgctaatttccctaagcatgtaatagagtgtgctaaacagaaagccctggaacttgaggagtttcagtatattggagaatcgcaaggatatgatatcatggaaccagcagcaaagaagtgctatctggaaagagagcaaggtgaaaaaattattcaggagttcctgtccaaggtgaaacaaatgccctttactgaaatgtcagaagaaaacatcacaataaagttaaaacagctaaaagctgaagtaatagcaaagaataatagctttgtaaatgaaatcatttcacgaataaaagttactacgtgaaaaatcccagtaatggaatgaaggtaatattgataagctattgtctgtaatagttttatattgttttatattaaccctttttccatagtgttaactgtcagtgcccatgggctatcaacttaataagatatttagtaatattttactttgaggacattttcaaagatttttattttgaaaaatgagagctgtaactgaggactgtttgcaattgacataggcaataataagtgatgtgctgaattttataaataaaatcatgtagtttgtggaaaaaaaaaaaaaaaaaaaaaaaaagttagaattacctggggggccaattagcgtccggttttgtacaggggcctataggatgaatataaagagggcggttaaaagtcggtggaaagcacggatctggaagccctccgggggcaatgggaaccagaataaggggataaaggttggacgctggcgaggtagatatac

SEQ ID NO: 5530 - DNA, 1480 bp, Homo sapiens
gggagctacaatgttttgtcattattcactctgatgtgaaaaaggcagtgaatttaatagaaaataacttcgtagagcaaaatctcaggtgtgtttttttagtgccgcagtcttggatgatgggttcctagaagctctcaacatctcttcttaattggagaaagtgttaagccccaaagtagctggagcagtacatcttcaatttttgacaagaaaacaggaacttgattactttgagtgctattcattagtttctgctttcattgagaatgcaacaaaagccaactaggctgctgctaactccttgctggacatcttctgccactatcacaggaactgtgactctcactggacaattaactagggagtctttcatcttgagtgactgctgcacaaatgatcttcaaagcattttagccaccagaggaattctcttgaaatacccaaaatccatcagtatcttgaatcatgctggattttgaagaattcttaacaagccatgtaaagggggctctctggccttgaaatagtgatgttttttatacagaaaggagaatgcagaatggtcagactaccatgcactgttaaatttgatttcaagaaattacaggaaaactttccaaagttccatctcacagaaattatttttacaaagaattccaagataagtttagttttatggaagacttttatgtggtttttactcactcttcatctcagacatcaacagatgattacatcacttatttagctagtaaatttattaatataaaaactcagagacattccaatatccacattgcttacaccattaggcatagattcagtgtcagctatgacaattgaaaataagctgttttgtgatttaaaggtttaaatttctctaaccaaactgcttgatccagatgcaggactgcaaatgttaatatttgttctggaagaacaatcaaataagacttaagaggaaaaggaatggccacaatccacctgaaatttttttttaaaaagtgtgcagcctactaaatcagaatgaaaatagaagtacaagattataaacaaaatgcaatcaaacttttcttaagcttacctaaagttatttcatctgaaaatttcaagcaactttgttcaacattaaattgacaatctaaactaacaagtcttttgaatttatgcatggtagtaaacattctctctattaactgtattacctaaggctaaacctaaaatttttaagcaaaattagaaaaatagtcttcactcatcaaaaaataaagtttgttacatttagtattttcccaagaaaaaaaaaaaaaaaaaaaaaaaaaaaaaaagagtctgtgcaaaatgtcactaaaaataaattagcactagaaattatttctaaataccaaaaaaaaaaaaaaattgagatgggtttcccaaggaaaacactcgcaatcaaacaacaaaaacaaagaacaaaaaagaatagacaaaaaga

SEQ ID NO: 5531 - DNA, 1476 bp, Homo sapiens
  misc_feature (755)..(755): n is a, c, g, or t
gagtttaattaaagcttaaccctaggtaagagtaaatgagaaatattacggcaataatggaactgcttcactgtttctggtgacttcctcactctaatgttttaaagaggcaacaaaagcttgtggtgccatttcagtaaccacggtgttgttttagatgcctttataagctcagtttcccctgttcttaagtgttgaatactgtctttaaactagaaaaatgcaaaatatgaactgatattttgtgtgtagttgattactcttccattgagtgaatgatgaatacctgtgaggataggaaattagttctgagatctagtccctctctgattcacttagtaatctatcctcttttcagtattacatgtgcttaatctcagatgaaccatttcaccatggcagtgttatctcatctctgggcttttctgggaattgaagtatctctccttaaccccaattgtcaagggtagtagctgtatactaccactttgaattattgaaacgggtcaatttacgaagtctgcattggctatggagatatggtttatagtacagcctagagaatgaaactcaccgtccagataaccatgcatgcacccagattttttccaccttggatacctgtcactagggaaaaataaggcctttattattccctagtgacaggtatccaaggccttattttttgtcttattcaactaagtagatcattatctctttccttttttatggtaatgagagaatttagcctccanctcaacaatgttcaattcagcaagggctttcctatccttgctggggggtcgggggataaggagcttattccaagttttcctggccctaagctattaaccttccactttcccatgcttgggaaaccgggcggaaggggaacaaaatggatttccctcccgggggggttcccgggaaaaaacagggggggggaccctcggttaacggggaaacccaaaaaagggggccccctaaaaatggggcccctgggttccaaaaattaaaaccccgagggggttttttaaaaaaaaaataaaaaacccctcttttacaaaaagggttcttctgggggaaaaaaatttccttttccacaagggcccccctattttcttttttataaaaaatatgggggggccccccaaaaaaaaaacccccccgggggggtggtgtttttcccgcgcgggcgcacttatgggggagaaaaacctccccacgagagggggcgcccccggggggggggttttctcccccgcgcccgtttttctctcgggggatatttttttccccccaccccccttcctttgtggggaaacaaaaagtccttttttgttggggggcccccctccgcgagaaaaaaacaggaggggggccccctctttttttttccccccccacaaaagaacaggacatctttttgttggacctctctccgcgcggggggggtggggtgttgtctcaccaaaa

SEQ ID NO: 5532 - DNA, 3137 bp, Homo sapiens
  misc_feature (1449)..(1483): n is a, c, g, or t
ctttttgcagtacctgctgcggccgctttcggcatggaggaaatttatgcgaagtttgtgtcccagaaaatcagcaaaacccgctggcgaccgctgcctccgggaagtttacagaccgcggagacgttcgctacaggatcttgggacaatgaggaaaattatatttcactgtggtctattggagattttggaaacttggactctgatggagggtttgaaggagaccatcagttattgtgtgatatcagacaccatggtgatgtaatggatttacagttttttgaccaggaaagaattgtcgctgcttcatcaacaggatgtgtaacagttttccttcaccatccaaataaccagactctgtcagtcaaccagcagtggactacagctcactaccacacaggccctgcagtccttcctatagcagtgcaccatgtacaggtgttgtgtgcaacaacccagaaatcgttacagttggagaggatggtcgaataaatctcttcagagctgatcacaaggaagctgtaagaaccatagacaatgcagatagtagtacactccatgctgtaacctttcttcgaactcctgagattcttactgtaaattcaattggacagttgaaaatatgggatttcagacaacaaggaaatgagccttctcagatattgtcacttgactggtgaccgagtgccactccactgtgttgatagacatcccaaccaacagcatgttgtagctactggtggccaagatggaatgttgagtatttgggatgttagacaaggtactatgcccgtatctctgctgaaggctcatgaagctgaaatgtgggaagttcactttcacccatccaacccagaacatctttttacctgctctgaagatggatccctctggcactgggatgcttccacagatgtacctgaaaagtcggcactctttcaccaaggaggaagaagcagtacttttttgtctcatagcattagtaaccaagctaatgttcaccagtctgtcattagctcctggctcagcactgatcctgcaaaagaccgaattgaaatcacaagcttacttcccagtaggtctctgtctgtgaacactttggatgttttaggtccttgtcttgtttgtggaaccgatgcagaagcaatttatgttactagacatcttttttcgtagaagtactataattataagatttcagatagaacatgcaattagccttttgaaatccaacttctgtgcaaaattttagtatcagaaaatacgagatttgcaggggaaacatcagtaaactaccattaatgtcaatgcccagttttgacttttgttagcctgacactcccaaacagttgtagaatccgatagatgactgatggcaaaagattgtgaacatgtggaagaaaatcagtgggattctggtgctgatgaataggttgccttcagagtatnnnnnnnnnnnnnnnnnnnnnnnnnnnnnnnnnnntttgatgttgtgggaattaacacatcaatggtggttatgggaactaccaatgggttcctacaatttttatcagtagtatgtggcatatacaccttcctagtggcagttgccaatgttaatgattattctttttattgcaagtatttcctatgatccttccacactttatttccttaataataataaactttttcagaaagaattgagtagagcaaaaatgacaaagatgtgtagctgtgttcaattttttttttttttttttttgaggcagagtcttgctctgctggagtgcggtggtgcagtctcggctcactgcaacctccacctcccgggttcaagcagttctcctgcctcagtctcctgagtggctggaactacgggtgtgcgccaccacgcccagctaatttttgtaattttagtggagatggggtttcactgtgttggccaggctggtcttgaactgacctcatgatccacctgcctcagcctcccaaaatgctgggattacaggcttgagccactgctcccggctgatttttgtattagtagagacgacagggtttcaccatgttggccagggctggtctcgaactcctgaccacaggtaatcagcccgcctcggcctccaaagtgctgtgattacaggtgtgagccactgcacccggcctgaaatttttttaaggtgaaaatgttttgacaagttcctttttcagaataggtttttgagcagaactctttcagcttgttagacccaactttgcttttgtttagcttcacagcatagctgaaagttgccaaactggacattgtgcaataaagtagaattctatattgataagcaaactatttccaaactaaaaatgtgatagataaaagtgtgattaatcaaatgatatgatcagagtaaagaattttgccattttgatccttttactttgttttagccacctatagtgttaccaaccatctttatccttgtctgcagggataataatgaactaatgtagtgttttaagataatttaatgatactatctttccaaactttgttagattttaaatgtattattgacctgagaccttaatgacaaatcactgctattagacaattgaagtgttcatttactttgtaattccaataatcatagttatggaattatggtaaggttttgcttttctgtcctaataaatatgtatattttttgagatggagttttgctcttgttgctgaggcaggagaattgctcaaacccgggaggcagaggttgcagtgacccaagatcgtgccacttcactccagcctgggcaaaagagcaaaacgccatctcaaaaaaatatacatatataaggagataaagtttcccattttccaatacagtttcacatttgaacagccctaattgatacaactttatggcagggttttagtgtgtgagtgggatccagaacactcaatcctgtaaaagggtacagtcctattgtatgttaacacactgatgatgtgagcctgtgagatgagccaatcaccagttgttatgttcgaatctgctttgtgttgggacgctttaatgtcagggtttcactaaataaatgaattttcatatactgaactgaaaaaaaaaaaaaaaaaaaaaaaaaaaaaaaaaaaagagagg

SEQ ID NO: 5533 - DNA, 2369 bp, Homo sapiens
gcgtgcgcggggcgggcgggtgcgcgcgcacttcctcctcgcccccacccagacccagaaggcgccaccatggcggcgcccccgcagcccgtcacccacctcatctttgacatggacggacttcttctggatactgaacggctgtattcagtggtgtttcaagaaatatgtaatcgctatgacaagaaatacagctgggatgtaaagtccctggttatgggtaagaaggcattagaggcggcacagattataatagacgtcttgcagctcccgatgtccaaagaggagctggtggaagaaagccaaacgaagttaaaggaagtgttccccatggctgcgctcatgccaggggcggagaaactcatcatccacctgcggaaacatggcatcccctttgcactagccaccagctcggggtccgcgtcgttcgatatgaagacaagccgccacaaggagttcttcagcttgttttcccacattgtgctgggagatgaccccgaagtgcagcatggcaagccagacccagacatcttcctagcttgtgccaagaggttctctccccctcctgctatggagaagtgccttgtctttgaagatgctcccaatggggtggaggcggccctggcagctgggatgcaggcggtcatggttcctgacggaaacttgagccgagatctgacaacaaaggccaccctggtgctgaattccctgcaggacttccagcccgagctgtttggtttgccctcctatgagtgagagggagggcctcagtcttccgcccccagcccactctcatggtccacactgctgggggaaagggaaaggaaatcagcaactcttcaatcccaacctgcgctgtgattttagcctcctgagattggagtttccatcccatgttggtttgtcccagtctaacgtgttgataaaatgtgacttgacggttgagacaaaaaatacagtagagacagaaacgaagcccagaacaaagatgaaacttgaattaccatctcagaagtcaagctgatggagtatgtgataaagtgaatgtacatgtatatacacacacacctccatatatacacgtgtgtatcagtttggtaatatgcaggtaggcattacatgcatatgtatgtagacatatgcatgcatgtatatgtaaaatatatacttttccaagacaaaatggaacatcacttctccttagtttttctgaacactggctgggaaatgtaaactgtgtatgcatataagtatatgctttatgtatgcatatgtatgtagatatgtttatatctatcgtctgcatcactctcctcagtgttgatgtcaacatgcaatgacaactgataaagcgagatggtagttctgcctggtttgcagtctgagtgggaaagtcctgtttttgatgagcactccttgttagctaacatttaaattctttttgtgacctcagaatgtctctggatctttcctcattgactgactctgtgccacgtcatccatagtttattgttagtatgaacacaactgtaacatttacctggtatctacatccttacctgcattggaaaatgtttgctacctcacaacaaccatttgcctcctttaagaacactgatgggctgcactttttggatagaaatagaatttgatttcagaatgtatgcttggtgagtctcagtgcccaggaacacttttggaataatttatcagacattgaacttctgtgattaatcgcttttatagatttactcagtctttaaaattcgtctctgatttgccagagaaaaacggtggtagccatggaaatcgggagtgaaggagcactgcttcattgtggctcagcccttcctaggggcctctgccctttgatgtccttgagctactcttcagctctggaagttgtggacaaaccgtaggaatgtatgtgtgcgtgtggtggagtgattgtctgtgaatgacaggccctggctattgattgatgttgcatcaatttagcaaattcatttcctcattcttgatggcctgaatatatgtctgcacttttaatgctcctcttaaccagttgtaacatcttaccatttccctaacaaattgaattagtttaataaaatcttttgacacatgttaaaaacaaaaaaaaaaaagcacaaaaaacgtttggggggcggttgggccacctggaaaggtttcttaaaccatctcgttggtgcgcgggggccgcagtgctacggaaacgggccaagacggtgtccagaagaaacggtcaggacaaggcgcgggatcccaccaaaataaaacgcggcggaccaggggttgcacacccaaggagaccagaggccgagggcacacagggccaggcgcgatat

SEQ ID NO: 5534 - DNA, 1661 bp, Homo sapiens
aggccattcaagcagttgggttggtaacatcaaaggagcaatatatatacatatatatttatgtagatatacttccatgaaagggctaatacgatgcatatactgaagggcaaggactttgaccatgtgaattttcagccgagaatggtcagaaagatcagtacaaccccatggattaggctgaaacatatgaaattgctgcatttgtagtttaaaaactgtcagcagtttcatatggttccacctaatattattgaagacaattattttcttagctatcaataggcttaatagttttagttattttagcttttgaaagtgttttaaaagatttcctttatcggacaggaccatctttatgacctgctttctgtttttcaatatcatacattggtgtatgtcaaagaataaattagtaaaattagtaaatgaaaaagactcttccgtacatcattatttccatgctaatgtgtgtctgtgatccagaataacttctcccactcatatcttcagttcacctaatgaaatgaatggatagcaagagccctttgttcccaggactttaaggcaaaatattaaaaattattgccaaaattaagaatataatgtttgtataaatgtccttgaatttgccatttaaattaactcattttcttttcactttgatttgaaagctgataagtatttctgcagcagatagaatattaaaatcaggttgtgtgtacacactgcactatgaggtaccttggtgtcctggtgtgaatagacaagaagctgtactatatgttgctctctcagtggcaacaatgaagtttttgcaattctagaacttggatttttttttaacaaaagtcccaaaacaccaaaaatgtaaacaagataagagattaatattgtagtgatgtaatttaattaaagttatattttgggttaattttaacaactgaagtcttattgttgaaacttattttcaacaaaactgtgcagttaaatttgtatacgtattcacatactgaaagatgaaccgttaaaatagcacttaattttgtgtttcttcaatatgtcttgatatactttgtgcaattaatattacacatgtaagttgtatggcagtttacagaactcaatgacttgtcatgaggttttcatatgagctacacattgtgtacattgattgttttttatttttacataaatccattctgtcattttcaactttatatataaatctccaatgttatgggaaacaatagattgacacataatttttaaaaattatatttgtaaaatttctctattgtgaataaagtcttttaatataaaaaaaaaaaaaaaaaaaaaaaaaaaaaaaaaaaaaaaaaaaaaaaaaaaaaaaaaaaaaaaaaaaaaaaaaaaaaaaaaaaaaaaagggcacaaatctatccgccacccacgtttagatcaaaggggccccaagagagagacaaaagaaagcgacggcgacacaacaaccgggggcacacgcgtacgactagggagagcacaatcgcggtagtaggacacacacaaaaaacgagaacaaacaggaccgtgacaccacctgcgattgcctaataaaaaggcagaaacggcacgcacagcgacgagcacgcagcagaaacaccacacgcagcaccatgtac

SEQ ID NO: 5535 - DNA, 4066 bp, Homo sapiens
ataatccttttgcaaacatctcaacgctggctctccaggtggagcaccatggaaggcgactgtctgagctgcatgaagtatctgatgtttgtattcaatttcttcatatttctgggcggggcctgcctgctggccatcggcatctgggtcatggtggaccccaccggcttccgggagatcgtggctgccaatcctctgctcctcacgggcgcctacatcctcctggccatggggggcctgctctttctgctcggcttcctgggctgctgcggggccgtccgtgagaacaagtgtctgctgctatttttcttcctgttcatcctgatcatcttcctggcagagctctcagcagccatcctggccttcatcttcagggaaaatctcacccgagaattcttcaccaaggagctcaccaagcactaccagggcaataacgacacagacgtcttctctgccacctggaactcggtcatgatcacatttggttgctgcggggtcaacgggcctgaagactttaagtttgcatctgtgtttcgactcctgaccctggatagtgaagaggtgccggaggcctgctgccggagggaaccccaaagtcgggacggggtcctgctgagccgggaggagtgcctcctgggaaggagcctattcctaaacaagcagggctgttacacggtgatcctcaacaccttcgagacctacgtctacttggccggagcccttgccatcggggtactggccatcgagcttttcgccatgatctttgccatgtgcctcttccggggcatccagtagagggtatggcctgaagcctgaagactcgccccacccaccactgcccagcacccaatgtcctcccgtgcccctccccgctgtcctcttggccccaggggagaagatgaggccatcagagatggccaggagaagggccaggggaatagagctatttttttaacaaaacaaaatgaggacaaaaatatggactgatgtatcctcgcctggactcagggcaggtgccgtgggttctccagagaccccagcacctggcccaggatgcaggctgctctagagaccaaaggaacaccaggcccagcgccctctttggtccagccagaccctgggccctctctcctcactgcaccaggacctgatgccaagaaagtgaggatttaggcaacaaggaggcaaaagcaaatctcagagaagtcatcaaagcccaggggctgcacggagattcagctgccatgtctttgaggactcggaacccacagcgcaatccctggtccactggaggatggactgttccccccttcaggccggggccaagagtgagctgctaacacggcatccaagattgccccacttggtaggatccttgctttccccatctgttggaccaaataatctcaaaggcccagagaggacagtgaccatccacagacacgcagcacaggcgtgacagttctgaaaagaagctgagtcgtctccaggctgctgtcactgcatccaggactctgtcagctctgctgcccacatgcacccctggcctcagcatcccggttcccccagacaagagagggcaagtcagccaggaactgcctcctccctgctctacagctaagaaaacaccattccatgacttcccaccgcgccctcgctcctacctccccacacctctctctcagtccccaggaacacacagaggtgcacatcacattcccttgtccacactgcccgcctctcccacatgccacccccttccctgtccttccccaactccccagctccaagagtggaagaaatccccaagatcatctgggtctccctctccacacccagaactgaggcttggatatcttcttcaacatccttgccaagacttctccaccctcttgcatacctccagggacagagagcttactacctcccaaggcagcctcctgcctttggactgctctgactttagcatcagcttaatacacagaagaggtttctgtttttctgtggctctgtccatggcatcccacttgcccactctccttcctggagtgttgaggtcacacattgactcccctgagccctcttctctccaggctaaagaatcccgaaggcatcgaggccatttctgctgcaacaaggtttcctgtctcttcactgtccgcacatttcttagtattccctccaggcttgggcagggagactcgcagatgcacacccacaagtattcagttctcaaactctagacgagtgttggcaactggattgcaagatgctcctaccctgatagatcaggggtggctgctggaggctgtgctggggatctgaggtttggtctgggctcagtgggagatggcagtgcaatcctgatgagtgatgtctgccaggcaccgtaagtttgattagtgatgtctgccacgggcagggatggaaggagcagtgtgatgtctgctctcttctctcccctctgtccctcttcaggaagaaagagctcattctgtctcacaagccaccggcatcctgtatcagcttccagcctcccctcaggctttccagtcaccagggacactcggagccacagcctagagccccgtgttccctggcctgtgcgtctgcccccttctgagatgcagccagaagctctgtgcctgctgcaaagattcaggtggaccctcctctaatctcctcctgctgtgcccgccagtccttgccctcccaccaggtctctgagctcagtcttaccaaattcgccctttaacagcttgctctggcaaccccataaatgacacctgagctccgtagaagctaagctcctgagacccagggggacctgccactggtaccgcggcccagcctggggcctgggggctgcccctcttgaaccacccacatgcttagccccagctttttggaagaggcaaatggctggtctgaggatgacacacaaaaacaaaaacaaaaaacaaaaaacccatgctgggcaggactgaggcaaattgcacagctttatggctctaatccaggggcatcccaggcttctggggcccacagaagtcagagggaggacccaagagaaagggctggtcatgaagggaaatctggctaaggtgggttcaagggcagacacaagactgcccctcagcagctttctacaaatgtgccaaggaaccctcaatcagccctgattcagctcgccagccagccactggccaccctcttaggctggaaagggaagacaggcagtttctgctcctgttggcattcgctcaggctggtagctatttgcaagactgcctgaggccattccttggaggcaaggcaaagaaagctcagcccaaatcaggcttgagcctccctccagagcacagggagaaacagggtttagctggcttggtccagatacaacccacagcaggttctggtggtggctggggttgtgggggaggggtgggcagggatacctctttgtttcttttcaccccgaaatacaacagcccataacagagacttcctcggaccccactaacagggcaaggaacaagaagactacaccgctcatcacaaaccctgcctgtatcgaaagccactttcctgctctgaagctactgcctcttagagaaagggaatagctctttatgggctgggggtgagggcccctccccagggtccctgttaatttctggccttggtgctcaggcctgtccacagcctcccttgtctatgtctctatccatgcttaaggggcccggacaggatttcccaaaccagccgaggccccagcacccgccgtctccccagaagccccctcctccttcccccatgggtcatatgttgaaagtctattttaaaaactatgttccttgccgtagattgcagagctaatttatcacgtttctctcctgtgagaccccccttttatatgatatatccagaggaagttttgtaatataaaacaggacgcccacactgatggttttgcactggtttttgtgaatgtttcttacaaaaagaaaaaggaacaaagaataaatagtgaccgtgaaaaaaaaaaaaaaaaaaaaaaaaaaaa

SEQ ID NO: 5536 - DNA, 1486 bp, Homo sapiens
  misc_feature (4)..(5): n is a, c, g, or t
  misc_feature (8)..(19): n is a, c, g, or t
  misc_feature (31)..(32): n is a, c, g, or t
  misc_feature (36)..(36): n is a, c, g, or t
  misc_feature (50)..(50): n is a, c, g, or t
  misc_feature (52)..(55): n is a, c, g, or t
  misc_feature (60)..(60): n is a, c, g, or t
  misc_feature (70)..(71): n is a, c, g, or t
  misc_feature (83)..(83): n is a, c, g, or t
  misc_feature (101)..(106): n is a, c, g, or t
  misc_feature (111)..(111): n is a, c, g, or t
  misc_feature (136)..(136): n is a, c, g, or t
  misc_feature (142)..(142): n is a, c, g, or t
  misc_feature (174)..(174): n is a, c, g, or t
  misc_feature (198)..(198): n is a, c, g, or t
  misc_feature (220)..(220): n is a, c, g, or t
  misc_feature (234)..(234): n is a, c, g, or t
  misc_feature (242)..(243): n is a, c, g, or t
  misc_feature (263)..(264): n is a, c, g, or t
  misc_feature (282)..(283): n is a, c, g, or t
  misc_feature (992)..(992): n is a, c, g, or t
  misc_feature (995)..(997): n is a, c, g, or t
  misc_feature (1015)..(1020): n is a, c, g, or t
  misc_feature (1022)..(1022): n is a, c, g, or t
  misc_feature (1027)..(1027): n is a, c, g, or t
  misc_feature (1038)..(1039): n is a, c, g, or t
  misc_feature (1044)..(1049): n is a, c, g, or t
  misc_feature (1384)..(1400): n is a, c, g, or t
aaannaannnnnnnnnnnntttgtagggggnngccntttttttttttttncnnnnccctntggggagaannccccccaaccangttttggaaaccttaaannnnnngcttnccaggggacttcttctttaaatttnaacccncccggttaccaaggaacccaggaggtcccaanctggggtagtaaaaaatgcctttntggggggattttggcacggtanaatgcccgaggttntccagccnnatattggaagatgctggtgnnaatttcctgggccaaaanngccgaagtgaaatttccctgccaagtggaggaccttgaaatggaaccattaaattgtcccagacaagtaatgtcggataaagaggaggaagctgttaccatagagatgaatgaaccagttcaactaacttttgcactgaggtacctgaacttctttacaaaagccactccactctcttcaacggtgacactcagtatgtctgcagatgtaccccttgttgtagagtataaaattgcggatatgggacacttaaaatactacttggctcccaagatcgaggatgaagaaggatcttaggcattcttaaaattcaagaaaataaaactaagctctttgagaactgcttctaagatgccagcatatactgaagtcttttctgtcaccaaatttgtacctctaagtacatatgtagatattgttttctgtaaataacctatttttttctctattctctgcaatttgtttaaagaataaagtccaaagtcagatctggtctagttaacctagaagtatttttgtctcttagaaatacttgtgatttttataatacaaaagggtcttgactctaaatgcagttttaagaattgtttttgaatttaaataaagttacttgaatttcaaaaaaaaaaaaaaaaaaaaaaaaaaaaaaaaaaaaaaaaaaaaaaaaaaaaaaaaaaaaaaaaaaaaaaaaaaaaaaaaaaaaaaaaanggnnnaaaaaaaaaaaaaaaaannnnnnanggaanaaaaaaaaaannaaaannnnnngggggggggcgaaaaaaaagacccccccggaggggccccataataacccgggcgccggtttttttataaaagggggggccccgggagggggcgcattttaatgggcgggggcgggggggaccttttttacacgtggggggggggggaaaaggatcaccgctggcggactttttgtgaagaagaccccctcgctggggggggggatattaatgtggggaaaccaccgccctaacaaaaattttacacgcgggtgggggggaagaaaaaaatttttttttcggggaaatggggtggtaaaaaaaaaagccgagaaaatgggtgtggggggtggaaannnnnnnnnnnnnnnnnggggtccttaatttcaagaaatacttttaccccgcggggggaggggggcggccccaccggggggggaggattttcaacttccgccc

SEQ ID NO: 5537 - DNA, 2170 bp, Homo sapiens
acaattccgagaaagagacggagagagagggaagaaaaagacagatagatattggggggaaggagaaaaaaggagaagagagggaagagaggacagcggagagagagcaccagagagagagggagagagagagagagcgctagagagagggagcgagcatgtgcgatgagcaatagctgtggaccttacagttgctgctaactgccctggtgtgtgtgagggagagagagggagggagggagagagagcgcgctagcgcgagagagcgagtgagcaagaattccagaaaagaggtggagagggggggaataagaaagagagagaaggaaaggagagaaggcaggaagaaggcaagggacgagacaaccatgctgtgctgtatgagaagaaccaaacaggttgaaaaaaatgatgacgaccaaaagattgaacaagatggtatcaaaccagaagataaagctcataaggccgcaaccaaaattcaggctagcttccgtggacacataacaaggaaaaagctcaaaggagagaagaaggatgatgtccaagctgctgaggctgaagctaataagaaggatgaagcccctgttgccgatggggtggagaagaagggagaaggcaccactactgccgaagcagccccagccactggctccaagcctgatgagcccggcaaagcaggagaaactccttccgaggagaagaagggggagggtgatgctgccacagagcaggcagccccccaggctcctgcatcctcagaggagaaggccggctcagctgagacagaaagtgccactaaagcttccactgataactcgccgtcctccaaggctgaagatgccccagccaaggaggagcctaaacaagccgatgtgcctgctgctgtcactgctgctgctgccaccacccctgccgcagaggatgctgctgccaaggcaacagcccagcctccaacggagactggggagagcagccaagctgaagagaacatagaagctgtagatgaaaccaaacctaaggaaagtgcccggcaggacgagggtaaagaagaggaacctgaggctgaccaagaacatgcctgaactctaagaaatggctttccacatccccaccctcccctctcctgagcctgtctctccctaccctcttctcagctccactctgaagtcccttcctgtcctgctcacgtctgtgagtctgtcctttcccacccactagccctctttctctctgtgtggcaaacatttaaaaaaaaaaaaaaaaagcaggaaagatcccaagtcaaacagtgtggcttaaacattttttgtttcttggtgttgttatggcaagtttttggtaatgatgattcaatcattttgggaaattcttgcactgtatccaagttatttgatctggtgcgtgtggccctgtgggagtccactttcctctctctctctctctctgttccaagtgtgtgtgcaatgttccgttcatctgaggagtccaaaatatcgagtgaattcaaaatcatttttgttttcctccttttcaatgtgatggaatgaacaaaaaggaaaaaattcaaaaaacccagtttgttttaaaaataaataaataaagcaaatgtgccaattagcgtaaacttgcggctctaaggctcctttttcaacccgaatattaataaatcatgagagtaatcaaaaaaaaaaaaaaaaaaaaaacaaaaaaaacaaaacacaaacaaaaaaaaaaaacaagaaaacaaaaaaaaaacaaaaaaaagaagaaatggcacagaaaccaaagaaaacacaaccacaaaaaaaggggggggggcgcccaccaaatagacaaacgggggaggcgactcccgccccgcacatttttgaagagaggcccccacagacgggcgacataataacaagaacggagagcgagggcagaccaaacacaacctaagtgaagggggacgaacaggcacgacgggtacgaagacgtaggagaaaagaacccactaggttggggaagggagcacaaatggtgcgcacccccccacaaggagagaaatgcgctcgcgggaaaaacaaatagcaggcaagaggttatgatgacacaacaatattactgcgcagacagaaagagccgagaataataaaatacaggcggggtcgatatagcggggagg

SEQ ID NO: 5538 - DNA, 6115 bp, Homo sapiens
  misc_feature (3494)..(3499): n is a, c, g, or t
  misc_feature (3501)..(3599): n is a, c, g, or t
agcctccgccgagcatggagagctgccgccgcggccggccggcgacgctggcgacgctttcgcccctgaggtagtttggcgaccgcgaagaaggaaaaagggcgggcgggcggctgtcctctcaccgtcctcaccccgcgaggcccggcccgctcctccgtcgtggatttcgcggcgatccccccggcagctctttgcaaagctgcttgaaacttctcccaaactcggcatggatacgactgcggcggcggcgctgcctgcttttgtggcgctcttgctcctctctccttggcctctcctgggatcggcccaaggccagttctccgcaggtggctgtacttttgatgatggtccaggggcctgtgattaccaccaggatctgtatgatgactttgaatgggtgcatgttagtgctcaagagcctcattatctaccacccgagatgccccaaggttcctatatgatagtggactcttcagatcacgaccctggagaaaaagccagacttcagctgcctacaatgaaggagaacgacactcactgcattgatttcagttacctattatatagccagaaaggactgaatcctggcactttgaacatattagttagggtgaataaaggacctcttgccaatccaatttggaatgtgactggattcacgggtagagattggcttcgggctgagctagccactgagcccctccctggcccaatgactcttcacgctcacatccgaagctgatctcaggagggagaagtggttatattgccattgatgacatccaagtactgagttatccttgtgataaatctcctcatttcctccgtctaggggatgtagaggtgaatgcagggcaaaacgctacatttcagtgcattgccacagggagagatgctgtgcataacaagttatggctccagagacgaaatggagaagatataccagtagcccagactaagaacatcaatcatagaaggtttgccgcttccttcagattgcaagaagtgacaaaaactgaccaggatttgtatcgctgtgtaactcagtcagaacgaggttccggtgtgtccaattttgctcaacttattgtgagagaaccgccaagacccattgctcctcctcagcttcttggtgttgggcctacatatttgctgatccaactaaatgccaactcgatcattggcgatggtcctatcatcctgaaagaagtagagtaccgaatgacatcaggatcctggacagaaacccatgcagtcaatgctccaacttacaaattatggcatttagatccagataccgaatatgagatccgagttctacttacaagacctggtgaaggtggaacggggctcccaggacctccactaatcaccagaacaaaatgtgcagaacctatgagaaccccaaagacattaaagattgctgaaatacaggcaagacggattgctgtggactgggaatccttgggttacaacattacgcgttgccacacttttaatgtcactatctgctaccattacttccgtggtcacaacgagagcaaggcagactgtttggacatggaccccaaagcccctcagcatgttgtgaaccatctgccaccttatacaaatgtcagcctcaagatgatcctaaccaatccagagggaaggaaggagagtgaagagacaattattcaaactgatgaagatgtgcctggtcccgtaccagtaaaatctcttcaaggaacatcctttgaaaataagatcttcttgaactggaaagaacctttggatccaaatggaatcatcactcaatatgagatcagctatagcagtataagatcatttgatcctgcagttccagtggctggacctccccagactgtatcaaatttatggaacagtacacaccatgtctttatgcatctccaccctggaaccacgtaccagtttttcataagagccagcacggtcaaaggctttggtccagccacagccatcaatgtcaccaccaatatctcagctccaactttacctgactatgaaggagttgatgcctctctcaatgaaactgccaccacaataactgtattgttgagaccagcacaagccaaaggtgctcctatcagtgcttatcagattgttgtggaagaactgcacccacaccgaaccaagagagaagccggagccatggaatgctaccaggttcctgtcacataccaaaatgccatgagtgggggtgcaccgtattactttgctgcagaactccccccgggaaacctacctgagcctgccccgttcactgtgggtgacaatcggacctaccaaggcttttggaaccctcctttggctccgcgcaaaggatacaacatctatttccaggcgatgagcagtgtggagaaggaaactaaaacccagtgcgtacgcattgctacaaaagcagcagcaacagaagaaccagaagtgatcccagatcccgccaagcagacagacagagtggtgaaaatagcaggaattagtgctggaattttggtgttcatcctccttctcctagttgtcatattaattgtaaaaaagagcaaacttgctaaaaaacgcaaagatgccatggggaatacccggcaggagatgactcacatggtgaatgcaatggatcgaagttatgctgatcagagcactctgcatgcagaagatcctctttccatcaccttcatggaccaacataactttagtccaagatatgagaaccacagtgctacagcagagtccagtcgccttctagacgtacctcgctacctctgtgaggggacggaatccccttaccagacaggacagctgcatccagccatcagggtagctgatttactgcagcacattaatctcatgaagacatcagacagctatgggttcaaagaggaatatgagagcttttttgaaggacagtcagcatcttgggatgtagctaaaaaagatcaaaatagagcaaaaaaccgatatggaaacattatagcatatgatcactccagagtgattttgcaacccgtagaggatgatccttcctcagattatattaatgccaactatattgatggctaccagagaccaagtcattacattgcaacccaaggtcccgttcatgaaacagtgtatgatttctggaggatgatttggcaagaacaatctgcttgcattgtgatggttacaaatttagttgaggttggccgggttaaatgctataaatattggcctgatgatactgaagtttatggtgacttcaaagtaacgtgtgtagaaatggaaccacttgctgaatatgtagttaggacattcaccctggaaaggagggggtacaatgaaatccgtgaagttaaacagttccatttcacgggctggcctgaccatggagtgccctaccatgctacagggctgctttcctttatccggcgagtcaagttatcaaaccctcccagtgctggccccatcgttgtacattgcagtgctggtgctgnnnnnncnnnnnnnnnnnnnnnnnnnnnnnnnnnnnnnnnnnnnnnnnnnnnnnnnnnnnnnnnnnnnnnnnnnnnnnnnnnnnnnnnnnnnnnnnnnnnnnnnnntaatatggtccagacagaggaacagtacatttttattcatgatgccattttagaagcctgcttatgtggagaaactgccatacctgtctgtgaatttaaagctgcatattttgatatgattagaatagactcccagactaactcttcacatctcaaggatgaatttcagactctgaattcagtcacccctcgactacaagctgaagactgcagtatagcgtgcctgccaaggaaccatgacaagaaccgtttcatggacatgctgccacctgacagatgtctgccttttttaattacaattgatggggagagcagtaactacatcaatgctgctcttatggacagctacaggcaaccagctgctttcatcgtcacacaataccctctgccaaacactgtaaaagacttctggagattagtgtatgattatggctgtacctccattgtgatgttaaacgaagtcgacttgtcccagggctgccctcagtactggccagaggaagggatgctacgatatggccccatccaagtggaatgtatgtcttgttcaatggactgtgatgtgatcaaccggatttttaggatatgcaatctaacaagaccacaggaaggttatctgatggtgcaacagtttcagtacctaggatgggcttctcatcgagaagtgcctggatccaaaaggtcattcttgaaactgatacttcaggtggaaaagtggcaggaggaatgcgaggaaggggaaggccggacgattatccactgcctaaatggtggcgggcgaagtggcatgttctgtgctataggcatcgttgttgaaatggtgaaacggcaaaatgttgtcgatgttttccatgcagtaaagacactgaggaacagcaagccaaacatggtggaagccccggagcaataccgtttctgctatgatgtagctttggagtacctggaatcatcttagttgggtgagactctttaaagtgcatccatgaagaaacctgtccatctattgagccagcagctgttgtacctgttacacttgtgcagaaagattttaatgtggggggtgggagacttttacatttgagaggtaaaagtattttttttatgaagttgtgtatcttaataaaaaggactgaattagtttttattactatattaaagcatcaacatttcatgccacataaattatatttaataagaaccagattgaaatgagaacgtattggtgtttgtacagtgaacatgccaccttttttctcatggtttcagtagagcagctaccacatgttgcatgagttcatactttctacgtggcatttttctccctttctaaaatgaaagctgatgaatcttaaaaggaagaagaaaagaaaagctgtgcaaattcatagtaaagttcgttttttatatgtttccagtgtagcagatctctatataaatatataaatatatataactggcttattttcttttaatgtgcaatgatggctggatcatttaaagttctttttagaaaataacataagccaaagactcaagtgtaaatatgtctatatggagaaagcacattatatttattggttacttacattccttttttgatggctaaaatactaccaccacacaatcatctttttttcctgaagaaagctttttctttagctaaaatcaattgtaaacgatttttgtagattattttttgtatgttttagtgtaagtagaagataaactttttattcataaaccaggaagcaatgttctttatagtgattctcttgtgtacatgcttgtgaattaaatttgtgtaaaatcccttggcaattgggtcttttaatataggaccaaattaaaacattttgctgaatatgtatagtttttcacaatttcattaggtaaataatggtttggtgatcatacatgagaaatgtacacattaaaaggccttgctgacaacttgcacaatgttgaacatagcctttaagcatcatttaaattttaaaggaatggagtttttcagcctgtggcccagcactggtcaagaaaacaagatggcaacatatatgctttcagggtcaaatttgagcaaactgtaaactgtcagggtgataaaatgtttctcttgatgtttacatgcacaagctttgcgttctgactataaaaagtgtgaacaaatcaatgccagattcctgttttgcgcattgtcatgggattcttaagtgaacctttctaaatgtggtcttgttcacatgctccacgtagctgtaacttcacatcatcagcttgcagtttgtaattgactaaagcattccagtgtcctctttctagattgccagctcatgacatggtgcttataaagatttaattaaagtaagaatgaaataaagtttttataattataacataaaaaataaaaaaaactctagggggggccccgttacccaatttttctcttttatggattgtatttacaattacatgggccgctggtttaaaacaatattaattgggaaaaacctggt

SEQ ID NO: 5539 - DNA, 473 bp, Homo sapiens
ttttttttttcatagaaacagtgtctcgttatgttgcccaggttggtcttgagctcctggcttcaagcgaccctgccgtcttggccttccaaagtgctgagattacagagatgagccaccacaattagccaatgccttaattttttattttaaggcattggttctttttaatattcaaaaggaccttacaaggtaggtaccaatattatttccattttagaaatctgaaaactgaaagggtaagtaatttttcaagactatacagctgatctaaatggcataaaaatcacactagttacaaaggctaaatcagtgttcgactacataatgaggggatgggggcaattatttacaaaaacataggatcagaaaatgtccaggtaaactcttgggtgggaccccaaattatttccttgaaaaaaaaaagggaaggcatttgggatttttgagggttaaccgtgtgcctagccttt

SEQ ID NO: 5540 - DNA, 1394 bp, Homo sapiens
ggcccaggcgcaggcgcgggtgtcggtcccaccgcgcgtcgtcctcgccccggccccggccaatcccttcgaatttggccgaggccgggaaatactagctaatcacggcgcgcgctgttgacgccggccaatgggagctccggaaagcttcggcacaattcgccagcggcgggcggtggacagtcatggcggcccggcgcggggctctcatagtgctggagggcgtggaccgcgccgggaagagcacgcagagccgcaagctggtggaagcgctgtgcgccgcgggccaccgcgccgaactgctccggttcccggaaagatcaactgaaatcggcaaacttctgagttcctacttgcaaaagaaaagtgacgtggaggatcactcggtgcacctgcttttttctgcaaatcgctgggaacaagtgccgttaattaaggaaaagttgagccagggcgtgaccctcgtcgtggacagatacgcattttctggtgtggccttcaccggtgccaaggagaatttttccctagactggtgtaaacagccagacgtgggccttcccaaacccgacctggtcctgttcctccagttacagctggcggatgctgccaagcggggagcgtttggccatgagcgctatgagaacggggctttccaggagcgggcgctccggtgtttccaccagctcatgaaagacacgactttgaactggaagatggtggatgcttccaaaagcatcgaagctgtccatgaggacatccgcgtgctctctgaggacgccatccgcactgccacagagaagccgctgggggagctatggaagtgacccaaggctgcccactggagacgcctctccctgcagtcccccgagaggtgggagactcgcggaaggccccgtccccagcggagtccagaccccacaacttcaggagctctttcccggcagcagagatctgcaggctgcctcttctgccccggagctggggtgcactggggacccccgtggtggggaccttggcagtgtggacatgagcagagcgatggagcagtctcctgccctctcccctgtcctgatggcactctgttgtattttcttactgaagttcagtgataactctgagcagtttcattgtgatcactgtaaatggtaatcagttggaattctcctaaatgtcttccagacactagtaaaaaaagacctgaaaattaaaaaaaaaaaaaaaaaattttttttttttttttaaagttttcagacttatttcacagcgattgacacagaaacatacctctgacatgattagaagcatgccagaacagactggtgaaaaggtttactttagagcattttttttttttttttttttttaaagttttcagacttatttcacagcgattg

SEQ ID NO: 5541 - DNA, 1408 bp, Homo sapiens
  misc_feature (25)..(25): n is a, c, g, or t
tcatctacataatgttgagaggctnatgaacgacctccgcatggattggtcccgttataggcccggtgagtagagtgcattcccagtgtggcggttcgtatccctaacagttggttttaacttgtatgggccgtagtgtgtgtagggtgtttagttctgggtgtttaggcgcggccagttgcgggggtcccaatctctcctaaggtcaagggggccaaggggttcgggggggggggagccacggggaaattcggggtatatcaaaggggccaggtccccagggccaaggcggaactttttccagcactcctgaaccaggcgcgggagagggaggaccccgaccaggttaggaggtgctgcaggaagcaagtggcggcagcagcacgccaggtggggtccagtttcacagcacatgtgccgcagccctggctccctgcagacacagggcccatgggagccgctcaccgctgctgggcacagaacggcctccaactgcagctcctaccagggcctccagccccaggccagagctcccaggtgctgcacagttaggagcacagtgggaaccagtgacaagtagggactggggcctaactccacgacctggcagagggaggtacggagtagctcggagactgctgtcccagtagacagcacaggtagtcggcttgatccttgcgcatgtaaacagatactgctaaagtgcttgcgcctagacacagccatgtgctctgtggtggccacgccccagccacacgcccatgtgggaactgcttcatgaggcctgtggtgcacccccttcatcaccactgccgtccccaccacccgcccatgctactcacatggacaagggcagcctggcagggcagagcagagcacaaggcctaaggagagtgggggttggaactggattctgaaggtgatgcaggagcccctacctaacccgtgaggaactggaagaaccagggacttcaacctgaagccagcatccagggaagactttgggggaaactgaggttcccaccccaccatagccaggaaacatcagaagggaggtggaggcgcacccaggaacaggaatcccagccaatgctaggggctactgaaaaaaacagcccagccactgtaatatggactggcctcagctctggcccccaagactgcccagggagtaagcccaccccctcagtgggctgggggcaggggctggcccaggcctgagctggcagcagcagaagccccagcctggcacagtgtccacggggccaaggagctccctgagtcagcagtcactgactccacaccgacccgcgttcagggaagaggcgggtctctgtggcgtcatctgctcacgctactcagctggggcggactgcaagactggcaacacccatggggccgagtcctc

SEQ ID NO: 5542 - DNA, 3481 bp, Homo sapiens
  misc_feature (1735)..(1741): n is a, c, g, or t
gcggccgcctgaggggagcccgcgcctccgccgcctgagaggaggtcgagctgccgccggggcgatgctggaggcacgaggagtgcggggcgcccggcgccaggggagccgccacagccatggattgcaaagatagaccagcttttccagttaagaagttaatacaagcccgtctgccgtttaagcgcctgaatcttgtcccaaaggggaaagccgatgacatgtcagacgatcagggtacttctgtgcaaagtaaaagccccgatttagaggcctctttggacaccttggaaaacaactgtcatgtgggttctgacatagactttagaccgaaacttgtcaacgggaagggtcccttagataactttttaagaaatagaatcgaaaccagtattggccagagcacagtcatcattgatttgacagaggactcgaatgagcagccagacagtcttgtggaccacaataaactaaattctgaagcctctccctccagggaggcaataaatggccagcgagaagacactggggatcagcaggggttgttgaaggccattcagaacgacaagttggcatttcctggagagaccctttcagacattccttgcaaaacagaggaggagggtgttggctgtggaggtgcagggaggagaggcgactcccaggaatgttcgccacggagctgcccggagctgacgagtggcccgagaatgtgccccagaaaggagcaggacagttggagtgaagctgggggcatcctgttcaaagggaaggtgcctatggtggtcttgcaggacatcttggctgtgagaccaccgcaaatcaagtcccttccagccacaccccaaggcaagaacatgacccctgagagtgaggtgctggaatctttccccgaagaagactctgtactcagccattcgtccctgagctctccctcttccaccagctcgcccgaggggccgcctgctcccccaaagcagcacagcagtaccagtcccttccccacctccacgcccctccgcagaataactaagaaattcgtcaaaggctctacagagaagaacaagctcagactgcaaagagatcaggagcgtctgggcaagcagctcaagttacgtgcagaaagggaagaaaaggagaagctgaaagaggaggccaagcgggccaaggaggaggccaagaagaagaaggaggaagagaaggagcttaaggaaaaggagaggcgggagaagcgggagaaggatgagaaggagaaggcggagaagcagcggctcaaggaggagcggcgcaaggagagacaggaagccctggaggctaaacttgaggaaaaaaggaaaaaggaagaagagaaacggttaagagaagaagagaagcgcattaaagcagagaaggccgaaatcacgaggttcttccagaaaccaaagactccacaggcccccaagaccctggccggctcctgtgggaagtttgccccctttgaaattaaagagcacatggtcctggcccctcggcgtcggaccgctttccatccagacctctgcagtcagctggaccagctcctccagcagcagagcggcgagttctccttcttgaaagacctcaaaggccggcagcccctgaggtccggacccacgcacgtttccacccggaatgcagatatttttaacagtgatgtcgtcatcgtggagcgtgggaagggcgacggtgttcccgagaggaggaagtttggcaggannnnnnntcctgcagttctgtgagaaccaccggcctgcctactggggtacctggaataagaagacggcactcatccgcgcgcgagacccctgggcccaggacacgaagctcctggactatgaggtggacagtgatgaggagtgggaagaagaggagcctggggagtccctgtcccacagtgagggggatgatgatgacgacatgggagaggatgaagatgaggacgatggtttctttgtgccccatgggtacctgtctgaggacgaaggtgtgacagaggagtgtgccgaccctgagaaccataaggtccgccagaaactgaaggccaaggagtgggacgagttcctggctaaggggaagcgctttcgcgtcctgcaacctgtgaagatcggctgcgtgtgggcggctgacagagactgcgcaggcgatgacctgaaggtactgcagcagttcgcagcctgcttcctggagaccctgccggcccaggaggagcagacgcccaaggcctccaagcgggagaggagagacgagcagatcctggcccagctgctgccgctcctgcacggcaatgtgaacgggagcaaggtcatcatccgggagttccaggagcactgccgccggggactgctcagcaaccacaccggcagcccgcggacgccctccaccacctacctgcacacccccacccccagcgaggatgccgccatcccctctaagtcccggctcaagcggctcatttccgagaactcagtgtatgagaagcggcctgacttcaggatgtgctggtacgtgcacccgcaggtgctacagagcttccagcaggagcacctgcccgtgccgtgccagtggagctatgtgacatcggtgccctcggcccccaaagaggacagtggcagcgtcccctccacggggcccagccagggcactcccatctcgctgaagaggaagtcagcgggcagcatgtgcatcacccaattcatgaagaagcgcaggcacgacggccagattggtgctgaagacatggacggcttccaggcagacacggaggaggaggaagaggaggagggcgactgtatgatcgtggatgtcccggatgctgtggaggtccaagccccgtgtggagccgcttccggagctgggggtggtgtgggggtggacaccggcaaggccaccctgaccgcgagcccactgggtgcatcctgagagcaggggtgacgtatgtagaacgcttagggtgtcctccccacagagcagatacttgaaccgactcaattcctgtgtaaagagcactttgtcctgcttcacggacctccccaaagtgtgcagagttctatataggatgctggattagttcctttgatatttgtaaaaattcccccaagagccgcatatgaatctgccctttaataaagcattattgagattgctggcctattggggaagctgcgggcacaggagcaggcgtggaatccaatacttgtaaatgaattgaagcgtcaggaccacccgcctggccacgtgcgcgggcccctggacctaacgaggcagtgtataaacttattctctagccctgaaaaaaaaaaaaaaaaaacaatacacaacataagcaaaacaacgaactaaaaaaccggggcgcatattagagggcggcgaaaaaagagttaataacggccacgcgacataagttccggcacacgtttttcaacaagggaaacagggcccccaaagggggcaatatagaggtatt

SEQ ID NO: 5543 - DNA, 1289 bp, Homo sapiens
ttttttttttttttttaacaaattcggaacggagacggcgattttttttctttttgtctgttttgcttttgccctcttgtcctcgtggtggtgattgatttttgtatagtcgactctttaaatcatttttaactagagagaatattttcccagaaaataacaaattaaccgcaaactatcaacaacccccaaccaccatctaccactacggccaccccaaaggaccccgacgccaacagacagtcaaacgctgatgttgcgggcagaaaacataaaagaggtgacaattgtatactttctaggacaagcacggcttctcctttcggttcccatggacccggcaccccacctgcatgacgatttatttgtatctgggaaaatattctctctagttaaaaatgatttaaagagtcgactatacaaaaatcaatcaccaccacgaggacaagagggcaaaagcaaaacagacaaaaagaaaaaaaatcgccgtctccgttccgaatttgttaaaaaaaaaaaaaaaaaaaaaaaggacagggggaaaaaaaaaaaaaaagaactcctggagagggaaatagcaaatgtgtcttgccttttgttgctctctctctctttttttttctctcgctctctttctttctcttcttctctctgtttttaagtcaagtattggtcaaaaaaatgcaatcttctgttttttgttcagcagacaatcattttcttcgtaagcacctttttctctccactctgtcactgcctgtgtgggtactggttataaatgtggaaaaagaatagttatgactgtaacagatttttatttttatttcaaaattttatatgaattatgtatatcttaatgatcggtcattttcccagtttgtaatatatgtgtagaaattgcctgtatatgatattgctttttctcctctccctttctctttctctcctctccctctctctgtctttctccccgctcaactgtctcttttctttttggggttctcctcccactcggtgctcctggtgtcgacttggcagtcaaggagaggcatggtggcctgggttaggaagagggaccctgtcgctagcaaaagcggagagtgagattgtagtattcttatgcaaaagctatttccagtatttcttagcagcttcagaggtatctctcactccctgtagggcgcttttactgttatcttaaactgcgtgtttatctatatgtaaaaactttctaaagcaaatacagtattctccattttcttatcaaaaaaaaaaaaaaaaaaaaaaaa

SEQ ID NO: 5544 - DNA, 1538 bp, Homo sapiens
  misc_feature (1234)..(1266): n is a, c, g, or t
aatgggagtgtatgttatctatgaggtcgccttccggggaccaaaaggtgcggggttagggctgttatattatctcggagtgttgtgaccgcatatggaggggcccgccaacccccgggcgaagggccccaagggcccaagtgttctccgggttggcccaccctttcgccccccgttttaggggggaatggtttttttccgtgttattttttattttttcaggcttttgtttcttgggccccaggaattccaaaagtgaaaaatttgagttggaggttgaaccctttacaacccggtaggattttagtaggggtagatttcaaaaggaaggttcgctttcttcccaaaagtagccagtcccaagtttccaggggcggtctttcagctcatgggaggtttcatggggacccagccgggcacaggtgcaggggccggagtccgcccacccaggcctggcgctgaaacttttttttttttttttttggtttaagagcactttattattgttcttaaggctacttttaagtacaaaaaaagatggcctgccaaacctttttttttcttcttccaggaaaaacaggccacagagaatggtatattacagatttacacacatgaagagaaggtcagagcgcactgcaggcagcgcggctctgggaagaacttcacggagccccttcttagagcagggagggggctttctcagtgaaatgtttggttttctgctgcctcctctgccccaggcccccctccagggtactgcctatcccagataggtcagtgcaccagggacccggccgccagcaccgccgacccctcccagagtgacgcccttgttcactgacaaagagacctgtcccaggagtgtcctccaccgagccggtcagctgtgggtggttttcctgttacgacgctcagtagcctgtagcaataacaaactcgtggctatgaatgcagatgcagtgttctcatagaataactgttcctgcacttttacagacaaatctacgacaaaaaaaaagatcaactttttttttccgaacaacaaaaaaaatgaatgattacaataggaaagggaaaaattaaatagctacatatcattaacaaattaatgttcttcaaaaaatacctacaaatttctctgtacattctttacgcacagcgtaacgatggtctcaaaatcacccatatagaaaagtgttctcaacgatttttcctacagaaaatatagggnnnnnnnnnnnnnnnnnnnnnnnnnnnnnnnnngtggggagtgaaatgtgtgcggggcaaggaggaagggcttttctttcctccactttttcaaaggcctgcagccactctgtggactacaagagccagtcctccgaccttttcacccagtgccaatttccaaaattcaacagctaaaaactgtaaaaccgggggtcatacggtgtgcagagtccacaaagccttgcaggtgaggtgaccacgcccacgtcacctggtcaggtgccatcgtcgtgagcctctggtggggcaggtgggacacagca

SEQ ID NO: 5545 - DNA, 7059 bp, Homo sapiens
  misc_feature (138)..(168): n is a, c, g, or t
  misc_feature (245)..(268): n is a, c, g, or t
  misc_feature (499)..(519): n is a, c, g, or t
  misc_feature (598)..(612): n is a, c, g, or t
  misc_feature (834)..(872): n is a, c, g, or t
  misc_feature (1136)..(1156): n is a, c, g, or t
  misc_feature (1591)..(1611): n is a, c, g, or t
  misc_feature (1709)..(1741): n is a, c, g, or t
  misc_feature (1892)..(1944): n is a, c, g, or t
  misc_feature (2606)..(2683): n is a, c, g, or t
  misc_feature (3736)..(3755): n is a, c, g, or t
  misc_feature (4269)..(4297): n is a, c, g, or t
atgaaatggaaacatgttccttttttggtcatgatatcactcctcagcttatccccaaatcacctgtttctggcccagcttattccagaccctgaagatgtagagagggggaacgaccacgggacgccaatccccacnnnnnnnnnnnnnnnnnnnnnnnnnnnnnnnacaggctcccgtcttcgtcaggaagattttccacctcgcattgttgaacacccttcagacctgattgtctcaaaagnnnnnnnnnnnnnnnnnnnnnnnnaagctgaaggccgccccacacccactattgaatggtacaaagggggagagagagtggagacagacaaagatgaccctcgctcacaccgaatgttgctgccgagtggatctttatttttcttacgtatagtacatggacggaaaagtagacctgatgaaggagtctatgtctgtgtagcaaggaattaccttggagaggctgtgagccacaatgcatcgctggaagtagccnnnnnnnnnnnnnnnnnnnnncaaaacccttcggatgtcatggttgcagtaggagagcctgcagtaatggaatgccaacctccacgaggccatcctgagnnnnnnnnnnnnnnnaagaaagatggctctccactggatgataaagatgaaagaataactatacgaggaggaaagctcatgatcacttacacccgtaaaagtgacgctggcaaatatgtttgtgttggtaccaatatggttggggaacgtgagagtgaagtagccgagctgactgtcttagagagaccatcatttgtgaagagacccagtaacttggcagtaactgtggatgacagnnnnnnnnnnnnnnnnnnnnnnnnnnnnnnnnnnnnnnntacagtacgatggaggaaagatgatggagagctgcccaaatccagatatgaaatccgagatgatcataccttgaaaattaggaaggtgacagctggtgacatgggttcatacacttgtgttgcagaaaatatggtgggcaaagctgaagcatctgctactctgactgttcaagaacctccacattttgttgtgaaaccccgtgaccaggttgttgctttgggacggactgtaacttttcagtgtgaagcaaccggaaatcctcnnnnnnnnnnnnnnnnnnnnngagaagggagtcagaatctacttttctcatatcaaccaccacagtcatccagccgattttcagtctcccagactggcgacctcacaattactaatgtccagcgatctgatgttggttattacatctgccagactttaaatgttgctggaagcatcatcacaaaggcatatttggaagttacagatgtgattgcagatcggcctcccccagttattcgacaaggtcctgtgaatcagactgtagccgtggatggcactttcgtcctcagctgtgtggccacaggcagtccagtgcccaccattctgtggagaaaggatggagtcctcgtttcaacccaagactctcgaatcaaacagttggagaatggagtactgcagatccgatatgctaagctgggtgatactggtcggtacacctgcattgcatcaacccccnnnnnnnnnnnnnnnnnnnnngcttacattgaagttcaagaatttggagttccagttcagcctccaagacctactgacccaaatttaatccctagtgccccatcaaaacctgaagtgannnnnnnnnnnnnnnnnnnnnnnnnnnnnnnnnggcaaccaaatttgaattcaggagcaactccaacatcttatattatagaagccttcagccatgcatctggtagcagctggcagaccgtagcagagaatgtgaaaacagaaacatctgccattaaaggactcaaacctaatgcaatttaccnnnnnnnnnnnnnnnnnnnnnnnnnnnnnnnnnnnnnnnnnnnnnnnnnnnnntcagatccagtgaaaacacaagatgtcctaccaacaagtcagggggtggaccacaagcaggtccagagagagctgggaaatgctgttctgcacctccacaaccccaccgtcctttcttcctcttccatcgaagtgcactggacagtagatcaacagtctcagtatatacaaggatataaaattctctatcggccatctggagccaaccacggagaatcagactggttagtttttgaagtgaggacgccagccaaaaacagtgtggtaatccctgatctcagaaagggagtcaactatgaaattaaggctcgccctttttttaatgaatttcaaggagcagatagtgaaatcaagtttgccaaaaccctggaagaagcacccagtgccccaccccaaggtgtaactgtatccaagaatgatggaaacggaactgcaattctagttagttggcagccacctccagaagacactcaaaatggaatggtccaagagtataaggtttggtgtctgggcaatgaaactcgataccacatcaacaaaacagtggatggttccaccttttccgtggtcattccctttcttgttcctggaatccgatacagtgtggaagtggcagccagcactggggctgggtctggggtaaagagtgagcctcagttcannnnnnnnnnnnnnnnnnnnnnnnnnnnnnnnnnnnnnnnnnnnnnnnnnnnnnnnnnnnnnnnnnnnnnnnnnnnnnagcagccggccttcatagcaggtattggagcagcctgttggatcatcctcatggtcttcagcatctggctttatcgacaccgcaagaagagaaacggacttactagtacctacgcgggtatcagaaaagtcccgtcttttaccttcacaccaacagtaacttaccagagaggaggcgaagctgtcagcagtggagggaggcctggacttctcaacatcagtgaacctgccgcgcagccatggctggcagacacgtggcctaatactggcaacaaccacaatgactgctccatcagctgctgcacggcaggcaatggaaacagcgacagcaacctcactacctacagtcgcccagctgattgtatagcaaattataacaaccaactggataacaaacaaacaaatctgatgctccctgagtcaactgtttatggtgatgtggaccttagtaacaaaatcaatgagatgaaaaccttcaatagcccaaatctgaaggatgggcgttttgtcaatccatcagggcagcctactccttacgccaccactcagctcatccagtcaaacctcagcaacaacatgaacaatggcagcggggactctggcgagaagcactggaaaccactgggacagcagaaacaagaagtggcaccagttcagtacaacatcgtggagcaaaacaagctgaacaaagattatcgagcaaatgacacagttcctccaactatcccatacaaccaatcatacgaccagaacacaggaggatcctacaacagctcagaccggggcagtagtacatctgggagtcaggggcacaagaaaggggcaagaacacccaaggtaccaaaacagggtggcatgaactgggcagacctgcttcctcctcccccagcacatcctcctccacacagcaatagcgaagagtacaacatttctgtagatgaaagctatgaccaagaaatgccatgtcccgtgccaccagcaaggatgtatttgcaacaagatgaattagaagaggaggaagatgaacgaggccccactccccctgttcggggannnnnnnnnnnnnnnnnnnncgtgtcctatagccatcagtccactgccactctgactccctccccacaggaagaactccagcccatgttacaggattgtccagaggagactggccacatgcagcaccagcccgacaggagacggcagcctgtgagtcctcctccaccaccacggccgatctcccctccacatacctatggctacatttcaggacccctggtctcagatatggatacggatgcgccagaagaggaagaagacgaagccgacatggaggtagccaagatgcaaaccagaaggcttttgttacgtgggcttgagcagacacctgcctccagtgttggggacctggagagctctgtcacggggtccatgatcaacggctggggctcagcctcagaggaggacaacatttccagcggacgctccagtgttagttcttcggacggctcctttttcactgatgctgactttgcccaggcagtcgcagcagcggcagagtatgctggtctgaaagtagcacgacggcaaatnnnnnnnnnnnnnnnnnnnnnnnnnnnnntcatgcgtctcagtgccctaggcccacaagtcccgtgtctacagacagcaacatgagtgccgccgtaatgcagaaaaccagaccagccaagaaactgaaacaccagccaggacatctgcgcagagaaacctacacagatgatcttccaccacctcctgtgccgccacctgctataaagtcacctactgcccaatccaagacacagctggaagtacgacctgtagtggtgccaaaactcccttctatggatgcaagaacagacagatcatcagacagaaaaggaagcagttacaaggggagagaagtgttggatggaagacaggttgttgacatgcgaacaaatccaggtgatcccagagaagcacaggaacagcaaaatgacgggaaaggacgtggaaacaaggcagcaaaacgagaccttccaccagcaaagactcatctcatccaagaggatattctaccttattgtagacctacttttccaacatcaaataatcccagagatcccagttcctcaagctcaatgtcatcaagaggatcaggaagcagacaaagagaacaagcaaatgtaggtcgaagaaatattgcagaaatgcaggtacttggaggatatgaaagaggagaagataataatgaagaattagaggaaactgaaagctgaagacaaccaagaggcttatgagatctaatgtgaaaatcatcactcaagatgcctcctgtcagatgacacatgacgccagataaaatgttcagtgcaatcagagtgtacaaattgtcgtttttattcctcttattgggatatcattttaaaaactttattgggtttttattgttgttgtttgatccctaaccctacaaagagccttcctattcccctcgctgttggagcaaaccattataccttacttccagcaagcaaagtgctttgacttcttgcttcagtcatcagccagcaagagggaacaaaactgttcttttgcattttgccgctgagatatggcattgcactgcttatatgccaagctaatttatagcaagatattgatcaaatatagaaagttgatattcaacctcacaagggctctcaaagtataatctttctatagccaactgctaatgcaaattaaaacatatttcattttaacatgatttcaaaatcagtttttcatactaccctttgctggaagaaactaaaaatatagcaaatgcagaaccacaaacaattcgaatggggtagaaacattgtaaatatttactctttgcaaaccctggtggtattttattttggcttcatttcaatcattgaagtatattcttattggaaatgtacttttggataagtagggctaagccagttggatctctggttgtctagtcattgtcataagtaaacctagtaaaaccttgttctatttttcaatcatcaaaaagtaattataaatacgtattacaaacaagtggatgtttttaatgaccaattgagtaagaacatccctgtcttaactggcctaaatttcttctggtagtgtcagttcaactttcagaagtgccacttaaggaagtttgatttttgtttttgtaatgcactgtttttaatctctctctctttttttttttttttttggttttaaaagcacaatcactaaactttatttgtaaaccattgtaactattaaccttttttgtcttattgaaaaaaaaaatgttgagaagcgtttttaacctgttttgttaatgctctatgtttgtatttggaatatttgaataatgacagatggtgaagtaacatgcatactttattgtgggccatgaaccaaatggttcttacttttcctggacttaaagaaaaaaagaggtttaagtttgttgtggccaatgtcgaaacctacaagatttccttaaaatctctaatagaggcattacttgctttcaattgacaaatgatgccctctgactagtagatttctatgatccttttttgtcattttatgaatatcattgattttataattggtgctatttgaagaaaaaaatgtacatttattcatagatagataagtatcaggtctgaccccagtggaaaacaaagccaaacaaaactgaaccacaaaaaaaaaggctggtgttcaccaaaaccaaacttgttcatttagataatttgaaaaagttccatagaaaaggcgtgcagtactaagggaacaatccatgtgattaatgttttcattatgttcatgtaagaagccccttatttttagccataattttgcatactgaaaatccaataatcagaaaagtaattttgtcacattatttattaaaaatgttctcaaatacaaaaataaagcatgtgatggtgtggtgttgttgcggctcggacattgtcgtgtttcgctcgtcggacggggtggtgccgggtcgcgtgtgatgggggtgtcgttggtgttgctgtgctgcgtgtggggcggatcttggtcttctcgctctcgtggtgtcgccgctggttcgctgcctagttcggttgcgtgttctctctttcctcgctgggtcttggcttgtcttgtctgggctgctgcctgtggggctttggctggtcggacctggatgccgcttcttcgggtaggcgtgctcggcgcgtctgggtcgtgatgtgcgtgggagacggttggtggcagtgatcgtgctgcctgatggtgctcggtgatgctccgagcgctgctcgctcgactcgcggctgccgtctgcgttcgctgtctggtggcggg

SEQ ID NO: 5546 - DNA, 3054 bp, Homo sapiens
ggagtttattcataacgcgctctccaagtatacgtggcaatgcgttgctgggttattttaatcattctaggcatcgttttcctccttatgcctctatcattcctccctatctacactaacatcccacgctctgaacgcgcgcccattaatacccttctttcctccactctccctgggactcttgatcaaagcgcggccctttccccagccttagcgaggcgccctgcagcctggtacgcgcgtggcgtggcggtgggcgcgcagtgcgttctcggtgtggagggcagctgttccgcctgcgatgatttatactcacaggacaaggatgcggtttgtcaaacagtactgctacggaggagcagcagagaaagggagagggtttgagagggagcaaaagaaaatggtaggcgcgcgtagttaattcatgcggctctcttactctgtttacatcctagagctagagtgctcggctgcccggctgagtctcctccccaccttccccaccctccccaccctccccataagcgccctcccgggttcccaaagcagagggcgtgggggaaaagaaaaaagatcctctctcgctaatctccgcccaccggccctttataatgcgagggtctggacggctgaggacccccgagctgtgctgctcgcggccgccaccgccgggccccggccgtccctggctcccctcctgcctcgagaagggcagggcttctcagaggcttggcgggaaaaagaacggagggagggatcgcgctgagtataaaagccggttttcggggctttatctaactcgctgtagtaattccagcgagaggcagagggagcgagcgggcggccggctagggtggaagagccgggcgagcagagctgcgctgcgggcgtcctgggaagggagatccggagcgaatagggggcttcgcctctggcccagccctcccgctgatcccccagccagcggtccgcaacccttgccgcatccacgaaactttgcccatagcagcgggcgggcactttgcactggaacttacaacacccgagcaaggacgcgactctcccgacgcggggaggctattctgcccatttggggacacttccccgccgctgccaggacccgcttctctgaaaggctctccttgcagctgcttagacgctggatttttttcgggtagtggaaaaccagcagcctcccgcgacgatgcccctcaacgttagcttcaccaacaggaactatgacctcgactacgactcggtgcagccgtatttctactgcgacgaggaggagaacttctaccagcagcagcagcagagcgagctgcagcccccggcgcccagcgaggatatctggaagaaattcgagctgctgcccaccccgcccctgtcccctagccgccgctccgggctctgctcgccctcctacgttgcggtcacacccttctcccttcggggagacaacgacggcggtggcgggagcttctccacggccgaccagctggagatggtgaccgagctgctgggaggagacatggtgaaccagagtttcatctgcgacccggacgacgagaccttcatcaaaaacatcatcatccaggactgtatgtggagcggcttctcggccgccgccaagctcgtctcagagaagctggcctcctaccaggctgcgcgcaaagacagcggcagcccgaaccccgcccgcggccacagcgtctgctccacctccagcttgtacctgcaggatctgagcgccgccgcctcagagtgcatcgacccctcggtggtcttcccctaccctctcaacgacagcagctcgcccaagtcctgcgcctcgcaagactccagcgccttctctccgtcctcggattctctgctctcctcgacggagtcctccccgcagggcagccccgagcccctggtgctccatgaggagacaccgcccaccaccagcagcgactctgaggaggaacaagaagatgaggaagaaatcgatgttgtttctgtggaaaagaggcaggctcctggcaaaaggtcagagtctggatcaccttctgctggaggccacagcaaacctcctcacagcccactggtcctcaagaggtgccacgtctccacacatcagcacaactacgcagcgcctccctccactcggaaggactatcctgctgccaagagggtcaagttggacagtgtcagagtcctgagacagatcagcaacaaccgaaaatgcaccagccccaggtcctcggacaccgaggagaatgtcaagaggcgaacacacaacgtcttggagcgccagaggaggaacgagctaaaacggagcttttttgccctgcgtgaccagatcccggagttggaaaacaatgaaaaggcccccaaggtagttatccttaaaaaagccacagcatacatcctgtccgtccaagcagaggagcaaaagctcatttctgaagaggacttgttgcggaaacgacgagaacagttgaaacacaaacttgaacagctacggaactcttgtgcgtaaggaaaagtaaggaaaacgattccttctaacagaaatgtcctgagcaatcacctatgaacttgtttcaaatgcatgatcaaatgcaacctcacaaccttggctgagtcttgagactgaaagatttagccataatgtaaactgcctcaaattggactttgggcataaaagaacttttttatgcttaccatcttttttttttctttaacagatttgtatttaagaattgtttttaaaaaattttaagatttacacaatgtttctctgtaaatattgccattaaatgtaaataactttaataaaacgtttatagcagttacacagaatttcaatcctagtatatagtacctagtattataggtactataaaccctaattttttttatttaagtacattttgctttttaaagttgatttttttctattgtttttagaaaaaataaaataactggcaaatatatcattgagccaaatcttaaaaaaaaaaaaaaaaaggtcgagccggccggctaattagtagtagtaggcgccgc

SEQ ID NO: 5547 - DNA, 2824 bp, Homo sapiens
ccacgcgtccgccattctcctgcctcagcctcctgagtagctgggactacaggcgcccgccaccacacccggctaactttttttgtatttttagtagaaacattgtttcaccacgttagccaggatggtctcgatctcctgacctcgtgatccgcctgcctcggcctcccaaagtgctgggattacaggcgtgagccactgcacccagccgagtgagaatttttatgccataaaaatacgactctgaaagctacatggaaaaggagaatcccacctccttgcactacattgaaacaagcaagcctttccctccctctcctttttgatgttttcttgtcccaagacaaaagtttggcatcttggaacttattcatgctctctggctgcctttgtagacttttggagtcctttgcaaggtttggtggtctcgtcgttaatctggagaaattccccagaatctgtctcaaagcgctcaacctggctcagaggacacccagcccctatgccccactcacaagagaggtgggcaagcccccagggataggaggaagtaagcaggatcctccctgtcctgtttcccagaaccagagcaaggaatggggaatcctaagggtttctgtggcatcactgaatgtcacccactccacatcaacctgcctctcacctgccaccctttttcagggaggtgagtacctgccatggtcactgttaccagatccttaaaatcctgggctctgagctaggtgcattgctctgttacccatttcctacatttgtttgtttgttcttgatttcctgggggaatgggactgatggagacagacaaacccactgtgggcagcatctaagccatgtccaaggttggtcgaattaagggaaccctggcctctcagcaggacagaaagctgagctgtggttccaggccctcctctctgggcccctggtgtgtatcttttttccttgttgcttttgaaatttttgcaattattttaagaatccagtctttcagaccagcccttttattaagctttgaatttttaattgatttttttaaagtaaaaaaaaaaaaaacccaaaaaacaaacaaaatttaacaaaaaaatccgctactcttactcccctgcctccccctaccccagcccatgagagttcccttgcactcccctctgcctttgcaactgatcatcctccctttctccttggcttgaagcatctatgtccagtatctgtgaaatgatgttttatctgtgtgtcaggatgagaaacggcagtcattccaccaagtgttggaaactggttagcctggagacaagggtttctggggccacagctcagggatgtgtatttaattacaggatccccagaaactcctctctaggctgccacagcaacattttttctgggcttgggagccatacctgaactgtttcctccaaggcgggaactccagagagcctgccaagtctggagcaagctggggcttctgctttggccagacctgggccaccatgagacttgaaggcttctagctgtcctacgacacgagccacggtggccctgcctctccccgctcatagaagcctggtccctctgtctagcccagttcccatctagcatccgtcttctgggcctgaagccctaaatggaccacagcctgcacaggaatcaactgtaggctcaaagggaggcggtgagtaaggtcagagcctgctccaagcccaagaacaaaagttgtgttatgggtggaggctagtcccccagatctagccctgccgtctttgccctttaatgaccattgttttctttctctaaaatgtcttgtaataggtgataatgttgttgattcaaatttccatgaaaaaaaaaaaaaaaactacctcttaagcgacatcctggtcgattcctctctgaggaatcctgtgggaaaagaatactgtagctcctgctctgtttacatgtttctgtcgggaaagaagccccgcctgccctggggtgttggtgtttttgtctgtgttgccatcccaggtctgccataggggctggtggctgcattgtgatgtctgggctgtgtctggggattccttcccacctacccagccagggactagtcacccccctgaagaggcctccatttccttcctgtgctccagggcatagggagcaccactcccacagacaccacctttaagggctctagtggcacacacatccacgagcctacccccaggttacctgccctaggtccacctccacccacagtcctgtgtgtaggaatcgaggaaacgggatgtccctgagcccttgtctccaaagggccggccaagggctgcccgccagcctgactccatcaaccctccatgaccaaatgatagctggcgggctctgcaggctacccaggccctctgctacctcccaccctgccagctggcaagggatgggccctgttctgtgaattgactacctgtggaaatgtgaccaattagtgtgaaatgcatgtttagcaagtgttaggtactgtatttgaaccaataaatgtgaatccttctgcaaaaaaaaaaaaaaaaaaagaaaccagaccatacacaagacgggggagcgccgctgaatagagaacccggaaggggcgccaaagtaatcggggtcaccaccctttgtgcaaacaacggggggccccctaagggtaggggccgactcatacagcgagcacgtcgcgcgggtaaacaaggtacaggcgtagcacacacgcaacagggaacatgtggaaagagacacaatgagggggcagaacagggcaacacacagcaagattagacagccgaggaaa

SEQ ID NO: 5548 - DNA, 1483 bp, Homo sapiens
ttttttttttttttgtttgtttgggttttttttttttttttccctgatctctgcattgggaaggaaaatgcaaaagtggaaagagttggagagaagagggaaaaaaaaaaaaaaaacccaaacaaacaaaagcacccaggcacccagtctgagttctgggcaactgatacgcctgtttcagcaggctttcttttttttcaatgaatgggaattgcaaatcaactggattttcattatttccttttaatttatatatggagaaatgtgaagagcgaaaggaaatggaaagagaaagagaaagggagataaaaatagtgaaaataagagcctccaggctcagaagaactgattacattcttaaggtgaacaggaaaaatacaatctataactttctttgatgaggaaaaattaagtttacatttttcatatttagtgttaaacaatttaatgtagattaaaataaaagaccagtattaggaggaaaaaacaagtgcctaaatgtcttaatgctctctatgtgagacagaaatagacgtgaccattagtaatgcaactatttttgtcaaatttagtgggattttttggttgttgtttgttttcttgggtttttttttttaaatgacaaactctaaaaatgtaccaatgtgaaaaaacactttcctgaatgccattactcatgccctcaaagctttcatatctgtagcctactcctgtaaagggtttctcctgtttctagtttctagtttgcaaaggtatgccaacgaatctggcaacctggtatttgttactaaaacagcatgtgttttcaggtttcttttctattgtacctaaagcagtctaaattaaaacttagtagaacaccaggagtatgattctgtttctgaaaggtgagtggtgtattgctgtcattgggccctatttttttttttaaatatatttttctttcttacttaatggtggctgtgaattgcagggtactttgaaggccatcatctgaaccaagagtagtaactagattaattatatgacagaaagagtgaatttagccttggggtatttattaacttctattatttagatatgcaattttgtttaccactatctcttcacagcattcatatgttaactaagctcttttgtgttaacaagtttatgacaagactgtgaaagtaaaaataatttatctgcttgaagacaaaaaagggaaggagaacaaggatagaaacattgtgaattaatttgtacaaatagaaagcagaccagcaggacaggagctcttttgcagtgctgccggatggtgtctagaaaaatcccagtaatcatgtaggctccatattatttttgcctggggcaaaatgatgtatcttctgtatttagcttttaaaattagtgaaacaaatggcattatttattaaaattctactcaggataacaaaaaaaaaaaaaaaaaaaaaaaaaaaaaaaaactcgagggggggcccgg

SEQ ID NO: 5549 - DNA, 1695 bp, Homo sapiens
agcggacttttgaaaggcacgagggggaagtgctgttggagccgctgtggttgctgtccgcggagtggaagcgcgtgcttttgtttgtgtccctggccatggcgctgcagctctcccgggagcagggaatcaccctgcgcgggagcgccgaaatcgtggccgagttcttctcattcggcatcaacagcattttatatcagcgtggcatatatccatctgaaacctttactcgagtgcagaaatacggactcaccttgcttgtaactactgatcttgagctcataaaatacctaaataatgtggtggaacaactgaaagattggttatacaagtgttcagttcagaaactggttgtagttatctcaaatattgaaagtggtgaggtcctggaaagatggcagtttgatattgagtgtgacaagactgcaaaagatgacagtgcacccagagaaaagtctcagaaagctatccaggatgaaatccgttcagtgatcagacagatcacagctacggtgacatttctgccactgttggaagtttcttgttcatttgatctgctgatttatacagacaaagatttggttgtacctgaaaaatgggaagagtcgggaccacagtttattaccaattctgaggaagtccgccttcgttcatttactactacaatccacaaagtaaatagcatggtggcctacaaaattcctgtcaatgactgaggatgacatgaggaaaataatgtaattgtaattttgaaatgtggttttcctgaaatcaggtcatctatagttgatatgttttatttcattggttaatttttacatggagaaaaccaaaatgatacttactgaactgtgtgtaattgttcctttatttttttggtacctatttgacttaccatggagttaacatcatgaatttattgcacattgttcaaaaggaaccaggaggtttttttgtcaacattgtgatgtatattcctttgaagatagtaactgtagatggaaaaacttgtgctataaagctagatgctttcctaaatcagatgttttggtcaagtagtttgactcagtataggtagggagatatttaagtataaaatacaacaaaggaagtctaaatattcagaatctttgttaaggtcctgaaagtaactcataatctataaacaatgaaatattgctgtatagctccttttgaccttcatttcatgtatagttttccctattgaatcagtttccaattatttgactttaatttatgtaacttgaacctatgaagcaatggatatttgtactgtttaatgttctgtgatacagaactcttaaaaatgttttttcatgtgttttataaaatcaagttttaagtgaaagtgaggaaataaagttaagtttgttttaaaaaaaaaaaaaaaaaaaaaaatactggtttggtgttgatatagttaaatggtaattagaattgattcagcatagctaatgaattcttgttcctacgaggttatagaacttaagggtccaaagttgagtgagtcttgaggtgtcttcaatctaatggataaactttgatcacatcctgttcatctcttagcaatagacttaaaggctattacctcacttatttgggaaaaagataaaatgccccttttggaattaagtcccaacaattccccggttggaacaaggtggttggaattta

SEQ ID NO: 5550 - DNA, 1958 bp, Homo sapiens
agcgggcctcccgttccctccgccctcaacgtacgtcgcaccgcctctctgtagccgcccgcggagcatcgcagccggcccgggcccccgccagcctccctcctcgcgtccctcggtgtcctccgcgggccggcgcgatgcggctgggcccgaggaccgcggcgttggggctgctgctgctgtgcgccgccgcggccggcgccggcaaggccgaggagctgcactacccgctgggcgagcgccgcagcgactacgaccgcgaggcgctgctgggcgtccaggaagatgtggatgaatatgttaaactcggccacgaagagcagcaaaaaagactgcaggcgatcataacagaaaatcgacttggactcagatggctttctcactgaaagtgaactcagttcatggattcagatgtcttttaagcattatgctatgcaagaagcaaaacaacagtttgttgaatatgataaaaacagtgatgatactgtgacttgggatgaatataacattcagatgtatgatcgtgtgattgactttgatgagaacactgctctggatgatgcagaagaggagtcctttaggaagcttcacttaaaggacaagaagcgatttgaaaaagctaaccaggattcaggtcccggtttgagtcttgaagaatttattgcttttgagcatcctgaagaagttgattatatgacggaatttgtcattcaagaagctttagaagaacatgacaaaaatggtgatggatttgttagtttggaagaaatttcttggtgattacaggtgggatccaactgcaaatgaagatccagaatggatacttgttgagaaagacagattcgtgaatgattatgacaaagataacgatggcaggcttgatcccccaagagctgttaccttgggtagtacctaataatcagggcattgcacaagaggaggcgcttcatctaattgatgaaatggatttgaatggtgacaaaaagctctctgaagaagagattctggaaaacccggacttgtttctcaccagtgaagccacagattatggcagacagctccatgatgactatttctatcatgatgagctttaatctccgagcctgtctcagtagagtactggctccttttataatttgttaccagctttacttttgtgataaaatattgatgttgtattttacactcttaagtcttaaccacagtcagaattatcttaatgtagattataattttggtcttttaggaaaaaaaaacaaaaatctgatatttatttcaaaacgtattgaagcaacaaaatattaatattgtgccatatgacaacaaagtctttcctaaatactccatctgtttagtactgtattgtggaatatttgagttctatttccatacttgaaaacatggaggattttagagatgcctgaacaatattatttaagtagtatgtgaccgagctataaatttttgtttttgttctaagtagatttaatttgggaactgacaggacaatgtttttaggtttagcattttgtttaaaaacctttaaagaaacctttagaaggacttagacctcacatattaatgttgagaagttctgcttaattttaaaatggtttctataaagggttttattgtatgaaatagaactttatatttttgcatatgtatagatagtaattatatttaatgtataactatagcattatggtgagtggaatttgacattgtccaaacctttttcatttttgagtgattaaaaatgaaatgtcctttgtaaaaaaaaaaaaaaaaaaaattaacacacaaacgaccatccaccaccacacaaacaacaaagagggggggggcaaacttccggggcaccaatccccacttttttgagccccccgtgatcaaataaaagccgcggcacaacaggcgaaacaccctcttcagaacctctgcgttatcaccccatt

SEQ ID NO: 5551 - DNA, 2101 bp, Homo sapiens
cggggaaggggagggaggagggggacgagggctctggcgggtttggaggggctgaacatcgcggggtgttctggtgtcccccgccccgcctctccaaaaagctacaccgacgcggaccgcggcggcgtcctccctcgccctcgcttcacctcgcgggctccgaatgcggggagctcggatgtccggtttcctgtgaggcttttacctgacacccgccgcctttccccggcactggctgggagggcgccctgcaaagttgggaacgcggagccccggacccgctcccgccgcctccggctcgcccagggggggtcgccgggaggagcccgggggagagggaccaggaggggcccgcggcctcgcaggggcgcccgcgcccccacccctgcccccgccagcggaccggtcccccacccccggtccttccaccatgcacttgctgggcttcttctctgtggcgtgttctctgctcgccgctgcgctgctcccgggtcctcgcgaggcgcccgccgccgccgccgccttcgagtccggactcgacctctcggacgcggagcccgacgcgggcgaggccacggcttatgcaagcaaagatctggaggagcagttacggtctgtgtccagtgtagatgaactcatgactgtactctacccagaatattggaaaatgtacaagtgtcagctaaggaaaggaggctggcaacataacagagaacaggccaacctcaactcaaggacagaagagactataaaatttgctgcagcacattataatacagagatcttgaaaagtattgataatgagtggagaaagactcaatgcatgccacgggaggtgtgtatagatgtggggaaggagtttggagtcgcgacaaacaccttctttaaacctccatgtgtgtccgtctacagatgtgggggttgctgcaatagtgaggggctgcagtgcatgaacaccagcacgagctacctcagcaagacgttatttgaaattacagtgcctctctctcaaggccccaaaccagtaacaatcagttttgccaatcacacttcctgccgatgcatgtctaaactggatgtttacagacaagttcattccattattagacgttccctgccagcaacactaccacagtgtcaggcagcgaacaagacctgccccaccaattacatgtggaataatcacatctgcagatgcctggctcaggaagattttatgttttcctcggatgctggagatgactcaacagatggattccatgacatctgtggaccaaacaaggagctggatgaagagacctgtcagtgtgtctgcagagcggggcttcggcctgccagctgtggaccccacaaagaactagacagaaactcatgccagtgtgtctgtaaaaacaaactcttccccagccaatgtggggccaaccgagaatttgatgaaaacacatgccagtgtgtatgtaaaagaacctgccccagaaatcaacccctaaatcctggaaaatgtgcctgtgaatgtacagaaagtccacagaaatgcttgttaaaaggaaagaagttccaccaccaaacatgcagctgttacagacggccatgtacgaaccgccagaaggcttgtgagccaggattttcatatagtgaagaagtgtgtcgttgtgtcccttcatattggaaaagaccacaaatgagctaagattgtactgttttccagttcatcgattttctattatggaaaactgtgttgccacacaagaactgtcttgtgaaacagagagacccttgtgggtccatgctaacaaagacaaaagtctgtctttcctgaaccatgtggataactttacagaaatggactggagctcatctgcaaaaggcctcttgtaaagactggttttctgccaatgaccaaacagccaagattttcctcttgtgatttctttaaaagaatgactatataatttatttccactaaaaatattgtttctgcattcatttttatagcaacaacaattggtaaaactcactgtgatcaatatttttatatcatgcaaaatatgtttaaaataaaatgaaaattgtattataaaaaaaaaaaaaaaaaaaaaaa

SEQ ID NO: 5552 - DNA, 2850 bp, Homo sapiens
cgagggccccagccggggaggcgccgccgccgagcccgcggccagacgccccatcagtagcgtccgcaccgggagccgcggctctcgcccgagccgtgggcgcgcccgaggggcgggctcgcctcccgccgtccctcgcagctctgccgggcccgagcccgcgccgccgccgccgccgccttgccgctcgggccgcgcggcccgggaaacgcggccgcgggctgcatgggcagcgcccgcgccccgccgctgagccgtcgcggagccgcgcagccctcggagcacgaatatatacagccctgctctgggacacacctccattggatttaaaagacagtcctcgtcagcactgactttcagctatggaatcgcagacggttgatgatgaagcgccggccgtgtaaatgaagatcgggtgaggagcaggacgatgcccaagggtgggtgccctaaagcaccacagcaggaagagcttcccctcagcagcgacatggtggagaagcagactgggaaaaaggataaagataaagtttctctaaccaagaccccaaaactggagcgtggcgatggcgggaaggaggtgagggagcgagccagcaagcggaagctgctcgattcaccgcgggcgccagatggaggtagctagaaggactcggacacagagaagcagggccctgagcggaagaggattaagaaggagcctgtcacccggaaggccgggctgctgtttggcatggggctgtctggaatccgagccggctaccccctctccgagcgccagcaggtggcccttctcatgcagatgacggccgaggagtctgccaacagcccagtggacacaacaccaaagcacccctcccagtctacagtgtgtcagaagggaacgcccaactctgcctcaaaaaccaaagataaagtgaacaagagaaacgagcgtggagagacccgcctgcaccgagccgccatccgcggggacgcccggcgcatcaaagagctcatcagcgagggggcagacgtcaacgtcaaggacttcgcaggctggacggcgctgcacgaggcctgtaaccggggctactacgacgtcgcgaagcagctgctggctgcaggtgcggaggtgaacaccaagggcctagatgacgacacgcctttgcacgacgctgccaacaacgggcactacaaggtggtgaagcttgctggctgcgggtaccggaggggaacccgccagccaaagcaaccagggaaagggcgaggaacgcgcgcttgaaaatgggaccaaactttcccccacgatggtgaacctcctgttaggcaaaggcacttacacttccagcgaggagagctcgacggagagctcagaagaggaagacgcaccatccttcgcaccttccagttcagtcgacggcaacaacacggactccgagttcgaaaaaggcctcaagcacaaggccaagaacccagagccacagaaggccacggcccccgtcaaggacgagtatgagtttgatgaggacgacgagcaggacagggttcctccggtggacgacaagcacctattgaaaaaggactacagaaaagaaacgaaatccaatagttttatctctatacccaaaatggaggttaaaagttacactaaaaataacacgattgcaccaaagaaagcgtcccatcgtatcctgtcagacacgtcggacgaggaggacgcgagtgtcaccgtggggacaggagagaagctgagactctcggcacatacgatattgcctggtagtaagacacgagagccttctaatgccaagcagcagaaggaaaaaaataaagtgaaaaagaagcgaaagaaagaaacaaaaggcagagaggttcgcttcggaaagcggagcgacaagttctgctcctcggagtcggagagcgagtcctcagagagtggggaggatgacagggactctctggggagctctggctgcctcaaggggtccccgctggtgctgaaggacccctccctgttcagctccctctctgcctcctccacctcgtctcacgggagctctgccgcccagaagcagaaccccagccacacagaccagcacaccaagcactggcggacagacaattggaaaaccatttcttccccggcttggtcagaggtcagttctttatcagactccacaaggacgagactgacaagcgagtctgactactcctctgagggctccagtgtggaatcgctgaagccagtgaggaagaggcaggagcacaggaagcgagcctccctgtcggagaagaagagccccttcctgtccagcgcggagggcgctgtccccaaactggacaaggaggggaaagttgtcaaaaaacataaaacaaaacacaaacacaaaaacaaggagaagggacagtgttccatcagccaagagctgaagttgaaaagttttacttacgaatatgaggactccaagcagaagtcagataaggctatactgttagagaatgatctttccactgaaaacaagctaaaagtgttaaagcacgatcgcgaccactttaaaaaagaagagaaacttagcaaaatgaaaaaaaaaaaaaaaaaatggctctttaaagatgaaaaatcactgaagagaatcaaagacacaaacaaagacatcagcaggtctttccgagaagagaaagaccgttcgaataaagcagaaaaggagagatcgctgaaggaaaagtctccgaaagaagaaaaactgagactgtacaaagaggagagaaagaagaaatcaaaagaccggccctcaaaattagagaagaagaatgatttaaaaagaggacaaaatttcaaaagagagggagaagatttttaaagaagat

SEQ ID NO: 5553 - DNA, 1828 bp, Homo sapiens
gagaggtcgtagcccttctctaaaaagtctcagttcggaagcctctccagggaccataggagaataggggacatccaagaatacgaaaacatcaggcattaaccgcgcccaatccaggacagggattcctttggcgggaacctgccaagtacagaactcccaccagttctaatcgccttcaagataatacacagatcttcttggtgttgtggacaagagaacccagttttggcgctactttgcaggaatctggcatcgggtggtgccgcagggccaacatcccctgtgttttgtgtaccctcttgattgtgcccgtacccgtctaccagctgatgtgggtaaagctggagctgaaagggaattccgaggcctcggtgactgcctggttaagatctacaaatctgatgggattaagggcctgtaccaaggctttaacgtgtctgtgcagggtattatcatctaccgagccgcctacttcggtatctatgacactgcaaagggaatgcttccggatcccaagaacactcacatcgtcatcagctggatgatcgcacagactgtcactgctgttgccgggttgacttcctatccatttgacaccgttcgccgcggcatgatgatgcagtcagggcgcaaaggaactgacatcatgtacacaggcacgcttgactgctggcggaagattgctcgtgatgaaggaggcaaagcttttttcaagggtgcatggtccaatgttctcagaggcatgggtggtgcttttgtgcttgtcttgtatgatgaaatcaagaagtacacataagttatttcctaggatttttccccctgtgaacaggcatgttgtattatataacatatcttgagcattcttgacagactcctggctgtcagtttctcagtggcaactatttactggttgaaaatgggaagcaataatattcatctgaccagttttctcttaaagccatttccatgatgatgatgataggggactcaattgtattttttatttcagtcactcctgataaataacaaatttggagaaataaaaatatctaaaataaaaaaaaaaaaaaaaaaattttcatataaaaaaaaaaaaaaaaaaaaaaaaaaaggggggggcgcggccgggattaaaatagtttttttttttttttttttccggtatatttttttttttgtgtgttttaaaacccccgttttttggtaccccgcggtggtgaatcacccttgatatcccggtgacaccagcaacaacttggggtggggttccctggacaaaaggggcttcaggaaacctccgtgatggggagcaacagctggggaaaaagaggagctcctctacaaaagaggcggggccacagagaccttggaagggtccaagaaaaaggtgcccaaaaggggggcccggggaaacttcccccagggtggtaaagtgacacccccggttgagtcgttggacaagtcttatcagatacccacgccctcagaagaagggttttttaaggaccagggtgggagacaacgatagccgagggcccccttggtaccgagggaatatacgtacaccaacactaaagcgagagcagatgtacctcttgaaggggacatgtgtggtgtgccgatttgtgtccccccacaactgcgaccgggaaaaggaacattgcaggaatatgcccgggtggggggaccctgggaggagagtaaagagaggcggccaagacccagagccagtacacacgattttaaaggcgccataggatatcagcaggcagcaggaggaaactgcatgcgacatgtggctggaccacatgcacagtctgacctg

SEQ ID NO: 5554 - DNA, 2020 bp, Homo sapiens
  misc_feature (635)..(647): n is a, c, g, or t
cgcgcacggtagctgggttggggtcgggctccgggaatggtgggcggcggtcgccgggtggggcgcgacggtagcccagttctgggcggggtgggaacccagacgggggacccctaggcgccgggccctccctctccccgtacttttcccccttcccagtcatttcttctgcggaacctccacccctccagtgggtgcgggaccctaggcagcaggccaggcaccgccgctctgactgggggccccgaagcagttaacgggccggacagcaaagtggaaagttagaccagctgggaccaggggaggtgggcacccggctgcgggaggagcggccaggctggcactgcccccctaacttgctctcgatcctgccggtctcgtcccgcagagccggtgccatctgtgggggctttgggccaggggtctccggacagcatgagcgtgggcttcatcggcgctggccagctggcttttgccctggccaagggcttcacagcagcaggcgtcttggctgcccacaagataatggctagctccccagacatggacctggccacagtttctgctctcaggaagatgggggtgaagttgacaccccacaacaaggagacggtgcagcacagtgatgtgctctnnnnnnnnnnnnngccacacatcatccccttcatcctggatgaaataggcgccgacattgaggacagacacattgtggtgtcctgcgcggccggcgtcaccatcagctccattgagaagaagctgtcagcgtttcggccagcccccagggtcatccgctgcatgaccaacactccagtcgtggtgcgggagggggccaccgtgtatgccacaggcacgcacgcccaggtggaggacgggaggctcatggagcagctgctgagcagcgtgggcttctgcacggaggtggaagaggacctgattgatgccgtcacggggctcagtggcagcggccccgcctacgcattcacagccctggatgccctggctgatgggggtgtgaagatgggacttccaaggcgcctggcagtccgcctcggggcccaggccctcctgggggctgccaagatgctgctgcactcagaacagcacccaggccagctcaaggacaacgtcagctctcctggtggggccaccatccatgccttgcatgtgctggagagtgggggcttccgctccctgctcatcaacgctgtggaggcctcctgcatccgcacacgggagctgcagtccatggctgaccaggagcaggtgtcaccagccgccatcaagaagaccatcctggacaaggaccaccttcctctagagctcgggagcccggagggtcttcacccactcctactccagtatcagctggcacgggctccttcctgagagcaaaggtcaaggaccccctctgtgaaggctcagcagaggtgggatcccacgccccctcccggcccctccctgccctccattcagggagaaacctctccttcccgtgtgagaagggccagagggtccaggcatcccaagtccagcgaaaggggccacagcccctcttggctgccaagcacgcagatcccatggacatttggggaaagggctccttgggctgctggtgaacttctgtggccaccacctcctgctcctgacctccctgggagggtgctatcagttctgtcctggccctttcagttttataagttggtttccagcccccagtgtcctgacttctgtctgccacatgaggagggaggccctgcctgtgtgggagggtggttactgtgggtggaatagtggaggccttcaactgattagacaaggcccgcccacatcttggagggcatctgccttactgattaaaatgtcaatgtaatctaaaaaaaaaaaaaaaaaaaaaaaaaaaaaaaaaaaaaaaaaaaaaaaaaaaaaagaaaatgtattggataataaatttttgtttaaaaaaaaatctctgggggggggcccggcccatagaatccctaatagggacttttttcaaaag

SEQ ID NO: 5555 - DNA, 2557 bp, Homo sapiens
  misc_feature (1248)..(1263): n is a, c, g, or t
  misc_feature (2502)..(2537): n is a, c, g, or t
atgtaaggagtgctaccgcttacaggccacacactgttccttcatcatcattgtccccaatgactggtatgaaaaattgagttgagacctgcccaaggtcagacagctagtaagtggcaggacacagatacgaactcaggtaggaaattcagaaggatctaaagtaaaggggacacttggaggctgaaaaatacccaaacgtaagaagactgaggagccctggggtgagcagcagagttgtgttgcagaacgtgatgaggattagggctcagcaggtgtcagccatggctgggcctcctccaggctgtctcctaggatatctgggccattgtaggtcacagtttctttcctgcctccctcccttcttccattcctctttcctcttccttctccctttatgttttcctttcttctcccagattttctctttcttttgcgtgtatgtgatctccccatcttcactttctttctttgtaatagaatggtccatctattcagccagctgttgatcctagcctttgagctttgagcaaatcttttttttttttttttgagacggagtcttgctctgtcactgcgcaaggctagagtgcagtggcgcaatctcagctcactgcaacctctgcctccctgggttcaagtgattctcttgcctcagcctcctgagtaactgggattacaggcatgtgccaccacacctggctaatttttgtatttttagtagagacggggtttcaccatgttggccaggctggtctcgaactcctgacctcaggtgatctgcctgccttggcctcccaaagttctgggattataggcatgagccactgcactcagcccctttgagcaaattttagcacatacagagaggctgtgtagacagacctaaacatggtccctgttttttaggagtttatcctccactttcagttttgttatgggaagcagcttcccctactcacagaaattgtttatgcaacctatagcatcacctctgctcctgaaccaaacatggagtccacaccctaactctgagggtgcctgtaagagtccttagaacatagcagtaatatagacacccaactggataagcctcttcctctccctcaccccaaacccccctatccctcttgaggggttgttttggggaccactcctggtacctgtctgacctcaggatgcaggccctggagtcctctgttccctgtgttcaccaggtgtacagcagatagtgaggtcaagacctgnnnnnnnnnnnnnnnnaacaaagaaggaaaagatctatttaaggaagcagttcagcagttgtcttctgtgtacagaaaagtcagggagaggctggtctgtgggtacaggcagcacctgggaaccaggatgaaattcagaaatttccacactgttctctggtaccaacatctgtggccactgaagcccgtcagagggaccaaacctgtattttcctgaagcaggagtgggtctttggggcaagtttttgttgccccaaagaaggtggatgggggcatccaccttcttcccaccttggccagttatcccagcaagaagctaaaaccaaggctggcatgggcctggctgtcagcctcgcctttctgggggcatttctttcctccattgctgctggcctgccctgcatcagggcccccaccttcctcagggctttcggtgcatctggggttgatggttctctgtctctctctctccagggccaggtctggattaatggctttaaccttggccgctattggccagcccggggccctcagttgaccttgtttgtgccccagcacatcctgatgacctcggccccaaacaccatcaccgtgctggaactggagtgggcaccctgcagcagtgatgatccagaactatgtgctgtgacgttcgtggacaggccagttattggctcatctgtgacctacgatcatccctccaaacctgttgaaaaaagactcatgcccccacccccgcaaaaaaacaaagattcatggctggaccatgtatgatgatgaaagcctgtgtctttgagggattctaccctgaacatacctcacagatcctccctgtcatgccacatttcactgattggaatgtggaaatggaaaaggaatttaggatgtgcattttcacctgaggtttccctgcatccctgcagtgccaaagccccaccttcagggaccacctggaatgtgtgaggggctgacagcacagtaacgtgcatacatatctgcagggctggaatggaagctttaaaggtggtagtgatttttattttggaagaatcatgttacctttttgttaaataaaatttgtactcaaaaaaaaaaaaaaaaaaatttttaatgtgcacgtattgaattatatggtctgacttaaattataactagacttgagtgggctgaataacccaattacctacttggaagttacaaaggatgaaataaagaataaaaattgggccttgttggctctcacggtggaactttnnnnnnnnnnnnnnnnnnnnnnnnnnnnnnnnnnnngtacggctcgtgggctgggg

SEQ ID NO: 5556 - DNA, 5085 bp, Homo sapiens
  misc_feature (1669)..(1690): n is a, c, g, or t
  misc_feature (5072)..(5074): n is a, c, g, or t
tacggctgcgagaagacgacagaagggggagggaggcacaggcgcttgctttgcaggagtcagctctgccttcctcggctggagtgtgggtggcttggtgagccggtggtcaggaattctctctcctccttgcaattttcctttctgtctgggagcacgccaagatgtcccttgtgactgtccccttctaccagaagagacataggcacttcgaccagtcctaccgtaatattcaaacacggtacctgctggacgaatatgcgtcaaaaaagcgagcttccacccaggcatcttcccagaagtccttgagtcagcggtcgtcttcacagagagcctccagccagacgtccctgggaggaaccatctgcagggtctgtgcgaagcgagtgagcacgcaggaagatgaggagcaggagaacagaagcaggtaccagtccctggtggccgcctatggtgaggccaagcgacacggcttcctcagcgagctggcccacttggaggaggatgtccacctggcacgctcccaggcccgcgacaagctggacaaatacgccattcagcagatgatggaggacaagctggcctgggagagacacacatttgaagagcggataagcagggctcctgagatcctggtgcggctgcgatcccacaccgtctgggagaggatgtctgtgaaactctgcttcaccgtgcaaggatttcccacgcccgtggtgcagtggtacaaagatggcagtctgatttgccaggcggctgaaccgggaaagtacaggattgagagcaactatggcgtacacacactggagatcaacagggcagactttgacgacactgcgacatactcagcagtggccaccaatgcccacggacaagtgtccaccaacgcggcggtggtggtgagaaggttccggggagacgaggaaccattccgttcggtgggactcccgattggattgcccctgtcatcgatgattccgtacacgcacttcgacgtccagtttttggagaagtttggggtcaccttcaggagggaaggcgagacggtcactctcaagtgcaccatgctggtgacgccggacctgaagcgggtgcagccgcgcgccgagtggtaccgcgatgacttgctgttgaaagagtccaagtggacgaagatgttctttggagaaggccaggcctccctgtccttcagccacctgcacaaggacgacgagggcctgtacaccctgcgcatcgtgtctcggggcggcgtcacggaccacagcgccttcctgtttgtcagagatgctgacccgctggtcacaggggcccccggtgcacccatggacttgcagtgccacgacgccaaccgggactacgtcatcgtgacctggaagccgcccaacaccaccactgagagccccgtcatgggctattttgtggaccgatgtgaagtaggaacgaataattgggtgcagtgcaatgatgcaccggtgaaaatctgcaaatacccggtcacagggctttttgaaggaaggtcttacatattccgagtgagggcagtgaacagtgcgggcatcagccgaccctccagggtctctgatgcggtggctgcacttgaccccttggacctcagaaggttacaagccgttcatttggagggagagaaggagattgccatttatcaggnnnnnnnnnnnnnnnnnnnnnnggttccagggcctcccaccggtgtgcacgcttccgagatcagcagaaactatgtcgtcctcagctgggagccacccactccccgtggcaaggacccgctcatgtacttcattgagaagtcggtggtggggagcggcacgtggcagagagtcaacgcccagacggctgtgagatccccgagatatgccgtgtttgacctcatggaagggaagtcttatgtgttccgagtgctgtcagcaaaccggcatggcctgagcgaaccttcggagataacgtcccccattcaggcccaggatgtgaccgttgtcccttctgctccgggtcgggttcttgcttcccgaaacaccaagacgtcggtggtggtgcagtgggaccgacctaagcatgaggaggacctgctgggctactacgtggactgctgtgtggccggaaccaacctctgggagccctgcaaccacaagcccatcggatacaacaggttcgtggtgcacggcttaaccacgggagagcagtacatcttccgagtcaaggcggtcaatgctgtggggatgagtgaaaattcccaggaatcagacgtcataaaagtgcaggccgcactcaccgtcccgtcccatccttatgggattacgctcctcaactgtgacggccactccatgaccctcggctggaaggtcccgaaattcagtggtggctcgcccatcctgggctactacctggacaagcgtgaagttcaccataaaaactggcacgaggtcaattcctcacccagcaaaccgacaatcctaacggtggacggcttgacggaaggctcactctacgagttcaaaatcgccgccgtcaacctggccggcatcggggagccctcagatcccagtgagcacttcaagtgtgaggcctggaccatgccggagcccggtcctgcctacgacttgacgttctgtgaggtcagggacacgtccttggtcatgctgtggaaggcccctgtgtactccggcagcagccctgtttctggatatttcgtggacttcagggaggaggatgctggagagtggatcactgtcgatcagacgacaacagccagccgttatttaaaggtctctgacctgcagcaaggtaagacctatgtcttcagggtccgggcagtcaatgcaaatggcgtggggaagccctcagacacgtcggagcctgtgctggtagaggcgagaccaggcaccaaggaaatcagtgctggtgtcgatgaacagggcaacatctatctgggcttcgactgccaggaaatgacagacgcgtctcagttcacctggtgtaaatcctacgaggagatttcagatgatgagaggtttaaaatcgaaaccgtgggggatcactccaagctgtacttaaagaatccggataaggaggatttagggacttactccgtgtctgtaagtgatacagacggagtgtcctccagttttgttctggacccagaagagctcgagcgtttgatggcattgagcaatgaaataaagaaccccacaattcctctgaaatcggaattagcttatgagatttttgataaggggcgggttcgcttctggctccaggctgagcacttatcaccagatgccagctaccgatttattattaatgacagagaagtctctgacagcgagatacacagaattaaatgtgacaaagctactggcattattgagatggtgatggatcgatttagtattgaaaatgaggggacctacactgtgcagattcatgatgggaaagccaaaagtcagtcttctctagttcttattggagatgcattcaagactgtgctggaagaggctgagtttcaaaggaaagaatttctcaggaaacaaggccctcattttgctgagtacttgcactgggatgtcacggaagaatgtgaagttcgacttgtttgcaaggttgcaaacaccaagaaagaaaccgttttcaaatggctcaaggatgatgctctgtatgaaacggagacactgcctaacctggagaggggaatctgtgagctcctcatcccaaagttgtcaaagaaggaccacggtgaatacaaggcaaccttgaaagatgacagaggccaagatgtgtccatccttgaaatagctggcaaagtgtatgatgatatgattttggcaatgagtagagtctgtgggaaatctgcttcgccactgaaggtactctgcaccccagaaggaatacgacttcagtgtttcatgaagtattttacagacgaaatgaaagtgaactggtgtcacaaagatgctaagatctcatccagtgagcatatgagaatcggggggagtgaagagatggcttgctgcagatatgtgagccgactgagaaggataaaggaaaatacacttttgagattttcgatggcaaagacaaccatcaacgctcccttgacctgtccggacaagctttgatagcagtttgctagaatgtccacgcggattcaaagctgctgcttttgcagagaagaatcgtggcaggttgatcggcggcttgcctgacgtggtgaccatcatggaagggaagaccttgaatctgacctgcacggtgtttggaaaccctgaccccgaagtgatttggttcaagaacgaccaggacatccagctcagcgagcacttctcggtgaaggtggagcaggccaagtacgtcagcatgaccatcaaaggcgtgacctccgaggactcgggcaagtacagcatcaacatcaagaataagtatggcggggagaagatcgacgtgacggtgagcgtgtacaaacacggggagaagatcccggacatggccccgccccagcaagccaagcccaagctcatccccgcgtctgcctcagcggcaggccagtgaaggcgttttcctagcctggagatgggaaaatatgcttggcagagacaggaatgctgtgtgcttgttccaaatgagcagctggcatccgagtggtgtcctgtgtgggctgatagttgatcacacattgtgcttttgatttttgcatttggtgatgaatattttatacccgtctaagggagaaagctaatgttttccacaagactgaacaacgtgtatttacacgagggtagacggcagatgcctgacagagagtgggttggcagacaacacactagcattttcacgggtgtgggcacatgggtgtggcacctggacgtgtgcagcatgtggcggtctctgtgtgaagccaccgtgcttctctttggggggccgcgagatctagcatctctgaaatcctggctgtcgaggctttgaagcatgtgttacctggttaagcttgttttctcttgctttaggcaaataaaagtttaaaaatcaaaaaaaaaaaaaaaaaaaaaaaaaaaaaaaannnaaaaaaaaaaa

SEQ ID NO: 5557 - DNA, 2789 bp, Homo sapiens
  misc_feature (1977)..(1991): n is a, c, g, or t
gggcagcctgcatggaaagggacggccagcatctgcctccactgctctgtgctgggatcatggaacttgcactgctgtgtgggctggtggtgatggctggtgtgattccaatccagggcgggatcctgaacctgaacaagatggtcaagcaagtgactgggaaaatgcccatcctctcctactggccctacggctgtcactgcggactaggtggcagaggccaacccaaagatgccacggactggtgctgccagacccatgactgctgctatgaccacctgaagacccaggggtgcagcatctacaaggactattacagatacaacttttcccaggggaacatccactgctctgacaagggaagctggtgtgagcagcagctgtgtgcctgtgacaaggaggtggccttctgcctgaagcgcaacctggacacctaccagaagcgactgcgtttctactggcggccccactgccgggggcagacccctgggtgctagaagcccacaccctctaccctgttcctcagcatggagctctggcatccccacctcagtatctaacctgaaccagcctggcttttcaaacactccggggggaggtagtcccagcctcccccggaaccctctaccaatgccttctgaccttctgaagctttccgaatcctcccagttgaggcagtagctgtgtcctctgagggtggatgggaatcttgggagaagcccaagcaagggagccctcagaggtggtgtttggaccaaagcatcggggtgggggaggggtctgccgctgtcccccacctgctggcccccttgtccttcctcaccccctccaatatagtctcggagctacaaccgcagcagccactataaagggcaatattgatctttctgtccatgtggctctatcttttaaaacctcaaggccctccactgtcctaagataaagcctctcataggcactggggaccctgcacagtctggccatgtgaccctctccccaggcaagctctgaagtccctgcaggtggaggccatgcctgtcttaaactcagttgcatccctggtgcccaaagcaacaccagaaccaagaaggagctccataaatccttcttgggtgaagcctagacaaagccgccaggtcttgtggctccaggcaccagagccttgagtactttctcctgcctccaggcattggctcagggtgaattacaaggggctactgaatggctattactttcatcacgactgatccccacctcctcagggtcaaagggctactttctggaagtctccccaggctgactccttctccctgactgcaagggctcactccctcctccaagctcccacaatgcttcatggctctgccgcttacctagcttggcctagagtggcaaatggaacttctctgatctcccccaactagactggagcccccgaaggatggagaccatgtctgtgccatctctgtttcccctgttttcccacatactaggtgctcaattcatgcctgtgaatggcgtgagcccataatggatacacagaggttgcagcagatggtgtgggtacctcacccagatatcatccaggcccaaggcccctctccctgagtgaggccaggtgttggcagccaactgctccaatctgcctccttcccctaaatactgccctggtctagtgggagctgccttccccctgccccacctctcccaccaagaggccacctgtcactcatggccaggagagtgacaccatggagggtacaattgccagctcccccgtgtctgtgcaggattgtctgggttgaatgacactctcaaattgttcctgggatcgggctgaggccaggcctctcctggaaccacctctctgcttggtctgaccccttggcctatccagttttcctggttccctcacaggtttctccagaaagtactccctcagtaaagcatttgcacaagaaaccttgtctcaggcannnnnnnnnnnnnnngagactgaagagggacaactttttcctatgaggactcccaatctgccatttgtgtgtggctagctgtttccagccagggggctgaggcacctgcagtcacccacactctgggcctgtggcaccatctgtgcctcagctgactgagcagttctgagatgtggtgactcatgtgaagtggtgtcataggaatgaaggactgtgggcgctgggttcaaattccagttctatgcaccactccaggtagggatacccatgggggcagctgtgcctgtgtgggggaacagggtagggaaatctccataccttctcaattttgctgtgaacctaaaactgccatataaagataaagtctaggccaggcatggtggctcatgcctgtaatcccaacacttagggtggctgaggcaggcagatcacctggggtcaggagttcaagaccagcctgcccaacatggcaaaacctcgtctctactaaaaatacaaaaattagccaggcatcgtggtgggtgcctgtaatcccagctattcaggaggctgaggcaggagaatcacttggacctgggaggcagaggtttcagtgagcccagatcgcgacactgcactccagcctgggcaacagagtgacactctgtctcaaaaaataaaataaaataaaataaaataaaataaaataaaataaaaaaaaaaaaaaaaaaaaaaaaaaaaaaaaaaaaaaaaaaaaaaaaaaaaaaaaaaaaaaaaaaaaaaaaaaaaaaaaaaaaaaaaaaaaaaaaaaaaaaaaaaaaaaaaaaaaaaaaa

SEQ ID NO: 5558 - DNA, 1637 bp, Homo sapiens
ggacgcgtgggcgtacgtgctgggcgacgtgcacgacagcgtcctctaccgcctgtgcctgcagccgctgccgctgcgcgctgggcccgccgccgccgcgccagagacccccgagccggccgagtgcgtggagttcaccgccgagccggccggcatgcaggacatcgtggtggccatgacggcggtgggcggctccatctgcgtcatgctggtggtcatctgcctgctggtggcctacatcaccgagaacctcatgcgcccggccctcgcgcgccccggcctgcgcagacacccctgaagcgcgaggccgcccgcccatctttgcgccacctgcctgagggcgcctgagctcccaggtcctccgcccgctctcctctcctcattcctgctgcctccttaagatccccgcggaggaggacctgccggcgacggctccggcactttggcatcatcacacgccctttccagccgggcgtcagactcccagactctggccccggattggcccctgggcttgcgctgctgtgccagccgcatccagggctctccccgctctccgcaggcctttatagaggcggccagggcatggagccccttccagcaagagccatgggcactccggctcaccccgcacctccatcctgtgccgaattgtcccagacagaccgtcgccattgctcggtcactgtgctttgcaggcctggggcgcagctctccaagcctgtcctgccccgccccaccccactgggcttaggttagcttcgtgccttagtatctcgggcccactgcaggagccaacaccctctgctgtccagggggggtctgtggccctaagattggccggcctctccatgcatctggccagcgtccccttggagacaccttcaccctcaagcgctgcagaagcatgaggtgagggcctgcagcgctctgtaccgtttagggtgttggaccagccgggagcctggcaggcctggcccagcggccagggtgagtgttctcagaccccgggcagctggtggttctccagggccaggtaccccttttgtgtgtgcgacctctgactaggtccctgtgggaatggggcagatggcggccatcaccactgggtcccagggcagaagcttagataccggccttgagcagcccgaccttccaccgctgcctggatcccaagcctcagccgacccaggggaccttggtggcaacggtgtgactgacagcaccacccctagcctttgcatgcccaggggtcgagagccagtatccggcccagacaatgccacccgccatggaagaaaagctgaccctgcccacctgctgcagacccgggccccgggccgaggttgctttctgtgacgaccgcctggtgacgctggacaccaggagggttatggcactgccctcccctcctggagcccctggcactgaccacctggacttgacctgactcctggtcactggccaaacacccatcctcaccccagccaccccgggccctggctggtgccgtgtgacacctgtagcccacctgtgtgtctttgctccgcccacccctgcgtggcgccggtcaggcgcaaacctggcgccagtgtctaaatgtccatcattctcagaccaaaaaaaaaaaaaaaaaa

SEQ ID NO: 5559 - DNA, 12010 bp, Homo sapiens; identical to SEQ ID NO: 5515
  misc_feature (2709)..(2798): n is a, c, g, or t
  misc_feature (5028)..(5048): n is a, c, g, or t
  misc_feature (6639)..(6654): n is a, c, g, or t
  misc_feature (11815)..(11819): n is a, c, g, or t

SEQ ID NO: 5560 - DNA, 1475 bp, Homo sapiens
  misc_feature (798)..(817): n is a, c, g, or t
aaccagtcccaagtgctcaggacagaggctggacgggctccttcctgcacccctgctcttgggacacagtgccctccggctctaataggccaggagttgggggggcaactggctctgctccctggccctggctccccctgctccctggggctgcccgaggtgaaggtgacaggtgggggaggcaggtggagaattgggccagtgagctcatggcaaaggcgcccagctgggcaggggtgggtgctctggcctataaagcccccgaggccctgtggcctgcagaggcggttatggacggcaccatggaggactccgaggcggtgcagagggccacagcgctcatcgagcagcggctggcacaggaggaggagaatgagaaactccgaggagacacacgccagaagctgcccatggacttgctggtgctggaggatgagaagcaccacggggctcagagtgcagccctgcagaaggtgaagggccaagagcgcgtgcgcaagacgtccctggacctgcggcgggagatcatcgatgtgggcgggatccagaacctcatcgagctgcggaagaaacgcaagcagaagaagcgggacgctctggccgcctcgcatgagccgcccccagagcccgaggagatcactggccctgtggatgaggagaccttcctgaaagctgcggtggaggggaaaatgaaggtcattgagaagttcctggctgacggggggtcagccgacacgtgcgaccagttccgtcggacagcactgcaccgagcttccctggaaggccacatggaaatcnnnnnnnnnnnnnnnnnnnntggggccactgtggacttccaggatcggctggactgcacagccatgcattgggcctgccgcgggggccacttagaggtggtgaacttctgcaaagccatggagcagacaccaatgtgagggataagctgctgagcaccccgctgcacgtggcagtccggacagggcaggtggagattgtggagcactttctatccctgggcctggaaatcaatgccagagacagggaaggggatactgccctgcatgacgctgtgaggctcaaccgctacaaaatcatcaaactgctgctcctgcatggggctgacatgatgaccaagaacctggcaggaaagaccccgacggacctggtgcagctctggcaggctgatacccggcacgccctggagcatcctgagccgggggctgagcataacgggctggaggggcctaatgatagtgggcgagagacccctcagcctgtgccagcccagtgaatgcgtgccccagcccagccagctacccagcccctctctgtgtgcagccggagggtcctaagaatggctcccggagctaactgagggcccagccttttttctgcatgatccaggagcacataccacaaactaccacaataaaaaagctgtttttgctaacaaaaaaaaaaaaaaaaaaaaaaaa

SEQ ID NO: 5561 - DNA, 1270 bp, Homo sapiens
ggaagttacccaagttggctttggaccctcggctgtctttttcgcgcgatataaatggcccccccgtggtgtttgaaccggccttgattccttcagggatggaaacacaggctggtttaaaacttcccagaccgccggcttgttcaagtaaagcatgaatgtgcttcgggccagtgaggcctgtgcaagggggaacactggccccagatacccttggccccttccagcttttactgacagagagttccaggctagacaccataaaaaccaccccttggtctccctcccttgttctgaggggctgaggctggaaatagattgtacagacaagcaagggttgagtggtggttcccacacgaagtcatctcttaaatcatcattagcaatagcagttcccttccaaggcctcccctcactcccgaaacacttacgtcccatgcaggcccaatgcaaaaaaacacatttgagcttttttcccgcagggccatgaagtccccttaagttcccatatctaagatggttgactgaccctctccccttatgtacagaagaggaaactgattctcagagaggggaagtggcttgcccgagtgtttgttaggaggttactgaatgacaaactgttcctaagaccccatctcatgctggccagagggccagcctcctcattcctgcttgctcttagaaaatctttcactgatcattttttgtcactggaataacttcaaggttattatgctttcattccaaatggatctgtcctcagctctggacccaattccccttacttcattttggcaaacactaagtcaaatagtgaaatgcctgtcactacatagaacctattacctggggcaaatacgaacagattgagtttccttcatcttgtgtaaatatgatgaaacagagacctggtaacttggtgacactgttaaaccctttttgggataaagccaaatgtaaatgaaaacattaaacagataaattgtggtgttgagacttttctgaattgagaaaaataaatgtaattttggaagaaaaaaaaaaaaaaaaagggggggggctaaaaaaaatcctgagggggccagtttaaggtaccccgttttttgtaacatgggcccaaaggaggcgtttaaagcaggaggcggggttcacagtgggtgggaaatggtttggtcttggacggcccttctgcgggattggaccacccagattaagcggaataattagtgttggaccgctttgtgttgtgtaatatttaaaaatacgt

SEQ ID NO: 5562 - DNA, 2946 bp, Homo sapiens
tcctccccccctccggcctgctctctttcttctcctcctttcatctttatcttcctctgttctcttccttccttccttctgtctctcatcgttctttcttcccttctgttctcttctttgctgtgcctctgttctcttttcctcctcctctctcttttgctgtctgtcgtcgtgccccccctccctcctttcttttcctctcttttgctcttctccgcctgtttccttctcctccctcttttttcttctccgttcttctgcgtcccccccgccccttcccttcttgttgcgttcgcgtcctgtctcccgctggtcctcgtgtctctcgcgctctgcctcttttcttcttctttcttctttgcgttcctctgtcgtgcgtcgcttttgttcttctttttttcttttttttttttttttttttttttttttttttttttttttttttttttttttttttttttttttttttttttgtcacaattcatttttattaatagaaaataaacacttattccagtttcaaagttgttatacttgaagttgctaatttaaaaaaacgaattttaaataatcacttaataatcctgctttgactaagacaatgaaatgtggctttaaaaaaaaagtattcagcaccatttgctcataggtctttcagagtttgttcttaaagtttctggaactttcctgtctgtaaagtaacaggaattactgagctacattggaaagcctctctgggacaggcagtggggagttaagcagtcatcataaaggaatcagtgtacattcagcatggtgacttgactacacaacaatcccttcccctctactgtagctcaagagagacatgcttctaaccactgaggtatgaggagtctcagactgttatttgctgttagaattggtcttcccagctaataacagtacatctctggcacagatgctattggtccttaatgtcctgtgattttaggaaatagtttggatttagttcaatttattcagaaaccaaacgtgtttaattagcttcactactctggcagagtaagggtatgctggtttagtatctttataaaatatatataatgtataggtaaatcatagtcttaaatcatacctaaaatactgtatcatttaaaccaatatctattttaacaaaatgtttataactaaaaacagctgatgaaacactaaatccaaaggtatgacaaagaggactcagctctgtgttgcttaaagaacttttaaaaggcatgtgcccataacgtcattcgaggagagggaaggagccccccttctcctcctccttactatagaattcctgttgggggtgggccagaaattagcacttctaaatatttcagagaagtccaaagtgttaaaaaaaagtcttttatgcaaaagaacgtctttctgcatcagtgaatagtaatgctcatcagaatttcctaatagcacaaaaaacaaagccaagtctatacatttgatcagatatcaaagtaatgggaggtggactattatgtcaaccttagtcagagctcctgctggcttcttcctatacactgttcaccaatttgagtaaagtggactttgtgagagaattatgtttgatggccaggacctcttttgggcatttcttcctaagtggaatacacaacacataagggagtaggggaggtaatacagggaagctactctttccagctcagaaggagttgatgaagcccatatatgcattcaagaagcccatgggatcctctagctgtggatagtggctaatgtggtcatccagaatcgacactgtggaccgcggcagcgttttcctgtacagctccaaaaactctggatagggatttacaggatccaatggcccatagataaaatgaatggggatagttacagaggcaagagctcccacccagcgccttctgaacttcttcctctgattgatgtactgtaagagactgtcaatgactaagttcccgtcattgttgcggatccctgcccacatgtcccacagctcactctcagagggccgagtatacggcccaaagactggggtgagacctcgagagaatacaaagaagttcatcagtcgtgtgaggatgggtgacagcacacctccatctttgagtagcttttggagaaggagtggacggtgagtctcaggaaagatacctccatttgacagacagagactctttatggtaagccgaccagatcgattctgcttgtacctgtagagaagctcctgagcaacaatatctccatagtcatgagaaagaaggttgatcctgcggttctggagccccagatgccgcaaaagcgcttccacgatgctggcctgctcaaatatggaatagtgatgtggtctcggtttgtcactgaagccaaagcctaagaaatcaagggcaatcacccgatgaaacctcaaggtcagaccttcccaaatcttgtaccagtcgtagctggatgttggaaaaccgtgtaaaagcacaactatctctggacttccaaccacacccacagagtcttggtagaagatacgcagtcccttgtaagtgaaaaacttgcctgaagacttccatgagtgaagggcaggggagagctgagggggtgggatgtgcaggtacgcagcaagcaggggcacggccagcagccccacctggacccaccactccctcatcctgcggaggcgatctcggcgcaccatggccgcgttatcccatgccgcccgccgcagcgttgcagagcaccgggcgccgcagagcccgcagccgtgcagagctggccagcagcgggggcgcagcccgcagcccacagcccgcgcagggcggcgccgcgccgggcagctacagccactccggcgtgcgctgcggcactgcgcttgcgaggcgcagctgccgcagaggaggtgccggggtgtgctgcctcgtgccgcccgct

SEQ ID NO: 5563 - DNA, 6682 bp, Homo sapiens
  misc_feature (2192)..(2206): n is a, c, g, or t
agcggatcctttatggttgaagggtgttggaggaagcagagttttcatcagctgctgaagtggcaactaatagaggtttgaatggccgtagaaaaatattgtgttacttgtttgttgtctaggggctcttggctttgggcctcagtgcaagtccattggaaaaggcagctgcaacaatctagtggtcaccagcagtcccatgatggttcagcgactgggactcatttcacctccagcaagccaggtctctacagcatgcaaccagatcagtcctagcttacagagggcaatgaatgcagccaacctgaatatacctccttcagataccaggtcccttatttcgcgtgagtctttggcgtccacgaccttgagtctgacggaaagtcagtcggcctcaagcatgaagcaggagtggtcccagggctacagggccctcccttcgctctccaaccacggctctcagaatggccttgatctaggggatctccttagccttcctcccgggacatccatgtccagcaatagtgtctctaactcattaccatcctacctttttggcacggaaagtagccactctccttaccctagtcctcggcactcatccaccaggtcccactcggcccgctccaagaagagagcgctgtccttgtccccgctgtccgatggcatcgggatagatttcaataccatcatccgcacgtcgcccacgtccttggtggcctacatcaacgggtcgagggcttcgccggccaacctgtccccgcagccggaggtctacgggcatttcctgggcgtgcgcggcagctgcattccccagccgcgcccggtgcccggcagccagaagggcgtgctggtggcccctggaggcctggcgctgccggcctacggcgaggacggggccctggagcacgagcgcatgcaacagctggagcacggcggcctgcagccaggcctggtcaaccacatggtggtgcagcatggcctgccgggccccgacagccagccggccggcctgttcaagaccgaacgcctggaggagttcccgggcagcaccgtagacctaccccccgcgcctccgctccctcctctgccgccgccccaaggccccccacccccttaccatgcccatgcgcaccttcaccacccggagctcgggccccacgcccagcagctggccttgccccaggccaccctggacgacgacggggagatggacggcatcgggggcaagcattgctaccgctggatcgactgcagcgccctgtacgaccagcaggaggagctcgtgcggcacatcgagaaggtccacatcgaccagcgcaaaggggaggacttcacttgcttctgggccggttgccctcgaagatacaagcccttcaacgcccgctataaactgctgatccacatgagagtccactctggggagaagcccaacaagtgtacgtttgaaggttgcgagaaggccttttcaaggcttgaaaatctcaagatccacttgcggagccacacaggcgagaagccgtatttgtgccagcatccgggttgtcagaaggccttcagtaactccagtgaccgcgccaaacaccagcggacgcatctggacaccaaaccttatgcttgtcaaattccaggatgtaccaaacgctacacagacccaagttccctaagaaagcatgtgaaggcacattcttccaaagagcaacaagcaaggaaaaagttgcggtccagcacagagctccatccagacctgctcacagattgcctcaccgtgcagtccctgcagccggccacttcccctagagatgctgctgctgaagggaccgtgggacgctcccctggacccgggcctgacctctattcagctcccattttctccagcaattattcaagccgaagtggaacagctgctggggccgtaccacccccacatcctgtcagtcacccttctccaggacataatgtacaggggagccctcacaacccctcctcccagttacctccactcacagctgtggacgcaggagctgagaggtttgcaccttctgctccatctcctcaccacatcagcccccggagagttccagctccttcttcaatactgcaaagaacacagcctccctatacccagcagccatcaggttcacacctgaagtcctatcagccagaaacaaactcttcttttcaaccaaatnnnnnnnnnnnnnnnggattttatgggcagctgcagaagttctgtcccccacactaccccgattcccagagaattgtgccgcctgtcagctcctgcagtgtggtgccttcgtttgaggactgcctagtccctacatccatgggccaggccagttttgatgttttccacagagccttctcgactcactcgggcattacagtgtatgatttaccttcaagttcctcgagcctctttggggagtctctccgcagcggggctgaagatgctaccttcttgcagatcagcaccgtggaccgctgtcctagccagctctcctctgtctacaccgaaggctaaaagctctcttggccactcctgcacacccaggaccttgatgttgcttgccaccttttgttttcgtactctcacagactgcttgaggaaggatgtcagcccaatcagcgggccctgcagagttactgatgttctttcagaaggcaggactgaatggcagagctagctttgcaggaatcattacagttgctcctttttctctctggttttcctggactatgtgaccaggaggactgtcttttcaaagggaatttagagcctcactctcctggatacctgttacttcctggctgtcaacccttaaaggaccccagtgaaatgatgtgcatatgaaaatgtagtttggggatgactctacctgaaaactccaaacagggaaaaagacctcaattacgagaggcatagtgacctgcctcacctaatcctcacccttgctgctcctgatgcaaaaccaggcacaacaagggaaatccatgtccaaagcatagtgtggtctcaactcttagaaactccctgggtttcccttttctcttagccacatgctaaccagttgcttctcagtgtttctcttcaatagaaaaataaggttttatatgccagcagcctatccttgtttttgcattttaaagacttagttatttatacgtattttaaaatgaaaaaaaaaatgtaaaggtctgtgctttggatggaaatcattattattgtaatcacgtcagctatagacattttgcacagctgtggttctgcctggccccacctctagcatgttagttttgcagttagcaaaggttacctgagggaaatggagtgggcacctcccgcaccaacagtcctgtagctggaaccttcctgagttgactgtttagtaactccacctcaaagactgtgttcaaagaaaaatgttgtttgactggtttacccattgcctccactctggtgctgcacccagagaagtgccagatgtgagaactgggacagactgagtcatgtgccagcttcccttggaaaaccaaacctagtgatacttgacttccagtgctcagattttactaacgtttttcaggatatccactcatctgtctgtctcttccctacacttctctccaccctctttttgcatccctcttaccctcttcctgactgtggttcatatatccccaccagccgccattgtctgatcatcttgggaaggtagaggtgacagttctcgaaaagtctacagaaagaggcaattctttttctgagttccagtttgaaggcctggaattttcacatagcacttggtcgaaaatatcaagcctaaataggaagtcattttctgtgacacctctacatagctattacagatcctaagtcctagggcatcagctataaaaattggccagtcccaaagacacagtaagttctaacattctggtactatcatatttcaagtattttttctcactttttaaaaatgtttttctgaacaaaagtgaaacaatgccatttatcaaactgagatcattacaatcttcaacaagacaactaaaacagcttgatgttagatgggattctgtgaccgtttgtatactgacaggtccttccagtctccctccacagtcccacaagcggaagtattctacctgattccagagttcattccaacatgcagtagaatgaggtgaatgaagaaccaagtgtgggttttgttttcacagtgcacttggtcaatctagtttctctgagtagtgggctgtattctaagaaaagctttcacgtagacgtcaaagtctgcaaaagagatgagttagccactttacaaaaacctgctctgctttacaaaagatgcacaccaggcttcctttacaagtgaactccaaggctgcttgtaaagtaccacccttcctgcagactttgtgggtcgtgtcacttggcctaaacaagtggcctaacatatgcatgctcacagctagtagcatccctcatgcgtcctttgtcatactctggaaagaaaaaaactctgctatcttcagagaaaccatctattcatacttaaatatggaagcctttacaaggaactcaaaatacatttcatttcatttgtacaatgagaaaaaagatgaaaaggcaaggttgttattgcagttgacattgtcagccctgccttttggctttatgtaatttaaaatagaaagggggaaggaggacaagacagaagctcaactttagaaaccatggacatcacctccctctttgagaggagctgcttgtgaaccaggctccagtcttcctgtggcctctcacagtaaccctgcccctttcttacctcacaggggcaagagggactctaaagagggcgtaagcaatagaggcacctgcagccctccttcctcagcaggaaatcaatgtggagccccagagggacattttatctcagagagagcatgctggccacaggacccagtgcagccctgcttcctgcaccgtgggtctttcctgatagctgcaggcttgagattgcagcctcaggataggacacgttcagatgccttccagactacacacactatgcttagattcgagagtctttcctgaccttaaaatttgtcccttgcttactttcacactgcagaagatttatatatatattcatcattatttttgcagcagtacaagtggaaacttcaaaaaaatcattccctttcatgtcctggtctttttaagtcttgatatgtaaccattttcataaatatccaaacagagattgtcattccccttaaaaacagaaacaaaacacaaaactagtgcttgtgaaaacacacagcgcaaagacaattatcctattgcattaaaaaaaaaatcagtctgcctagagacatttcattggctgcattgtcttaattccctaacgaaactgcatcaaaatgtcagttgtaatttagcctctgatcagctgttaaatattatttaaatatttacaggtcctgtggggtatctcccattacccatgtcgccctcaaattacataagcgatcataaaataagaagaaaaaaaaaggtctttagtagatcacagcagagttaccactgataagagtgttggctttgttcagttgtttttaaattaccagccgtcaagcacagtagcccctaaaaccaattttgagcaaggataaattcaactccctcatctgagaaccttgactttccagttgccttgaagtattgggaatagtaactgtacattttcaatttaattatttggtattttatttgactgtcttggccatgtcattttatggaagcatttttaaatagcactttttgttagtggtgtggaatttctgcggttattttttttttttttttgcaacagatgaagcaaaaaaaaaaaaaaactcattggagaaatagtgagtgtaaaaagagatttattttgtacagacagcaaagtatcctgtgtaatgttgctgacataaagcactttgggggaaaaaagtggaaatctgttttccataaatcacacagactcttgtacatagttatatacactcacgtagagaaatgaactgcatatatcatactggatatggggccgattttactctagaggcacatctggtgcttattgtcataaatcttttaaagaattaggtacacttttttctattaatatgtatagttttgtgatttgtcacagttatgtttcatataatcataagttattttgtcttgttcatgaagtcctttttttatgtcaaaagtaaaatgaagggattgtgcacttggtacagaataaaactggaaatagagaagacgccctcctgcctaaaatcctccttcagcctgtcggtttaaaacacaatggcaaccatcattgtttgtttgtttgtttttttgttttgttttaccatcagcctcttacatactgggaatggtaattataattaaaggcagatgatgcgggagggaatgttcaagtccagctttaaaatgctgcattgctttgggccagagctgtagcctggatttaattatagatatgaggaggaaatggcagtaaaaatgaatgtctccctgagtcctttacatgttgggagtgtccataaataaaacatgaagttttatttcatcagatttaattaaagattttataacatgttaaaaaaaaaa

SEQ ID NO: 5564 - DNA, 4389 bp, Homo sapiens
  misc_feature (4310)..(4310): n is a, c, g, or t
  misc_feature (4329)..(4329): n is a, c, g, or t
gggaaagcgaggagccgcggcggcgtggagccggcgggcccgggcgggggctccccggagccctaccaccccaccctgggcatctacgcccgctgcatccggaacccaggggtgcagcacttccagcgggacacgctgtgcgggccctacgccgagagcttcggcgagatcgccagcggcttctggcaggccacagctattttcctggctgtgggaatctttattctctgcatggtggccttggtgtccgtcttcaccatgtgtgtacagagcatcatgaagaaaagcatcttcaatgtctgtgggctgttgcaaggattgcacagtctacaccttaacctcggtttgatactctaccctgctggctggggttgccagaaggccatagactactgtggacattatgcatctgcctacaaacctggagactgctccttgggctgggccttttataccgccattgggggcacagtcctcactttcatctgtgctgtcttctctgcacaagcagaaattgcaacctctagtgacaaagtacaggaagaaattgaagaggggaaaaacctgatctgcctcctttagtttggaagagacaatgccattttctcccttgagtaatcttgtgaaacagtccacagtttcatcatttgagtcaagtggagaactaacctttacctaccaaagccacgttccacggcccgaggcttaaacaggaccaatgagaggccacatccagctacgcaaagttactggacatgcggtctgcagtgcacattataaggaatggaacatgaaaatagtatataatcctagacctggagttgccaagttctgtcagactccatctcccccaggttcaatgatggatgataatctaaatcattagggcagcagtaatctctggctaacggaagagaccgtccgcagatctgcaggctgtttctgctccaacactgcttgcttgtgagcatctctgcctcagaatggggttttgggttggagttcttgttttcctctgttctttcaagttgtctccaacgaacagaaaactataaacttactggggacaggatgtgtgctaaagggcacagcaagacactgtcttttgcttagctgaccaaaggggtcagcagggatggcgtggagtcatgctgtggaacttattctaggctgaatcctagggtaaggtggatcaactgaactgtcactccagagattttagaaatttgagtaaagaaacaataaggacctatacaatcatatgagaacaaaaatatgaaatcttgctagtgaagacgtattttttcttcttcccagcagccaggctagcaccagttctggcccagtctcctcttcttctggagatcacatgtttttcttctaaggttaggattgtgctttgactgcgaaaggaaacctcactgtttcctccttccagggactgaggtctccaagctagctgtggcttatgcagatgttcactgggaggacctgccagaatctcggcacttggggggagacctttactcccagtttggtgaccatgctgtagtcagctctatttccaatcccgacagtagcagaatggcattctacaacaaaaagaagctagttatgggagttaagtttttgtagttactggtgttgatcctgaaagcagactgagataacattaaattgctgcaactgaagaacctgcagccaagaccttaattccaggaaagcacagaggacaaagttaattcaaaaagaggcgctagatcaaggtcacagcactgcctacacctgtttacaaaaagaatcaaataccactatgaataaggattcaggggtttttaatctactttccataaattaccaatatcactgattcaggaagatagtatctcagaatgaccagagcagcacagaaacaagctactctgacattatgggagcttcaaaattgtatcatgatacagaaacactccttagcactttaagaaagtgagatggaactgccagatttctggaaggagaaaaagtgtaggtatttgggttcattaatctgctcacttgaggactttgttttgaaaaagtaccttctgtggacaaggtattgtgctaccagctatacaaccctgacttcagagtttgcaaccttgccctgagtgaatcatgttaaagctgtctgagtctaaagcaccgtatcttggtgcagaacagataattatacagagatggaatgggacaaccgcagttttactacattctggtgtttggcctatatgagaaaccatcttctcacagattaagggctaagggcaaaaggggtgggaggtgtggaactagccttaatgagtttcccattcctgaaccaaaattcaaagtgagtgagatgtaaatcctgtgattttggtgaagaaaaaaacgggtatcttcatagcagcctaggaaaccttaaccatatctctaacaccacacagaaagaggctggaggagccactggacaaagcttctgtctctgtgtgtacatttataatgttctaaccaagtctcaaaccttgatgaaaaacacaaaatttttccataaacttatcagaagactcacttttctttctttcttggatagagaaaccattttctgacactaggtttacaatctcagtgtccttacaagttaagtcctaagctcacaggatcctccgagcatgtccatcacctgctctttggctaaggtggcagtgtacctctagatcaacctgggaacagtcacaagggagtgtgacttcttggccataataaactcactcgatagtgtttatgttattaatctgaatgcaacagaagacaaaagcacaggcatgcacacacacagaaccccaaaccactaaaaactacctaaacactgacttagtaaatagtaaaaaggtaatgttgggacttttaaaccttgaatccattagccaggcttgggatgaaaggaccatctaaaatcatgctagtctaaaccatgctcttccacacagctgtttaaaaaccactgggtatgaggaatatgctagaaagaaatgttaaaaatagattgttggctcacacttatttttctaataaataggaccattattactaccaggaaagtcttatttattttgcctgaaattggcttaaagaaagtctcatgacgggatgggatgggctgcgcttctcaatgaactctgaggcagaaatatttgccttggattctgtggattctttaaacctgtgtgctaataattcaaacaatgttgcattaattgtataagggtttttgtatagttttcaaacatctgtggtgtaatgatctttgttaaacatatattctgtaaagtgccatagtctttttttatgtgtagcatatttaaaaatatatatgtatattatacatacacaagtttgtgtgaaagatgtgcaataacaaaggtgtatgtatgttttgttgttttgttttggaaactggacaggagtcaaaacagggatgtttgtttctgttttggcaaaggagagttccacatttttgccttcatggcttattcagtaacccataattttaatgctacacaaatcttatgtgaagaaaagactggtatgaaatcattttttcctgggtctaaaataatcgctagtgttatgtcaaagttaagcccgcacgccaggcccagttaatgctagtctttcatgtgaaatgtgaagctgccatgttgccttttctcttagtaggataactagtagctggtacataatcactgaggagctatttcttaacatgcttttatagaccatgctaatgctagaccagtatttaagggctaatctcacacctccttagctgtaagagtctggcttagaacagacctctctgtgcaataacttgtggccactggaaatccctgggccggcatttgtattggggttgcaatgactcccaagggccaaaagagttaaaggcacgactgggatttcttctgagactgtggtgaaactccttccaaggctgagggggtcagtaggtgctctggagggactcggcaccacttgatattcaacagccacttgagccaaatataaaattgtatttacagctgatggactcaatttgagccttcaaacttgtagttatcctattatattgtaaactaatacattgtctagcattgatttggttcctgtgcatatgtattttcactatgtgctcccctccccagatcttaattaaaccagattttgcaattcaaaaaaaaaaaaaaaaaatagtctagcattgatttggttcctgtgcatatgtattttcnctatgtgctcccctccccngatcttaattaaaccagattttgcaattcaaaaaaaaaaaaaaaaaaaaaaaaaaaaaaa

SEQ ID NO: 5565 - DNA, 769 bp, Homo sapiens
  misc_feature (69)..(85): n is a, c, g, or t
  misc_feature (728)..(728): n is a, c, g, or t
cccagtttatgatctaagagtgaaatcaacaggacttcgggaaggatgtgaatatgaatatcgtgtttnnnnnnnnnnnnnnnnnggcctaagtcttccaagtgaaacctctcccttaattagggcagaagatccagtgttcctaccatctcctccatccaaacccaaaattgtggactcaggcaagacaactataactattgcctgggttaagccgctgtttgatggtggggccccgataactggatatactgtagaatacaaaaaatctgatgacactgactggaaaacttccattcagagcttacgagggacagaatatacaataagcggactaacaacaggagctgaatatgttttcagagtaaaatctgtcaataaggttggtgctagtgaccccagtgatagctctgaccctcagatagcaaaggaaagagaagaagaacctttatttgatattgacagtgaaatgaggaagaccttgattgtcaaggctggtgcctcatttaccatgactgtgcctttccgaggaagaccagtacccaatgtcttgtggagtaagccagacactgacctccgtactagagcttatgttgataccacagactctcgtacatcactgaccattgaaaatgccaacagaaatgactctggaaagtacacattaacaattcagaatgttttgagtgctgcttcactgaccttagttgtcaaagttttagataccncaggtcctccaaccaacattcttcagcagggtaccgagcta

SEQ ID NO: 5566 - DNA, 1138 bp, Homo sapiens
gcgtcgacctacggcgaggcactggccagcccagctccacgaggactgaacaaggtgctgtctcactgccaccatgccggaagtcgagagaaaacccaagatcactgcctcccgcaaactcttgctgaagagcctgatgctggccaaggccaaggaatgctgggagcaggagcacgaggagcgcgaggctgagaaggtgcgctacctggcagagcgcatccccacgctgcagacccgtggcctgtccctcagtgccctgcaggacctgtgccgggagctgcacgccaaggtggaggtggtggatgaggagcgatacgacattgaggccaaatgcctccacaacaccagggagattaaggacctgaagctgaaggtgatggacctccgtgggaagttcaagcgcccgcccctgcgtcgagtccgtgtctcggctgacgccatgctccgggccctgctgggctccaggcacaaggtgtccatggatctgcgggccaacctcaagtctgtgaagaaggaagacacagagaaggagcggcctgtggaggtgggtgactggaggaagaacgtggaggccatgtctggcatggaaggccggaagaagatgtttgatgccgccaagtctccgacctcacaatagaggtacctagagaccagctcccttctctggggtccatcagagtctagaggataatgagggagtccacaatgggcaggcgggttgtacttagtgtggtgcacggatgcacggactaaggcaccgatgagactgatttgagtcggctctcctgggctcagtcctggctccagcaccatgatacttgggcatgtcatttctgtttggcggccctttttgttcccatcatctatgaaattgggggctgtatcaaatcagtggttctccaagtgtggtcctgggaccagcagcgtctacatcacctgggatgcaaatgatcagcccccaccccagatccactaaattggaaactctggggtgaggccagccttctaggtgattctgatgcacatgagagtttgagaaccactaggttagagggtccctgggatcccttcatctctgactttttgagaatctatgcacttttaaataaaaaaaaaaaaaaaaaaaaaaaaaaaaaaa

SEQ ID NO: 5567 - DNA, 2282 bp, Homo sapiens
  misc_feature (2172)..(2279): n is a, c, g, or t
tcaacacgtgaattcccacagaagctgctcagggactatccatggcctccccgtggccaacttgagtctgctctgcagctttaggcccgacttggaaggcccatgggctgcagatgaggaaactgaggtccagacagccgaagagtggtagtgtccaggacacacaactgggccggcggcggcggctgccccgagggacgcggccctaggcggtggcgatggggaccgcccggatcgcacccggcctggcgctcctgctctgctgccccgtgctcagctccgcgtacgcgctggtggatgcagatgacgtcatgactaaagaggaacagatcttcctgctgcaccgtgctcaggcccagtgcgaaaaacggctcaaggaggtcctgcagaggccagccagcataatggaatcagacaagggatggacatctgcgtccacatcagggaagcccaggaaagataaggcatctgggaagctctaccctgagtctgaggaggacaaggaggcacccactggcagcaggtaccgagggcgcccctgtctgccggaatgggaccacatcctgtgctggccgctgggggcaccaggtgaggtggtggctgtgccctgtccggactacatttatgacttcaatcacaaaggccatgcctaccgacgctgtgaccgcaatggcagctgggagctggtgcctgggcacaacaggacgtgggccaactacagcgagtgtgtcaaatttctcaccaatgagactcgtgaacgggaggtgtttgaccgcctgggcatgatttacaccgtgggctactccgtgtccctggcgtccctcaccgtagctgtgctcatcctggcctactttaggcggctgcactgcacgcgcaactacatccacatgcacctgttcctgtccttcatgctgcgcgccgtgagcatcttcgtcaaggacgctgtgctctactctggcgccacgcttgatgaggctgagcgcctcaccgaggaggagctgcgcgccatcgcccaggcgcccccgccgcctgccaccgccgctgccggctacgcgggctgcagggtggctgtgaccttcttcctttacttcctggccaccaactactactggattctggtggaggggctgtacctgcacagcctcatcttcatggccttcttctcagagaagaagtacctgtggggcttcacagtcttcggctggggtctgcccgctgtcttcgtggctgtgtgggtcagtgtcagagctaccctggccaacaccgggtgctgggacttgagctccgggaacaaaaagtggatcatccaggtgcccatcctggcctccattgtgctcaacttcatcctcttcatcaatatcgtccgggtgctcgccaccaagctgcgggagaccaacgccggccggtgtgacacacggcagcagtaccggaagctgctcaaatccacgctggtgctcatgcccctctttggcgtccactacattgtcttcatggccacaccatacaccgaggtctcagggacgctctggcaagtccagatgcactatgagatgctcttcaactccttccagggattttttgtcgcaatcatatactgtttctgcaatggcgaggtacaagctgagatcaagaaatcttggagccgctggacactggcactggacttcaagcgaaaggcacgcagcgggagcagcagctatagctacggccccatggtgtcccacacaagtgtgaccaatgtcggcccccgtgtgggactcggcctgcccctcagcccccgcctactgcccactgccaccaccaacggccaccctcagctgcctggccatgccaagccagggaccccagccctggagaccctcgagaccacaccacctgccatggctgctcccaaggacgatgggttcctcaacggctcctgctcaggcctggacgaggaggcctctgggcctgagcggccacctgccctgctacaggaagagtgggagacagtcatgtgaccaggcgctgggggctggacctgctgacatagtggatggacagatggaccaaaagatgggtggttgaatgatttcccactcagggcctggggccaagaggaaaaacagggaaaaaaagaaaaaaaaaagaaaaaggaaaaaaggaaaaaaaaaaaaaaaaaaaaaaaaaaannnnnnnnnnnnnnnnnnnnnnnnnnnnnnnnnnnnnnnnnnnnnnnnnnnnnnnnnnnnnnnnnnnnnnnnnnnnnnnnnnnnnnnnnnnnnnnnnnnnnnnnnnnnaaa

SEQ ID NO: 5568 - DNA, 2193 bp, Homo sapiens
gggcaggaagacggcgctgcccggaggagcggggcgggcgggcgcgcgggggagcgggcggcgggcgggagccaggcccgggcgggggcgggggcggcggggccagaagaggcggcgggccgcgctccggccggtctgcggcgttggccttggctttggctttggcggcggcggtggagaagatgctgcagtccctggccggcagctcgtgcgtgcgcctggtggagcggcaccgctcggcctggtgcttcggcttcctggtgctgggctacttgctctacctggtcttcggcgcagtggtcttctcctcggtggagctgccctatgaggacctgctgcgccaggagctgcgcaagctgaagcgacgcttcttggaggagcacgagtgcctgtctgagcagcagctggagcagttcctgggccgggtgctggaggccagcaactacggcgtgtcggtgctcagcaacgcctcgggcaactggaactgggacttcacctccgcgctcttcttcgccagcaccgtgctctccaccacaggttatggccacaccgtgcccttgtcagatggaggtaaggccttctgcatcatctactccgtcattggcattcccttcaccctcctgttcctgacggctgtggtccagcgcatcaccgtgcacgtcacccgcaggccggtcctctacttccacatccgctggggcttctccaagcaggtggtggccatcgtccatgccgtgctccttgggtttgtcactgtgtcctgcttcttcttcatcccggccgctgtcttcttcagtctctggaggatgactggaacttcctggaatccttttatttttgttttatttccctgagcaccattggcctgggggattatgtgcctggggaaggctacaatcaaaaattcagagagctctataagattgggatcacgtgttacctgctacttggccttattgccatgttggtagttctggaaaccttctgtgaactccatgagctgaaaaaattcagaaaaatgttctatgtgaagaaggacaaggacgaggatcaggtgcacatcatagagcatgaccaactgtccttctcctcgatcacagaccaggcagctggcatgaaagaggaccagaagcaaaatgagccttttgtggccacccagtcatctgcctgcgtggatggccctgcaaaccattgagcgtaggatttgttgcattatgctagagcaccagggtcagggtgcaaggaagaggcttaagtatgttcatttttatcagaatgcaaaagcgaaaattatgtcactttaagaaatagctactgtttgcaatgtcttattaaaaaacaacaaaaaaagacaaatggaacaaagaagctgtgaccccagcaggatgtctaatatgtgaggaaatgagatgtccacctaaaattcatatgtgacaaaattatctcgaccttacataggaggagaatacttgaagcagtatgctgctgtggttagaagcagattttatacttttaactggaaactttggggtttgcatttagatcatttagctgatggctaaatagcaaaatttatatttagaagcaaaaaaaaaaagcatagagatgtgttttataaataggtttatgtgtactggtttgcatgtacccacccaaaatgattatttttgtagaatctaagttaaacttactatttataatgcataggtaaccattaactatgtacatataaagtataaatatgtttatattctgtacatatggtttaggtcaccagatcctagtgtagttctgaaactaagactatagatattttgtttcttttgatttctctttatactaaagaatccagagttgctacaataaaataaggggaataataaacttgagagtgaataaccatagtattctgctgcaataaatgtttctaccctcttgcgataaaaaaaaaaaaaaaaaaaaaaaaaaaaaaaaaaattcctgcggccgcaaggttatgaaaaggatttattaaaaggttaagatactttgttttgaaagtacattgtgatttgcagccacctagcactaaagcatagaacttaaacacgaatccctaaatgaacagattatgttacattaatctgagaattttaaatttagaagctaaaataaataaaaatcacagctggttgttaaaaaaaaaaaaaaaaa

SEQ ID NO: 5569 - DNA, 1619 bp, Homo sapiens
ccttttttttttttttttttttttttttttttttttttttttttttttttttgtttaaaatgcccatgcgcgttttattaataaaaactaacagtgccaagttaaacaagtcaaacaattaaagtctctttatataccataaaatattacagaaaagtttatttgtgtttcaataaaaagactatcgttttagaacaggcagctaatagcaactgtgcagttaatgggttttgtgaataaattttaaaagagactactgcctgtccttaaattcctttttctttttataaaaaaagaactattaaaaatgattgacaaattttgagttaaaaaattgttaaaacattctctatatttaatttcaattttataatagattacaggaagatgcttatgaaacaaatacatttgtttcagtacatgtctttaaatgatagacttataagtatgtaaacaactatataataaaaggtttccaaacgctgcctgtaagaaatcaggcaaattttaccataagcaataaaccattccaagccttccagacagtctccatagccgcaccagcatggcaataagctttaaccaaacgaaaacaaacaaacaaaagcacttcgcaatttgttgctgcaaaacagggagagaaaagagtgtacaaacttgatggaatcacaacagtcaatataatttaagggacaataaagtcaataaggttgatggtgtttattgtttaaaaagttgaattctgctgtttgcttggggctgtttagaaagttgcattctgctgtttgcttggacaccgtaccactgaacaaactccacagagtcttgctatccgccagcaggggtgccgtccaaactcacggcaaataagcggcatcaggggctcaccatccacaacaggaggtgttttattttcatggatgtggttgaaatacaatttcttcagcaaactcagcaaaaacttttcaggggcaaaaatgaactctgcacttaaagaaaaatagcaaatgaaaacacaaaatcctaacaagtaaataaacgctctgcatcagcacactggtatcaaaacacacatccacagcacgtcctaatcctacgggaaacaatccttgcttatcagaggtgcatatctaaattcaatagcttaccaatatcttcttgggagtaggccaaaaggaaacagaaaacccacattaaaaaaaaagtttcttttcgctaaacgttttcctgaagccgaatctgaagtggggaggacgtcagtcgtcctcgtcattctcgttgaagtcatcgtcctcctcgtcgtcctccccgacgtaggacaccggagtctccaccctggagccgctgtactgagacccattggagcttgtggccagcatcccatctgcaccgttggtcaggtcaactgtcacgtatggctacagagccttggggaccagacttctggccattttaaggtcttcggcagagcagctccccgactccagcccgcaagccatgcccatccgcttcagcacttctatgtcatcgtggatttcaaatgtgttgtcaaaattaaacagatactcaaatttgtcattggagatctgcagtcgatgaccgtcttctgctgctgtgtc

SEQ ID NO: 5570 - DNA, 1231 bp, Homo sapiens
  misc_feature (1213)..(1213): n is a, c, g, or t
  misc_feature (1223)..(1223): n is a, c, g, or t
ttcatttccaagtctcgcggttgtcgtccattttgaaatgttcgcccgaagcggtccttcgcgatacgagtgcgcctgcacaacaatctcgaaattcagagtgttcaaccaatggccgcccaggtcatgtctgtgctaacccccggaggtcactttggcaccgctacccattacagtgagcatgcattctgactgattaaaacacacataaaccaaaaccaaacaacaggcccttgggtgaaaggtgctatataattgtgaagtattaagcctaccgtatttcagccatgataagaacagagtgcctgcattcccaggaaaatacgaaaatcccatgagataaataaaaatataggtgatgggcagatcttttcctttaaaataaaaaagcaaaaactcttgtggtacctagtcagatggtagacgagctgtctgctgccgcaggagcacctctatacaggacttagaagtagtatgttattcctggttaagcaggcattgctttgccctggagcagctattttaagccatctcagattctgtctaaaggggttttttgggaagacgttttctttatcgccctgagaagatctaccccagggagaatctgagacatcttgcctacttttctttattagctttctcctcattcatttcttttatacctttcctttttggggagttgttatgccatgatttttggtatttatgtaaaaggattattactaattctatttctctatgtttattctagttaaggaaatgttgagggcaagccaccaaattacctaggctgaggttagagagattggccagcaaaaactgtgggaagatgaactttgtcattatgatttcattatcacatgattatagaaggctgtcttagtgcaaaaaacatacttacatttcagacatatccaaagggaatactcacattttgttaagaagttgaactatgactggagtaaaccatgtattcccttatcttttactttttttctgtgacatttatgtctcatgtaatttgcattactctggtggattgttctagtactgtattgggcttcttcgttaatagattatttcatatactataattgtaaatattttgatacaaatgtttataactctagggatataaaaacagattctgattcccttcaaaaaaaaaaaaaaaaaaaaaaagtcctaaaaatttttttttttttggatnattatgacanttatccct

SEQ ID NO: 5571 - DNA, 1014 bp, Homo sapiens
ggaacatggagcgggggccggtggtgggggcaggactgggggccgggcgaaatccaggcactgctgggctgcctgctcaaggtgctgctctgggtggcctctgcttgctgtactttggaagcgaacaggccgcccgccttctgggcagcccctgcttacggcgcctctaccatgcctggctggcagcagtggtcatctttgggccgcttctgcagttccatgtcaaccctcggactatcttcgccagccacggcaacttcttcaacataaaatttgtgaattcagcctggggctggacatgcactttcttagggggctttgtgttgctggtggtgttcctggctacacggcgcgtggcagtaactgccagacacctgagccgactggtagtaggggcagccgtgtggcggggagccggccgggccttcctgctcatcgaggacctgactggctcctgcttcgagccactgccccagggtctgctgctccacgagctgcctgaccgccgcagctgcctggcagccggccaccagtggcgaggctacaccgtctcctcccacaccttcctgctcaccttttgctgcctgctcatggcagaggaagcagctgtgttcgccaagtacctggcccatgggcttcctgccggcgccccactgcgccttgtcttcctgctgaacgtgctgctgctgggcctctggaacttcttgctgctctgtaccgtcatctatttccaccagtacactcacaaggtggtgggcgccgcagtgggcacctttgcctggtacctcacctatggcagctggtatcatcagccctggtctccagggagcccaggccatgggctcttcccccgtccccactccagccgcaagcataactgaaagaaataaaaaccatcgggcctgaaaaaaaaacaaaaaacaacaaacaaaaaaagcaaacgagatcaaagaacacaagaaaacacaagaacaaatcactcccatcgagaacaaacaaggaacaaaacaacac

SEQ ID NO: 5572 - DNA, 6464 bp, Homo sapiens
ggccgcgtcttctgcgtcacgaacagccagtccattgaagacttgaacaagtgggccctatttcttgtgtctccttttatacttgaagcagaacacatagcatttgtgacggagagcatttgggtacaaagtgagaatttacagagatcatcctcttcagaaacaacggagtgtcgttctgtcgtccaggctggagtgcagtggtgtggtctcggctcaccacaacctctgcctactgggttccagtgattctcctgcctcagcatcccgagtagctgggactacaggtgcacgctaccatgcccggctaatttttgtatttttagtagaggcgggggtttcaccatgccatccaggctggtttcgaactcctgacctcgtgatccacctgtctcggcctcccaaagtgctgggattacaggtgtgagccaccgcgcctggccctgtattttcaaattctttacctctgcgtttccagccttgctccatccaatttgttactagagctttttaacaatttcacgttgaattaagatgatttggaagaggagaaacaagagtcagaaaaattagcagcatccgtgatctgactctgggtaccagtgggttgttgagatttctgttccccactcactgcagagctgctgcctgccaatgccccctgttgggcagggccacctgtgctagtttaacctggggtctttcactcccggactgcttcttggatgtgagttttaagttgagcagagaagatatgccttgcctgctgccatacattgtaacatcaagtcaagagctttagttacttaacagatttctgctggctgctattataggaggaaactcctttgtttagggacagccagggcttccttagctttgatctttgggagtgagccttttgcttgacttcccttctcttttccatgcctttgtttccatctcgaagtgcaaatttaaagtgtcctgtttgcctttatccactggaaggcaaacaccctggacgacgtatcagtgacagcgcggttctgctttgatcggagcacccagcgctgcttgaaggcgtttgcatggtccatggctcatggaccacgctcctagaaaacggaaatgcacttagattgtcaagtggtcagactgttgtttgccattagcttgcagacctggggatccttatcggctaattgctgaagcaagtgtggacaacttcagcaagctgggggtggcgttcatggaagatagactccacatggataatggactggtaccccaaaagattgtgtcggtgcacttgcaggactccactctgaaggaagttaaggatcaggtctcaaacaagcaagcccagatcctagagccgaagcctgaaccttctcttgagattaagcctgagcaggacggtatggagcatgttggcagagatgacccaaaggctcttggtgaagaacccaaacaaaggagaggcagtgcctctgggagtgagcctgctggggacagtgacaggggagggggccccgttgagcattatcacctccatctgtctagttgccacgagtgtctggaacttgagaacagcaccattgagtcagtcaagtttgcgtctgccgagaacattccagaccttccctacgattatagcagcagtttggagagtgttgctgatgagacctcccccgaaagagaagggaggagagtcaacctcacgggaaaggcacccaacatcctcctctatgtgggctccgactcccaggaagccctcggccggttccacgaggtccggtctgtgctggccgactgtgtggacattgacagttatattctctaccacctgctggaggacagtgctctcagagacccgtggacggacaactgtctgctgttggtcattgctaccagggagtccattcccgaagacctgtaccagaagttcatggcctatctttctcagggagggaaggtgttgggcctgtcttcatccttcacctttggtggctttcaggtgacaagcaagggtgcactgcacaagacagtccagaacttggttttctccaaggctgaccagagcgaggtgaagctcagcgtcttgagcagtggctgcaggtaccaggaaggccccgtccggctcagccccggcaggctccagggccacctggagaatgaggacaaggacaggatgattgtgcatgtgccttttggaactcgcgggggagaagctgttctttgccaggtgcacttagaactacctcccagctccaacatagtgcaaactccagaagattttaacttgctcaagtcaagcaattttagaagatacgaagtccttagagagattctgacaacccttggcctcagctgtgacatgaaacaagttcctgccttaactcctctttacttgctgtcagctgcggaggaaatcagggatcctcttatgcagtggcttgggaaacatgtggactccgagggagaaataaaatccggccagctctctcttagatttgtttcatcctacgtgtctgaagtagaaataaccccatcttgtatacctgtggtgaccaacatggaggccttctcatcagaacatttcaacttagagatctatcgccaaaatctgcagaccaagcagttggggaaagtaattttgtttgccgaagtgacccccacaacgatgcgtctcctggatgggctgatgtttcagacaccgcaggaaatgggcttaatagtgatcgcggcccggcagaccgagggcaaaggacggggagggaatgtgtggctgagccctgtgggatgtgctctttctactctgctcatctccattccactgagatcccagctgggacagaggatcccgtttgtccagcatctgatgtccgtggctgtcgtggaagcagtgaggtccattcccaagtatcaggatatcaacttacgagtgaagtggcccaacgatatttattacagtgacctcatgaagatcggcggagttctggttaactcaacactcatgggagaaacattttatatacttattggctgtggatttaatgtgactaacagtaaccctaccatctgcatcaacgacctcatcacagaatacaataaacaacacaaggcagaactgaagcccttaagagccgattatctcatcgccagagtcgtgactgtgctggagaaactgatcaaagagtttcaggacaaagggcccaacagcgtccttcccctttattaccgatactgggtccacagtggtcagcaagtccatctgggcagcgcagagggaccaaaggtgtccatcgttggcctggacgattctggcttcctccaggttcaccaggagggcggcgaggttgtgactgtgcacccggacggcaactccttcgacatgctgagaaacctcatcctccccaaacggcggtaatgccgggcgtccccgagacgcggctgcctgtccgtgcccatgcatctggaaatctaatttagagttgtaggtgaattttcttttcctccaattcatttgttaagtctttgttctttttctgtgtttctgtttgtttttaggtttgttttgttgtcgttttctttggtgtttgaagaggctctgggatagatggttaagaagtagaaaatttagtttagggaaagccctcccacaggtgggaaattgctctcccctctgtggcttggacttacgtttattgtcaaggggagtttttacatggaaatgacaatgggaaaattcagatattttcttagtagtgcagacctttacccctagtctatgaaaaaacaaaccaaaatatgctcttgcgcccaggccagtggtgagttagaggtatgctatcactgtttgtaagcatctggggaggtactgaactgtaagaacatgcttggacacttagtcattgttctgtgtttttattaatgaagaaaagggaagacagacttccaagagttactgtccacccggtggtgtggccccatagcgaagtctaaatgcctgtagagatagagctagctggtgtggttgcagtgaccttgtagaggaaatcagttcattactttgacatcattcagtgagctctcctttcctaaggaagtttaaatgtccttagttagggactgactttcttaagtaagtttaaatttactacatattgtgaagagacaggatcaagttcagaatccttaaatgtctgattaggcatcacttggatgaggaggtgggcgatttggctctgacagctggagatgaaggcacactcataccacatacaagggaggatttggagcttttaagccagtttcagatttactctgaaatgtggagcattcctgcaagactgtgcagctcacggaatatagaagacatggcattttactcagaagtcataagtttttgcccccctcatttacctcgtattaccaagaaagaaaatgttatcgatactaaacaccatcagttcagagggaggatgtgtgtgtgtgcccgcatatgtgtgtgcgtgcgtgtgtgcgcacatagctttaaaagaagacattcaaaatttgatgtgctacaagcctcatgaaagaacaaaagaaatgaagccttttgatatgcattcgctattcccagatgtacgccatgccttttccatgtccctcctatctctgttgaacttatgaatcatactcattacttttcagctttttaaaaggccaatttttgtccagttttctctcttccagtcccagctgaaattagtggaaagaaagtttgatggagtttcagctttgaacaaaatcccttcattgtaaactagcaccatctttatccaggtcttacccagtcaggctaattccagaaacttgtggtttttagtatagtctgtctacctttagccaggcacaggacagccctatgaaaaaatacccaatatatattttttggaaatgaaacattaaaagaacttaaaaagtaatttttggaaatgaggcttcaattagaattatttttctcaaaaaacaaacaaacaaaaaacacaaaaaaaaccactcttctccaaatgcccaagccttctttcaaaattagttagaaacttaagtaaaatacaagtccacaccatccccaaattacaaaatggacttacccttgagagggcatctgcagaatatcatcagggacaaagatctcgaggctaacgatgtaggtttcatttctcagactttgtaatataaggcaagccctctctcagagctgccatcatcactttttgaatttctttgggggttatttaatgaaaaacatgctatgttttgttttaagctgaagtcctattctggacactctgctttgggaaaaaatgttatcatttaatttcctttctgcaaattaaaactaatgaagtgtggccttgtcaaaggctatggagatgttccgggcatactgctgtgctctgtgctttccagcaggcgctcctccctcacgcaggagactcagttgtcctgagagagatgaagcagccttgaagcagatgctgcgttttccataaacctgattttgcctcacatgaaccaaagactctcaaaactccgcttctatagaattagctgaataaaggcattttactgatagctgttcgtgttagcgaaacctgtctacctgctatagcacactctccgatttgggccatttatgcaccccgcaacctgggatctcaaggagctttaaagtcttaatgggaacttggcattttcctgatgatctttaaaatgtggtcactaaactcaggattggcgtgtgcttttagaacactggagtagcccttgttttagaggctgtgcattgagtatcgaccgtattttgtaaaaggcaagatatcctcccttccaggctggtaacgggtttcaaggggactcttgaggaagtgccccctaaaatagaacacagcaataactgggcttcctgtccccacccccaccccagcagtgctctctggcactgggaactctgctagggagtggtggaagtaggaaggatttgtgtgcaaaggaaaatcgtggttgagtttcactgcagcaggctgacgttgcctgatgtgagagcaagtggccgactggggtgcgggtgcacaggtcgggggagcacaggccacagagcgcagctctgggggtcccccaaggcacagcatatacagcatggtcgccccttgccctggagtctgggaacaaagagaggagccagcctccccgcactgcttcagatggaaaagggaggcagggtgggcttccgttctccagatctgtttgctcttaacaggcagaacatgggagaatccttattcctggttaatcactatgcatatttgaaataaaagaaagcgtaagcctctgcaattttaacttctcaaaggatgtctctgaaaagaatcactttaaaccaatgcctataaaaagcaagtctaccaaaataaactaagactttctatgtg

SEQ ID NO: 5573 - DNA, 2082 bp, Homo sapiens
cccacgcgtccgctgagacggattcgctcccaaatgatgctccagtggcaggagcaactcaagttcatcattgtcctgagagagaggagcagcgcggttctcggccgggacagcagaacgccaggggaccctcacctgggcgcgccggggcacgggctttgattgtcctggggtcgcggagacccgcgcgcctgccctgcacgccgggcggcaacctttgcagtcgcgttggctgctgcgatcggccggcgggtccctgccgaaggctcggctgcttctgtccacctcttacacttcttcatttatcggtggatcatttcgagagtccgtcttgtaaatgtttggcactttgctactttattgcttctttctggcgacagttccagcactcgccgagaccggcggagaaaggcagctgagcccggagaagagcgaaatatggggacccgggctaaaagcagacgtcgtccttcccgcccgctatttctatattcaggcagtggatacatcagggaataaattcacatcttctccaggcgaaaaggtcttccaggtgaaagtctcagcaccagaggagcaattcactagagttggagtccaggttttagaccgaaaagatgggtccttcatagtaagatacagaatgtatgcaagctacaaaaatctgaaggtggaagttaaattccaagggcaacatgtggccaaatccccatatattttaaaagggccggtttaccatgagaactgtgactgtcctctgcaagatagtgcagcctggctacgggagatgaactgccctgaaaacattgctcagattcagagagatctggcacatttccctgctgtggatccagaaaagattgcagtagaaatcccaaaaagatttggacagaggcagagcctatgtcactacaccttaaaggataacaaggtttatatcaagactcatggtgaacatgtaggttttagaattttcatggatgccatactactttctttgactagaaaggtgaagatgccagatgtggagctctttgttaatttgggagactggcctttggaaaaaaagaaatccaattcaaacatccatccgatcttttcctggtgtggctccacagattccaaggatatcgtgatgcctacgtacgatttgactgattctgttctggaaaccatgggccgggtaagtctggatatgatgtccgtgcaagctaacacgggtcctccctgggaaagcaaaaattccactgccgtctggagagggcgagacagccgcaaagagagactcgagctggttaaactcagtagaaaacacccagaactcatagacgctgctttcaccaactttttcttctttaaacacgatgaaaacctgtatggtcccattgtgaaacatatttcattttttgatttcttcaagcataagtatcaaataaatatcgatggcactgtagcagcttatcgcctgccatatttgctagttggtgacagtgttgtgctgaagcaggattccatctactatgaacatttttacaatgagctgcagccctggaaacactacattccagttaagagcaacctgagcgatctgctagaaaaacttaaatgggcgaaagatcacgatgaagaggccaaaaagatagcaaaagcaggacaagaatttgcaagaaataatctcatgggcgatgacatattctgttattatttcaaacttttccaggaatatgccaatttacaagtgagtgagccccaaatccgagagggcatgaaaagggtagaaccacagactgaggacgacctcttcccttgtacttgccataggaaaaagaccaaagatgaactctgatatgcaaaataacttctattagaataatggtgctctgaagactcttcttaactaaaaagaagaatttttttaagtattaattccatggacaatataaaatctgtgtgattgtttgcagtatgaagacacatttctacttatgcagtattctcatgactgtactttaaagtacatttttagaattttataataaaaccacctttattttaaaggaaaaaaaaaaaaaaaaaaaaaaa

SEQ ID NO: 5574 - DNA, 3820 bp, Homo sapiens
gcctgctgccgcctgggccccgccgagcggagctagcgccgcgcgcagagcacacgctcgcgctccagctcccctcctgcgcggttcatgactgtgtcccctgaccgcagcctctgcgagcccccgccgcaggaccacggcccgctccccgccgccgcgagggccccgagcgaaggaaggaagggaggcgcgctgtgcgccccgcggagcccgcgaaccccgctcgctgccggctgcccagcctggctggcaccatgctgcccgcgcgctgcgcccgcctgctcacgccccacttgctgctggtgttggtgcagctgtcccctgctcgcggccaccgcaccacaggccccaggtttctaataagtgaccgtgacccacagtgcaacctccactgctccaggactcaacccaaacccatctgtgcctctgatggcaggtcctacgagtccatgtgtgagtaccagcgagccaagtgccgagacccgaccctgggcgtggtgcatcgaggtagatgcaaagatgctggccagagcaagtgtcgcctggagcgggctcaagccctggagcaagccaagaagcctcaggaagctgtgtttgtcccagagtgtggcgaggatggctcctttacccaggtgcagtgccatacttacactgggtactgctggtgtgtcaccccggatgggaagcccatcagtggctcttctgtgcagaataaaactcctgtatgttcaggttcagtcaccgacaagcccttgagccagggtaactcaggaaggaaagatgacgggtctaagccgacacccacgatggagacccagccggtgttcgatggagatgaaatcacagccccaactctatggattaaacacttggtgatcaaggactccaaactgaacaacaccaacataagaaattcagagaaagtctattcgtgtgaccaggagaggcagagtgccctggaagaggcccagcagaatccccgtgagggtattgtcatccctgaatgtgcccctgggggactctataagccagtgcaatgccaccagtccactggctactgctggtgtgtgctggtggacacagggcgcccgctgcctgggacctccacacgctacgtgatgcccagttgtgagagcgacgccagggccaagactacagaggcggatgaccccttcaaggacagggagctaccaggctgtccagaagggaagaaaatggagtttatcaccagcctactggatgctctcaccactgacatggttcaggccattaactcagcagcgcccactggaggtgggaggttctcagagccagaccccagccacaccctggaggagcgggtagtgcactggtatttcagccagctggacagcaatagcagcaacgacattaacaagcgggagatgaagcccttcaagcgctacgtgaagaagaaagccaagcccaagaaatgtgcccggcgtttcaccgactactgtgacctgaacaaagacaaggtcatttcactgcctgagctgaagggctgcctgggtgttagcaaagaaggacgcctcgtctaaggagcagaaaacccaagggcaggtggagagtccagggaggcaggatggatcaccagacacctaaccttcagcgttgcccatggccctgccacatcccgtgtaacataagtggtgcccaccatgtttgcacttttaataactcttacttgcgtgttttgtttttggtttcattttaaaacaccaatatctaataccacagtgggaaaaggaaagggaagaaagactttattctctctcttattgtaagtttttggatctgctactgacaacttttagagggttttgggggggtgggggagggtgttgttggggctgagaagaaagagatttatatgctgtatataaatatatatgtaaattgtatagttcttttgtacaggcattggcattgctgtttgtttatttctctccctctgcctgctgtgggtggtgggcactctggacacatagtccagctttctaaaatccaggactctatcctgggcctactaaacttctgtttggagactgacccttgtgtataaagacgggagtcctgcaattgtactgcggactccacgagttcttttctggtgggaggactatattgccccatgccattagttgtcaaaattgataagtcacttggctctcggccttgtccagggaggttgggctaaggagagatggaaactgccctgggagaggaagggagtccagatcccatgaatagcccacacaggtaccggctctcagagggtccgtgcattcctgctctccggacccccaaagggcccagcattggtgggtgcaccagtatcttagtgaccctcggagcaaattatccacaaaggatttgcattacgtcactcgaaacgttttcatccatgcttagcatctactctgtataacgcatgagaggggaggcaaagaagaaaaggacacacggaagggcctttaaaaaagtagatatttaatatctaagcaggggaggggacaggacagaaagcctgcactgaggggtgcggtgccaacagggaaactcttcacctccctgcaaacctaccagtgaggctcccagagacgcagctgtctcagtgcccaggggcagattgggtgtgacctctccactcctccatctcctgctgttgtcctagtggctatcacaggcctgggtgggtgggttgggggaagtgtcagtcaccttgttggtaacactaaagttgttttgttggttttttaaaaacccaatactgaggttcttcctgttccctcaagttttcttatgggcttccaggctttaagctaattccagaagtaaaactgatcttgggtttcctattctgcctcccctagaagggcaggggtgataacccagctacagggaaatcccggcccagctttccacaggcatcacaggcatcttccgcggattctagggtgggctgcccagccttctggtctgaggcgcagctccctctgcccaggtgctgtgcctattcaagtggccttcaggcagagcagcaagtggcccttagcgccccttcccataagcagctgtggtggcagtgagggaggttgggtagccctggactggtcccctcctcagatcacccttgcaaatctggcctcatcttgtattccaacccgacatccctaaaagtacctccacccgttccgggtctggaaggcgttggcaccacaagcactgtccctgtgggaggagcacaaccttctcgggacaggatctgatggggtcttgggctaaaggaggtccctgctgtcctggagaaagtcctagaggttatctcaggaatgactggtggccctgccccaacgtggaaaggtgggaaggaagccttctcccattagccccaatgagagaactcaacgtgccggagctgagtgggccttgcacgagacactggccccactttcaggcctggaggaagcatgcacacatggagacggcgcctgcctgtagatgtttggatcttcgagatctccccaggcatcttgtctcccacaggatcgtgtgtgtaggtggtgttgtgtggttttcctttgtgaaggagagagggaaactatttgtagcttgttttataaaaaataaaaaatgggtaaatcttgaaaaaaaaaaaaaaaaaacaaccaccacaacaaaacaaaacaaaggggcgccacacagagagacccacccagggggggaccaaagtagaggtaaccacgcagaagcgggacaaacgagaggccacaaagaggcgaggcataaagcgaccgag

SEQ ID NO: 5575 - DNA, 2651 bp, Homo sapiens
  misc_feature (2511)..(2610): n is a, c, g, or t
agaactttaaaatgccactaggggtctaagaaatggttgagtctgtcactgccagaatatgaactcagcttaataataagttagaaaagatgcaaataagttaaactgataatattcttcttggatatatactggctttttcctcatcagtgtgctttagcaaaggctagactatcaaaatcttttcaggtttccttttatagaaacaaagacactttcagtttttatcatattaaagtataatgcatttcaatcatcaaaagccaattttctgagagaaactatataatggaggatgtattttagagtcaggctagcctgagttttaatcctagctctaccatttactagctgtgtgattttggacatgatatttaagctttctgatcttcagtttctgaatctaaaacgtgtgactattaataggaatccaactgggaatgctgtgcggttgaaattagataatgtattttaaatgcctggcaaagtgtctgacacagagtacacacttaaggaatggagggatattatcatcatcacggttttaaaaacgatattaacattatctatgagttagctggttgagaaaagtaagagtgcagggaatcaaaagaataggatagaaggtttttcttctttgtacaacactatattgttttgataccttatatcaaaaactaattatgcatatctggcccttccctgcctatttatcctatttcatcaccacagttttcttccctaactgaaaattcttacccaaagctttttttcagtttcttaactacacaaaactctcctctgtgcgtttggccaccttttcatgcagtctccaggtctcggtttaaatatcacctcacagaacagtctaccctggacattgactaagtagctagtcttttattaatctcacacaaccacctagtgtatttccttttgtcttagtcagttcaggctgctgtaacagaataccatagactgggtggcttaaacaacgacaattcattccccacaattttggaggctgagaaattcatttctcacattccaagatccagaccctggcagatctggtatctccaaggacacacttcctgtttgcagatggccatttctcattgtatcacatggtagatagagagagaggacgcatgtgttctcatctttttgtaagggcactgatcccattcatgagtgctctaccctcattcactaattacctctcaaaggctttacctcctaataccatcacactggggattaggatttcaacatgtgggttttaagaggatgcaaacatttagttcatagcacctttctagcacttttcacaatttttgattatatgtttgcatggtacttactagttttctccctagataaactgcaaaccctgctctgtgaggttagtgaccatgtctgctttatttattaatatacttagtgcttacatagacttagtacatattttgcaaataaatgaaagaacaaatgtgatacagaggatgccaatgagtaaataaagccagtttatgacttcccacaaatacaatgggcataataattgagtctgcaatagtagagtcatgaaaagtgattgggccattgaatttttaggaatgcagaaataaattatacagttttgtttgtaagtaccaatcaataaatgtgatcatttactaatggcttaaaaattcatactgtttttctttctactttttttaaatctagaatggccacatctgttgctcagtggatccacagtgccttcaggaactgtgaagttaactgtctcatgggagatttctgttaaaagaatgttctttcattaaaagaccaaaaagaagttaaaacttaaattgggtgatttgtgggcagctaaatgcagctttgttaatagctgagtgaactttcaattatgaaatctgtggagcttgacaaaatcacaaaaggaaaattactggggcaaaattagacctcaagtctgcctctactgtgtctcacatcaccatgtagaagaatgggcgtacagtatataccgtgacatcctgaaccctggatagaaagcctgagcccattggatctgtgaaagcctctagcttcactggtgcagaaaattttcctctagatcagaatcttcaagaatcagttaggttcctcactgcaagaaataaaatgtcaggcagtgaatgaattatattttcagaagtaaagcaaagaagctataacatgttatgtacagtacactctgaaaagaaatctgaaacaagttattgtaatgataaaaataatgcacaggcatggttacttaatattttctaacaggaaaagtcatccctatttccttgttttactgcacttaatattatttggttgaatttgttcagtataagctcgttcttgtgcaaaattaaataaatatttctcttaccttataacacaaaaaaaaaaaaacacttgaggcaaaaagaataaacaaaaaaaataaattctatgtgaacaccaaaaaannnnnnnnnnnnnnnnnnnnnnnnnnnnnnnnnnnnnnnnnnnnnnnnnnnnnnnnnnnnnnnnnnnnnnnnnnnnnnnnnnnnnnnnnnnnnnnnnnnnaaatgtaagcgttaatttttgttttcgcgttttttggtttc

SEQ ID NO: 5576 - DNA, 6346 bp, Homo sapiens
  misc_feature (6249)..(6299): n is a, c, g, or t
agcgggtgttgggcaggaggagtccttcagcggccgggttcgcgccgcggtcgccggctgcttacgtgggcgggcctagtgtggggctgaggcacgagggtcgctatggcggtggacatcacgctgctattccgggccagcgtcaagaccgtgaagacgcggaacaaggcgctgggagtggcggtgggcggcggggtcgatggcagccgggacgagctgttccgccggagcccccggcccaagggcgacttctccagccgggcccgcgaagtgatttctcacattggcaaactgagagattttcttctggaacacaggaaagattatattaatgcttatagccataccatgtctgaatatgggaggatgacagacacagaacgagaccagatagaccaggatgcccagatattcatgaggacctgttcagaagcaattcagcaactacgaacagaagctcacaaggagatacattcccagcaagtgaaggagcacaggaccgctgttttggatttcattgaagattacttgaaaagagtatgtaaactttactcagaacagagagccatccgagttaaaagagtggtggataagaaaagattatctaagctggaaccagaaccaaatacaaagacaagagaatccacatcttctgagaaagtttcacagagtccttcaaaagactctgaagaaaaccctgccactgaagaacgtccagaaaaaattttggctgaaacacaacctgaattgggaacgtggggagatggcaaaggcgaagatgagttatccccagaagaaatacaaatgtttgaacaggaaaatcagcgactaattggtgaaatgaacagcttgtttgatgaagtgaggcaaatcgaagggagagtggttgagatttccagactccaagagatattcacggaaaaggttttgcaacaggaagctgagattgacagcattcaccagttagttgtgggggcaactgaaaatatcaaggaaggcaacgaagacataagagaggccattaaaaacaacgctggcttccgcgtgtggatcctcttcttcctcgtgatgtgctccttctccttgctcttcctcgactggtacgacagctagccagggccacgggggcccagcacgagagtcctcatgggcactcacagactgcgtgctttcatgtacttccagtgctggagcatggtatgaccagattttatcacagtgccatttgaagggaaaggagttcagacagacagacgtattccccaaaaagggataccccaggccgatggtgttcagccatttagcagctgaaaaaggaaacagtgcacaccaatgggaggcagcctgcgtagccctcatcaggcaagacagactgaatgcaggagtgggtgattagctgctccttgaacttgaggctgccttggcagcaggggcacagcaggcctcaagagcccctaattgtctcagggttcaaaggaagacactgacctttcccatcccggtagcttcagggaagatcatagttaataacgtctctcaacaaatgattacttctttgtttccttgtggcttcttgtctgtctgagtcaacgaatacacagacttactggattatagaagagaaaattcacatctgccttgttaatctaataaatataattacagccccttaaaaaaaaaaaaaagagtctaagttgacaaattcagtggcagcccagccacctcctatcaatcaatcagggaagaaatgcaggggagactggggccctcagtgaggggctgcctggcattactcctccaaagactgctgcccccagaacaggcagggggtgtgggagggccagtttcccgccactgggtccaaggagcctttgttcaaaggaagaagtgggccacggaagaacgggcctgcttctctcgtgcctgtgcttctgacctccaggaactgtaaacaggaacacctatgtgtaactgaaggcatgagacatctgtacaggaagcatcccagcgcccacatgggcatgagacagtctgcactgcgcctggtgaaatgcgtgtgtgtacagacagtccactgggcagcacaggtatcctcatgttctttatttgcacagagtgaaatgtcagaagttacatgtaaatgaattcacagtcaataaagtccacgtctacctggaaatacaggctcggcctctgcactgtgcgcacacgggcttcacttgtgtctattcagatgcgcagggaagctttggcactgatttattgctcttgagtcattttccacagcttaacaccacccttctcagcacacgcctctgatgcacaccgctgcgccaaggtcacggtctgtgtctccagacacccttgatgagaaaatacattttctgtcttagaagcacatttcaggaaacaagagtggcgctgaccacggtcaccatgcctgttcacaacacatctcacactatttgtcgtttatttctgatctaaaaaactgaaacttttgacacgtacaccagaaacaacacattcaataacatagaagaaatgtctgcgaatgtcttttctatttgttttacacacttagttcatctaactggcagttttgtaaacataaactttaatatcaagattcaaactggaacaattttcttacaaagattgtgagttgaaatttgtcattttgtttgcacggtgccacaccagtcccccacccccaccccacagcctttcctgcctgtttcccacatcaagggatatcagtttcatagaataaaaattaaagtagctcaagcttaccagaaattacatttccacttttcccacccagctcatttctttaaaaactaatggggctattggtgcaaatttattcataatagaagtgaaccagagggccagtgggggctctttcctatcagcacatcacagagcagacagactacctgcagggagagttctgcacctcacgggcccagggccgtctcttcccagccctctccctcacatgctctgccagtctacacacactggagcaaaccccagctgtctccacccagatgggtggtgcccctccctccttaccaagatgccagagtcagaggggagggagtagtcaatccacaccgagcctgccacattgcagggccgtcccaccccgactcaggagtcagcacagggaggggtgggggggtctttttcctcgttctctatgccacttacttactacagtgcaccttggcagcagtcagcactgttacccgctgatggccgaggaagaaatgcgaagtaggcttgctcttagcacagcgagagatcactctagatatggctatggaggaaggtttgcagacagcagggtcggttcagaaaatcaattccacaaaatgcatttatctgagatccaaacccttcgcatatccagtgtaaatttatttttttacagcatccaataaatcccagtaaaggagctaaatgaagatcttaacatgaaaagtggtgtcagagctctttaggcaatgctgaaatgcacttgattttatgcccgtgggtggtcggcagcaagttttatttgcaaagcagcattagcaaacagaagcaattgcaccgtaaatgagtaacctctaaagtatcagtaattatatttaatgaaatgtccctcaaagtccctttgttatttgcaagtgacacattgtaaggaacttgcccatcccgctaagctgacttctcagccgcttcagtctcctgctcggacagcttctcttctgacagaactgacatccagggcgatacggagcgcgtgatgctctgcttggccaggttgtagtggtttatgactgtgtaaaatttctcccgggcactggagtcttgctccgcgtagtagctctccaagccttctgggatgcactgggtgttcttgaggacgaacccatcggggcaggcgcggtcatacttgtacaccttgtagacaaccaggaagacgacgcaggtgaggaaggccagggcgaagaggaccaacacggagaccttaaacctctcggtgacaccctccgtgatgctgacggtgaactcagcaatttggggaggacgtgctttccctttcttgcggtcaggttcatactcggtcttagttttcacgaccaccttatccgggggcgggaactgcagctgattgacatcgaggggcgtcatcaggggaatggtgtcgaagccatcctccagcagcggctgcttggtgcccttctctgcgaaattgttccccaacttcaccatcgttccgggagctccgaggctgcagcccacgcccggctccggcaggtcagctgagcgctccgagctccgcgtctcctgctcctgctcgcagcaatggcggaggcggcgccgcgcgcggacccgggaaggggagcgaacgattgggctccacggccgctccctcctcctcgcgccgccgcctcccttcctgcctctcccgggggctgggtgcgcgcgggtgggtgcgcgcgtgtggccgcgcctccaccttgacgcagcgcccgcccggccgcacaaaggagtgcggggctgggcgggagcctcccctgggaccacgcgcccgccctgagccgggggagggaacaggggagcgggagaggacgcgcccccagggggtctcggagcggcggagggcgcccggagcgggagggctgcgggctgcgccaccccgggcggcggcctgggcgcgaggcgcttagaaaggagaaaggggaggcggggaccgtagggacagagcgacccccaggggtgcggggaggtgcagagagggtccccgcccgcagcgcgccgcgctcacctgggggtcctgaggacgttcaagggtttggggggatgggtccaggaggcgctgggtggtggcggagaccagagcagggtgctccttagtgctgggttggggagggggcgaccaaaagagggcgcgtccgcgtataaagggggcgcggcccgtaaaggaggcgcggcccgtaaaggaggaggaggttttcggtggtgcgggaggcggagtagcgctctcccagggctggggtgtgggcgcccagggtgaggctgccccaggcagcgggagggaagtcgttctaggcaaagagcgctcagtgcgccgcttggagggaggcggaaaggttcctccgctctggttggcagagaaggtggaggtcccactgcagccgccgcccgagcatcctgggcacagaggaggggccgctgggacgatgcccggacgcggagagaaggggggtggttctagcccgacctgcgcccccaaaccccgagctcagccgctgtcgcggcttcccagagagggtcctgtttgcagacctccaacccgtcctgcctgcaggactcacggatgaaagactatggggtgtgggggcgaggccgaaatgggagtggagcccgcgcgggaggaggccggctgcggggatcggtgcctcctgggcacctgggccaggagctgggccctgtcaggcgctggacgaggaggaggcatcacccaaattcgatactttttcacaccctttccggggacttccccgcggcactacggagggtccggggcgttttccatcagccgtctgagaatcctttttggcactttgatgcctccctgaagcaggtgaagaagagaagatttctcttgctccacttcagaaatctgcccaggcatctaggttgtcccagagatggacggtgaacaatcatgtttctctgctagctggccttttgtgctgtcttgggtcttcactggtgctggtcattgggactgtttcatcctgtggttttcttcctctgctgattgtatctgggccctccaagatgctggcagctccaaattcctctggcctgctcattttcctctcacaacccaggctgttttcaaataatccaacctgtccaactcgcgagggtccgtggcttcattcttgaagtcagtgagacgaagaacgcaccagaagtaaccaattccagacacaccagcactttgggaggccaagaccagcagatcacaaggtcaggagttcaaaaccagcctgaccaacatggtgaaaccccatctctactaaaaatacaaaaattagccgggcgtggtggcgcatgcctgtaatcccagctacttaggaggctgaggcaggagaatcgcttgaactcaggaggtggaggttgtggcgagctgagattacaccattgcactccagcctgggccacagaacaagactctgnnnnnnnnnnnnnnnnnnnnnnnnnnnnnnnnnnnnnnnnnnnnnnnnnnnctctcggaagaacattcgcccagcactggcgtctccaccaaagcact

SEQ ID NO: 5577 - DNA, 10411 bp, Homo sapiens
  misc_feature (685)..(702): n is a, c, g, or t
  misc_feature (3966)..(4002): n is a, c, g, or t
  misc_feature (4678)..(4708): n is a, c, g, or t
  misc_feature (5562)..(5594): n is a, c, g, or t
  misc_feature (6672)..(6688): n is a, c, g, or t
  misc_feature (6705)..(6735): n is a, c, g, or t
atggggagaagacggaggctgtgtctccagctctacttcctgtggctgggctgtgtggtgctctgggcgcagggcacggccggccagcctcagcctcctccgcccaagccgccccggccccagccgccgccgcaacaggttcggtccgctacagcaggctctgaaggcgggtttctagcgcccgagtatcgcgaggagggtgccgcagtggccagccgcgtccgccggcgaggacagcaggacgtgctccgagggcccaacgtgtgcggctccagattccactcctactgctgccctggatggaagacgctccctggaggaaaccagtgcattgtcccgatttgtagaaatagttgtggagatggattttgttcccgtcctaacatgtgtacttgttccagtgggcaaatatcatcaacctgtggatcaaaatcaattcagcagtgcagtgtgagatgcatgaatggtgggacctgtgcagatgaccactgccagtgccagaaaggatatattggaacttattgtggacaacctgtctgtgaaaatggatgtcagaatggtggacgttgcatcgcccaaccgtgtgcttgtgtttatgggttcactggtccacagtgtgaaagagattacaggacaggcccgtgtttcactcaggtcaacaaccagatgtgccaagggcagctgnnnnnnnnnnnnnnnnnnaagactctgtgctgtgccaccactggacgggcgtggggccatccctgtgagatgtgtccagcccagcctcagccctgccgacggggtttcatccccaacatccgcactggagcttgccaagatgttgatgaatgccaggctatcccagggatatgccaaggaggaaactgtatcaatacagtgggctcttttgaatgcagatgccctgctggtcacaaacagagtgaaactactcagaaatgtgaagacattgatgagtgcagcatcattcctgggatatgtgaaactggtgaatgttccaacaccgtgggaagctatttttgtgtttgtccacgtggatatgtaacctcaacagatggctctcgatgcatcgatcagagaacaggcatgtgtttctcgggcctggtgaatggccgctgtgcacaagagctcccggggagaatgacgaaaatgcagtgctgctgtgagcctggccgctgctggggcatcggaaccattcctgaagcctgtcctgtcagaggttctgaggaatatcgcagactttgcatggatggacttccaatgggaggaattccagggagtgctggttccagacctggaggcactgggggaaatggctttgccccaagtggcaatggcaatggctatggcccaggagggacaggcttcatccccatccctggaggcaatggcttttctcctggcgttgggggagccggtgtgggggccgggggacagggacctatcatcactggactaacaattctgaaccagacaatagatatctgtaagcatcatgctaacctttgtttaaatggacgctgtataccaactgtctcaagctaccgatgtgaatgcaacatgggttataagcaggatgcaaatggagattgtatagatgttgatgaatgcacatcaaatccctgcactaatggagattgtgttaacacacctggttcctattattgtaaatgtcatgctggattccagaggactcctaccaagcaagcatgcattgatattgatgagtgcatccagaatggggttctttgtaaaaacggtcgatgcgtgaactcagatggaagtttccagtgcatttgcaatgccggctttgaattaactacagatggaaaaaactgtgttgatcatgatgaatgtacaactaccaacatgtgtttgaatggaatgtgcatcaatgaagatggcagcttcaagtgcatctgcaaaccaggatttgtcttggctccaaatgggcgttactgtactgatgttgatgaatgccagaccccaggaatctgcatgaatgggcactgcatcaacagtgaagggtccttccgctgtgactgtcccccaggcctggctgtgggcatggatggacgtgtgtgtgttgatactcacatgcgcagtacctgctatggaggaatcaagaaaggagtgtgtgtgcgtcctttccccggtgcagtgaccaagtccgaatgctgctgtgccaatccagactatggttttggagaaccctgccagccatgccctgcaaaaaattcagctgaattccacggcctttgtagtagtggagtaggtatcactgtggatggaagagatatcaatgaatgtgctttggatcctgatatatgtgccaatgggatttgtgaaaacttacgtggtagttaccgttgtaattgcaacagtggctatgaaccagatgcctctggaagaaactgtattgacattgatgaatgtttagtaaacagactgctttgtgataacggattgtgccgaaacacgccaggaagttacagctgtacgtgcccaccagggtatgtgttcaggactgagacagagacctgtgaagatataaatgaatgtgaaagcaacccatgtgtcaatggggcctgcagaaacaaccttggatctttcaattgtgaatgttcgcccggcagcaaactcagctccacaggattgatctgtattgacagcctgaaggggacctgttggctcaacatccaggacagccgctgtgaggtgaatattaatggagccactctgaaatctgaatgctgtgccaccctcggagccgcctgggggagcccctgtgagcggtgtgaactagatacagcttgcccaagagggcttgccaggattaaaggtgttacgtgtgaagatgttaatgagtgtgaggtgttccctggcgtttgtccaaatggacgctgtgtcaacagtaagggatcttttcattgcgagtgccctgaaggccttacgttggatgggactggccgtgtatgtttggatattcgcatggagcagtgttacttgaagtgggatgaagatgaatgcatccaccccgttcctggaaagttccgcatggatgcctgctgctgtgctgtcggggcggcttggggcaccgagtgtgaggagtgccccaaacctggcaccaaggaatacgagacactgtgcccccgcggggctggctttgctaaccgaggggatgttcttactgggcggccattttacaaagacatcaatgaatgcaaagcatttcctgggatgtgcacttatgggaagtgcagaaatacaatcggaagcttcaaatgccgttgcaatagtggctttgctctagacatggaggaaagaaactgcacggacatcgacgagtgcaggatttctcctgacctctgtggcagtggaatctgcgtcaatacaccgggcagctttgagtgcgagtgcttcgaaggctatgaaagtggcttcatgatgatgaagaactgcatggacattgacggatgtgaacgtaaccctctcctttgtaggggtggcacctgtgtgaacactgagggcagctttcagtgtgactgcccactgggacacgagctgtcaccatcccgtgaggactgtgtggatattaatgaatgctccctgagtgacaatctctgcagaaatggaaaatgtgtgaacatgattggaacctatcagtgctcttgcaatcctggatatcaggctacgccagaccgccagggctgtacagatattgatgaatgtatgataatgaacggaggctgtgacacccagtgcacaaattcagagggaagctacgaatgcagctgcagtgagggttatgccctgatgccagatgggagatcgtgtgcagacattgatgaatgtgaaaacaatcctgatatctgtgatggcggccagtgtaccaacattcctggagagtatcgctgcctctgctatgatggcttcatggcttccatggacatgaaaacatgnnnnnnnnnnnnnnnnnnnnnnnnnnnnnnnnnnnnntgcatgtttggggaatgtgagaacacaaagggatccttcatttgccactgtcagctgggttactcagtgaagaaggggaccacaggatgtacagatgtggatgagtgtgaaattggtgctcataactgcgacatgcatgcctcatgtctgaatatcccaggaagcttcaagtgtagctgcagagaaggctggattggaaacggcatcaagtgtattgatctggacgaatgttctaatggaacccaccagtgtagcatcaatgctcagtgtgtaaataccccgggctcataccgctgtgcctgctccgaaggtttcactggtgatggctttacctgctcagatgttgatgagtgtgcagaaaacataaacctctgtgagaacggacagtgccttaatgtcccgggtgcatatcgctgcgagtgtgagatgggcttcactccagcctcagacagcagatcctgccaagatattgatgaatgctccttccaaaacatttgtgtctctggaacatgtaataacctgcctggaatgtttcattgcatctgcgatgatggttatgaattggacagaacaggagggaactgtacagatattgatgagtgtgcagatcctataaactgtgtcaatggcctatgtgtcaacacgcctggtcgctatgagtgtaactgcccacccnnnnnnnnnnnnnnnnnnnnnnnnnnnnnnngttgtgttgacaaccgtgtgggcaactgctacctgaagtttggacctcgaggagatgggagtctgtcttgcaacaccgagatcggggtgggcgtcagtcgctcttcatgctgctgctctctgggaaaggcctggggaaacccctgtgagacatgcccccctgtcaatagcactgaatattacaccctgtgtcccggaggtgaaggcttcagacctaaccccatcacaatcattttagaagacattgacgaatgccaggagttaccaggtctctgccagggtggaaactgcatcaacacttttgggagcttccagtgtgagtgcccacaaggctactacctcagcgaggatacccgcatctgtgaggatattgatgagtgttttgcacatcctggtgtgtgtgggcctgggacctgctataacaccctgggaaattacacctgcatttgcccacctgagtacatgcaggtcaatggaggccacaactgcatggacatgagaaaaagcttttgctaccgaagctataatggaaccacttgtgagaatgagttgcctttcaatgtgacaaaaaggatgtgctgctgcacatataatgtgggcaaagctgggaacaaaccttgtgaaccatgcccaactccaggaacagctgactttaaaaccatatgtggaaatattcctggattcacctttgacattcacacaggaaaagctgttgacattgatgaatgtaaagagattccaggcatttgtgcaaatggtgtgtgcattaaccagattggcagtttccgctgtgaatgccctacaggattcagttacaatgacctgctgttggtttgtgaagatatagatgagtgnnnnnnnnnnnnnnnnnnnnnnnnnnnnnnnnnagactgcatcaatagtcctggtagttaccgctgtgaatgtgccgcgggtttcaaactttcacccaatggggcctgtgtagatcgcaatgaatgtttagaaattcctaacgtttgcagtcatggcttgtgtgttgatctgcaaggaagttaccagtgcatctgccacaatggctttaaggcttctcaggaccagaccatgtgcatggatgttgatgagtgcgagcggcacccatgtggaaatggaacttgtaaaaacaccgttggatcctataactgtctgtgctacccagggtttgaactcactcataataatgattgcctggacatagatgagtgcagttccttttttggtcaggtgtgcagaaatggacgttgttttaatgaaattggttctttcaagtgtctatgtaacgaaggttatgaacttaccccagatggcaaaaactgtatagacactaatgagtgtgtcgcccttcccggctcttgctctcctggtacctgtcagaatttggagggatccttcagatgcatctgtcccccagggtatgaagtaaaaagcgagaactgcattgatataaatgaatgtgatgaagatcccaacatttgtctttttggttcctgtactaatactccagggggcttccagtgcctctgcccccctggctttgtactatctgataatggacggagatgctttgatactcgccagagcttctgcttcacaaattttgaaaatggaaagtgttctgtacccaaagctttcaacaccacaaaagcaaaatgctgctgtagtaagatgccaggagagggctggggggacccctgtgagctgtgccccaaagacgatgaagttgcatttcaggatttgtgtccatatggccatggaactgtccctagtcttcatgatacacgtgaagatgtcaatgagtgtcttgagagcccaggcatttgttcaaatggtcaatgtatcaacaccgacggatcttttcgctgtgaatgtccaatgggctacaaccttgactacactggagtacgctgtgtggatactgatgagtgttcaatcggcaatccgtgtggnnnnnnnnnnnnnnnnnatgttattgggagtttnnnnnnnnnnnnnnnnnnnnnnnnnnnnnnngggcccatgatgaattgtgaagatatcaacgaatgtgcccagaacccactgctgtgtgctttacgctgcatgaacacttttgggtcctatgaatgcacgtgcccgattggctatgccctcagggaagatcaaaagatgtgcaaagatctggatgaatgtgctgaagggttacacgactgtgaatctaggggcatgatgtgtaagaatctaatcggcaccttcatgtgcatctgccctcctggaatggcccgaaggcccgatggagaaggctgtgtagatgaaaatgaatgcaggaccaagccaggaatctgtgaaaatggacgttgtgttaacattattggaagctatagatgtgagtgtaatgaaggattccagtcaagttcttcaggcactgaatgccttgacaatcgacagggtctctgctttgcagaggtactgcagacaatatgtcaaatggcatccagtagtcgcaatctcgtcactaagtcagaatgctgctgtgatggtgggcgaggctggggccaccagtgcgagctttgcccacttcctggaactgcccagtacaaaaagatatgtcctcatggcccaggatatacaactgatggaagagatattgatgaatgtaaggtaatgccaaacctctgcaccaatggtcagtgcatcaataccatgggctcattccgatgcttctgcaaggttggctacaccacagacatcagtggaacctcttgtatagaccttgatgaatgctcccagtccccgaaaccatgcaactacatctgcaagaacactgaggggagttatcagtgttcatgtccgagggggtatgtcctgcaagaggatggaaagacatgcaaagaccttgatgaatgtcaaacaaagcagcataactgccagttcctctgtgtcaacaccctgggggggtttacctgtaaatgtccacctggtttcacacagcatcacactgcttgtatcgacaacaacgaatgtgggtctcaacctttgctttgtggaggaaagggaatctgtcaaaacactccaggcagtttcagctgtgaatgccaaagagggttctctcttgatgccaccggactgaactgtgaagatgttgatgaatgtgatgggaaccacaggtgccaacacggctgccagaacatcctgggtggctacagatgtggctgcccccaaggctacatccagcactaccagtggaatcagtgtgtcgatgagaatgaatgctccaatcccaatgcctgtggctctgcttcctgctacaacaccctggggagttacaagtgcgcctgcccctcggggttctccttcgaccagttctccagtgcctgccacgacgtgaatgagtgctcgtcctccaagaacccctgcaattacggctgctctaacacggaggggggctacctctgtggctgcccccctgggtattacagagtgggacaaggccactgtgtctcaggaatgggatttaacaaggggcagtacctgtcactggatacagaggtcgatgaggaaaatgctctgtccccagaagcatgctacgagtgcaaaatcaacggctatcctaagaaagacagcaggcagaagagaagtattcatgaacctgatcccactgctgttgaacagatcagcctagagagtgtcgacatggacagccccgtcaacatgaagttcaacctctcccacctcggctctaaggagcacatcctggaactaaggcccgccatccagcccctcaacaaccacatccgttatgtcatctctcaagggaacgatgacagcgtcttccgcatccaccaaaggaatgggctcagctacttgcacacggccaagaagaagctcatgcccggcacatacacactggaaatcactagcatccctctctacaagaagaaggagcttaagaaactggaagagagcaatgaggatgactacctcctaggggagcttggggaggctctcagaatgaggctgcagattcagctctattaaccgttcacagacttgggcccaggctcaaatcctagcacagccagtctgcagaagcatttgaaaagtcaaggactaattttaaagaggaaaaataataataactcttgtttctttcctccctgtcttagactttgaatgttgaccctcacagggagggataatttagactctggtatggccaaagatttgagctcaaaggcaaccgtggttactgtattttttatataacttcattttaaaatatattaaaagaaacctaaatgttcaagatatcagcatatggcactaaatgcacaaaaataatgtgagcttttttttttttttcctgttagcagtctgtaacactttgggtattttgctatagttgctaattaaaaaaatatagatgtttatttatttttaatgcagtaatatatggagaaatgaacaaactatgtaaacaaaaagggaaactcacttgtttttctttagatttataaatttgagctattttttttagaggtgctttttaaaaatccaatagatacaagagatgtttcctttggttttctgccagtcatccagctgatacacacctgatcgattttaaagaaagccacacagagctgaatcgggcagtgctaatcaataatttaaaagacatgaatgtcattagatcctttataacgtagatcgaagccaaagcagctcatttgtgacaacatttcatatcaccagacacaccaggcaacagaagttgaagcacaaccactgtagcaaaataccttgactgcttgtgagaccattagcattgcaggccaaaccgtactgtatttccttctcataacctcaaggaaccatatgtgctacccacaacacctcattcttacccagggtgcgctgcgtcctcatggtactgtaggcagctgaagaaccgccgttcccttgaaagggaacacctggcattctgtggtgtttcgtgctgtcttaaataatggtgcatttattatgttcaagttatttcaggattgccatatgtgcaaacaaatcatgcaatgcagccaaggaatatatgttgttgttgttgttttaaacccattttttttttagaattttcattaatactgtagttatacaccatatgcctcattttatcatagcctattgtgtatgaaagatgtttgtacaatgaattgatgtttagtttgctttagtcatttaaaaagatattgtaccaggatgtgctattaagagcacgtatccattattcttctcaacccaagaacctgtttcctggaccagtgaccaaacctcatatgtgaaatggccaaagcacatgcaggctcctggttgttcctctcaaacctgtgctgaccaaagattagtaaccagttatacccagtattttgaggttttattgtttttttaataactaaaaaaaaaaaaggaacagtgtaaatttgtaatcaagagtttgtgaggaaaaacttatggtttttggttttgtttgtttttgtaggtctgtgtatcaaatatgacacttttcttgcaataaagcttattttggggtaaaaaaaaaaaaaaaaaacaacaacacaaaaacaccaaacaaacaaaaaaccacacccaaaaaaaaacaaaacacacaaccacacacaccaaaaacacataccaacaaaatcaaaccaaccaa

SEQ ID NO: 5578 - DNA, 2110 bp, Homo sapiens
agcgtgtgggagcgagcgcgagaaatgcagaggctgcggcggcggcggcagcggagtggcacgaggcggcgacgacggcggcggcagcgctccaactggctcctcgctccgggctccgccgtcgagccgggagagagcctccgccagcggccaggcaccagccagacgacgccagcgaccccggcctctcggcggcaccgcgctaactcaggggctgcataggcacccagagccgaactccaagatgggaggcaagctcagcaagaagaagaagggctacaatgtgaacgacgagaaagccaaggagaaagacaagaaggccgagggcgcggcgacggaagaggaggggaccccgaaggagagtgagccccaggcggccgcagagcccgccgaggccaaggagggcaaggagaagcccgaccaggacgccgagggcaaggccgaggagaaggagggcgagaaggacgcggcggctgccaaggaggaggccccgaaggcggagcccgagaagacggagggcgcggcagaggccaaggctgagcccccgaaggcgcccgagcaggagcaggcggcccccggccccgctgcgggcggcgaggcccccaaagctgctgaggccgccgcggccccggccgagagcgcggcccctgccgccggggaggagcccagcaaggaggaaggggaacccaaaaagactgaggcgcccgcagctcctgccgcccaggagaccaaaagtgacggggccccagcttcagactcaaaacccggcagctcggaggctgccccctcttccaaggagacccccgcagccacggaagcgcctagttccacacccaaggcccagggccccgcagcctctgcagaagagcccaagccggtggaggccccggcagctaattccgaccaaaccgtaaccgtgaaagagtgacaaggacagcctataggaaaaacaataccacttaaaacaatctcctctctctctctctctctctctatctctctctctatctcctctctctctctcctctcctatctctcctctctctctctcctatactaacttgtttcaaattggaagtaatgatatgtattgcccaaggaaaaatacaggatgttgtcccatcaagggagggagggggtgggagaatccaaatagtatttttgtggggaaatatctaatataccttcagtcaactttaccaagaagtcctggatttccaagatccgcgtctgaaagtgcagtacatcgtttgtacctgaaactgccgccacatgcactcctccaccgctgagagttgaatagcttttcttctgcaatgggagttgggagtgatgcgtttgattctgcccacagggcctgtgccaaggcaatcagatctttatgagagcagtattttctgtgttttctttttaatttacagcctttcttattttgatatttttttaatgttgtggatgaatgccagctttcagacagagcccacttagcttgtccacatggatctcaatgccaatcctccattcttcctctccagatatttttgggagtgacaaacattctctcatcctacttagcctacctagatttctcatgacgagttaatgcatgtccgtggttgggtgcacctgtagttctgtttattggtcagtggaaatgaaaaaaaaaaaaaaaaaaaaagtctgcgttcattgcagttccagtttctcttccattctgtgtcacagacaccaacacaccactcattggaaaatggaaaaaaaaaacaaaaaaaaaaacaaaaaaatgtacaatggatgcattgaaattatatgtaattgtataaatggtgcaacagtaataaagttaaacaattaaaaagaaaaaaaaggacagtaacaacagagaaacaagaaggaaacgccaactaagaggacgacaagaacacagcgagagagaaacgagagaaagaatacgaataaacaaaggggacgaacctacagagagcacgcaagagaaaagcgacagaagaagcacaacccagaggagcaaccaggagaacagagatacaggacaggcggaatgtaaccacggcaaaacgacggaacagtagacgtagctccagtaccaccg

SEQ ID NO: 5579 - DNA, 1686 bp, Homo sapiens
  misc_feature (1177)..(1177): n is a, c, g, or t
actccgggcgtgggcccccaacccggctgcctatcgggatatacctgagggctccccccccggtccccaatgggaggcagctacaacgccccccaggggacacaccccaggctccagcccggagaccctcccgaagcggctcaggggccagaaacccgccaccaacggccacttctgatcctggcaacgtctacatcggccgctactacaccgtggttgaccggacccacaacaggggtggggcttcgcccgaggctcgcccgcctctagtgcccaaggctgtccgcgcgccagcacagaaacagaggagagtcccagagcagaaggcccctggcccagcggccccctcccacacacacccacacactcgccccgcccactgtcctggggcgccctggaagccgccggcccaagcccgacttgctgttttgttctgtggttttcccctccctgggttcagaaatgctgcctgcctgtctgtctctccatctgtttggtgggggtagagctgatccagagcacagatctgtttcgtgcattggaagaccccacccaagcttggcagccgagctcgtgtatcctggggctcccttcatctccagggagtcccctccccggccctaccagcgcccgctgggctgagcccctaccccacaccaggccgtcctcccgggccctcccttggaaacctgccctgcctgagggcccctctgcccagcttgggcccagctgggctctgccaccctacctgttcagtgtcccgggcccgttgaggatgaggccgctagaggcctgaggatgagctggaaggagtgagaggggacaaaacccaccttgttggagcctgcagggtggtgctgggactgagccagtcccaggggcatgtattggcctggaggtggggttgggattgggggctggtgccagccttcctctgcagctgacctctgttgtcctccccttgggcggctgagagccccagctgacatggaaatacagttgttggcctccggcctcccctcaaaaaaaaaaaaaaaaaaaaaaaaaaaaaaaaaaaaaaaaggggaaaaaaaaagcagaggggagggagagaaaagaggggaaaggaaaaggggcaagatggagaacagaggcgtgatctcaccgtgcgacacacaaagaaaataaaagaggaccngacagggcggggaagaaacgaaggcgggggaaacacaccagaaaaagaggaggcagcgactacaaacagcaacgcgcaaaaaacggacccgagggacaacacgcagaatagaggacaaagacgacgaacagaaagacagacaaacgcagcaaacaacacccacacaaaaagcaacccacccgacgagcggagggacaaaaaagacaacaatgcacaaacaaccaaagaaagaccgagcgagcggtgatgagcaggcgagaacagagaccactcattaaatcaaaaacacaaaggagacccacaaatcgaagagactcaaacagcacccaagttaatacatgaaagcagcagcaagagagacagagaaagacagcgcacacagacagctgatggctaaaatctcatcatacattcagttaacgagagcagaagaagagagagatagaagagagcaagagggcggcgagaggagaaacagagaggaggcagcaaggagcgcgcagaacaag

SEQ ID NO: 5580 - DNA, 1486 bp, Homo sapiens
ggttgggatctgaggggtcctctctgtgcccatcacagtttgagcttcagggaaaagaagaagaggtctttgcccttcgtttttccaccgaattccgggcaagagtgagccatggagctacgtgtggggaacaagtaccgcctgggacggaagatcgggagcgggtccttcggagatatctacctgggtgccaacatcgcctctggtgaggaagtcgccatcaagctggagtgtgtgaagacaaagcacccccagctgcacatcgagagcaagttctacaagatgatgcagggtggcgtggggatcccgtccatcaagtggtgcggagctgagggcgactacaacgtgatggtcatggagctgctggggcctagcctcgaggacctgttcaacttctgttcccgcaaattcagcctcaagacggtgctgctcttggccgaccagatgatcagccgcatcgagtatatccactccaagaacttcatccaccgggacgtcaagcccgacaacttcctcatggggctggggaagaagggcaacctggtctacatcatcgacttcggcctggccaagaagtaccgggacgcccgcacccaccagcacattccctaccgggaaaacaagaacctgaccggcacggccccgctacgcttccatcaacacgcacctgggcattgagcaaagccgtcgagatgacctggagagcctgggctacgtgctcatgtacttcaacctgggctccctgccctggcaggggctcaaagcagccaccaagcgccagaagtatgaacggatcagcgagaagaagatgtcaacgcccatcgaggtcctctgcaaaggctatccctccgaattctcaacatacctcaacttctgccgctccctgcggtttgacgacaagcccgactactcttacctacgtcagctcttccgcaacctcttccaccggcagggcttctcctatgactacgtctttgactggaacatgctgaaattcggtgcagcccggaatcccgaggatgtggaccgggagcggcgagaacacgaacgcgaggagaggatggggcagctacgggggtccgcgacccgagccctgccccctggcccacccacgggggccactgccaaccggctccgcagtgccgccgagcccgtggcttccacgccagcctcccgcatccagccggctggcaatacttctcccagagcgatctcgcgggtcgaccgggagaggaaggtgagtatgaggctgcacaggggtgcgcccgccaacgtctcctcctcagacctcactgggcggcaagaggtctcccggatcccagcctcacagacaagtgtgccatttgaccatctcgggaagtgaggagagcccccattggaccagtgtttgcttagtgtcttcactgtattttctttaaaaaaaaaaaaaaaaaaaaaagccaaaaaaaaccactccaaaaaaacccagcacaaaaaaaaaaaaaaa

SEQ ID NO: 5581 - DNA, 1655 bp, Homo sapiens
  misc_feature (513)..(527): n is a, c, g, or t
  misc_feature (830)..(848): n is a, c, g, or t
ggcacgaggctgagaaggcggtggctgcagcagcagcggcggcggaaaccctaaagtccgagtccggactacgagtgcgtggcctcctaatccggatcctagtcctgagcgtgtctgtgtgcgagtggacggtcccggacgcgatgaccctgaacggcggcggcagcggagcgggcgggagccgcggtgggggccaggagcgcgagcgccgtcggggcagcacaccctggggccccgccccgccgctgcaccgccgcagcatgccggtggacgagcgcgacctgcaggcggcgctgaccccgggtgccctgacggcggccgcggccgggacggggacccagggtcccaggctggactggcccgaggactccgaggactcgctcagctcagggggcagcgactcagacgagagcgtttacaaggtgctgctgctgggggcgcccggcgtgggcaagagcgccctggcgcgcatcttcggcggtgtggaggacgggcctgaagcagaggcagcannnnnnnnnnnnnnncgctccattgtagtggacggagaagaggcatcactcatggtctacgacatttgggagcaggacgggggccgctggttgcccggccactgcatggccatgggggatgcctatgtcattgtgtactcagtgacggacaagggcagcttcgagaaggcctcagaactgcgggtccagctgcggcgtgcacggcaaacagatgatgtgcccatcatcctcgtgggcaacaagagcgacctggtgcgctctcgtgaggtctcggtggatgagggccgggcctgcgcggtggtctttgactgcaagttnnnnnnnnnnnnnnnnnnncattgcaccacaatgtccaggcgctgtttgaaggtgtcgtgcgccagatacgcctgcgcagggacagcaaagaagccaacgcacgacggcaagcaggcacccggaggcgagagagccttggcaaaaaggcgaagcgcttcttgggccgcatcgtagctcgtaacagccgcaagatggcctttcgcgccaaatccaagtcctgccacgacctctcggttctctaggtcccacccgctcccactatggtgggagacgaacggaagggttggtgggctggcccagccaactgccccgggtgcctcagagcaggctcagactctgggtccctcggagctgccagccgggcacccccaacctcatggtcatggacagatagacagtgctgccctgcgaagtggctctcaggggccagtgagggctgggcccacagagatgcatgcgcaggctcatatgcgtcccaagcagccgcagcgcagccgccgggcaggcctgcgtgccgggagaggactctgccttttttcacagcccgggtgtgcctgccctggagggaggctcttcagtgcggtagctatttgtttacatgcagatttttgtaataaaggctatttcctgataaaaaaaaaaaaaaaaaaaaaaaaaaccgaggggcccgtaccgccccggtttgcaaggccacgagcataacccagaccgggggcacaccccggaaccgccagctgcagccacggtgcacccccagacacgccacagcatgacccccggcgagctatcaccaaacacccaaatccacacacacgccaacacacc

SEQ ID NO: 5582 - DNA, 2314 bp, Homo sapiens
gggggcggcgtccaggcggcggcggcggcggcggctcctcagagtccggctcaggctccggctgcggctccagcccgcgatgccccattccgtgaccctgcgcgggccttcgccctggggcttccgcctggtgggcggccgggacttcagcgcgcccctcaccatctcacgggtccatgctggcagcaaggctgcattggctgccctgtgcccaggagacctgatccaggccatcaatggtgagagcacagagctcatgacacacctggaggcacagaaccgcatcaagggctgccacgatcacctcacactgtctgtgagcaggcctgagggcaggagctggcccagtgcccctgatgacagcaaggctcaggcacacaggatccacatcgatcctgagatccaggacggcagcccaacaaccagcaggcggccctcaggcaccgggactgggccagaagatggcagaccaagcctgggatctccatatggacaaccccctcgctttccagtccctcacaatggcagcagcgaggccaccctgccagcccagatgagcaccctgcatgtgtctccaccccccagcgctgacccagccagaggcctcccgcggagccgggactgcagagtcgacctgggctccgaggtgtacaggatgctgcgggagccagccgagcccgtggccgcggagcccaagcagtcaggctccttccgctacttgcagggcatgctagaggccggcgagggcggggattggcccgggcctggcggcccccggaacctcaagcccacggccagcaagctgggcgctccgctgagcggcctgcaggggctgcccgagtgcacgcgctgcggccacggcatcgtgggcaccatcgtcaaggcacgggacaagctctaccatcccgagtgcttcatgtgcagtgactgcggcctgaacctcaagcagcgtggttacttctttctggacgagcggctctactgtgagagccacgccaaggcgcgcgtgaagccgcccgagggctacgacgtggtggcggtgtaccccaatgccaaggtggaactcgtctgagctgggaccctgctcccacgcctgcttcttaaggtccctgctcggccggtgtaaatatgtttcaccctgtccctctaataaagctcctctgctccaccttgaaaaaaaaaaaaaaaatgccaccctcctgcgcaggccatgcatggctcccgagtacagtagtatctgcttaggtgccaggcatgtcctaggctctgggtgcagtagtgagcaggacgggtaccatgctgccctgaaggggccacagcctgggtggaaggcagacctgaatcacaacgggccagctctagtaatacgaaggtgaggtctgggatgctgcgtgcggcgcgacgacaggaggtatgacctgggtggggtcagggaaagtcttagctgagaactaagagatgagggaggcacaaactctgcacgggggaactgtgtgtgcaaaggtgagctgggggcgagaaaggcctctgtggccgtcatcggcactagcgggttgggggtggtggtggggtgctggcagcctcaggagcgatcgctcccctggagagggtgattgagtgtggagatcaccggggccgccgcgggccgtctgcacttctgttccaggtttttctggcattttctgttccaggtttcttccacccacgagcactttattctcctccgagacccccttttcttccccttcctctctcccaccagggggcgcgcttaaatttccagacagagaccagaaggaaggtttagaaagaaaagaacacttgcccagggcagctttgccctccaagaggctccctcctgtctctaagtcaattccacccctcctcgaagtcccggcttccacccctctcctcagagtcccggcgtttacctcgtggtgtgtttgccttgggcctttcatgccccggctgcacacatcgtctgtgaattgtggctgttcactcccgaggatgtgtcctagactccgggtcgcgtggatctaccctctagtttacttgctcgggagaagaaactgactcgttttatttagtgcctatttagcgagcccagagtaacgtacatttgtgctgttttcaattttgtgctatcgcaaatcacaaaaaaactgttatcaattcacattcatcatcagcacgagacccatttccttgtgctcctgccagctcaggatattatgtttcttttttcatttttgccagtctgttaagtaaaatgtcatatgcgtttgttttaaaaaaaaaaaaaaaaaaaaac

SEQ ID NO: 5583 - DNA, 1247 bp, Homo sapiens
  misc_feature (8)..(8): n is a, c, g, or t
  misc_feature (12)..(12): n is a, c, g, or t
cggcgaangggnaccgggcccctttggacccacgcgtccgatctacacgcgtcaagccactcctcaagtggacaaggcacttaccaacagagattgctgatttgctccttaagcaagagattcactgccgctaagcatggctcagaccaactcgttcttcatgctgatctcctccctgatgttcctgtctctgagccaaggccaggagtcccagacagagctgcctaatccccgaatcagctgcccagaaggcaccaatgcctatcgctcctactgctactactttaatgaagaccctgagacctgggttgatgcagatctctattgccagaacatgaaattcgggcaacctggtgtctgtgctcacccaggccgagggtgccttcgtggcctcactgattaaggagagtggcactgatgacttcaatgtctggattggcctccatgaccccaaaaagaaccgccgctggcactggagcagtgggtccctggtctcctacaagtcctggggcattggagccccaagcagtgttaatcctggctactgtgtgagcctgacctcaagcacaggattccagaaatggaaggatgtgccttgtgaagacaagttctcctttgtctgcaagttcaaaaactagaggcagctggaaaatacatgtctagaactgatccagcaattacaacggagtcaaaaattaaaccggaccatctctccaactcaactcaacctggacactctcttctctgctgagtttgccttgttaatcttcaatagttttacctaccccagtctttggaaccctaaataataaaaataaacatgtttccactaaaaaaaaaaaaaaaaaaaaaaaaaaaaaaaaggcggcagaccggcacaaaaaaataacccacaggggggggccacgaaatataaacattaccccagagtagcggcgaccaaggtggccccaaatgaagggagccgcggaccatacaacaccaggacaagggccacgacgattacacaacggcccgagccgaggggcaaaaccggcgcgcccggggggcccccgtgggagagcgacacaccacaccaccgggcggggcgcaccaaccaggcgagccaaccacccccacacacgagatataagaccccgcagcggaccaataaaacagtcaacagtaccaataggtcgacacacaccacgccactattaagacggccaggacaaagtggacgaccggaagagagatgtagcagacat

SEQ ID NO: 5584 - DNA, 2906 bp, Homo sapiens
agcggggctcagcgggcggggcgcaggagcggtggggcggaggagccggggaggcgggaggcgggaggcgggaggtgttggggccgttgaagcggcctccctcccgcccccagccgcccggtctggccccagccctgtctcgacccccggcctggcccactccgaccctacccggccgaagggttccgctggacacgcaggcggcctccggagcagcccaagcccatgagggccgcgcgcccggccgccggtgctgacgagacggagctcctggcccccgaggaggagcagaggatcaatgcggttcaagaatcgattccagcggttcatgaaccatcgagctccagccaatggccgctacaagccaacttgctatgaacatgctgctaactgttacacacacgcattcctcattgttccggccatcgtgggcagtgccctcctccatcggctgtctgatgactgctgggaaaagataacagcatggatttatggaatgggactctgtgccctcttcatcgtttctacagtatttcacattgtatcatggaaaaagagccacttaaggacagtggagcattgttttcacatgtgtgatagaatggttatctatttcttcattgctgcttcttatgctccatggttaaatcttcgtgaacttggacccctggcatctcatatgcgttggtttatctggctcatggcagctggaggaaccatttatgtatttctctaccatgaaaaatataaggtggttgaactctttttctatctcacaatgggattctctccagccttggtggtgacatcaatgaacaacaccgatggacttcaggaacttgcctgtgggggcttaatttattgcttgggagttgtgttcttcaagagtgatggcatcattccatttgcccacgccatctggcacctgtttgtggccacggcagctgcagtgcattactacgccatttggaaatacctttaccgaagtcctacggactttatgcggcatttatgaccaatctgtactaattctccaaaccagtattatttcaattatggcacttgggagtggggtgagagctaaacattgcacagggaaagaaaaaaaataactgcactgactttatatcttttgaatataattactgtgaaagtataaaggcctgtgttctggaattttctgcctcacagcaaataaataaggtagtgaattaattattcattccattccactatcatgaaggactctgaatagacttggccaactgatgtttacaaaccagacttttatattttaattttacagattttactacatgatttttctaaattactatgtcaggttgtaaaagtcagtgcaataacaaaccttcctttttaagaagaaaattgtttctattactttcccattcactaggtaaagaatcatggacagaacttacactactttttaccatgtttcatcttggcataacatggttcttttttaaatagaaactttagttttttgtaaatttttaaaaaaatatttcattgatatgcatctctgcaggtcctcattcatgttgtaaatttttggagcaagcagtcaacattccacaaacgaacaaacattatacctcttctgatagttttattaagcatggagaaattgccaatttttaaaaactgcagttttccaaacttttctgccaacctcttactctgaattcagtgctgctttgggacatatacttgacctagcttggtttaccagtgatggaaaagtattttgatatcattaactttttcaaaagatccaactttttctctatgcctttgccacattctcttcagggtctctttccacagcggataaatgttttttctgtattatgacagtattgttgtgatggccatctgctggaaactcctgaagagcattatgtattacagtgagcagttgtattgcctgtttggtgcccaatggttaagtcattgtcacttagctttatattgtcagtttgatatttattttaaattgtggaactagatgcataaattcacatttctgcctttcctttgcatcttctcatatattgtgttttttttttttttcctagaaaaaatatttaaagcattgtttgacaggtagaaactcatgtatctgtagtccatgagttatatcctggctcagtggagtgatatttatgtattatttttacttttctctcagtgtcttatattaagattaacatgttgttaatagttgctttgttgattaatctctcttgttggtgttttaataaatgaaataggcttgcctttagatcgggtgctgatattgcctgtttcctagtaatgggctgatcaaatgatcagtggaattcttggtttgatgataaccttattaattgaaattttttactgatgtggctttaaaagaggtttattttgtatatgtttagaactctctgattttgatgaattatatgggaatgagaaacagaagaagtggtatttgctggcgagttaaataggcaaggtacccagtgataacaccaaccaaaccactcctatctgcatgattctgaacatctggatgcctgttgttttactgtgtatattttatttttaatatattaactttgtggattcatttaaggtctactcaaaagtaacactgtcaaaaccactaatatgtatgtaaaaattgtgctgtatactacaataaagttgttacttggatttgttccaaaaaaaaaaaaaaagggggggccccctctaaaaatatcccctcgagggggcccaagctttacggcggaaccccacttttttttggaaaaaaggggggtcccttatagcgggggcccctaatccttaaacttccggccccttggcccccccctttttaacaccggtgtggg

SEQ ID NO: 5585 - DNA, 5037 bp, Homo sapiens
agcgggcttttacaatggggagctgcagaagcgtagggaagaagctgaagaaaaaaagggggcgtctcccctttaaagacttgcaaagattgagagagaaagagagagagtcaagaacagagaatcagagagagagagagagtctgtgtctctgggaaagaagaacatctctgcttcacagtgatttgcgctgggggagaggcatcaattggcttcggacccaagggggagacgagaccaggtcaccccggttaagaccaagtgagcgttgcccctccctctcccaactctctacccgggaatgtctcggcgaaagcagcggaaaccccaacagttaatctcggactgcgaaggtcccagcgcgtctgagaacggtgatgctagcgaggaggatcacctcccaagtctgtgccaagtgctgcgcagaatttcactgacccaactgaattcctcgcccaccagaacgcatgttctactgaccctcctgtaatggtgataattgggggccaggagaaccccaacaactcttcggcctcctctgaaccccggcctgagggtcacaataatcctcaggtcatggacacagagcatagcaaccccccagattctgggtcctccgtgcccacggatcccacctggggcccagagaggagaggagaggagtcttcagggcatttcctggtcgctgccacaggtacagcggctgggggaggcgggggcctgatcttggccagtcccaagctgggagcaaccccattacctccagaatcgacccctgcaccccctcctcctccaccaccccctccgcccccaggggtaggcagtggccacttgaatatccccctgatcttggaagagctacgggtgctgcagcagcggcagatccatcagatgcagatgactgagcaaatctgcaggcaggtgctgttgcttggctccttaggccagacggtgggtgcccctgccagtccctcagagctacctgggacagggactgcctcttccaccaagcccctactacccctcttcagccccatcaagcctgtccaaaccagcaagacactggcatcttcctcctcctcctcctcttcctcttcaggggcagaaacgcccaagcaggccttcttccacctttaccacccactggggtcacagcatcctttctctgctggaggggttgggcgaagccacaaacccacccctgccccttccccagccttgccaggcagcacagatcagctgattgcctcgcctcatctggcattcccaagcaccacgggactactggcagcacagtgtcttggggcagcccgaggccttgaggccactgcctccccagggctcctgaagccaaagaatggaagtggtgagctgagctacggagaagtgatgggtcccttggagaagcctggtggaaggcacaaatgccgcttctgtgccaaagtatttggcagtgacagtgccctgcagatccaccttcgttcccacacgggtgagaggccctataagtgcaatgtctgtggaaaccgttttaccacccgtggcaacctcaaagtgcatttccaccggcatcgtgagaagtacccacatgtgcagatgaacccacacccagtaccagagcacctagactatgtcattaccagcagtggcttgccttatggtatgtccgtgccaccagagaaggccgaggaggaggcagccactccaggtggaggggttgagcgcaagcctctggtggcctccacaacagcactcagtgccacagagagcctgactctgctctccaccagtgcaggcacagccacggctccaggactccctgctttcaataagtttgtgctcatgaaagcagtggaacccaagaataaagctgatgaaaacacccccccagggagtgagggctcagccatcagtggagtggcagaaagtagcacggcaactctcatgcaactaagtaagttggtgacttcactaccaagctgggcactgcttaccaaccacttcaagtccactggcagcttccccttcccctatgtgctagagcccttgggggcctcaccctctgagacatcaaagctgcagcaactggtagaaaagattgaccggcaaggagctgtggcggtgacctcagctgcctcaggagcccccaccacctctgcccctgcaccttcatcctcagcctcttctggacctaaccagtgtgtcatctgtctccgagtgcttagctgtcctcgggccctacgccttcattatggccaacatggaggtgagaggcccttcaaatgcaaagtgtgtggcagagccttctccaccaggggtaatctgcgtgcacatttcgtgggccacaaggccagtccagctgcccgggcacagaattcctgccccatctgccagaagaagttcaccaatgctgtcactctgcagcagcatgtccggatgcacctggggggccagatccccaacggtggtactgcactccctgaaggtggaggagctgctcaggagaatggctccgagcaatctacagtctccggggcagggagtttcccccagcagcagtcccagcagccatcaccggaagaggagttgtctgaggaggaggaagaggaggatgaggaagaagaggaagatgtgactgatgaagattccctggcagggagaggctcagagagtggaggtgagaaggcaatatcagtgagaggtgattcagaagaggcatctggggcagaggaggaggtggggacagtggcggcagcagccacagctgggaaggagatggacagtaatgagaaaactactcaacagtcttctttgccaccaccaccaccacctgacagcctggatcagcctcagccaatggagcagggaagcagtggtgttttaggaggcaaggaagaggggggcaaaccggagagaagctcaagtccggcatcagcactcaccccagaaggggaagccaccagcgtgaccttggtagaggagctgagcctgcaggaggcaatgagaaaggagccaggagagagcagcagcagaaaggcctgcgaagtgtgtggccaggcctttccctcccaggcagctctggaggagcatcagaagacccaccccaaggaggggccgctcttcacttgtgttttctgcaggcagggctttcttgagcgggctaccctcaagaagcatatgctcctggcacaccaccaggtacagccctttgccccccatggccctcagaatattgctgctctttctctagtccctggctgttcgccttccatcacctccacagggctctccccctttccccgaaaagatgaccccacgatcccatgagcctgtttttctgtacctgctgctctttgtcccacagagcagaaacagcttcacaaaaggacctcccagagttatgagccctgattttgtctttttctctaagttcttaacatgttatgtccctagtggcttttctgtagtccctgagcttggaaattactgtgcttacaaggggatggccccctaaggaatttttcttccctcctcattctttgtacctgaggaacatagattctctgcagctttctcaaggggaaccctctccagcttccctggtgtgacccttcttccccctcctctctcctctccctttccctttggtaggtgcacctgagcacctacatttggcattgcagcctagccaaaaagggctggcagctgtctctggagggcccagtgccactcctctggggtgacctttctgctcagctggtgggtatgggtcccctatctttctagaaccagtatgtggcattcctgtcaaatggcctgcccatgaagccctggaattccagctccacctccactaccactccaagcctggccccaccagtgctgtttggcctaggaactgtggctgggaaggtgcctccaacaatgggatccagggaagccaaggagaagacagcccccctcctatttcagcctcctgcacccaaggcagtgcctgagaagcccatcatagacaagaagtagcaaactgtacattccttcttcctccccctgctccagaaggtgccggtactgaagatgctccagtaattggtgacccaaccctaggaagtagggagaaatgaaggaagggcataggaaaattttcccaggtaaatcccctgatggtcacattaaggtaaaggttttggctggtcagtgtgccaagacctctccagcttctcattcatgatgacctctcaaagttgggaaacaagctgatttcttgccaagaggtctcccaggagatatttgggaaatgtgaagttcgtatctttaaggagcatttttggtcagcatggttgatgaactaatgatgagagagttaaggaatgttgctagaacatagggcttgctggtacctatgtgactaagaaagggacatgatgtaagggaaaaggcctcaaattcttgtgaatgtggacattctcgttaatattcttttgggctaatagtgacatagtgtgcagaggtgtaccagggatcatgggggatttcctagcactagtatgcttctagttttagataactccctcctttattccctggccccttgtattttccttatcttcctctttcaagacccctacccattttgcctatccgtaggctggggcttgtgtctttgtcattgtctggttcttaagagtcccagactttgggagaccagctccaggtggcgtcctccctgcctctccgtcttgtaatgagttgtagtatttactcttaacataggatcatttggaacaggagttctgaggaggagagagtgagggttttgctattgactgacttgaacgatggcttctcctcaagctgtaggctccagagcttcctaacctagtaaaatgtcaagaacagacgggagatattagtgtctttccctctatcattaaaggtgttttaaccaagaaaaaaagaaaaaaaaaaaaaaaaaaaaaaaaaaaaaaaaaaaaaaaaaaaaaaaaaaaaaaaaaaaaaaaaaaaaaaaaaaaaaaa

SEQ ID NO: 5586 - DNA, 2199 bp, Homo sapiens
  misc_feature (1616)..(1678): n is a, c, g, or t
aagttccggctttggcgctatatgacgtcaccgaagtgacggagcggaaaagcgcgagaagcggcttggttccttgtacgcagaggcggtagtgacacaggcacaactgagagtggcagaagctcagctgacaaggactggggacggcggtgtccttgtctggctacaggttcggggcgcgggtctcttccgcggaaactgacattgcgtttccgttgtcggcctcccactgcaggagccatatattgaagaccatgtctgggagcttctactttgtaattgttggccaccatgataatccagtttttgaaatggagtttttgccagctgggaaggcagaatccaaagacgaccatcgtcatctgaaccagttcatagctcatgctgctctcgacctcgtagatgagaacatgtggctgtcgaacaacatgtacttgaaaactgtggacaagttcaacgagtggtttgtgtcagcatttgtcaccgcggggcatatgaggtttattatgcttcatgacataagacaagaagatggaataaagaacttctttactgatgtttatgatttatatataaaattttcaatgaatccattttatgaacccaattctcctatttgatcaagtgcatttgacagaaaagttcagtttcttgggaagaaacaccttttaagctgaatgcagaaaattccaaaataaatgatgtcaccacaatggtgtatactcaggaatgtgtacattgtaagttacttgattaaatagcctggaaaacttttgtgtattctcagcttatctaaacctaatgaaattccttttatatttaaaaatagtacattctgtctcatgtcacgtatcaatagatcaattggtatttccttgtgaacagtgttatttataaagagttcattatcaataatcatgttttttttttttttttttttctgatacagagtctcactctgttgccaggctggagtgcagtggcgcaatcttggctcactgcaacctccgcctcccaggttcaggcgattctcctgcctcagcctccaagtagctgggactacaggcgcgtgccaccacgcccggctaatttttgtatttttagtagagacagggtttcaccatattggtcaggctggtcttgaactcctgacctcgtgatctgcccgcctcagcctcccaaagtgctaggattacaggcatgaaccaccgtgcccggccaggaataagcttttgacttacccaattcagataggttgatctttggggtttttttttttttttgagatggagtttcgctctgttgtccaggctggagtgcaatggcagttgtttcaccgtaacctctgcctcctgacttcaagcaattctcctgcctcagcctcccaaagtgctgggattacaggtgtgagccaccgtgcccggcccagataggttgatcttaatgtaacaacccaaaaataaatgtcatagtcaagatttggtagataaatttaaaattaaaatattctgcagttgggagtgaaatgtgatagcacatacgttgacattatgcatttagagatgttataaaaatgtataggcagtatacacagcactactcaagaagccaaagannnnnnnnnnnnnnnnnnnnnnnnnnnnnnnnnnnnnnnnnnnnnnnnnnnnnnnnnnnnnnnctgctataatgtgagaacccaaatcatgtttataaaataggacgctgggagcagttgcaggccacagtgaagtgtgttgcttctgtcactttatattcttatatttcctttccctcagacagtaaactgttgatactcgtacttgtaaaaaattgtaaggcaatttttagtattgttgtcaaagaaaagcttggattacattaacatttgtattcagtcttttaggtgatacaccagagggggctgggaattgtctctttgttcctataagtagatcttaatgtaaaatagtaaatgtccattgaaaagcaagtaatacagcctgtgctaattgggagcacttgaacaattttgttccattctgagtaacttttgagcaagtaattctaagctttgtcttgtatccttgtgtgaaattgcataatttttaccctatttgatttcttaaataaagatgtttgctcaaaaaaaaaaaaaaaaaaaaaaaaaaaaaaaaaaaaaaaaaaaaaaaaaaaaaaaaa

SEQ ID NO: 5587 - DNA, 2680 bp, Homo sapiens
agggacagcccagaggaggcgtggccacgctgccggcggaagtggagccctccgcgagcgcgcgaggccgccggggcaggcggggaaaccggacagtaggggcggggccgggccggcgatggggatgcgggagcactacgcggagctgcacccgtgcccgccggaattggggatgcagagcagcggcagcgggtatggcaggcagccggcgggccggcctccagcgcaggtgcccgagaggcaggggctggcctgggatgcgcgcgcacctgccctcgccccgccccgcccgcacgaggggtggtggccgaggccccgccccgcacgcctcgcctgaggcgggtccgctcagcccaggcgcccgcccccgcccccgccgattaaatgggccggcggggctcagcccccggaaacggtcgtacacttcggggctgcgagcgcggagggcgacgacgacgaagcgcagacagcgtcatggcagagcaggtggccctgagccggacccaggtgtgcgggatcctgcgggaagagcttttccagggcgatgccttccatcagtcggatacacacatattcatcatcatgggtgcatcgggtgacctggccaagaagaagatctaccccaccatctggtggctgttccgggatggccttctgcccgaaaacaccttcatcgtgggctatgcccgttcccgcctcacagtggctgacatccgcaaacagagtgagcccttcttcaaggccaccccagaggagaagctcaagctggaggacttctttgcccgcaactcctatgtggctggccagtacgatgatgcagcctcctaccagcgcctcaacagccacatgaatgccctccacctggggtcacaggccaaccgcctcttctacctggccttgcccccgaccgtctacgaggccgtcaccaagaacattcacgagtcctgcatgagccagataggctggaaccgcatcatcgtggagaagcccttcgggagggacctgcagagctctgaccggctgtccaaccacatctcctccctgttccgtgaggaccagatctaccgcatcgaccactacctgggcaaggagatggtgcagaacctcatggtgctgagatttgccaacaggatcttcggccccatctggaaccgggacaacatcgcctgcgttatcctcaccttcaaggagccctttggcactgagggtcgcgggggctatttcgatgaatttgggatcatccgggacgtgatgcagaaccacctactgcagatgctgtgtctggtggccatggagaagcccgcctccaccaactcagatgacgtccgtgatgagaaggtcaaggtgttgaaatgcatctcagaggtgcaggccaacaatgtggtcctgggccagtacgtggggaaccccgatggagagggcgaggccaccaaagggtacctggacgaccccacggtgccccgcgggtccaccaccgccacttttgcagccgtcgtcctctatgtggagaatgagaggtgggatggggtgcccttcatcctgcgctgcggcaaggccctgaacgagcgcaaggccgaggtgaggctgcagttccatgatgtggccggcgacatcttccaccagcagtgcaagcgcaacgagctggtgatccgcgtgcagcccaacgaggccgtgtacaccaagatgatgaccaagaagccgggcatgttcttcaaccccgaggagtcggagctggacctgacctacggcaacagatacaagaacgtgaagctccctgacgcctacgagcgcctcatcctggacgtcttctgcgggagccagatgcacttcgtgcgcagcgacgagctccgtgaggcctggcgtattttcaccccactgctgcaccagattgagctggagaagcccaagcccatcccctatatttatggcagccgaggccccacggaggcagacgagctgatgaagagagtgggtttccagtatgagggcacctacaagtgggtgaacccccacaagctctgagccctgggcacccacctccacccccgccacggccaccctccttcccgccgcccgaccccgagtcgggaggactccgggaccattgacctcagctgcacattcctggccccgggctctggccaccctggcccgcccctcgctgctgctactacccgagcccagctacattcctcagctgccaagcactcgagaccatcctggcccctccagaccctgcctgagcccaggagctgagtcacctcctccactcactccagcccaacagaaggaaggaggagggcgcccattcgtctgtcccagagcttattggccactgggtctcactcctgagtggggccagggtgggagggagggacaagggggaggaaaggggcgagcacccacgtgagagaatctgcctgtggccttgcccgccagcctcagtgccacttgacattccttgtcaccagcaacatctcgagccccctggatgtcccctgtcccaccaactctgcactccatggccaccccgtgccacccgtaggcagcctctctgctataagaaaagcagacgcagcagctgggacccctcccaacctcaatgccctgccattaaatccgcaaacagccaaaaaaaaaaaaaaaaaaaaaaaaaaaaaaaaaaaaaaagggggggcgc

SEQ ID NO: 5588 - DNA, 764 bp, Homo sapiens
  misc_feature (411)..(411): n is a, c, g, or t
ttgtagaggcgagctcttgctatgttgcctaggctcgggcttgaactcctgagctcaagagatcctcccactttggcctcccaaagtgctcggattacaggcccagcctcaagatattttttaaagtcatgctttaaggtggcattccacgttaaaatattctccctcattcacttcaagacaggttgatcagccatcaaggcctgccctagacatacagggtcgtgtggataacaggcacgttttgggggcttcctttgcaaatcaaatctctctaagagatggcaaacaccaaaaaaagggatccattataggttgctcatgttatatgccctcacaaaagtgacaacatttctcctacatggctttgcttggaataagaactattataaagaagccccccgaaaaaanaaggtgtgtgtgtgtgtgtgtgtgtgtgtgtgtgtgtgtgtgtgtgtgatagagactgtgttggtcacttatttcataagccttgcagtgataattacagtctgaagtgaccctactatgtctgaatacttccatggtaaaaaataaattctatcacgacaaaaacttttggaaaaaaacatgcatagccagtctaacctttaaaggtcgctgaggagctgcaatctttatttgaattcattatgaaatcaataaaacctctggttaagattcatgtaattataaataacacggaagaccgtgaggagaaaaaaatgtttgtcataaatctttcataacttctcaaacttcac

SEQ ID NO: 5589 - DNA, 833 bp, Homo sapiens
  misc_feature (817)..(832): n is a, c, g, or t
gagaggcactctgcaaacacttcctcaaactttaggaaagcaaaaacattccttctgctcaacacggcagaaaacagggtctctgccccttggcgctgggtgaggagtgtcctaatccaaaagccatgaacagcggcgtgtgcctgtgcgtgctgatggcggtactggcggctggcgccctgacgcagccggtgcctcccgcagatcccgcgggctccgggctgcagcgggcagaggaggcgccccgtaggcagctgagggtatcgcagagaacggatggcgagtcccgagcgcacctgggcgccctgctggcaagatacatccagcaggcccggaaagctccttctggacgaatgtccatcgttaagaacctgcagaacctggaccccagccacaggataagtgaccgggactacatgggctggatggattttggccgtcgcagtgccgaggagtatgagtacccctcctagaggacccagccgccatcagcccaacgggaagcaacctcccaacccagaggaggcagaataagaaaacaatcacactcataactcattgtctgtggagtttgacattgtatgtatctatttattaagttctcaatgtgaaaaatgtgtctgtaagattgtccagtgcaaccacacacctcaccagaattgtgcaaatggaagacaaaatgttttcttcatctgtgactcctggtctgaaaatgttgttatgctattaaagtgatttcattctgaaaaaaaaaaaaaaaaaaaaaaaaacaaataacgacttcaggcatgtaatttcgaagatggggtgcgaggcnnnnnnnnnnnnnnnnc

SEQ ID NO: 5590 - DNA, 4785 bp, Homo sapiens
tgaattcgtgagagacttgagggaggcgctgcgactgacaagcggctctgcccgggaccttctcgctttcatctagcgctgcactcaatggaggggcgggcaccgcagtgcttaatgctgtcttaactagtgtaggaaaacggctcaacccaccgctgccgaaatgaagtataagaatcttatggcaagggccttatatgacaatgtcccagagtgtgccgaggaactggcctttcgcaagggagacatcctgaccgtcatagagcagaacacagggggactggaaggatggtggctgtgctcgttacacggtcggcaaggcattgtcccaggcaaccgggtgaagcttctgattggtcccatgcaggagactgcctccagtcacgagcagactgcctctggactgatgcagcagacctttggccaacagaagctctatcaagtgccaaacccacaggctgctccccgagacaccatctaccaagtgccaccttcctaccaaaatcagggaatttaccaagtccccactggccacggcacccaagaacaagaggtatatcaggtgccaccatcagtgcagagaagcattgggggaaccagtgggccccacgtgggtaaaaaggtgataacccccgtgaggacaggccatggctacgtatacgagtacccatccagataccaaaaggatgtctatgatatccctccttctcataccactcaaggggtatacgacatccctccctcatcagcaaaaggccctgtgttttcagttccagtgggagagataaaacctcaaggggtgtatgacatcccgcctacaaaaggggtatatgccattccgccctctgcttgccgggatgaagcagggcttagggaaaaagactatgacttcccccctcccatgagacaagctggaaggccggacctcagaccggagggggtttatgacattcctccaacctgcaccaagccagcagggaaggaccttcatgtaaaatacaactgtgacattccaggagctgcagaaccggtggctcgaaggcaccagagcctgtccccgaatcacccacccccgcaactcggacagtcagtgggctctcagaacgacgcatatgatgtcccccgaggcgttcagtttcttgagccaccagcagaaaccagtgagaaagcaaacccccaggaaagggatggtgtttatgatgtccctctgcataacccgccagatgctaaaggctctcgggacttggtggatgggatcaaccgattgtctttctccagtacaggcagcacccggagtaacatgtccacgtcttccacctcctccaaggagtcctcactgtcagcctccccagctcaggacaaaaggctcttcctggatccagacacagctattgagagacttcagcggctccagcaggcccttgagatgggtgtctccagcctaatggcactggtcactaccgactggcggtgttacggatatatggaaagacacatcaatgaaatacgcacagcagtggacaaggtggagctgttcctgaaggagtacctccactttgtcaagggagctgttgcaaatgctgcctgcctcccggaactcatcctccacaacaagatgaagcgggagctgcaacgagtcgaagactcccaccagatcctgagtcaaaccagccatgacttaaatgagtgcagctggtccctgaatatcttggccatcaacaagccccagaacaagtgtgacgatctggaccggtttgtgatggtggcaaagacggtgcccgatgacgccaagcagctcaccacaaccatcaacaccaacgcagaggccctcttcagacccggccctggcagcttgcatctgaagaatgggccggagagcatcatgaactcaacggagtacccacacggtggctcccagggacagctgctgcatcctggtgaccacaaggcccaggcccacaacaaggcactgcccccaggcctgagcaaggagcaggcccctgactgtagcagcagtgatggttctgagaggagctggatggatgactacgattacgtccacctacagggtaaggaggagtttgagaggcaacagaaagagctattggaaaaagagaatatcatgaaacagaacaagatgcagctggaacatcatcagctgagccagttccagctgttggaacaagagattacaaagcccgtggagaatgacatctcgaagtggaagccctctcagagcctacccaccacaaacagtggcgtgagtgctcaggatcggcagttgctgtgcttctactatgaccaatgtgagacccatttcatttcccttctcaacgccattgacgcactcttcagttgtgtcagctcagcccagcccccgcgaatcttcgtggcacacagcaagtttgtcatcctcagtgcacacaaactggtgttcatgggagacacgcgtgacacggcagggtgactgcccaggacattcgcaacaaagtcatgaactccagcaaccagctctgcgagcagctcaagactatagtcatggcaaccaagatggccgccctccattaccccagcaccacggccctgcaggaaatggtgcaccaagtgacagacctttctagaaatgcccagctgttcaagcgctctttgctggagatggcaacgttctgagaagaaaaaaaagaggaaggggactgcgttaacggttactaaggaaaactggaaatactgtctggtttttgtaaatgttatctatttttgtagatattttatataaaaatgaaatattttaacattttatgggtcagacaactttcagaaattcagggagctggagagggaaatctttttttttccccctgagtggttcttatgtatacacagaagtatctgagacataaactgtacagaaaacttgtccacgtgcttttgtatgcccatgtattcatgtttgtttgtagatgtttgtctgatgcatttcattaaaaaaaaaaccatgaattacgaagcaccttagtaagcaccttctaatgctgcattttttttgttgttgttaaaaacatccagctggttataatattgttctccacgtccttgtgatgattctgagcctggcactgggaatctgggaagcatagtttatttgcaagtgttcaccttccaaatcatgaggcatagcatgacttattcttgttttgaaaactcttttcaaaactgaccatcttaaacacatgatggccaagtgccacaaagccctcttgcggagacatttacgaatatatatgtggatccaagtctcgatagttaggcgttggagggaagagagaccagagagtttagaggccaggaccacagttaggattgggttgtttcaatactgagagacagctacaataaaaggagagcaattgcctccctggggctgttcaatcttctgcatttgtgagtggttcagtcatgaggttttccaaaagatgtttttagagttgtaaaaaccatatttgcagcaaagatttacaaaggcgtatcagactatgattgttcaccaaaataggggaatggtttgatccgccagttgcaagtagaggcctttctgactcttaatattcactttggtgctactacccccattacctgagggaaactggccaggtccttgatcatggaactatagagctaccagacatatcctgctctctaagggaatttattgctatcttgcaccttctttaaaactcaaacatatgcagacctgacactcaagagtggctagctacacagagtccatctaatttttgcaacttcctccgccgaattctgtataaccccttccactatctcacagatagtcacagcgtccattccatagtctgtctcctcacatctgttagtattgacacagcacagacaccacaagccatcaggttcttcatggggcaggtgaaatacttctaccccatgggtaaatgtatttacatattaccaagagaagaagcacattatctatgatcttttggcccagttcttatttagcatttttattccagcctacttggaaacatgtttttatttgcaatatatgcctgactgaattaagcttgcttgttttaaacaaccaaatcattggaacagaaaaggatttaaaaaacaagaatgcatgatctcagcgtgattaaaaaaaaatcagtggaaataaatgatcatagaaggtgcttttcaaaacaactgctattataattctcaaagtcctactctgccaaaagaagattaaaagtcatacattacattacaaggaaatgttcatgtgggaagagggttgctgaaaatcaacaacgcttgaagttaaaaagtgtgtctttgtagatttcattgtataatgtgtatttcttaggagatggctgacttgattgatctacgctaagtggagacatttcacatttttaaaaccaaatgttcaatctgtattactctttgccatcttgtatgtagaggctatttttaaatcattaaatttttagatctctgttaaaaaaaaaaaaaaaaaaaaaaaaaaaaaatggttaaaaaaagcacaaaaacacccaacaacaaaaaacaaaaaccactacaacagaacagaacacaagcgaggacatcaaaaaactaaacatacaacagcaaagagagacacaaacagagaacagaaacaaacacaaaagataaggacatcagacaaaaaaaagcgcgcaaacagaagcacagacaaacaagtgaggaacacaaaacaaacccaaaatagacaaccaa

SEQ ID NO: 5591 - DNA, 1246 bp, Homo sapiens
gcccctggtgctttcagatgtcggccaggcttgcagacaaggtgaatgcatctcattggctccagggaggcatgatgccaccgggcagctctttttaagagaaaagccagaaccggtggagcagcgaattccgagcagtgttctctgtgctgagcggcgggactgagctgttgagttagagccaacatgagtgagcgacaaggtgctggggcaaccaatggaaaagacaagacatctggtgaaaatgatggacagaagaaagttcaagaagaatttgacattgacatggatgcaccagagacagaacgtgcagcggtggccattcagtctcagttcagaaaattccagaagaagaaggctgggtctcagtcctagtgggagaaccccctcctagtccacctgaaaacaccaaattcaaccatcatctgtcaagaaattaaaagaacaacaccctagagagaagtcatccacacacaatccacacacgcatagcaaacctccaatgcatgtacagaaacctgtgatatttatacccttgtaggaaggtatagacaatggaattgtgagtagcttaatctctatgtttctctccattttcattcctcctgcaactattttccttgatgttgtaataaaatgaagttacgatgagaaaaaaaaaaaaaaaaaaaaataaaacgccgaggcaatacaaagagaaggagtgcggcagacacagacggcatgggaaagggcacacagggccaaagccaggttcccgagaccgagatacccggccacaaagggcgggcaaaataggggagtcacccacaaaaggaacgacgcattcagtccgcgaaagcaccggttcacccggcgggtaacgggcacaccaggaaaaaggggagcggaagcaccagcagggaagcgagagaggacggagcagagaaggaggaggcgggagaggagaaaggaagaaggaggaaaaggcaggagagtgggacagacgagaaggcgacagggcgaagagcagacacaacaaacgagcagaacaagcagagagaaggggaaaaaggaagaggaaaaaagaggagcacaagagggaaaaaggaaaacaaaacgaaaaagagaggaaggagagaggagaaagaaaagaaaagaaagaagagaaaagagaaaagaaaaaacaagaaagagaggaaggagagagagggagaagagagagagagagaaacgagagggagagaggaggagggggagaaaaaag

SEQ ID NO: 5592 - DNA, 940 bp, Homo sapiens
ggaaaaaaaaaaaaaaaaaaaaggaataggtaaaagggacagaggtgaaattttgagtgacttgagtctcttgcagtccctgattacacagaacctttctgggctacttggagcatcacgaatagtctttcctgtacttaccagatttcaagtattcataacttgactccctaagtgtacaagttgggaatagtacagggccaagttcaagtcgcatatgctgtactgttcctcctgcaaatgtggggaaagaagagggagatactagaggaactgaggctccacccattcattcagttgctctaagcaccagaggacttgtttcagaaaaggggagtgggaacgccctcgactttgccctcctccggagcatctctgggacgcagggagtctggctagcgttaataggaaaggttgctcggcagagctgccctggagtactgacttgtctctccctcctttgtcaaggtccatgtttttctggctcttcctgcacactcatccctagattatgagcgttaatgtacgaaatgtgcagagcaaattgaggccaactgtggcatcaatactgcaacttaaacttgacaatcatggtttgctggtcctcaaacaggcactgaaatctcagtatgggtatacgatttaataatcggcccctcccttctatttgtcggttttatgtttctatccttcaatagctgcactgttttctaatgtgctgtagagtttttgaaataatttatgcaagtatttggtttccatgtttacaatttatacagctttcctagcattttaaatggaaatgtcaataaatgctatgaattggtgtcaaaaaaaaaaaaaaaaaatatctgaggccagcatagatacagtttgaaagggcctatgggggattaagaggaggcggtacgggggaagtcacggttggagacactgggag

SEQ ID NO: 5593 - DNA, 7501 bp, Homo sapiens
  misc_feature (784)..(810): n is a, c, g, or t
  misc_feature (2257)..(2269): n is a, c, g, or t
  misc_feature (4473)..(4489): n is a, c, g, or t
agaagcaaaggagtagtgcatttgttaagaagaagacgcctgaatcttttagtggacctgctttcagcaaacttgttttttaggtcagaatactatatccaatgatcaagctaaacatgaaatgcttcgagtaagactcagtattcatactttgacatttgcaaatcactgggtctaataatactccacgcgtccgggcggcctgagcaatggaagagttaatagttgaacttcgtctctttcttgaactcctggaccatgaatatctaacctcaactgtcagggagaaaaaggcagtgataaccaacattctgctaagaatacagtcatccaaaggttttgatgtgaaggaccatgctcagaagcaggagaccgctaacagcctgccagcccctcctcagatgcccctgccggagatccctcagccctggctgcctcctgacagtgggcctccaccattgccaacatcctccctcccagaaggttattatgaggaagctgtgccactgagccccggaaaagctccggaatacatcacatcaaattatgattccgatgcgatgagcagctcttatgagtcgtatgatgaagaggaggaggatgggaaggggaagaaaacccggcaccagtggccctccgaggaggcctccatggacctggtcaaggacgccaaaatctgcgccttcctgctgcggaagaagcggttcggccagtggaccaagttgctctgcgtcatcaaagacaccaaactgctgtgctataaaagttccaaggaccagcagcnnnnnnnnnnnnnnnnnnnnnnnnnnnccaaggctgtaacattacgtacatcccgaaagacagcaaaaagaagaagcacgagctgaagattactcagcaggacacggacccgcttgttctcgccgtccagagcaaggaacaggccgggcagtggctgaaggtgatcaaagaagcctacagtggttgtagtggccccgtggattcagagtgtcctcctccaccaagctccccggtgcacaaggcagaactggagaagaaactgtcttcagagagacccagctcagatggggagggtgttgtggaaaatggaattaccacatgtaatggaaaggagcaagtgaagaggaagaaaagttccaaatcagaggccaagggcactgtgtcgaaagtcactgggaaaaaaatcaccaagatcatcagtctgggaaagaaaaagccgtccacagacgagcagacctcctcagctgaggaagatgttcccacctgcggctatctgaacgtgctctccaacagccgctggcgagagcgctggtgccgagtgaaagataacaagctcattttccacaaggacaggaccgacctgaagacccatattgtgtctattccgctccgtggctgcgaggtgatcccgggtttggattctaaacatcctctgacgttccggctgctgcgcaacggccaggaggttgcagtattggaggcatcttcttctgaagacatgggcaggtggattgggattttactcgcagagacgggatcgtccacagacccggaggctctgcactatgactacattgatgtggagatgtctgcaagtgtcattcagacagccaaacagaccttctgtttcatgaacaggcgtgttatatctgctaacccatatctagggggcacctccaacggctatgcccaccccagcgggacggcacttcattatgacgatgtcccgtgcatcaacggctcgctcaagggtaaaaagccccccgtggcgtctaatggggtcacaggaaaagggaagactctgagcagtcagccaaagaaagcggatcccgcggctgttgtgaaaaggacgggttcgaatgctgcccagtacaagtatggcaagaaccgggtagaagcagatgccaagcggctacagaccaaagaggaggagctgctgaagaggaaagaggccctgcggaataggctggcccagctccgcaaggaaagaaaagaccttcgagcggctattgaagtgaacgccggcaggaagccgcaggcgatcctggaggagaagctgaagcagctggaggaggagtgccggcagaaggaggcggagcgtgtcagcctggagctggagctgacggaggtcaaggagagcctgaagaaagcgctggcgggcggagtcaccctggggctggccatcgagcccaagtcagggacatcgagtccacagtctccagtgttccggcaccggaccctggaaaactcgccnnnnnnnnnnnnnctgtgacaccagtgacaccgagggccccgtgccggtgaacagcgcggccgtcttgaagaagagccaggctgccccgggcagctccccctgccgagggcatgtgctgcggaaggccaaggaatgggaattgaagaacgggacctaggggacagcagcaccactccagcctcagagactgcacacccccttgcctgtatcctcatctgtgtgacggcaggaagctctgcccagagtggcctcagctgcacgactccagaggctccacgactgagctctgaggccagtgcctgtcccccaggcccacttgtattctttctactgtaaaatggcgcctttaaaaaagatgtaagactttggttcccaactttgttaaaaaacaaaaaaagtgatggaaaggtgtttgaaaggatgctatcaggcgaagtgacatctttctaaccagataggccattgctttcaccgattccaacccagccctggactgaggatggatggttccatgagcccccagatgaaaacctggattcgacagggaagagcttggatccccggctgccccgggcatgagtgtggctggccatgggcactgggctcgccttgcacgcccaccaggagggccaggggcatacgcagtcctgacgtggactttgtgtcttggcgtaccctctccacgtgcccgtccccctcgtcatcagaggtaaaggcatgagaaaatcgcgctgtgaaacgttttttaccttttattattattttttggacagatgcttttgtcaccaagacatgaaaagctgccattcttcttaacctgttttttaagaatgtctttttactgtgtgtcacacttagatcaaggagttttcagaggttccttattttattaattaattatttgtgctgcttttgacaggtagcagagggttttaatacttcactaacagtacaccctcctcccccttgggctagcatccccagcccttaatccacgtcggagccggcaggtgcttctcacaccaggagcctctgggggcaggggctggctcctcgccgctgtacaggacgtttactgctgcttggggccagggcagtcctttgaaagggaagcaagttccggaatttgttccctcatggaactataacaccttagagcaagaggcaggaattccagggcctcctgcccctccccttcctccagcttgtcaagttaaaccactaatgtgttggtgggcctggccgtgctgcctctcctgagtagggtgggtgcaagtagggcctctttcccagctttcttgcttgccttctgtgcaatatttcttggagaatttggatgcctaaggcataaaggaaaaaaacagagttcatagtttgagctggtatttaccccctgggtttaaaaatcagattaacttcttggtctcccggaggctgctgtcaggaattctccagtacgggaagatgcagtcacttatgacgaaataagtcacccctgaacgcctccgcaggcagattcatggagaccagtcccagtagcaaccgccccttccccaagcatagaatacagaggtgccatacttggtgtaagccttccttctgtccactgtccagaatgtcctttttcacacagaggaagagatggcgggaaaacactgactgactccttgggtttcccccagacatactttcagagcgctagctgtgtggtgcacgggactttacagttaggattcatgtttaaggtggtggcgcttgaggcctgcaagggccacgttggattactgaagcggaaagcggtctcccatgtataagaaaaagttttacaacacgaattggaagctgcttgagtccacctgaacttgaattgattgcaaagccatctgccgggaacggttttgggttcctgagccatcagccagcctttctttcccctctgatgcacgttcctcccggcctagtccgtggaggcccatcacaccagatcgggagccggcttcccactaggacatccaggcaggtcgggcggggacgccacacgcctcagggccgtccgctgcactgccatagaggagccctccctccagtggtcacttcccaccattgcaggcagacttcccaccattgcaggcagctgggcccacttcatatcacacaaaatgaattttctataaagggaaaaaagtttgctcctccatagatttttgctgccttcnnnnnnnnnnnnnnnnncctggttgacgctcttgggccactctgattggcagcctgctttgccaaagagaactgtgtgaggttttggtggttagtaagagaagggggagatggccagcctgaagtcacggtcctggcccagcacaggtgggcagcagcgagctggcaggtgaagtgtgagcagcacgcaaagtgtcacgtgggccttagccgtcacccaccagcttcctcaccaggcaaggaggccccggagccttagcagggacttgcccgacggcacagctgattggtgctcgactcccagcatgcatattttgttgtaaaaacccaggtttgtaattcacatccacaaccctaagccttttaaagcggaggcaaacgttaacgaaccccatcgtggtccatggagcctttcaaaatgggtgccctggaggggcctgacagtgggttccttccatggcggatactcccttgaaatttcacattccatcaaagtttaaagcatttacttcagaataagttatttatgtgtatatgttcaataaatatagtttttaatttatatctgtacatattagacacacgcgagccatcttgccagaattctgacagtgatgtcattttattcccctcccaaaacatgccccaggaacaagcaccccttgcctctgtggcagctgcgagtgtgtctgatttcataacgaagccaggctgagggcaagaggcccgacaggcaggccagggtccccggagaagccggatttcttcgcaatgtcactggtacttagcagatggtcgtgttcacaggggctagccacctgtactacggtgccgaccgcaatgcgaggaatgtggtggccacgcgatggagctggccggaggacaggtcaggtgagggggccgacccctgcgggctcagggctctttccattctaaccttgagccacagtgtcactcttcagggctctgctcctggctctattttgttaaggtgtcatcagccttcaacctccatttatatatttttataatgttaagccactgaccaactttttcatagaaacaactatcagatttgagggctccctttgtccccctgacctgggcacaggcatgggccatggctccctcttcccagaatctgcggggaactggggcaaggcccatctgtctgcaaggctggtagctctctccctcggcttccagagtccacggcagttgcaaggtaaccagtgtggatctgctgagtcaccccaggcaccagacttaccccaggagcatgggccactgtccatggggccttccttgagaccttcccttggggctggcgggcggcggcttaccagctgggtcagtcccatctcgcccctctgtgcctatgccctggcgttgccaggcttaaccttcccctgtatcttactcatcccagaattattactggccatttctaaatagacaaaaactaccctaaaatgtggagatttactccttttgaaaagtctgtttcaaaaagtgtggcctcagctctggaggccacccccaggaaggagtttgaggttcattgtcattatggccacagtttggtgcttgtgcacgggactcaaagggcagcgtcgaagctggggttaggtgtagggttgtgagcaaagctcccctgtttgtggccacaccttccctttccaaaaaggctattaattctactcacccactatttggggggatgtaaattttgcccacagactttgccacccaggtgaggtgctgtgttcatgcacggaactgatgtcattagacaccatccaaggatgggcagcctgcagtgtggccggcgactgccatccagagaaaaggcaccttgtgccacagggcggggccgacaccctgagctcacaggtggcccctgcattcaggtggatgtccatccttgaaacagcctcttctgggaacacagcactggaggtctccaggcatcagggttggccggcagggtgccctgcagcttacataaaggtcgtggcaatgtttcaatgttaaactaaactattgccttcctcttacttttcctaaaatgattttctaatgggaacagtcacttcaagttcatgacatagtttgaaggaggataattcattttttcctggttgtcactgtcttctttcttatccccttggtgggctgggttcatactgtgaaataaactaaaatgaaaccaaaacgttcctgccgtaaatacgtggcacagcactgcagaaaaagcagtcacctctattcgtgagtccccaagccatagcagggcgtctgtaaaagaagggaaactgcacccaggaagtggtgggcgtcagacgcatcctttcgcccgtagttcatgaaatagttccggctttggtcttccagaaaatctcaacttcaccgtgcacaagtgttaccgggtctttttagtgtagccatggaagatactttcaaaaggacatcttcagatcataagtcttaggaccaaaggtgtttttaatgagataatctttttgattttctaacaagaaaggaaatattcactttacattttaacatcaacttttaagtgatattcagaattaattgaccatggtgatacgttgtaaaatgttttcatattaagaatgtaattatttccttattgtattttttaaaagctaaagtcatatttaaaattctctttgaaagaaacaggcaaagaaacagcaaagatttttttaaattaaatatgttagtagtgcccacttcaaatgactgtaaatatattttcactgtttctcaatgtatttaattcataaagtaaaaattttatgaaaagaaacttgcaaggaaaatcctagttttcagtccactcgccccactttgtagtagcttcactgaatttcctgctttcctggttgaattttctactgtttcacgtggtgtaaccctagactggcgcccttggcgtgcccctttgtgtatgaataaacttctctcccccaaaaaaaaaaaaaaaaaaaaaaaaaaaaaaaaaaa

SEQ ID NO: 5594 - DNA, 3950 bp, Homo sapiens
ctttcccgagtccgtttgaggaagtccccgaggcgcacagagcaagcccacgcgagggcacctctggaggggagcgcctgcaggaccttgtaaagtcaaaaatgtcagaaacttccaggaccgcctttggaggcagaagagcagttccacccaataactctaatgcagcggaagatgacctgcccacagtggagcttcagggcgtggtgccccggggcgtcaacctgcaagagtttcttaatgtcacgagcgttcacctgttcaaggagagatgggacactaacaaggtggaccaccacactgacaagtatgaaaacaacaagctgattgtccgcagagggcagtctttctatgtgcagattgacttcagtcgtccatatgaccccagaagggatctcttcagggtggaatacgtcattggtcgctacccacaggagaacaagggaacctacatcccagtgcctatagtctcagagttacaaagtggaaagtggggggccaagattgtcatgagagaggacaggtctgtgcggctgtccatccagtcttcccccaaatgtattgtggggaaattccgcatgtatgttgctgtctggactccctatggcgtacttcgaaccagtcgaaacccagaaacagacacgtacattctcttcaatccttggtgtgaagatgatgctgtgtatctggacaatgagaaagaaagagaagagtatgtcctgaatgacatcggggtaattttttatggagaggtcaatgacatcaagaccagaagctggagctatggtcagtttgaagatggcatcctggacacttgcctgtatgtgatggacagagcacaaatggacctctctggaagagggaatcccatcaaagtcagccgtgtggggtctgcaatggtgaatgccaaagatgacgaaggtgtcctcgttggatcctgggacaatatctatgcctatggcgtccccccatcggcctggactggaagcgttgacattctattggaataccggagctctgagaatccagtccggtatggccaatgctgggtttttgctggtgtctttaacacatttttacgatgccttggaataccagcaagaattgttaccaattatttctctgcccatgataatgatgccaatttgcaaatggacatcttcctggaagaagatgggaacgtgaattccaaactcaccaaggattcagtgtggaactaccactgctggaatgaagcatggatgacaaggcctgaccttcctgttggatttggaggctggcaagctgtggacagcaccccccaggaaaatagcgatggcatgtatcggtgtggccccgcctcggttcaagccatcaagcacggccatgtctgcttccaatttgatgcaccttttgtttttgcagaggtcaacagcgacctcatttacattacagctaagaaagatggcactcatgtggtggaaaatgtggatgccacccacattgggaaattaattgtgaccaaacaaattggaggagatggcatgatggatattactgatacttacaaattccaagaaggtcaagaagaagagagattggccctagaaactgccctgatgtacggagctaaaaagcccctcaacacagaaggtgtcatgaaatcaaggtccaacgttgacatggactttgaagtggaaaatgctgtgctgggaaaagacttcaagctctccatcaccttccggaacaacagccacaaccgttacaccatcacagcttatctctcagccaacatcaccttctacaccggggtcccgaaggcagaattcaagaaggagacgttcgacgtgacgctggagcccttgtccttcaagaaagaggcggtgctgatccaagccggcgagtacatgggtcagctgctggaacaagcgtccctgcacttctttgtcacagctcgcatcaatgagaccagggatgttctggccaagcaaaagtccaccgtgctaaccatccctgagatcatcatcaaggtccgtggcactcaggtagttggttctgacatgactgtgacagttcagtttaccaatcctttaaaagaaaccctgcgaaatgtctgggtacacctggatggtcctggagtaacaagaccaatgaagaagatgttccgtgaaatccggcccaactccaccgtgcagtgggaagaagtgtgccggccctgggtctctgggcatcggaagctgatagccagcatgagcagtgactccctgagacatgtgtatggcgagctggacgtgcagattcaaagacgaccttccatgtgaatgcacaggaagctgagatgaaccctggcatttggcctcttgtagtcttggctaaggaaattctaacgcaaaaatagctcttgctttgacttaggtgtgaagacccagacaggactgcagagggccccagagtggagatcccacatatttcaaaaacatgcttttccaaacccaggctattcggcaaggaagttagtttttaatctctccaccttccaaagagtgctaagcattagctttaattaagctctcatagctcataagagtaacagtcatcatttatcatcacaaatggctacatctccaaatatcagtgggctctcttaccagggagatttgctcaatacctggcctcatttaaaacaagacttcagattccccactcagccttttgggattaatagcacatgatttgggctctagaattccagtcccctttctcggggtcaggttctaccctccatgtgagaatatttttcccaggactagagcacaacataatttttatttttggcaaagccagaaaaagatctttcattttgcacctgcagccaagcaaatgcctgccaaattttagatttaccttgttagaagaggtggccccatattaacaaattgcatttgtgggaaacttaaccacctacaaggagataagaaagcaggtgcaacactcaagtctattgaataatgtagttttgtgatgcattttatagaatgtgtcacactgtggcctgatcagcaggagccaatatcccttactttaaccctttctgggatgcaatactaggaagtaaagtgaagaatttatctctttagttagtgattatatttcacccatctctcaggaatcatctcctttgcagaatgatgcaggttcaggtcccctttcagagatataataagcccaacaagttgaagaagctggcggatctagtgaccagatatatagaaggactgcagccactgattctctcttgtccttcacatcacccatgttgagacctcagcttggcactcaggtgctgaagggtaatatggactcagccttgcaaatagccagtgctagttctgacccaaccacagaggatgctgacatcatttgtattatgttccaaggctactacagagaaggctgcctgctatgtatttgcaaggctgatttatggtcagaatttccctctgatatgtctagggtgtgatttaggtcagtagactgtgattcttagcaaaaaatgaacagtgataagtatactgggggcaaaatcagaatggaatgctctggtctatataaccacatttctaagcctttgagactgttcctgagccttcagcactaacctatgagggtgagctggtcccctctatatatacatcatacttaactttactaagtaatctcacagcatttgccaagtctcccaatatccaattttaaaatgaaatgcattttgctagacagttaaactggcttaacttagtatattattattaattacaatgtaatagaagcttaaaataaagttaaactgattataaaaaaaaaaaaaaaaaaaaaaaaaaaaaaaaaaaaaaaaaaaaaaaaaaaaaaaaaaaaaaaaaaaaaaaaaaaaaaaaaaaaaaaaaaaaaaaaaaaaaaaaaaaaaaaaaaaa

SEQ ID NO: 5595 - DNA, 2243 bp, Homo sapiens
agtcctgcactttgctgtggaggctgatgcctgaccatgctgcgcacaaacctcggagcactgttccagctggggtgtgacttggggcctggacccacattccaggttcagctctgctgggtccctgggcacttcctctttgagggtcaccctttggtttttcccctttcgatgactaaaaagtggagggtaatctgtgagcttggtggtgactcaccaccatccgacaggcggcccacttttcccagcaggtgagctgcgtgagtagccctcctcctggccgggactgtggtgagctccctgcaccccaccccaggcagccacgtggccatcagcacatcatggtctgtgctgagcgcctgctcttgcagccctgggcagagtgagcagaggactcaccatctgggcacaccaggcaggtgcagatggggagacaagataaacccagggctggggctcttctctgggttcccaggccccaggcagcagcacattccttagcccccaacacccaccacctggcctcgttctcagccccagcccagccaggtgcacccatcttcccagcctctctcagtgccacacagccattcctgcctctcatcaagcaggttatgatgggcacggcagtctgagagggagggggatggagaggactggctcacgctccgcctactagctctggggcctcaggtcaaccccctgggcaggcaggcattcatttagcaccaaattgacattcatcttctgggagcttctgacagggtgagcaccaagggcactaagggtgaaccatccccaaattctgccctctaggcacttacagggatgacctatgctaacgtgccattaggatacgcagtgtcacaggaaccatcctaacctcccgcccttagtctccccttccccttccctgtaatgtttgacctcggcagtttcctttttccttctattacaacattctatcattctaaagtatatcttaagtaagccaaatgcttgcatttgagaaatatttattgagctggtgagtgttggacactatgctccaggctggggatgcaaagatggatgaatacgacccatgggctttgccctcagggagcttcttccagggtgtgagagaatggttggtatgtgtagatgcgtgcatacatctgtgatgaacgccagagaaagaagctggtcccatggccggtggaggctcaggagcccattaggactaccctgtccctccctccatttagccagctggccctcccttctcctcctccttctcacctgctgcaccaggggatgccaagggagcagagatgcctgcagcccgtgggagcaagtcctggcctttgcagttgcaaaaactggctgcaagctgctccagccccagaggaactggccaagctccagagggcctccttggagggcctcagagggagagagaactgctcagtaattttgatcactttgggcttatttcaaaacctttgtccctcagttccaggaggcagcatttgccaatggaaagctctaggaaacaccagtcttgagaggtggccagccagactgcctgtccacatgcgtgtcagcacatacagccgcttcctggaagccgcctggaatgtcttcacggcagcgttttgctcacacagcagcttttgcacgccccaggcagccccgactgctgaaatccaacttgagctggctggtggtccctggatcctagagcccttcacttcgggttactccctctttcttgcctctatttcttagttggaagaaataaactcacaaattatggtgcagtaattttccggggaaagtaaagcctcaggaatgcccacgcctttcttccaaagcctttgtctctgagacctcttaagttctaagattaaatgcccctcgctgttcttcctctgaaaaaaaaaaaaaaaaagcataaaccccaccccaaaaaatttgttatcacccccccatccgatcaatccaggtcgttccgcgcccggccccgccgttcaccgcgcggctcgggcgacgctgtccaattctcatatatccaatatacccgggggggtattaataaagcctccgttattggtcagacttctcccgctttattacaccaccccccaccccattttttatcgcactcccatgcccttgtttcacgagactcatctccttcctaattaactcctatccctttccccccaccttcatcccgttttcccccgcggtatcccccg

SEQ ID NO: 5596 - DNA, 7281 bp, Homo sapiens
  misc_feature (836)..(859): n is a, c, g, or t
ggcacgaggctgcagccaactccgctccccgcgcactcggctgcccaggcgctcggaacccagcagcggcgctcctccgcggtgccggtcgcccgcgatgcccgcttagcagcgtgtagcagcggccagcatcaccacacccgcggcaccgcgctgccggccgcagagccgggccagagccttgcccccctcccccagcccccaccccgccccccgccctgaaatgacttgttaatcggcgcagacaccaccaaggggactcaccgaagtggaatccaagtggaatttggatttggagaagagtttcttgaacatttaccctcttccttgttggttttctttttctttttcttctttttttttttggcttcttttttcctctccccttctccgctcgtcattggagatgaacacatcgcgtttgcatcccagaaagtagtcgccgcgactatttcccccaaagagacaagcacacatgtaggaatgacaaaggcttgcgaaggagagagccgcagccgcggcccggagagatcccctcgataatggattactaaatgggatacacgctgtaccagttcgctccgagccccggccgcctgtccgtcgatgcaccgaaaagggtgaagtagagaaataaagtctccccgctgaactactatgaggtcagaagccttgctgctatatttcacactgctacactttgctggggctggtttcccagaagattctgagccaatcagtatttcgcatggcaactatacaaaacagtatccggtgtttgtgggccacaagccaggacggaacaccacacagaggcacaggctggacatccagannnnnnnnnnnnnnnnnnnnnnnnaccctctacattgctgctagggaccatatttatactgttgatatagacacatcacacacggaagaaatttattgtagcaaaaaactgacatggaaatctagacaggccgatgtagacacatgcagaatgaagggaaaacataaggatgagtgccacaactttattaaagttcttctaaagaaaaacgatgatgcattgtttgtctgtggaactaatgccttcaacccttcctgcagaaactataagatggatacattggaaccattcggggatgaattcagcggaatggccagatgcccatatgatgccaaacatgccaacgttgcactgtttgcagatggaaaactatactcagccacagtgactgacttccttgccattgacgcagtcatttaccggagtcttggagaaagccctaccctgcggaccgtcaagcacgattcaaaatggttgaaagaaccatactttgttcaagccgtggattacggagattatatctacttcttcttcagggaaatagcagtggagtataacaccatgggaaaggtagttttcccaagagtggctcaggtttgtaagaatgatatgggaggatctcaaagagtcctggagaaacagtggacgtcgttcctgaaggcgcgcttgaactgctcagttcctggagactctcatttttatttcaacattctccaggcagttacagatgtgattcgtatcaacgggcgtgatgttgtcctggcaacgttttctacaccttataacagcatccctgggtctgcagtctgtgcctatgacatgcttgacattgccagtgtttttactgggagattcaaggaacagaagtctcctgattccacctggacaccagttcctgatgaacgagttcctaagcccaggccaggttgctgtgctggctcatcctccttagaaagatatgcaacctccaatgagttccctgatgataccctgaacttcatcaagacgcacccgctcatggatgaggcagtgccctccatcttcaacaggccatggttcctgagaacaatggtcagataccgccttaccaaaattgcagtggacacagctgctgggccatatcagaatcacactgtggtttttctgggatcagagaagggaatcatcttgaagtttttggccagaataggaaatagtggttttctaaatgacagccttttcctggaggagatgagtgtttacaactctgaaaaatgcagctatgatggagtcgaagacaaaaggatcatgggcatgcagctggacagagcaagcagctctctgtatgttgcgttctctacctgtgtgataaaggttccccttggccggtgtgaacgacatgggaagtgtaaaaaaacctgtattgcctccagagacccatattgtggatggataaaggaaggtggtgcctgcagccatttatcacccaacagcagactgacttttgagcaggacatagagcgtggcaatacagatggtctgggggactgtcacaattcctttgtggcactgaatgggcattccagttccctcttgcccagcacaaccacatcagattcgagcggctcaagaggggtatgagtctaggggaggaatgctggactggaagcatctgcttgactcacctgacagcacagaccctttgggggcagtgtcttcccataatcaccaagacaagaagggagtgattcgggaaagttacctcaaaggccacgaccagctggttcccgtcaccctcttggccattgcagtcatcctggctttcgtcatgggggccgtcttctcgggcatcaccgtctactgcgtctgtgatcatcggcgcaaagacgtggctgtggtgcagcgcaaggagaaggagctcacccactcgcgccggggctccatgagcagcgtcaccaagctcagcggcctctttggggacactcaatccaaagacccaaagccggaggccatcctcacgccactcatgcacaacggcaagctcgccactcccggcaacacggccaagatgctcattaaagcagaccagcaccacctggacctgacggccctccccaccccagagtcaaccccaacgctgcagcagaagcggaagcccagccgcggcagccgcgagtgggagaggaaccagaacctcatcaatgcctgcacaaaggacatgccccccatgggctcccctgtgattcccacggacctgcccctgcgggcctcccccagccacatccccagcgtggtggtcctgcccatcacgcagcagggctaccagcatgagtacgtggaccagcccaaaatgagcgaggtggcccagatggcgctggaggaccaggccgccacactggagtataagaccatcaaggaacatctcagcagcaagagtcccaaccatggggtgaaccttgtggagaacctggacagcctgccccccaaagttccacagcgggaggcctccctgggtcccccgggagcctccctgtctcagaccggtctaagcaagcggctggaaatgcaccactcctcttcctacggggttgactataagaggagctaccccacgaactcgctcacgagaagccaccaggccaccactctcaaaagaaacaacactaactcctccaattcctctcacctctccagaaaccagagctttggcaggggagacaacccgccgcccgccccgcagagggtggactccatccaggtgcacagctcccagccatctggccaggccgtgactgtctcgaggcagcccagcctcaacgcctacaactcactgacaaggtcggggctgaagcgtacgccctcgctaaagccggacgtaccccccaaaccatcctttgctcccctttccacatccatgaagcccaatgatgcgtgtacataatcccagggggagggggtcaggtgtcgaaccagcaggcaaggcgaggtgcccgctcagctcagcaaggttctcaactgcctcgagtacccaccagaccaagaaggcctgcggcagagccgaggacgctgggtcctcctctctgggacacaggggtactcacgaaaactgggccgcgtggtttggtgaaggtttgcaacggcggggactcaccttcattctcttccttcactttcccccacaccctacaacaggtcggacccacaaaagacttcagttatcatcacaaacatgagccaaaagcacatacctaccccatcccccacccccccacacacacacacatgcacacaacacatacacacacacgcacagaggtgaacagaaactgaaacattttgtccacaacttcacgggacgtggccagactgggtttgcgttccaacctgcaaaacacaaatacattttttaaaatcaagaaaatttaaaaagacaaaaaaaaaagaattcattgataattctaactcagactttaacaatggcagaagtttactatgcgcaaatactgtgaaatgcccgccagtgttacagctttctgttgcagcagataaatgccatgttgggcaactatgtcatagatttctgctcctcctctcttttaatgaaataacgtgaccgttaacgcaagtaactctttatttattgttcaccctttttttccttaaggaaaggactcttccaaatatcatcctatgaacagctcttcagaaagcccattgaaagttaaactatttaacgtgaaatccattaactggaataattgagtttctttatttttacaataaattcactgagtaaataagttggagctggaattctgagctttgtgtttggactgtctggtctgtagctaaaggaaaaagttaggaggggaatatttatttaaatctatcagttcattgcctggtcaggtctctggcctataaacatgcaaaaaaactaattcatgttaaagtccttccagatcctaatttctaaagcaatcaggagagaaagcttttagaatggcacatcatatctcattgatgccaacatggttttgtccatggttctgactttctgtgaaggcaccagcttgcaatatgccatcccatttcaccttgcatgtgagacagcaaacaaaatccacaaatggtgtgaactaatatgctggctgctaccttgcataaattaatgatttgatcacacgggttcttcgtggggttacatctgtgaatagcctgttttccacatgtaaatttgtgccttacaccttgagttgtgtacacttgtaaactctttatgatcaactgttcccccttttgaaataagtgcagatatttatttaaccctcccttccccaccctctgccccacttccagccctctgaaagattggagtcaagcagatggaagaatgcagtggtgatagttgtcatgcgacagcctgagaacgctgggcagcaccacaccctccaattcacactgccttctagttgtgccaactggaaccaccctttggctgtgctgcgaagcatggaccccagtgttgttgtgggtgtgtcaaatcccctttcatcctcaagagctccctgcttcccttagattatttcaatacggtgatatccttatttgctagcagaaaagggactaacgtcccattcctcttttctgctgcgtccactggctagagagcaggcggtgcgcggttgggcagacacctgggaggagtctccaagccatgtgcacagcacacacgtgcagtgcacacaaagaaatgacatggaaatagatgcaggcaggctggtccctgctgtgattaacgagtaactccaagtacaaggccgaccacaatggatgctgcaaaaacgttgactggggcaaaggattttttattttattttttattttgttaattatgtttttaggggatgggaggtggtgtgtgtttttctcctcttggttttcatttgctcaagcacacaaaagggacttttgtttactctatcatgaacaaaggaactgtccacatactgtaaaccatgagcagtgttgttgttgtttttttaaacagtatatttggtggtctctttgtctgcttttatttccagttcgatcttctgggtttagttttgtctttaaaaagaattcaaaaaaagactgacaatgacagttttgagttggatagtgaaaaagtggagcctccataatcagtgtggttgccttcagacctgagtacttagctgagggtgggtgagagccctttgttccaaaagtccattagttttgctgttgtttaggagtaggtggttgttgttgtttttactttttttttttttggcttttgtaatggaatccatgttcacatcctgtgaactctgtctcctgaaaccctgaagtatttcctagaacctgaaatattgttttcttccttgaattttctctagaaatgcagaaattaggaaggtgatgggtctgtatccccctgcccccttctttcccatgcttgactcccgagagtactggcagtgcagcacccatcattgacgtaagcggctgtcttgtccagtgtttgtaggcatcactgcctcagctgttaaggagacctgtgtcaaaacttacatccacattcctacacccccacaacccatcacttctggtgttaaccctaaaatacccacatgtattgagctggtcttctgcatttaagtatttctccccagtttttttccccactgtgtgtggggggagggtccataaacccgagtgtgcctttgctttccacccttgctagacactggtagatgcaacaaactcagatttatatttgttgtaaagttgtaaaaatattgtgatgtcaccaattttccttccatctccacatcccctaacatctgattcacgacttaatgtatgttgtaagaaaagaaaaaagaaaagaaaaaaagggaaaaaagaaaagcaaggaaaaggctctttattacttaaaagtaataaaacctgactgttctatattaaaaaaaaaaaaaaaaaaaaaaaaaaaaaaaaaaaaaaaaaaaaaaaaaaaaaaaaaaaaaaaaaaaaaaaaaaaaaaaaaaaaaaaaaaaaaaaaaaaaaaaacaaacaaaaaaacgggggggggggcgcagaaaacagtaccccccgcggcgggggcagaacaacaataagccccaccatattagagaggaggccgcacatgagggagtgataataaaccaacgcgagcggcgcgacgtcagaacaaacaagcgtggggggagggaaaaaaacactcagcagcagtggaagtacagtggaagaaaaacaccccacctgggggcgggggggcaagatggcagaaaacccccccacggagaagaaaagacagcgtcggaaagaaaaaaacaggcggagggcattggggggggacaccacacgatttggcgcgggagtggaaagatgtgcgccaggagcgtcgagaaaaatcacgg

SEQ ID NO: 5597 - DNA, 4517 bp, Homo sapiens; identical to SEQ ID NO: 1047

SEQ ID NO: 5598 - DNA, 521 bp, Homo sapiens
tgatatcccagggtgttctcacgaaaattaatttcaaatctaaaaggcaaggataatcactactttcagcagtaaaaggtaacagaaagaaattgcagtttaagcacagttagcatataattaagaacaagaaaaattaaagtattcttaaatatgtgttgctttaatttttctcctgatggcttttcagattaccttaaaaagatctatcaagactcctcctctagaaaagatctattaaaagccacagacacttgggagatccatgagaaggaaaaaaatgggtcatccttatacaggttgattatgtgagttgtctacatgcagtgcatatgtcagcaacaaggaaaacaacctccagatacattctggcaggcagattttcttctgggagaaaaacctatgttttcctatacatttgtgaagccaacagggtagggtaggagcagttcagtttcatccataagcatccacatcaggctggtttttgaaaagggagccaaacccacaataccccagaa

SEQ ID NO: 5599 - DNA, 1837 bp, Homo sapiens
  misc_feature (1829)..(1834): n is a, c, g, or t
gtcactggggtggtgcttagccggcgccagaccgaccctcgacttcggagaggcagcgcggttcctctgggtgcttccgcctccccttctcctgcttctccagcctcttcggcctcctcgcccgccgcgggaacccgagaccccagtgtatgccccacccctgaccccgctcgcgacatgtccaccccggctcggcggcgcctcatgcgggacttcaagaggttgcaggaggatcctccagccggagtcagcggggctccgtccgagaacaacataatggtgtggaacgcggtcattttcgggcctgaagggaccccgtttgaggatggaacatttaaacttacaatagaattcactgaagaatatccaaataaaccacctacagttagatttgtctctaagatgttccatccaaatgtctatgcagatggtagtatatgtctggacatacttcagaaccgttggagtccaacctatgatgtgtcttccattctaacatccatacagtctctgttggatgaacccaatcccaatagtccagcaaacagccaggctgctcagctgtaccaggagaacaaacgggaatatgaaaagcgtgtttctgcaatagtagaacaaagctggcgtgattgttgaccccgggtacagtttaaagaagctggccataagaaaaatatatattgatgtgtttgtcacctccctactcctgtcattacatttactttattaaaagcaaaataactgttgtgctgtttccatcttccttgccaagttttcctaccccttctaccctctccttaaacatcagaaaacaccctctatgaaatcaaatgtactgtacctgggttacttgcaaaaattactaatgcttcagtttttctgttgtatttcatttccagttttcaggcagttatttttattattgtactttaagcttttaagatgaattgttatacaagaggtgcttatgcttagcttggatgaccaaggatgttattttttaacaaaatttgctgaagtgtttcatcctggctggtccttcacttgtgttggatttagaagtgaatgtgtttggaatatggcctacagagaatagaaacaaatccatgtaaacaattttgaaggaggcatgggagctaaaaatcctgtgatactaagatctcagtcatatgaattacaacgtagtatttactggcaagaaggagaaagttgaaggactcagctaaaggagtacagcaattgtagtaactgacacatcctctctttgcaagctgctgactgggcacactcatgccaagtttcagaattattggtcttctgggtttttgctttttaaaagaggtgtgggagcagaggaatggaaacaatcgtgagtttttgagctagggaaagttggagctcctttaatctttttaaaggatcagtgctgccctaagtgaataaactcaattgtccatctttattttagagttttaatgaattcaaggaagggagcatagcatatctgtggcaaactattttccactcaaatcctgagttattgctgcatgctttaatttcttccctttcagcatctgagaaccttaaagccaatgtctgcgatctttttttggatatttatacttttagatatatagtacctttaagtagcagtatgggacaaggcttgtaaatgttttgtctaatgttctattgtcaccttttatgcatttatcacttccaaatctaactttgcacaagtaacccatgtaaaaaaaaatgtacatttttcaaaagttgtaaataaaaataaccttaaaaattcaaaaaaaaaaaaaaaaaaaaaaaannnnnnacc

SEQ ID NO: 5600 - DNA, 998 bp, Homo sapiens
caagagctaaaagagagtaagggggagaattcagcagctccaaccagggcaggcagcttgtgagaagatggaaccaatcctgcttctgctggccttcctcctgctgcccagggcagatgcaggggagatcatcgggggacatgaggccaagccccactcccgcccctacatggcttatcttatgatctgggatcagaagtctctgaagaggtgcggtggcttcctgatacaagacgacttcgtgctgacagctgctcactgttggggaagctccataaatgtcaccttgggggcccacaatatcaaagaacaggagccgacccagcagtttatccctgtgaaaagacccatcccccatccagcctataatcctaagaacttctccaacgacatcatgctactgcagctggagagaaaggccaagcggaccagagctgtgcagcccctcaggctacctagcaacaaggcccaggtgaagccagggcagacatgcagtgtggccggctgggggcagacggcccccctgggaaaacactcacacacactacaagaggtgaagatgacagtgcaggaagatcgaaagtgcgaatctgacttacgcgatttttacgacagtaccattgagtttgtgcgtgggggacccagagattaaaaagacttcctttaagggggactctggaggccctcttgtgtgtaacaaggtggcccagggcattgtctcctatggacgaaacaatggcatgcctccacgagcctgcaccaaagtctcaagctttgtacactggataaagaaaaccatgaaacgctactaactacaggaagcaaactaagcccccgctgtaatgaaacaccttctctggagccaagtccagatttacactgggagaggtgccagcaactgaataaatacctcttagctgagtggaaatctggagccaagtccagatttacactgggagaggtgccagcaactgaataaatacctcttagctgagtgg

SEQ ID NO: 5601 - DNA, 2019 bp, Homo sapiens
  misc_feature (40)..(40): n is a, c, g, or t
  misc_feature (128)..(128): n is a, c, g, or t
  misc_feature (1858)..(1858): n is a, c, g, or t
gtggtctgagcagtcagccaaagataaacaaccatatgancagaaagcagctaagctaaaggagaaatatgaaaaggtacagtgtcatcttttttaaagccgtggataagactaggtataggtaatanctgtagaaaacctgggaaatttagttaatcttgtattaatggttgtcagctatgttttgaaaaggcctaatgaaaattgtacacttcaacacaaggtaattgaaaccttccttttgactgaaaccagtgtttgtagcactagtatattcctgcagacagacttgtagttacttgtagttattgtatagtctgtatagtctgttatttttttttttaagcagagagtcaaagaaattgttttatgtagatatatataaaatgtgaaggtacaggagggactatggcactgtgtgtgatgtaaaagggtattggtagtgaaagtactgatactgctgtatcgcaacccttgtcattttacgtcattaacttgttaaagcctagtgggataagtgctctaaaaacttagactggttacctttttagacagttattagggttattggtcaatcatcttagattgtttacaactaagtggtttttcacagttgagtaatgataccggatgcagttaagctaaaggagaaatatgaaaaggatattgctgcatatcgtgccaagggcaaaagtgaagcaggaaagaagggccctggcaggccaacaggctcaaagaagaagaacgaaccagaagatgaggaggaggaggaggaagaagaagatgaagatgaggaggaagaggatgaagatgaagaataaatggctatcctttaatgatgcgtgtggaatgtgtgtgtgtgctcaggcaattattttgctaagaatgtgaattcaagtgcagctcaatactagcttcagtataaaaactgtacagatttttgtatagctgataagattctctgtagagaaaatacttttaaaaaatgcaggttgtagctttttgatgggctactcatacagttagattttacagcttctgatgttgaatgttcctaaatatttaatggtttttttaatttcttgtgtatggtagcacagcaaacttgtaggaattagtatcaatagtaaattttgggttttttaggatgttgcatttcgtttttttaaaaaaaattttgtaataaaattatgtatattaaaaaaaaaaaaaaaaaaaaaattccacctagcaaccccaaaaaattcccaccatctccccttccacacttatctctctcatattctcctccactcccattctcctaccccccccactcccttgtcctctccccccctcccttcccccccttctttcctttatcccccccccccctcccttcttttccactccccttcccgccccctctccatcccctttcccctttacctcttcccttctttcccccatcctactttcccgccgtttcccgtcgggacgtccccacgccccccccagcctcaccacccacggcgcaacacttttagccgcccccagatcgttccaccctcctagcccagccagtgttccgcccccgccccactcccctcaaccccgttcacccgtactccgcttaccacctcctcttccctcgaatatatttttacctatccctatactctaccacactgcctcaccaccactgctccctctaccccatgatcccttccctcccaccacccttcactctacaccctgaatgccacccgcattcctcgtctccacgtacccgagtcctcgcaccacctctcccacaagttccgcgccccaccatattatccctgttaccccacaccctcgctctattgtcttatcgcgnccacacgcttacgacgcttccgtccgtctattgtccaacacccactctacaccgattccgcctctctcgcgtctgtgatacaccctcatcgcatcggcacacccgccacaaattgctgacagcggcggctgcgccgccccgcgagtataccacccacctcc

SEQ ID NO: 5602 - DNA, 1698 bp, Homo sapiens
ggctccggcttcaagatcaaaggaaatgtttccctttgtcccgtttcacactaaacgggttggggaggaaccaggggagatgtcaaccgtctgccggtgactgggaagttttctgcaagtcctccacagcatagccagcaggccacttttcactaacagaagtcacaagccaagtgagacactcatccaagaggaaggatggccagtatcttttctaagttgctaactggccgcaatgcttctctgctgtttgctaccatgggcaccagtgtcctgaccaccgggtacctgctgaaccggcagaaagtgtgtgccgaggtccgggagcagcctaggctatttcctccaagcgcagactacccagacctgcgcaagcacaacaactgcatggccgagtgcctcacccccgccatttattccaagcttcgcaacaaggtgacacccaacggctacacgctggaccagtgcatccagactggagtggacaaccctggccaccccttcataaagactgtgggcatggtggctggtgacgaggagtcctatgaggtgtttgctgacctttttgaccccgtcatcaaactaagacacaacggctatgaccccagggtgatgaagcacacaacggatctggatgcatcaaagatcacccaagggcagttcgacgagcattacgtgctgtcttctcgggtgcgcactggccgcagcatccgtgggctgagcctgcctccagcctgcacccgggccgagcgaagggaggtagagaacgtggccatcactgccctggagggcctcaagggggacctggctggccgctactacaagctgtccgagatgacggagcaggaccagcagcggctcatcgatgaccactttctgtttgataagccagtgtcccctttattaacatgtgctgggatggcccgtgactggccagatgccaggggaatctggcataattatgataagacatttctcatctggataaatgaggaggatcacaccagggtaatctcaatggaaaaaggaggcaatatgaaacgagtatttgagcgattctgtcgtggactaaaagaagtagaacggttaatccaagaacgaggctgggagttcatgtggaatgagcgcctaggatacattttgacctgtccttcgaaccttggaacaggactacgagctggtgtccacgttaggatcccaaagctcagcaaggacccacgcttttctaagatcctggaaaacctaagactccagaagcgtggcacaggtggtgtggacactgccgcggtcgcagatgtgtacgacatttccaacatagataggattggtcgatcagaggttgagcttgttcagatagtcatcgatggagtcaattacctggtggattgtgaaaagaagttggagagaggccaagatattaaggtgccaccccctctgcctcagtttggcaaaaagtaaactttccctttcccaatttataaataatctgtctgctggtacgacagacataaatctctactctgagagtttttatacacttggaaaaatataaaattgtagatcctgcctatctttacaataaaactctccttaatataaaaaaaaaaaaaaaaaaaaaaaaaaaaaaaaaaaaaaacctgtcccaaattcaagtatggaacatatttacgattgggtggccgagttttaacacttcag

SEQ ID NO: 5603 - DNA, 2931 bp, Homo sapiens
  misc_feature (151)..(184): n is a, c, g, or t
  misc_feature (2848)..(2882): n is a, c, g, or t
atttacatctgaaaaaccaagtgagaactgaagaccagagagggtgagtggtttactcagtttggcacaactgaccccaacctagccctccatgaggactgagcgcatgagagatcctgagccacagccgcccagccctgctcctctcgannnnnnnnnnnnnnnnnnnnnnnnnnnnnnnnnnaagactgctgtttaaagccactgcattttggcatgatttgttatgcagtcgtagataaccagaaaacatcggatttacattttaaggtaaactttttattgaaacatcacatacacacagagacgtccaccaattggctcgatgagctttctcaaaggaaacacattctctgagcagtgtgcacatccagacacatcatctccatcctccagaagccccctcctgttaccgccactcacaggtcacccgtctcctgacttgcagccacagagatagtcctgcctaattctgaacgtggtacaaacggaatcatacagaatgggcttggcttctttcactctgggctgtgtttatgagcatcacccagattgctgcatggaagccatcgtttgttcattttcaccaccatagagtattctactgttgatgggacataggctatttattccttctactgttgagggacgcatagttatttccagctggagactggtatatgtctcttggctaccttctgcatgcatttctgttggaggttgtttcaggtatctcttaacgtataacagaccaccctcaaattgagtccttgaaacaattaccattttcttctttctcaggatttggtgcatgggatgggctcagttgggcagttcttctgttccatgtgatggtactggggctgcagtcattcagaggctcaactgggctgaacgtgcaaggtttcttgctcacgtggccatcagtggtgctggctgctgttgggagctccactggacttctgtccagagctcctcagctcacctctctgtatccttgccctgtggctcaggcttctaacaatacagaggctggattccaagaggagggaattagaagcgttcagccttcttaagaccaggattcagatgtcccagactgtcactgtattgaccggagcatttacaggccagcctagtaatttttccatcttgggcaggaatgggtggcatatgctgggggtaggggtagcattgttggggatcatctttggagctgtgtgccaaggagtaaattgctcggctgctttctacctgaggaagtccgctatgcttgcttgtggagagtggattgtgtgctcagagtccacaaggatttaagaatccgagccctgctgcccttgcctcagcctgtgcattagggcccggtggtgagagcactgagccattgtgaatcaaggcccctccctcgacctgcatactaacaggccagaagagcttgcttgattttggtcctaggctcctgcctgtgggttggattccaggggcactctctcctccacaaaccagacggtggcaggtacatcccctcaatggaaattgcccacacttcaccctaaagacagatcctgctgttcagcaacaatgtgagtggcccacacatttgtccagcatgaaaccgtttgcagattcctttccagtacacagtcccatcagccggtcacttcacgatgacagctcctcgaagcaccttttggtttgccgttgtgtagcttagaagtaggagcctgcacggcttcaggaattcacagaaggagcacactttgtgcttggagaagttaattataggaatatcctgcaacctgctgctctgagcctgtgcacctggggtgtttccctggaggtcctgtgtatgaggatactcatcagcatggggtttgggaagcctagcactggagacaacctaggtggtcctctccaggggagtaggtaagagccctacagcagtgaaaagcattgaaggaaaagtgtgttcagcagtgctcttaatctgatcagagcagcctgaacacattctaaacacagggcatttagaactagggtagaggcactagagcaccatagatacaaactcagattctgaaggtaaatgcccaggttcaaatccaagccccctcgccaagtgaccacgactcccccgagtcacctgacctctgtgtttacatcctcaaagttaagtagtcaggaaagggggcttggggcttgccacatggatggttgccactctcctttgcaaagtgtagtccccaaaaacaggtggaagagggaagggtccaattagaaggccgagtaccagctgccatgaatatgccagagctgctggctagtgataaataactgaaacccagggggacagcagagcttgggtgaccatacattctaggaaagaaaacatgcctgttgtcctggctttttatccagcttagacaaagatgggcaaagaaaataatttagaaaatggtagagatgggcacagagaaagggcacggagggaggcacaaacagaaggccaagtgatggtggaggcagacattggagaaatgcctttacaagccggggaatgccaaggatgctggcaaccctgggagtgggaagaacctggaacacaccctccgtcagagtctccagaaggaactggcccttcatcacctttcggacttctggcctccagaactgggcaagaaaatgtttctgctgttggaggccatccagctggtggtcatttgttatggttgccacagaaaacgaatatagatttagacatctaatttgcatatatagatatgcatgtgtatttgttaaataaaagataaagcatgacaactcgaaaaaaaaaaaaaaaaaaaannnnnnnnnnnnnnnnnnnnnnnnnnnnnnnnnnnggggcggggcgcttctaaaaggattccctcgagggggccccaaacttta

SEQ ID NO: 5604 - DNA, 4097 bp, Homo sapiens
aaacacgggggcagccggcgcttcccggccggtgtcgctccgcggcgggccatggccaacgtctctaagaaggtgtcctggtccggccgggaccgggacgacgaggaggcggcgccgctgctgcggaggacggcgcggcccggcggggggacgccgctgctgaacggggctgggcccggggctgcgcgccaggatatggaccctccacatcccttccccaaggagatcccacacaacgagaagctcctgtccctcaagtatgagagcttggactatgacaacagtgagaaccagctgttcctggaggaggagcggcggatcaatcacacggccttccggacggtggagatcaagcgctgggtcatctgcgccctcattgggatcctcacgggcctcgtggcctgcttcattgacatcgtggtggaaaacctggctggcctcaagtacagggtcatcaagggcaatatcgacaagttcacagagaagggcggactgtccttctccctgttgctgtgggccacgctgaacgccgccttcgtgctcgtgggctctgtgattgtggctttcatagagccggtggctgctggcagcggaatcccccagatcaagtgcttcctcaacggggtgaagatcccccacgtggtgcggctcaagacgttggtgatcaaagtgtccggtgtgatcctgtccgtggtcgggggcctggccgtgggaaaggaagggccgatgatccactcaggttcagtgattgccgccgggatctctcagggaaggtcaacgtcactgaaacgagatttcaagatcttcgagtacttccgcagagacacagagaagcgggacttcgtctccgcaggggctgcggccggagtgtcagcggcgtttggagcccccgtgggtggggtcctgttcagcttggaggagggtgcgtccttctggaaccagttcctgacctggaggatcttctttgcttccatgatctccacgttcaccctgaattttgttctgagcatttaccacgggagcatgtgggacctgtccagcccaggcctcatcaacttcggaaggtttgactcggagaaaatggcctacacgatccacgagatcccggtcttcatcgccatgggcgtggtgggcggtgtgcttggagcagtgttcaatgccttgaactactggctgaccatgtttcgaatcaggtacatccaccggccctgcctgcaggtggttgaggccgtgctggtggccgccgtcacggccacagttgccttcgtgctgatctactcgtcgcgggattgccagcccctgcaggggggctccatgtcctacccgctgcagctcttttgtgcagatggcgagtacaactccatggctgcggccttcttcaacaccccggagaagagcgtggtgagcctcttccacgacccgccaggctcctacaaccccctgaccctcggcctgttcacgctggtctacttcttcctggcctgctggacctacgggctcacggtgtctgccggggtcttcatcccgtccctgctcatcggggctgcctggggccggctctttgggatctccctgtcctacctcacgggggcggcgatctgggcggaccccggcaaatacgccctgatgggagctgctgcccagctgggcgggattgtgcggatgacactgagcctgaccgtcatcatgatggaggccaccagcaacgtgacctacggcttccccatcatgctggtgctcatgaccgccaagatcgtgggcgacgtcttcattgagggcctgtacgacatgcacattcagctgcagagtgtgcccttcctgcactgggaggccccggtcacctcacactcactcactgccagggaggtgatgagcacaccagtgacctgcctgaggcggcgtgagaaggtcggcgtcattgtggacgtgctgagcgacacggcgtccaatcacaacggcttccccgtggtggagcatgccgatgacacccagcctgcccggctccagggcctgatcctgcgctcccagctcatcgttctcctaaagcacaaggtgtttgtggagcggtccaacctgggcctggtacagcggcgcctgaggctgaagggcttccgagacgcctacccgcgcttcccacccatccagtccatccacgtgtcccaggacgagcgggagtgcaccatggacctctccgagttcatgaacccctccccctacacggtgccccaggaggcgtcgctcccacgggtgttcaagctgttccgggccctgggcctgcggcacctggtggtggtggacaaccgcaatcaggttgtcgggttggtgaccaggaaggacctcgccaggtaccgcctgggaaagagaggcttggaggagctctcgctggcccagacgtgaggcccagccctgcccataatgggcactggcgctggcaccccggcccttctgcatttcctcccggagtcactggtttctcggcccaaaccatgctccccagcagtggcaatggcgagcaccctgcagctgggcgggcaggcggcaggcgcggaactgaccctctcgcgggactgaccctgttgtgggcagtggtctccccccttggcgcctccttgcgcaggcccagcctccactctcctcgtctaggtttctttacctccagggatcagctgtgtgtgtgtgacctccctaccgggctatcggcctcttgggagccagcggcagggccggcacctgcgtgcctgtgcccgtgtgcgtgagacagagcccttgcccctgctgctgccccgagggctgccctgccctggaagggcccctctgcctccacaccagtggagtcttcgagacttgggagctgcttggcctcattttcagccatgagcagacggcctgtggtccctgggcctgaggcacggactcgtagcaccagggtttggaggctgcgaccgccccggagagcagcttcacactggcgccacagaggagccccacgtgcactccccggcctgcatccggcttgggtacacaggcccagaggactggggtgactcacgggccctgtgctgtgatgttgagagctgagaaaaacctccaaggccctgagccccatgcccagccctgccttggtcccccaacccccagagcttggagtctgggccccacacccagccctgccttggtccctgagcctcagagcgtggaattgctgccctgtggacactggctgggaaggcaggtcttcccctagcacatggggaccccggcctcgagggtgacctccctaccttgcccctgccagccaccaagcgcaggtgcagcgggggccagactcctgccggcctcagaggacacctggcccagcacaggcagctagaagggccggtgggcaccggggccgggaagcccccacctcaccacctgagggcccctgggaggctcctctggcctggctgggctgggtctggggccgccacaggcccctcacggggcggcagaggcaacttcagtgtccctgttagagcaacacgggtccctccgtggggggctgggtgcggccccctgccgtgtatttcctccccagggagtggggcctccccgggagctgacgccaccaccctgcttagccctcacagggccccaaggtgtccgagtgtgttgggtctgaacgcgaaataaagaaatcctctcagccaaaaaaaaaaaaaaaaatccctcccaccccacccagaccacgtccaacagcctgggactttcgggaccctggggtcggggccccgttgtgaagtgagacaggcgtgaaagacagcggctgcggccacccagggcaccagccacatcctcttcctcgtccccgcccctcagcctccctcctctggctcctggctggtgggtctgggggcaaggcagaggcgctccaggtggaggggggcgggccggggtgcccacgctggggtgacgcaagaagaaaactcccgggcctcagagtcggcgccggaaacctaggtctgggtttccctcgtggtggttgtgtactgaggacctggaaagtgatcatattttggatatattcggttaaataaaatcagcggttaggattcaca

SEQ ID NO: 5605 - DNA, 1649 bp, Homo sapiens
  misc_feature (242)..(274): n is a, c, g, or t
  misc_feature (301)..(301): n is a, c, g, or t
ggcacgaggcaaagtctcactgtgtcatgcaggctggagtgcagtggcatgatctcactgcaacctccatctcctgtctcagcctcctagataactgggattacaggtgcccaccaccatgcccggctaatttttgtatttttggtagagacagagtttcaccaggttggtcaggctggtctcaaactcttgacttcaggtaatccacccaccttggcctcccaaagtgctgggattacagnnnnnnnnnnnnnnnnnnnnnnnnnnnnnnnnnttattgagagagtgaaatgctattttnttccccaaatggcgctagtgaatcactaggagggtcccactgataggccatgtttagcactggttgccagggattctctttttgagagagggaaagcaaaatgaatggaagtacccagctggaggtttcagggcttctggaggatgctctcgcatagctcgaggtcctctgcccacctcttctctccaaggaaaatgaggactgccccttccccctgcaggattggcccccagcctgcgcatgcaccctcctcttgcccaagtggggagcacagaggcggagaggaatcccttaccacacccacggcccagcttgctcacgagtgtcacctctgtgacggtcaccactgctcccttggagggccacttgagttactgttgcttcctcgcctgctggcttgatgagcaccgatggtgggatctgaccccgaggggcagagctgtcggtgactgaggactggactgtggtgaccatgccgatttgctcagggagaacgttgcaatgcacccagcagctcctggctctgcaggcggcacagcctggggccctgtgatcctctggtttcttccattggggcggagtcgggggtggagggagctggccacaacccactgctctgatgggtggtttgtccaaggatgctgaatgtaatgcctggtcaatgtggaagcccatgaggttgcccagggaagcctccaaaagctgggatgcttgagggtatccaagttgaaaaagacaaaatctgaccatcagccagtgacagtcctggcaaatgaaggtggggcggggcagtgaggggtgggagaaggtgaatgattcattattccaccccgaggtttgctggggtgaggggaagaatcgatgctgctttgggaactgaaggtttttctgttgggaaggccctcttggttttggagagaaagacaagttatgagtagctgctaccctggaacggtgggcagagagcctactaggaaatgtgcagaataaactattttttgaaggaaaaaaaaaaaaaaaaaaaaaaaaaaaaaaaaaaaaaaaaaaggtgtgtgatgtccgccttcctgtatccaagtgttctcattgttcagttcccacctatgagtgagaacacgcggtgtttggttttttgtccttgcaatagtttgctgagaagacagggtctctcactctgcgtctcaggctggagtgtagcggcaccatcttggctcagtgcaacctccgccttccatgctcaaatgatccttccacctcagcctctggagtagatggaactatatagtagatggaactataggtgcttgcctccatgcccagctaattttttttttttttttttttttgg

SEQ ID NO: 5606 - DNA, 497 bp, Homo sapiens
  misc_feature (432)..(432): n is a, c, g, or t
  misc_feature (459)..(459): n is a, c, g, or t
  misc_feature (482)..(482): n is a, c, g, or t
ttttaatttggctctttccttctacatacaagtgcctgtggacacagcattgtccttgtgctgttgccatttacagcagtaaaacaacagctactatttcttaagggcttatatttggttctttattaacactgtctgttttaagccttacggtaactgaggttggtatcattgtccccattttacagatgagtaaactaaggcttgtgcaatgttaattgagctgcggagaggatatatcacagctaataaattagaggggcagcattcaaccccaggtcttcctgaatgcaaagatttgtgctagtaagctcctggtggttctcctcctggagggtccactgtgggtgggggctcctaagggccactttatggctaacccccaatttggtggtccagaaataccaggcaattgttggaaccacaccttgntcttataggaaattttaaaaaaccccnaattatttttacccttaattacntggtcctaaggttcc

SEQ ID NO: 5607 - DNA, 547 bp, Homo sapiens
  misc_feature (58)..(74): n is a, c, g, or t
ttttagggcgctgtgttaggtgctgtattgtacaagaaaaatataataaattagattnnnnnnnnnnnnnnnnnatagtgaatgaccttgaaaaatttactaaacatactatgtttgtttctccatgagtaaaatagggatacagggacaaacagtctaatatctcatagaaataccatggagacaaataaaatattttaatataaatatgatattaaagtaaatttctgaagtaatacttttgggtatggcactagtttttcctctgactattttactgtttctttcactctcaatataaaaactatttgataagataaaacgatatattttattgtaattagaatttagacaaatcagctataatgtaaaaatgttaataataattacgttttatctgattaaagttacaatgatcatagcactttaaaaatattatctgaactgtcatttgtttatatattaccgtctaataaaatagttatagatcttccaagaaaaaagaaaaaaattttaaaaggaaaagataaatggttgattaagaaaa

SEQ ID NO: 5608 - DNA, 11466 bp, Homo sapiens
ctaccgggcggaggtgagcgcggcgccggctcctcctgcggcggactttgggtgcgacttgacgagcggtggttcgacaagtggccttgcgggccggatcgtcccagtggaagagttgtaaatttgcttctggccttcccctacggattatacctggccttcccctacggattatactcaacttactgtttagaaaatgtggcccacgagacgcctggttactatcaaaaggagcggggtcgacggtccccactttcccctgagcctcagcacctgcttgtttggaaggggtattgaatgtgacatccgtatccagcttcctgttgtgtcaaaacaacattgcaaaattgaaatccatgagcaggaggcaatattacataatttcagttccacaaatccaacacaagtaaatgggtctgttattgatgagcctgtacggctaaaacatggagatgtaataactattattgatcgttccttcaggtatgaaaatgaaagtcttcagaatggaaggaagtcaactgaatttccaagaaaaatacgtgaacaggagccagcacgtcgtgtctcaagatctagcttctcttctgaccctgatgagagtgagggaatacctttgaaaagaaggcgtgtgtcctttggtgggcacctaagacctgaactatttgatgaaaacttgcctcctaatacgcctctcaaaaggggagaagccccaaccaaaagaaagtctctggtaatgcacactccacctgtcctgaagaaaatcatcaaggaacagcctcaaccatcaggaaaacaagagtcaggttcagaaatccatgtggaagtgaaggcacaaagcttggttataagccctccagctcctagtcctaggaaaactccagttgccagtgatcaacgccgtaggtcctgcaaaacagcccctgcttccagcagcaaatctcagacagaggttcctaagagaggaggagaaagagtggcaacctgccttcaaaagagagtgtctatcagccgaagtcaacatgatattttacagatgatatgttccaaaagaagaagtggtgcttcggaagcaaatctgattgttgcaaaatcatgggcagatgtagtaaaacttggtgcaaaacaaacacaaactaaagtcataaaacatggtcctcaaaggtcaatgaacaaaaggcaaagaagacctgctactccaaagaagcctgtgggcgaagttcacagtcaatttagtacaggccacgcaaactctccttgtaccataataatagggaaagctcatactgaaaaagtacatgtgcctgctcgaccctacagagtgctcaacaacttcatttccaaccaaaaaatggactttaaggaagatctttcaggaatagctgaaatgttcaagaccccagtgaaggagcaaccgcagttgacaagcacatgtcacatcgctatttcaaattcagagaatttgcttggaaaacagtttcaaggaactgattcaggagaagaacctctgctccccacctcagagagttttggaggaaatgtgttcttcagtgcacagaatgcagcaaaacagccatctgataaatgctctgcaagccctcccttaagacggcagtgtattagagaaaatggaaacgtagcaaaaacgcccaggaacacctacaaaatgacttctctggagacaaaaacttcagatactgagacagagccttcaaaaacagtatccactgtaaacaggtcaggaaggtctacagagttcaggaatatacagaagctacctgtggaaagtaagagtgaagaaacaaatacagaaattgttgagtgcatcctaaaaagaggtcagaaggcaacactactacaacaaaggagagaaggagagatgaaggaaatagaaagaccttttgagacatataaggaaaatattgaattaaaagaaaacgatgaaaagatgaaagcaatgaagagatcaagaacttgggggcagaaatgtgcaccaatgtctgacctgacagacctcaagagcttgcctgatacagaactcatgaaagacacggcacgtggccagaatctcctccaaacccaagatcatgccaaggcaccaaagagtgagaaaggcaaaatcactaaaatgccctgccagtcattacaaccagaaccaataaacaccccaacacacacaaaacaacagttgaaggcatccctggggaaagtaggtgtgaaagaagagctcctagcagtcggcaagttcacacggacgtcaggggagaccacgcacacgcacagagagccagcaggagatggcaagagcatcagaacgtttaaggagtctccaaagcagatcctggacccagcagcccgtgtaactggaatgaagaagtggccaagaacgcctaaggaagaggcccagtcactagaagacctggctggcttcaaagagctcttccagacaccaggtccctctgaggaatcaatgactgatgagaaaactaccaaaatagcctgcaaatctccaccaccagaatcagtggacactccaacaagcacaaagcaatggcctaagagaagtctcaggaaagcagatgtagaggaagaattcttagcactcaggaaactaacaccatcagcagggaaagccatgcttacgcccaaaccagcaggaggtgatgagaaagacattaaagcatttatgggaactccagtgcagaaactggacctggcaggaactttacctggcagcaaaagacagctacagactcctaaggaaaaggcccaggctctagaagacctggctggctttaaagagctcttccagactcctggtcacaccgaggaattagtggctgctggtaaaaccactaaaataccctgcgactctccacagtcagacccagtggacaccccaacaagcacaaagcaacgacccaagagaagtatcaggaaagcagatgtagagggagaactcttagcgtgcaggaatctaatgccatcagcaggcaaagccatgcacacgcctaaaccatcagtaggtgaagagaaagacatcatcatatttgtgggaactccagtgcagaaactggacctgacagagaacttaaccggcagcaagagacggccacaaactcctaaggaagaggcccaggctctggaagacctgactggctttaaagagctcttccagacccctggtcatactgaagaagcagtggctgctggcaaaactactaaaatgccctgcgaatcttctccaccagaatcagcagacaccccaacaagcacaagaaggcagcccaagacacctttggagaaaagggacgtacagaaggagctctcagccctgaagaagctcacacagacatcaggggaaaccacacacacagataaagtaccaggaggtgaggataaaagcatcaacgcgtttagggaaactgcaaaacagaaactggacccagcagcaagtgtaactggtagcaagaggcacccaaaaactaaggaaaaggcccaacccctagaagacctggctggctggaaagagctcttccagacaccagtatgcactgacaagcccacgactcacgagaaaactaccaaaatagcctgcagatcacaaccagacccagtggacacaccaacaagctccaagccacagtccaagagaagtctcaggaaagtggacgtagaagaagaattcttcgcactcaggaaacgaacaccatcagcaggcaaagccatgcacacacccaaaccagcagtaagtggtgagaaaaacatctacgcatttatgggaactccagtgcagaaactggacctgacagagaacttaactggcagcaagagacggctacaaactcctaaggaaaaggcccaggctctagaagacctggctggctttaaagagctcttccagacacgaggtcacactgaggaatcaatgactaacgataaaactgccaaagtagcctgcaaatcttcacaaccagacctagacaaaaacccagcaagctccaagcgacggctcaagacatccctggggaaagtgggcgtgaaagaagagctcctagcagttggcaagctcacacagacatcaggagagactacacacacacacacagagccaacaggagatggtaagagcatgaaagcatttatggagtctccaaagcagatcttagactcagcagcaagtctaactggcagcaagaggcagctgagaactcctaagggaaagtctgaagtccctgaagacctggccggcttcatcgagctcttccagacaccaagtcacactaaggaatcaatgactaatgaaaaaactaccaaagtatcctacagagcttcacagccagacctagtggacaccccaacaagctccaagccacagcccaagagaagtctcaggaaagcagacactgaagaagaatttttagcatttaggaaacaaacgccatcagcaggcaaagccatgcacacacccaaaccagcagtaggtgaagagaaagacatcaacacgtttttgggaactccagtgcagaaactggaccagccaggaaatttacctggcagcaatagacggctacaaactcgtaaggaaaaggcccaggctctagaagaactgactggcttcagagagcttttccagacaccatgcactgataaccccacagctgatgagaaaactaccaaaaaaatactctgcaaatctccgcaatcagacccagcggacaccccaacaaacacaaagcaacggcccaagagaagcctcaagaaagcagacgtagaggaagaatttttagcattcaggaaactaacaccatcagcaggcaaagccatgcacacgcctaaagcagcagtaggtgaagagaaagacatcaacacatttgtggggactccagtggagaaactggacctgctaggaaatttacctggcagcaagagacggccacaaactcctaaagaaaaggccaaggctctagaagatctggctggcttcaaagagctcttccagacaccaggtcacactgaggaatcaatgaccgatgacaaaatcacagaagtatcctgcaaatctccacaaccagacccagtcaaaaccccaacaagctccaagcaacgactcaagatatccttggggaaagtaggtgtgaaagaagaggtcctaccagtcggcaagctcacacagacgtcagggaagaccacacagacacacagagagacagcaggagatggaaagagcatcaaagcgtttaaggaatctgcaaagcagatgctggacccagcaaactatggaactgggatggagaggtggccaagaacacctaaggaagaggcccaatcactagaagacctggccggcttcaaagagctcttccagacaccagaccacactgaggaatcaacaactgatgacaaaactaccaaaatagcctgcaaatctccaccaccagaatcaatggacactccaacaagcacaaggaggcggcccaaaacacctttggggaaaagggatatagtggaagagctctcagccctgaagcagctcacacagaccacacacacagacaaagtaccaggagatgaggataaaggcatcaacgtgttcagggaaactgcaaaacagaaactggacccagcagcaagtgtaactggtagcaagaggcagccaagaactcctaagggaaaagcccaacccctagaagacttggctggcttgaaagagctcttccagacaccaatatgcactgacaagcccacgactcatgagaaaactaccaaaatagcctgcagatctccacaaccagacccagtgggtaccccaacaatcttcaagccacagtccaagagaagtctcaggaaagcagacgtagaggaagaatccttagcactcaggaaacgaacaccatcagtagggaaagctatggacacacccaaaccagcaggaggtgatgagaaagacatgaaagcatttatgggaactccagtgcagaaattggacctgccaggaaatttacctggcagcaaaagatggccacaaactcctaaggaaaaggcccaggctctagaagacctggctggcttcaaagagctcttccagacaccaggcactgacaagcccacgactgatgagaaaactaccaaaatagcctgcaaatctccacaaccagacccagtggacaccccagcaagcacaaagcaacggcccaagagaaacctcaggaaagcagacgtagaggaagaatttttagcactcaggaaacgaacaccatcagcaggcaaagccatggacaccccaaaaccagcagtaagtgatgagaaaaatatcaacacatttgtggaaactccagtgcagaaactggacctgctaggaaatttacctggcagcaagagacagccacagactcctaaggaaaaggctgaggctctagaggacctggttggcttcaaagaactcttccagacaccaggtcacactgaggaatcaatgactgatgacaaaatcacagaagtatcctgtaaatctccacagccagagtcattcaaaacctcaagaagctccaagcaaaggctcaagatacccctggtgaaagtggacatgaaagaagagcccctagcagtcagcaagctcacacggacatcaggggagactacgcaaacacacacagagccaacaggagatagtaagagcatcaaagcgtttaaggagtctccaaagcagatcctggacccagcagcaagtgtaactggtagcaggaggcagctgagaactcgtaaggaaaaggcccgtgctctagaagacctggttgacttcaaagagctcttctcagcaccaggtcacactgaagagtcaatgactattgacaaaaacacaaaaattccctgcaaatctcccccaccagaactaacagacactgccacgagcacaaagagatgccccaagacacgtcccaggaaagaagtaaaagaggagctctcagcagttgagaggctcacgcaaacatcagggcaaagcacacacacacacaaagaaccagcaagcggtgatgagggcatcaaagtattgaagcaacgtgcaaagaagaaaccaaacccagtagaagaggaacccagcaggagaaggccaagagcacctaaggaaaaggcccaacccctggaagacctggccggcttcacagagctctctgaaacatcaggtcacactcaggaatcactgactgctggcaaagccactaaaataccctgcgaatctcccccactagaagtggtagacaccacagcaagcacaaagaggcatctcaggacacgtgtgcagaaggtacaagtaaaagaagagccttcagcagtcaagttcacacaaacatcaggggaaaccacggatgcagacaaagaaccagcaggtgaagataaaggcatcaaagcattgaaggaatctgcaaaacagacaccggctccagcagcaagtgtaactggcagcaggagacggccaagagcacccagggaaagtgcccaagccatagaagacctagctggcttcaaagacccagcagcaggtcacactgaagaatcaatgactgatgacaaaaccactaaaataccctgcaaatcatcaccagaactagaagacaccgcaacaagctcaaagagacggcccaggacacgtgcccagaaagtagaagtgaaggaggagctgttagcagttggcaagctcacacaaacctcaggggagaccacgcacaccgacaaagagccggtaggtgagggcaaaggcacgaaagcatttaagcaacctgcaaagcggaacgtggacgcagaagatgtaattggcagcaggagacagccaagagcacctaaggaaaaggcccaacccctggaagacctggccagcttccaagagctctctcaaacaccaggccacactgaggaactggcaaatggtgctgctgatagctttacaagcgctccaaagcaaacacctgacagtggaaaacctctaaaaatatccagaagagttcttcgggcccctaaagtagaacccgtgggagacgtggtaagcaccagagaccctgtaaaatcacaaagcaaaagcaacacttccctgcccccactgcccttcaagaggggaggtggcaaagatggaagcgtcacgggaaccaagaggctgcgctgcatgccagcaccagaggaaattgtggaggagctgccagccagcaagaagcagagggttgctcccagggcaagaggcaaatcatccgaacccgtggtcatcatgaagagaagtttgaggacttctgcaaaaagaattgaacctgcggaagagctgaacagcaacgacatgaaaaccaacaaagaggaacacaaattacaagactcggtccctgaaaataagggaatatccctgcgctccagacgccaagataagactgaggcagaacagcaaataactgaggtctttgtattagcagaaagaatagaaataaacagaaatgaaaagaagcccatgaagacctccccagagatggacattcagaatccagatgatggagcccggaaacccatacctagagacaaagtcactgagaacaaaaggtgcttgaggtctgctagacagaatgagagctcccagcctaaggtggcagaggagagcggagggcagaagagtgcgaaggttctcatgcagaatcagaaagggaaaggagaagcaggaaattcagactccatgtgcctgagatcaagaaagacaaaaagccagcctgcagcaagcactttggagagcaaatctgtgcagagagtaacgcggagtgtcaagaggtgtgcagaaaatccaaagaaggctgaggacaatgtgtgtgtcaagaaaataacaaccagaagtcatagggacagtgaagatatttgacagaaaaatcgaactgggaaaaatataataaagttagttttgtgataagttctagtgcagtttttgtcataaattacaagtgaattctgtaagtaaggctgtcagtctgcttaagggaagaaaactttggatttgctgggtctgaatcggcttcataaactccactgggagcactgctgggctcctggactgagaatagttgaacaccgggggctttgtgaaggagtctgggccaaggtttgccctcagctttgcagaatgaagccttgaggtctgtcaccacccacagccaccctacagcagccttaactgtgacacttgccacactgtgtcgtcgtttgtttgcctatgtcctccagggcacggtggcaggaacaactatcctcgtctgtcccaacactgagcaggcactcggtaaacacgaatgaatggatgagcgcacggatgaatggagcttacaagatctgtctttccaatggccgggggcatttggtccccaaattaaggctattggacatctgcacaggacagtcctatttttgatgtcctttcctttctgaaaataaagttttgtgctttggagaatgactcgtgagcacatctttagggaccaagagtgactttctgtaaggagtgactcgtggcttgccttggtctcttgggaatacttttctaactagggttgctctcacctgagacattctccacccgcggaatctcagggtcccaggctgtgggccatcacgacctcaaactggctcctaatctccagctttcctgtcattgaaagcttcggaagtttactggctctgctcccgcctgttttctttctgactctatctggcagcccgatgccacccagtacaggaagtgacaccagtactctgtaaagcatcatcatccttggagagactgagcactcagcaccttcagccacgatttcaggatcgcttccttgtgagccgctgcctccgaaatctcctttgaagcccagacatctttctccagcttcagacttgtagatataactcgttcatcttcatttactttccactttgccccctgtcctctctgtgttccccaaatcagagaatagcccgccatcccccagatcacctgtctggattcctccccattcacccaccttgccaggtgcaggtgaggatggtgcaccagacagggtagctgtcccccaaaatgtgccctgtgcgggcagtgccctgtctccacgtttgtttccccagtgtctggcggggagccaggtgacatcataaatacttgctgaatgaatgcagaaatcagcggtactgacttgtactatattggctgccatgatagggttctcacagcgtcatccatgatcgtaagggagaatgacattctgcttgagggagggaatagaaaggggcagggaggggacatctgagggcttcacagggctgcaaagggtacagggattgcaccagggcagaacaggggagggtgttcaaggaagagtggctcttagcagaggcactttggaaggtgtgaggcataaatgcttccttctacgtaggccaacctcaaaactttcagtaggaatgttgctatgatcaagttgttctaacactttagacttagtagtaattatgaacctcacatagaaaaatttcatccagccatatgcctgtggagtggaatattctgtttagtagaaaaatcctttagagttcagctctaaccagaaatcttgctgaagtatgtcagcaccttttctcaccctggtaagtacagtatttcaagagcacgctaagggtggttttcattttacagggctgttgatgatgggttaaaaatgttcatttaagggctacccccgtgtttaatagatgaacaccacttctacacaaccctccttggtactgggggagggagagatctgacaaatactgcccattcccctaggctgactggatttgagaacaaatacccacccatttccaccatggtatggtaacttctctgagcttcagtttccaagtgaatttccatgtaataggacattcccattaaatacaagctgtttttactttttcgcctcccagggcctgtgcgatctggtcccccagcctctcttgggctttcttacactaactctgtacctaccatctcctgcctcccttaggcaggcacctccaaccaccacacactccctgctgttttccctgcctggaactttccctcctgccccaccaagatcatttcatccagtcctgagctcagcttaagggaggcttcttgcctgtgggttccctcacccccatgcctgtcctccaggctggggcaggttcttagtttgcctggaattgttctgtacctctttgtagcacgtagtgttgtggaaactaagccactaattgagtttctggctcccctcctggggttgtaagttttgttcattcatgagggccgactgcatttcctggttactctatcccagtgaccagccacaggagatgtccaataaagtatgtgatgaaatggtcttaaaaaaaaaaaaaaaaaaaaaaaaaaaaaaaaaaaaaaaaaaaaaaaaaaaa

SEQ ID NO: 5609 - DNA, 1529 bp, Homo sapiens
  misc_feature (14)..(14): n is a, c, g, or t
aatcgacggttccngggacgtatatttttttttcttaagatacatgatggcctgggcaataaggtgaaacccgtctctaccaagatatacaaaaaattagccaggtgtggtggtgcacacctgtagccccagctactctggaggctgaggcgggaggatagcttaaacctaagaggaggaagttgcagggatttcatattaaaatggtactatgatccaaacaccaaaagctgtgcaagattctggtatggaggttgtggtggaaacgaaaacaaatttggatcacagaaagaatgtgaaaaggtttgcgctcctgtgctcgccaaacccggagtcatcagtgtgatgggaacctaagcgtgggtggccaacatcatatacctcttgaagaagaaggagtcagccatcgccaacttgtctctgtagaagctccgggtgtagattcccttgcactgtatcatttcatgctttgatttacactcgaactcgggagggaacatcctgctgcatgacctatcagtatggtgctaatgtgtctgtggaccctcgctctctgtctccaggcagttctctcgaatactttgaatgttgtgtaacagttagccactgctggtgtttatgtgaacattcctatcaatccaaattccctctggagtttcatgttatgcctgttgcaggcaaatgtaaagtctagaaaataatgcaaatgtcacggctactctatatacttttgcttggttcattttttttcccttttagttaagcatgactttagatgggaagcctgtgtatcgtggagaaacaagagaccaactttttcattccctgcccccaatttcccagactagatttcaagctaattttctttttctgaagcctctaacaaatgatctagttcagaaggaagcaaaatcccttaatctatgtgcaccgttgggaccaatgccttaattaaagaatttaaaaaagttgtaatagagaatatttttggcattcctctaatgttgtgtgttttttttttgtgtgtgctggagggaggggatttaattttaattttaaaatgtttaggaaatttatacaaagaaactttttaataaagtatattgaaagttaaaaaaaaaaaaaaaaaaaaaaaaaaaacaacacaacaaaagacaaaaaacaaacaacaacgaaaagaaaagaagaaaaacaacaaccacacacagcaacggcggggggcgccgccccccattaataccaccctcgcccgagcggcccctccttctcgacgtcgcacccgattcgtgtatgttgtgacaaaaaaagagagggctcctcatcaatcgagttgggtcatatcattaatacaatagtagcggggacgttagaccaaagggtgttgtttaaaacaacgacatacccgcttgctgagcggcacaaccgtggtttgactagagagtggaagtcttcttcgaggtgacagacaactatgtataagaggggttacaaaaatatggggaacaatccctcacacctgcagaataacc

SEQ ID NO: 5610 - DNA, 5415 bp, Homo sapiens
  misc_feature (3660)..(3701): n is a, c, g, or t
  misc_feature (5397)..(5410): n is a, c, g, or t
cactgatcttctcaggtgggtaggtttgtgagctagaggaggcttgggtcctgagtccactctcctatcaacttggggcagcctggttaatgaggaaagaggtcttggctgctgggcagagccgggtttctctctcattcccgaagaacaccatttggtttcccccggctgggtctctatttagatgggcagtgatgacaccaaatataagcataaaaagacgttttaaaactacagatcctgaaacccagcacggcaggcacctgcagcttccagtgctgtaacagagaaaaaaaaaatccccactttgcaattgcatctggtcaatgagaggctctagttttggggaagagggaaacacctaaccttgacagaatcatcaccagagacacctgccggctgacaaggacagctttcttggagccaacagatgatgcaaggaaataagaagtgcacagacgcgttcagcgactcctccagcatcggcagcgtgttggatgatgcagacagggaggtgagcagcctaacagaccgggcattccggagtttgtgcatctccgaggacacatccttccatgactcctatctggctgtgtccccggatatcacccgacaggtgtttgggacttttcaccagagaacagtgggccacacccagaggaaaagtggcatttggagccagttaccgtcacagggcacggaacattcgggctgggcggccaccttccaacagctacccaagtacgttcagggagaggaaaagtaccccaaaaccagccccccaccaacgccagtccagaggagactggaggtgccagtttccggcctaaggagcagcaataagcctgtctccaaagtatcaacactaattaaatctttcgacaggaccgagagccaacgttgtgagagcaggcccactgccagcaagcctccggctctgaaaaatcctcccaaattcgctcctcttccagaaaacagtgtcaacttctgcttcgattctgcctttctgacagtcaggagggtgcccgctgaagtttccaacacccatcagaagagctaccagccaggcaggaagcacggagaacaggagtcctccaagaatccagaaatggcctgtcacggctccagcagcttcctcccagcagccaatgacacggccaccttatgtgagtcaaagttcccctctccacaccacaagccagtcacgggtgagcctgggagaggcaaaggtacctttctgcacagtgaaaatagtgcttttgagtcatggaatgcccaccaaccaaagctgctggagagaaaggacacagctggaaccgtcccagaaagcaaagctcccaagcactatggggacacgaccttgctaagagaaccctgtcctcctgagctcacagtctctccctgccaggtccaggccagctgcagtcaggaagagaacagactcgaagcaggggctctgtccacatctataccctgggggtgcagggatccaggagcccaggtatttgctgtggaaggaaaagctcccagctcacaacctgattctcaagagaagccagcccagcccccatgggggaagccaaagactggcaaaaaagggaaagaaagtctacaagatactttagaagaaaagacacagaccaaccagagaggcccacctttgtatacaaaacacaacccccaggaacagttttcagaaaacaatgctcttgacctgcctgtggaacccaatgaacattatgatcccccctttaacatcagtaagctcctgacccccatcatacccagcaagcacgccctggattcagcagccagccagccagcagagcgaaccccatcacccccaggacagctaaacggataccaagagaaggagcccagtgaatgtcagtctcgagacagctacaagtccaaagcccctagcctgctgttcaaccacaaggacgtgcggaagcgtgttaagagcacatacagttcctcacctctcttgaaagtgcttgatgagaaaactagaggtaaggttgatggaaagcaagaacctgtgagcaacggtgtcatcctccccaatgggcttgaggaaagccctccaaatgagctttctaaggagagacccgctgatgaccccactgcatcacacatcaatccccagaaggaccctacagctgaccccagtgagccctctgcagacagctatctaactcttagcacagctccgactatcgccaaagcccccttctatgtcaatggggaggctgctgagagaagcagttatgagaacaaggaggtggaaggagagttggagatgggtcctgccggatccagctggtgtccagactccagggaacaccgccccaggaaacacctctccctgaggctttgcaatagggatcctgagcctggaggggctacagagaaaatgaagacccaccagctagagaatgggctctccagatctgtgtcccaagagacagaacctgagagggaagcaggacttcagaacacacatttgaaccagaaattctccccagggcccctctctcctgaggaggaagatgtgttttacagtgacagccaatccgattttatgccaagcctcaaaggtaaggccaaattcagcaccagctcttcagatcaatcctttgcctcatttgatgatcagcagaagatgtggtttactgagaaccagcgggaagacaggaggaaggatgtgagcgcaggtgacagtcagaaggatgagaaggagaatgtgatgcggaaggatgagctgcagtactgtgccttaagcaatgggcacgcatgcctggaaaaccgcagccagggggaagcattgcaaagagaaagggaaagtgtgtctggaggaagaaccaggaaggcatcagcagaggaagctaatttcagaggctcttggattggggaaaataagggcacaaccttttcacaggccaaagaccttactccctcaccatcttctgcttcaaacaggcacatgctgtttacgattaaagacaacaccctcagagctacccccgtaattaaacctatcatgctgcctctcctgaggaccatgtccttggagaactccctcagcagtggccacaaagaggaggaattgccaaggccggaatggggtgaggatcctgggttttgtgcccccgaaaaccaggacattcttggtacatcgacacccactaacacacggggcacacgtgtgaagtgcatggccaacgaggtcatggaggaccctgggcaggggtcgagcatggccaggatggaggcctctcagccagccccaaaggggaatttcccatctatgcctctggtgggagagggggaccgggtgaaggcaccaccagatgctgcacctggcctcgtggcaagcaattgcaagagcggttctgcagactcagggaagctggcagccccatggcacatccccaccattgctttacccgagggtgacatagaagaccagccacccccatggcagcccgaaaactgttgggaagagcaaacaccaggtttcaagagtcactttttgtccacacccagagcagggccccctggcagaagactggtccccagtgagagggcgaattcccccaaccccggctcccccggggagagcagtgcctgctcccctgctgccagcaacatttgggnnnnnnnnnnnnnnnnnnnnnnnnnnnnnnnnnnnnnnnnnnaggagcctaatcaagccagcccctgggccagctccagtcctgccagggtcacccggagggaggacctgacccacgccctcgtgtgggagggcggctctgaccccctacttgagctgtcggcagaagacctccggaccctctctccaagaggttcattgctggatgtggccaccagcccagcaggcacctctgggagacttgagcttcctgcacagctagagaggacagcaagcaagccacctgcagtcccacccaaaacagagaaagccctgcggcgggcaaagaagctggcaagtaagaggaggaagacggatcaggctcaggagaagcatggcgagtcacaggagggaaagccctgcccggaggacttggagcagacacagcaaaggccgctgtgccccagagagaggccccgacacaatttccccgtggtccgttccctgccccctcccgtgcaccgccactccgtgtccggcttctcggagcctgtcgggaggcggcccgggggcccccagtccctcacacccctgcccacgtacacctccaccctgaaggtcctccaggatccgcagtccggggagtactttgtcttcgacttgccactccaggtgaaaatcaagaccttctatgacccagagacgggcaagtatgtcaaggtctccatcccgtcctccgagggggcctccccagagccgcccccaccggacgccctggccgctccctatgtgctgtaccccggcttccagccagtgcccgtgacggccttgatgccgctgcgctgctcttctcagctctccgcgcccaccttcctcaggcagggccctcgtgcctccgcggcccgcgccaggacccagagtgtccacgagtctggactacagctggacccagggcctcacggtgactgcaccccgcactctgcaggccagcgccctcatggtcctccccagagcccaggagaggagggtgtagaagctccaggcctgggcatcatctccactgacgacctagaggactttgccacagaaggcatttcttgagttactgcaggctgtcccccacccccagatgaacccagaggagcttacttccccctcccccaaaacaagcaacacacacacacacacacacacacacacacacacacacacacgatcatcaacacatacttagcctttttagatccataaagtccagaaggcagtagggatcccaagacgacctcacccaaagggctccctggctctcctctgatggaggggcactgcttgcttggcccggtcccctccgtgccagttcccaggcgcactctactccagcccttctccctccctcccttcctccctctcctggcccaccctgctcttccctcgccctgcaaattaggtgggtgtggcaagggcaccgcctggtcccaagtgtccctctgtacccacacccacccactcacttgtaagctccttgatgagccaaaccctaaggcccccagctcagactcagcaggcattcaggtcaactcaggcagactggctaaggaccagcccagggcaattttgcagaaatgatcatttgcacagaatgggtttccttcacagggagaaacttgcctctgaaagctattttctgatcaagaaaaggcccactttttaaaaagtgaaacaagtttgcagatacggttaaaaaaaaaaaaaaaaaaaannnnnnnnnnnnnntctcc

SEQ ID NO: 5611 - DNA, 3319 bp, Homo sapiens
agatcacaccagacaattataaaagaagagctggtcctgaagctcacaaccgtaacagccaccagacaagcttcagtggccggcccttcacatccagacttgcctgagaggacccacctctgagtgtccagtggtcagttgccccaggatggggaccacagccagagcagccttggtcttgacctatttggctgttgcttctgctgcctctgagggaggcttcacggctacaggacagaggcagctgaggccagagcactttcaagaagttggctacgcagctcccccctccccacccctatcccgaagcctccccatggatcaccctgactcctctcagcatggccctccctttgagggacagagtcaaggtaaggtcaccatcccatgccctcctcagtgaccctccaggtttctaatctggcctatatcccacttttcaggtggaaaggagggaagaggccctcgcccccactcccagccctggctaggagaaagggtgggctgctcacacattcccccttctatagtgcagccccctccctctcaggaggccacccctctccaacaggaaaagctgctacctgcccaactccctgctgaaaaggaaggtgagcgcttgcccaccctccctcacctctatcccactatggatcctgttgacaccaggctgatccctgctccttggtgccctcacccctatcttgcagtgggtccccctctccctcaggaagctgtccccctccaaaaagagctgccctctctccagcaccccaatgaacagaaggaaggtaagcagctccctctcttctttacccacctttacctcatggccttcccccagagcatgggcttcggggcagacaagacggtgggctctgccactcaccagttgtataaccttgggtaagttacatacttctccaagcctttgtttcttcatctgtaaaattgaggatatacctgttttagaaagttatgtgattagatgtgcaaaaatagcatctattttcacttgcttctctgctgagttcttctttgtgcatgtaaactagccaggctttctctgctagagatggccatcccaacatggcttttgcttactccttctacccagtagacccacctcttccatatcaggaggagataatcatccattccatgccgagagagggtgagtgacagctttggtctgtccatcctcctgccttagtgctcaggaccctggggagaggagcaggaagcccgagccttgagaagcaggaggaggtgggggcaggctgtgagctgacacctttcacacctcgcttctcttttcctttcagttattttaaaaggaagagccacaaattgttctttctcatttccactatatcctcccaaccctttctcctccaccccagattctttcaatcctcccagctcatccagcctttgtgggttccttcacatgtccccgcttcccactgttttccccattccaggaacgccagctccatttggggaccagagccatccagaacctgagtcctggaatgcagcccagcactgccaacaggaccggtcccaagggggctggggccaccggctggatggcttcccccctgggcggccttctccagacaatctgaaccaaatctgccttcctaaccgtcagcatgtggtatatggtccctggaacctaccacagtccagctactcccacctcactcgccagggtgagaccctcaatttcctggagattggatattcccgctgctgccactgccgcagccacacaaaccgcctagagtgtgccaaacttgtggtaaggttgggttcttgatgccggggggtgtcctttaaccccagacagtatgtgtgttttaagggttagagcactaggcctgggtctggaggaacctcaggtcccgttcactggccctaccctgggcctccccaatgtgccaggggagcagaggacaaccactgtctcttctttatctgcctgcccagtgtcctttcctggagcctgggaggaaggcaggaatgtggaaagtgggctgatcctcccctcttgctctagtgggaggaagcaatgagccgattctgtgaggccgagttctcggtcaagacccgaccccactggtgctgcacgcggcagggggaggctcggttctcctgcttccaggaggaagctccccagccacactaccagctccgggcctgcccagccatcagccgtgatatttcctcggctcttgagctgcctttccctcctggggtgcccacattggacaatatcaagaacatctgccacctgaggcgcttccgctctgtgccacgcaacctgccagctactgaccccctacaaagggagctgctggcactgatccagctggagagggagttccagcgctgctgccgccaggggaacaatcacacctgtacatggaaggcctgggaggatacccttgacaaatactgtgaccgggagtatgctgtgaagacccaccaccacttgtgttgccgccaccctcccagccctactcgggatgagtgctttgcccgtcgggctccttaccccaactatgaccgggacatcttgaccattgacatcggtcgagtcacccccaacctcatgggccacctctgtggaaaccaaagagttctcaccaagcataaacatattcctgggctgatccacaacatgactgcccgctgctgtgacctgccatttccagaacaggcctgctgtgcagaggaggagaaattaaccttcatcaatgatctgtgtggtccccgacgtaacatctggcgagaccctgccctctgctgttacctgagtcctggggatgaacaggtcaactgcttcaacatcaattatctgaggaacgtggctctagtgtctggagacactgagaacgccaagggccagggggagcagggctcaactggaggaacaaatatcagctccacctctgagcccaaggaagaatgagtcaccccagagccctagagggtcagatggggggaaccccaccctgccccacccatctgaacactcattacactaaacacctcttggatttggaaaaaaaaatatctatctaatgtctcacccgcagtgttttaagtggatcttggtgccctggcccaggagggcactggcgttttcagacacaccacagacaaacacaccctcctaagcctgcttgtatttccttcagtgcctggcccctgaggcccacggccctgcccccttcactgagcagatgttcacaggctgtgggatgcgaccataactaaacagcttgacgtcaaaaaaaaaaaaaaaaaa

SEQ ID NO: 5612 - DNA, 1798 bp, Homo sapiens
taaaatctaggtgtgatgcagttcagaataaataaattcaaatgacataggttgccttgctttgttgtagttttcaaaaatggacacaacagagttcatatttgataatacaaatagcccttgtcggtggcatgatagctttatccatcatttatagtttatgacttgtggttattttaaaacattgaaagaattttgaaaaaagtcataaatgtctgtaacactagcacttttaaggcagataatagacatctaaaatcttcagggcatggctatggctttagaatcatctgaataagttgaaaatatttaagaaatataggtctgttcatccaaagaattaaataatttgcctttgtcacgatggaataaataaaatatcacaggttatttttgttgtggtagatgccttttaacaaaaggcaatccctggagactgttgtagaaaaggacaaagcaaaacgggtgttttggttttgctttattttgattgattgttgtttgttgtcattactttccttgtacaatcacttttccatggtcaccctcttttctgctttatactaattgccctgttgaggtgtttccatgtcaaatgcagctcttgccggaactgaaaatggcagtgccaagggagctgtgcaagtataatcaaagctggaagatttcctccatccacccgcgaccccaaggcttaagcattcccttaggaaccaaagctgactctttgggaaagttatcacagccttattaggttacaaccctgaaggtgttttgttgttttgaccttaaaattttgcgaactgttttgtgaactgtgtgtgtgtgcacacacatgtgcaaaggagttgcttgcaccttgagagagtcaatttttctgcctaagtgaaaggtcaggaactgcagttaacccagagtaaaatattggttgggtgaagggctcacttctagtatagtcagaatgggctcaagatcttaggaggatgataggtgatgaactgcttaaggtaggtactgttgtgtttgtgctttgtctcatgtggacaaattaccttgttgcatatgtgagttatgtggacataaacatatacagcagttactccctgactggctggctttcttaaagtgatagtcagaatatagcctgtactgtcagatatggaagatcaatataattgaatgaaaaagaaagctgaaggacaatccaagaataatataaacataagctattttaaaacattagagggagtgctttatgcaaaagagaaactgaatttattgtttcattctctcttctctcccttcacccctttcaagaaaacgcaaagccacaagtgagtggttgtatgtgtctgatggcttatgtaaacatagaagaagtcttcagatggctaaaataaacatgcgcgtgttaccaaaggatatgtttacacaaaccatttgctcagcctctgaaataatgaataaatgaagattttactaaaataattgggaggatttttgtgtttctgcggatgccataattgaatggcaccaaagagacttttatcagctattttccgtgttacatgtgttagcagttcctttctgtgggttgaatacttcattctgtagttactttacacatgtttttctaagaaattgtcgtttattactgcaattctagagagttgcttgatttctcaagagaaatttagcagccagtaaaggttatttggatctggttggtcaggagagggagggcaaaaaaaaaaaaaaaaaaaaaaaagaggaaaggaaaaaaacaaaaacaaacact

SEQ ID NO: 5613 - DNA, 2659 bp, Homo sapiens
agctgcgggggcgcagtcgccgggccgcgggcggcgggacggacgaggccggggccccgggtggcacccggcaggcgggcaggcgggcgccatggagctgctctcggcgctgagcctgggcgaactggcgctcagcttctcgcgggtgccgctcttccccgtcttcgacctcagttacttcatcgtctccatcctctacctcaagtatgagccaggagcagtcgaactgtcccggcgccaccccatcgcgtcctggctgtgcgccatgctgcattgcttcgggagctacatcctggctgatctgctccttggggagccactgatcgattacttcagcaacaactccagcatcctgctggcctcagctgtctggtacttgattttcttctgccccctggacctcttctacaagtgtgtctgcttcctgcctgtgaaactcatcttcgtggccatgaaggaggtggtgcgagtccgcaagatcgcggtgggcatccatcacgcccatcaccactaccaccacgggtggttcgtcatgattgcaactgggtgggtcaaaggttctggtgtcgccctcatgtccaactttgagcagctgctccgaggggtctggaagccagagaccaacgagatcctgcacatgtctttccccaccaaggccagcctgtatggagccatcctcttcaccctccagcagacccgctggctcccagtgtccaaagccagcctcatcttcatcttcaccttgttcatggtgtcctgtaaggtgtttctgacagccacccactcacacagctccccctttgatgccctggagggctacatctgccccgtgctgtttggttcggcctgcgggggtgaccatcaccacgacaaccatggtgggtcccacagcggtggtgggccaggagctcagcattcggccatgcccgccaagtccaaggaggagttgagcgagggctccaggaagaagaaggccaagaaggcggattagggggtggcccaaggggcaccggggagaggacccggacccaggaccctctgagctgggaggcttcctgcgctcagacctatcctttcctggccttgacttccccatctgcaaatcagggtcattggctcaccctccagggctgacgtgggggttgagatatggggatgaggatgaagaacttttgtagaaatcggggttccctctttctctctgccaggaccccatagagtcacagcttttggaggggttcacagaatcctggcagcagctccagtcaagaatgtcactggttggcatgatattcttagttctatttttccttctttaaaattgcatcttgaccaggcacagtggctcatgcctataatcctagcactttgggaggccgaggcgggcagatcacctgaggtcaggagttcaagaccagcttggccaacatggtgaaaccccatctctaccaaaaatacaaaaattagccagacgtggtggtgcacgcctttaatcccagctactcgggaggctgaggcaggagaatcacatgaatccaggaggtggaggttgcagtgagctgagatcttcccactgcactccagcctggccaataagacctgtctccagcaagaccctgtctcaaaaaaaaaaaaaaaaaaaacatatggactcctgaagaacttcaggccatgttgagatccattcatttgatggacattttctaagtacctgtgagccaggtgctgccatttcaaagtctcttcttaccacgctcctcagtggctagactttttcacgtggccagaaagtcccgactcttgctgggcgtccctggacaagttgccttcctcctctgagcttggcgctccccatctgtatagtggagacccttggctcccctctgtacggaagggccgatgcgaagctgcagttaaaaaaggctcacatgctcctagcctcgtgcagtcaggaggggagaccaggacagttggaaattatgattgcaaatggctttgcattttagatcattcgtgtgtgtggatcagagaaacgcacaagttccctggcacaaaggaagccctcagtagacacgtctagggcaggcttgagagatcagatggcgtgaaaggcttgtgatctgttcgtctcaggctccccctaaaccaaagaaatggaaacagctggttggggttccacgatccagctctatcaaggggctctgagtgtgcacagttgggacctggatgtatcaggtctccctcaggctggagtccactggcactcattcagccattgaacaaacatacagatgcttacctgctctgtggtcagccttgtgctgctgctgggcgggccaggagcctgcttcagtgtgagcgaggtggatgatattatagctgaagggtccctcctggtcaccctcatctcagcctaggtcaccaggatgtctgagaggggtgggtgcatgggacgggcgtggccagtctcaggtgaggtttgggcccagacctcgttggagtcccagacgttgccaggctgttggaaaattgccttgttcctgtgatgcctgggagttaggtgggtcctggggaggtttcatcctcttgcttgtccacctcagctcggtgtggaggggcagccaataaatcattgtgaatgaaaaaaaaaaaaaaaaaa

SEQ ID NO: 5614 - DNA, 1078 bp, Homo sapiens
cctaaatttgtagaatgctccttcctttaatcctgtcacaacaagctttgttcctctcacttctttatctttacccttttcccattcttcttttccttcttctttatattcaacgatgtatccagttactttggatccaccatcttttagtgggggagaccactccagatctgcagatgatttagtccaatctgtcactttgggaaatggaggaccaggaggggcaattggatctctagcagtcgctgggtctgatggcagacttgctggacccacgccagcagcattgattgcatatacccggaattgatagtcggaaccttcaataagaccagtcactttataagaaacacccaaagtcatggctttgataggatctcggttaactctcttccatctctttgaagtggtgtctttcatttccagccagtaccctgtcacaggagagcctccatcatattctggctcttcccagttgacagtcatggagttacgagtcacgctgctaactgttggtttatctggtgctccagggacagagaagaggtttcttgctgtttcaggttcactgtcaagaggttctccaatgccatatttattctgggccatgattcggaatacatattcatggccttctagcaatttgggaatcgtgtacgtgcactcacttaggttcactggagacatgggacccatgtcttcctgttagcttctcttttctcaattacataggtttggtaatctttagacccaccatcatctttagggtggaaaccaagatagtgtcatttgatctgctgaaacagattcaaattttatgggtcccactggagggccaggacgacccaggacattcagtctcatctcctttgatgctgttcccagattatttacagctgtgatggtatataagccagtgtcactcctgcgagactgcggaataactaaagtgcaagtatcatctaccaccagtttgttgacatgggtgtcatagagaacaggttctttgttatcaggcttctttggaggagctttaaaccaggttagtgtcgggaatggcacacctttaattttggcc

SEQ ID NO: 5615 - DNA, 1339 bp, Homo sapiens
  misc_feature (3)..(3): n is a, c, g, or t
  misc_feature (64)..(67): n is a, c, g, or t
  misc_feature (70)..(72): n is a, c, g, or t
  misc_feature (79)..(79): n is a, c, g, or t
  misc_feature (82)..(82): n is a, c, g, or t
  misc_feature (85)..(85): n is a, c, g, or t
  misc_feature (110)..(113): n is a, c, g, or t
  misc_feature (126)..(128): n is a, c, g, or t
  misc_feature (132)..(133): n is a, c, g, or t
  misc_feature (136)..(136): n is a, c, g, or t
  misc_feature (138)..(139): n is a, c, g, or t
  misc_feature (141)..(141): n is a, c, g, or t
  misc_feature (146)..(146): n is a, c, g, or t
  misc_feature (149)..(149): n is a, c, g, or t
  misc_feature (155)..(157): n is a, c, g, or t
  misc_feature (162)..(162): n is a, c, g, or t
acncaaaaaaaaaaaaaaaaaaaaaaaaaaaaaaaaaaaaaaaaaaaaaaaaaaaaaaaaagcnnnnaannntttgctnttnggncaaaaaaaaaaaaaaaaaaaaaaannnnaaaaaaaaaaaannntgtnncanannanaaatnacnagaatnnngcacngacggagcgcgaactgaggtcggttcgccgtgcagcctgcagaatgagggccctccagcgctatcccccaatcttcgcgcccggcgagaactgcagcccccgcgtggggggcggcgcccgcgggctacgacgcagcggacaacgaacctgcgcatccttggcaagccaggtgatggagcgctgggagaccccctaatatgcaccgcgctggccgccgccgcctcctccaaaagggggccgggctcctggaggtgggctttggcatggccatcgcagcgtcaaaggtgcaggaggcgcccattgatgacgcattggatcatcgagtgcaatgacggcgtcttccagcggctccgggactgggccccacggcagacacacaaggtcatccccttgaaaggcctgtgggaggatgtggcacccacccctgcctgacggtcactttgatgggatcctgtacgacacgtacccactctcggaggagacctggcacacacaccagttcaacttcatcaagaaccacgcctttcgcctgctgaagccggggggcgtcctcacctactgcaacctcacctcctggggggagctgatgaagtccaagtactcagacatcaccatcatgtttgaggagacgcaggtgcccgcgctgctggaggccggcttccggagggagaacatccgtacggaggtgatggcgctggtcccaccggccgactgccgctactacgccttcccacagatgatcacgcccctggtgaccaaaggctgagcccccaccccggcccggccacacccatgccctcctccgtgccttcctggccgggagtccagggtgtcgcaccagccctgggctgatcccagctgtgtgtcaccagaagctttcccggcttctctgtgaggggtcccaccagcccagggctgatcccagctgtgtgtcaccagcagctttcccagcttctctgtgagggtcactgctgcccactgcagggtccctgaggtgaagtaaacgccggcgctgggcttggccagtcggcaaaaaaaaaaaaaaaaaaaaaacgacaaaccaaccaaaagaagcacaaaaaaccacggaggggacatctaaaagggggggggcgacaacaaaggcggcgtactaagaaagggggaagcggtggccaaaacaggggtcgcggccgaa

SEQ ID NO: 5616 - DNA, 1955 bp, Homo sapiens
gggcagctccaccctgggagggactgtggcccaggtactgcccgggtgctactttatgggcagcagctcagttgagttagagtctggaagacctcagaagacctcctgtcctatgaggccctccccatggctttagggggattataaaactaatcatcaaagccaagaaggcaagagcaagcatgtaccgctgaaaacacaagataactgcataagtaatgactttcagtgcagattcatagataatggataatctgctggggcatcagcagtcatcttgtcactctcctgctcctcctgatggattcagagacgatctgccgaccctctgggagaaaatccagcaagatgcaagccttcagaatctgggatgttaaccagaagaccttctatctgaggaacaaccaactagttgctggatacttgcaaggaccaaatgtcaatttagaagaaaagatagatgtggtacccattgagcctcatgctctgttcttgggaatccatggagggaagatgtgcctgtcctgtgtcaagtctggtgatgagaccagactccagctggaggcagttaacatcactgacctgagcgagaacagaaagcaggacaagcgcttcgccttcatccgctcagacagtggccccaccaccagttttgagtctgccgcctgccccggttggttcctctgcacagcgatggaagctgaccagcccgtcagcctcaccaatatgcctgacgaaggcgtcatggtcaccaaattctacttccaggaggacgagtagtactgcccaggcctgcctgttcccattcttgcatggcaaggactgcagggactgccagtccccctgccccagggctcccggctatgggggcactgaggaccagccattgaggggtggaccctcagaaggcgtcacaacaacctggtcacaggactctgcctcctcttcaactgaccagcctccatgctgcctccagaatggtctttctaatgtgtgaatcagagcacagcagcccctgcacaaagcccttccatgtcgcctctgcattcaggatcaaaccccgaccacctgcccaacctggtctcctcttgccactgcctcttcctccctcattccaccttcccatgccctggatccatcaggccacttgatgacccccaaccaagtggctcccacaccctgttttacaaaaaagaaaagaccagtccatgagggaggtttttaagggtttgtggaaaatgaaaattaggatttcatgatttttttttttcagtccccgtgaaggagagcccttcatttggagattatgttctttcggggagaggctgaggacttaaaatattcctgcatttgtgaaatgatggtgaaagtaagtggtagcttttcccttctttttcttctttttttgtgatgtcccaacttgtaaaaattaaaagttatggtactatgttagccccataattttttttttccttttaaaacacttccataatctggactcctctgtccaggcactgctgcccagcctccaagctccatctccactccagattttttacagctgcctgcagtactttacctcctatcagaagtttctcagctcccaaggctctgagcaaatgtggctcctgggggttctttcttcctctgctgaaggaataaattgctccttgacattgtagagcttctggcacttggagacttgtatgaaagatggctgtgcctctgcctgtctcccccaccgggctgggagctctgcagagcaggaaacatgactcgtatatgtctcaggtccctgcagggccaagcacctagcctcgctcttggcaggtactcagcgaatgaatgctgtatatgttgggtgcaaagttccctacttcctgtgacttcagctctgttttacaataaaatcttaaaatgccaaaaaaaaaaaaaaaaaaaatgactcgtggccg

SEQ ID NO: 5617 - DNA, 1331 bp, Homo sapiens
  misc_feature (879)..(883): n is a, c, g, or t
ccggtgtcgtcgctggctgtgcgcgtcatttccgggcgtcacgtaacggagtggccaacgccctgcagagcaacatgcccaagttttattgtgactactgcgatacatacctcacccatgactctccatctgtgagaaagacacactgcagtggaaggaaacacaaagagaatgtgaaagactattatcagaaatggatggaagagcaggctcagagcctgattgacaaaacaacggctgcatttcaacaaggaaagatacctcctactccattctctgctcctcctcctgcaggggcgatgataccacctccccccagccttccgggtcctcctcgccctggtatgatgccagcaccccatatggggggccctcccatgatgccaatgatgggccctcctcctcctgggatgatgccagtgggacctgctcctggaatgaggccgcccatgggaggccatatgccaatgatgcctgggcccccaatgatgagacctcctgcccgtcccatgatggtgcccactcggcccggaatgactcgaccagacagataaggatagaggggaggccttattgtatcggttttatattacctgttctgcttcaccaggagatcatgctgctgtgatactgagttttctaaacagcataaggaagacttgctcccctgtcctatgaaagagaatagttttggaggggagaagtgggacaaaaaagatgcagttttcctttgtattgggaaatgtgaaaataaaattgtcaactctttcagttaaaaaaaaaaaaaaaaaaaaaaaacacaaacacaaagaaacagcaacacacaggggacctctgggaacaacaaaacaaacaagaacaagaggccgcacacacaannnnngggggggccccctcaaaataacccccccagggggccacaactttacccgtacccccatttttttttgaaaaaggggggcccccataagggagccccttatttaaaaccttgggcacctggcccccccttttttaaaacccccgggacggggaaaaaacgtccaaccctggggaactctttgggaaggaacccttaccttccggggggggggggaaataatttgggacaaaccttccctaacgagaatttttaaaccctccgagggggaaaataaaaaaattttttaaagggttaaaaagggggttaaaaaacaaacgcgcaaaatagcctcggcccggccttaaaaaaatttttcccttctctcggggttatagttttttttggaaaatttttttttccccccggggcccccgggggaccccccaatttgggtgtgggggaattttta

SEQ ID NO: 5618 - DNA, 768 bp, Homo sapiens
  misc_feature (71)..(75): n is a, c, g, or t
ttctaagttactcattgccagttcaagccaaaggtcatgttgttaagggggtgcttctagtagcacttgtnnnnnatctgagttgaatgaagctgtgcaaacccaccctttaaaccattccacccggcagtattcagcttcttaaccagtcgctatttaggagaaaaaacccacctagttaggccatcaacaagcattctttttatatttcttccagtataataaattattgatatcattgctgacttttatattatgggagggagaaaataacattaataaaaaggtgataaaaaagcactgtttcctatttttttctttttttccaaaaaaagaaagtaataaaatatgcacatagagcaatagaacagaatagagaacccagaaataaagccaaatgcttacagacaactaatcttcaacaaagtacacaaaaacattaattggggaaaggatactttattcaataaatggtgcaggaagtataaaaataggcacatagagcaatggaacagaatagagaacccagaaataaagccaaatgcttacagacaactaatcttcaacaaagtatgcaaaaacactaattggggaaaggacactttattcaataaatggtgcagtctacagtcccgaattctatgcaggcacggtcctgttgtgccaggccaaccaggagggatcttccatgtacagtgcccccagttcacttgtatatacttctgcaatgccaggcttcccgtatccagcagccaccgccgcggacgc

SEQ ID NO: 5619 - DNA, 2259 bp, Homo sapiens
  misc_feature (1062)..(1080): n is a, c, g, or t
ggaaggaaagccatcccacacccctacaacatatgttctggcatttataaactgcttgattgtgtgcctcaaggggagaaaaagtcaagcaatgcttcaaaggccaggctttctaagcaaatgagtggttcaaagcagtgtttggctcaagggcagtctggttttatggatagggccgacccaagacatctgctcatgaagaaatgtggcatctgttgccatttcctaaactataaggtttagatagattgtcttgaattttgatagcaaatttttttaaatttatatttctgcctcctcgtacatccttatatatggaaaaaaaagtaagagttcctcagattcagagctcagtagctgtgttcaattttgaagttcaatcagtgtagttgtccctggggtgatcgctgactctgctctgtttcatatttcagttgcttgctcccaaggagagaattttctgagaacaatgggtgttagcaactttaagttactccccaaacgtttgctggccacattctcatttctaaacatctggatctgggtaaaggtttgaatagatgtagggaacaaaattggtttttccatggtgtagtctaattttgccaaatcacccaagaaagaaagtatatgacgtgtggagtttgcatttcttggatgggacctatcgggtcacccagcccagtcttacagtcataaattcctacctcttagttcctgccaaaggccttcagcctctgtgtgcacacttattgaatgaatgctttgcctaaagtttggccttttgaagaaaaacagcatgtgataatataaaaatatgagagtttaaaaaaaaaaaagatctctgcctctcttctctctgcctcgtcccacctgtgctgtctgtctcattgtctttctctcccctcaccatgcgctgaattcagatttctctttcttttattataggcatgttggttttggaatgtggactttggtgggagggagaggattgttctgagaacagaaactggaagatacgtctgagttgatgggaccaacagggctttgctcctctgtgannnnnnnnnnnnnnnnnnnttgtcgggggtgatgagggctttagcatctcaaggcagacatatgaagtatttactgctaaactatattacttactagtacaaatctgttggaattcaggggcagtctaagatttggtgagtgaaatgccatctggcaaaatcgagaagagagtgtggcctgagaggggaatgttcagcctcactgtcacattaagggtacctcaaaatacatggtccttccagtgtgttccttttccttcctccatttcacttgtgtcccctcttcttcctttctctccccattttccctggctttttagcactcagcttttttttataaagtatgtcattttactttttattatatatttggtcctttgggactttgtgatgattaagaatttattccattcaggattttaaaatgatgtgtttaatattttgttctcttaaactcttttgaagctatgctgctaaccaggtataggccagaaaggaggtggcccagtcagtaccttgctcacgtcagctaagggggacagtgatgtcatgtgggtgactcttcttcatttgaccaaggccagcctcctgttcttacctctgcccattcatttctggctatgggaaaactaccacctgttgagtgagccaatgaggccaggaagatcagaggggctgggttccggcccatggcacttatttgaatttctctgtagtaagctctttgtagggctggctccaactgcagtagccaaagaaaacctgtctgactcgacattttaatgcctgagagttggtgaaagttcagctgaagctaatgtctagacatcagcagtaactaggcatccagaaagtagcttcaaccaaagctaatagagcccaagtttccgcagaaggtttggtgctgagctgtccagagcagttgtttatctgagtgttgctagcccttagccatgctttcttagctttattctcgcctgttcctagggcatagcctggaaccagagctatgggctcactggttcgctttatttctacttccctagtcatgcgggaacaacatagtcttaaaaagggaaggtgtgggactgggggagttagggagacctgattttctatttccctatgtttttatagctcgattaacggcgtgcgagattctttgaagggttgttgtggcctcagtgttggggccgcc

SEQ ID NO: 5620 - DNA, 4669 bp, Homo sapiens
  misc_feature (1065)..(1087): n is a, c, g, or t
  misc_feature (1679)..(1721): n is a, c, g, or t
ctctcccaaccgcctcgtcgcactcctcaggctgagagcaccgctgcactcgcggccggcgatgcgggaccccggcgcggccgctccgctttcgtccctgggcctctgtgccctggtgctggcgctgctgggcgcactgtccgcgggcgccggggcgcagccgtaccacggagagaagggcatctccgtgccggaccacggcttctgccagcccatctccatcccgctgtgcacggacatcgcctacaaccagaccatcctgcccaacctgctgggccacacgaaccaagaggacgcgggcctcgaggtgcaccagttctacccgctggtgaaggtgcagtgttctcccgaactccgctttttcttatgctccatgtatgcgcccgtgtgcaccgtgctcgatcaggccatcccgccgtgtcgttctctgtgcgagcgcgcccgccagggctgcgaggcgctcatgaacaagttcggcttccagtggcccgagcggctgcgctgcgagaacttcccggtgcacggtgcgggcgagatctgcgtgggccagaacacgtcggacggctccgggggcccaggcggcggccccactgcctaccctaccgcgccctacctgccggacctgcccttcaccgcgctgcccccgggggcctcagatggcagggggcgtcccgccttccccttctcatgcccccgtcagctcaaggtgcccccgtacctgggctaccgcttcctgggtgagcgcgattgtggcgccccgtgcgaaccgggccgtgccaacggcctgatgtactttaaggaggaggagaggcgcttcgcccgcctctgggtgggcgtgtggtccgtgctgtgctgcgcctcgacgctctttaccgttctcacctacctggtggacatgcggcgcttcagctacccagagcggcccatcatcttcctgtcgggctgctacttcatggtggccgtggcgcacgtggccggcttccttctagaggaccgcgccgtgtgcgtggagcgcttctcggacgatggctaccgcacggtggcgcagggcaccaagaaggaggnnnnnnnnnnnnnnnnnnnnnnngtgctctacttcttcggcatggccagctccatctggtgggtcattctgtctctcacttggttcctggcggccggcatgaagtggggccacgaggccatcgaggccaactcgcagtacttccacctggccgcgtgggccgtgcccgccgtcaagaccatcactatcctggccatgggccaggtagacggggacctgctgagcggggtgtgctacgttggcctctccagtgtggacgcgctgcggggcttcgtgctggcgcctctgttcgtctacctcttcataggcacgtccttcttgctggccggcttcgtgtccctcttccgtatccgcaccatcatgaaacacgacggcaccaagaccgagaagctggagaagctcatggtgcgcatcggcgtcttcagcgtgctctacacagtgcccgccaccatcgtcctggcctgctacttctacgagcaggccttccgcgagcactgggagcgcacctggctcctgcagacgtgcaagagctatgccgtgccctgcccgcccggccacttcccgcccatgagccccgacttcaccgtcttcatgatcaagtacctgatgaccatgnnnnnnnnnnnnnnnnnnnnnnnnnnnnnnnnnnnnnnnnnnnccctgcagtcgtggcgccgcttctaccacagacttagccacagcagcaagggggagactgcggtatgagccccggcccctccccacctttcccaccccagccctcttgcaagaggagaggcacggtagggaaaagaactgctgggtgggggcctgtttctgtaactttctccccctctactgagaagtgacctggaagtgagaagttctttgcagatttggggcgaggggtgatttggaaaagaagacctgggtggaaagcggtttggatgaaaagatttcaggcaaagacttgcaggaagatgatgataacggcgatgtgaatcgtcaaaggtacgggccagcttgtgcctaatagaaggttgagaccagcagagactgctgtgagtttctcccggctccgaggctgaacggggactgtgagcgatccccctgctgcagggcgagtggcctgtccagacccctgtgaggccccgggaaaggtacagccctgtctgcggtggctgctttgttggaaagagggagggcctcctgcggtgtgcttgtcaagcagtggtcaaaccataatctcttttcactggggccaaactggagcccagatgggttaatttccagggtcagacattacggtctctcctcccctgccccctcccgcctgtttttcctcccgtactgctttcaggtcttgtaaaataagcatttggaagtcttgggaggcctgcctgctagaatcctaatgtgaggatgcaaaagaaatgatgataacattttgagataaggccaaggagacgtggagtaggtatttttgctactttttcattttctggggaaggcaggaggcagaaagacgggtgttttatttggtctaataccctgaaaagaagtgatgacttgttgcttttcaaaacaggaatgcatttttccccttgtctttgttgtaagagacaaaagaggaaacaaaagtgtctccctgtggaaaggcataactgtgacgaaagcaacttttataggcaaagcagcgcaaatctgaggtttcccgttggttgttaatttggttgagataaacattcctttttaaggaaaagtgaagagcagtgtgctgtcacacaccgttaagccagaggttctgacttcgctaaaggaaatgtaagaggttttgttgtctgttttaaataaatttaattcggaacacatgatccaacagactatgttaaaatattcagggaaatctctcccttcatttactttttcttgctataagcctatatttaggtttcttttctatttttttctcccatttggatcctttgaggtaaaaaaacataatgtcttcagcctcataataaaggaaagttaattaaaaaaaaaaagcaaagagccattttgtcctgttttcttggttccatcaatctgtttattaaacatcatccatatgctgaccctgtctctgtgtggttgggttgggaggcgatcagcagataccatagtgaacgaagaggaaggtttgaaccatgggccccatctttaaagaaagtcattaaaagaaggtaaacttcaaagtgattctggagttctttgaaatgtgctggaagacttaaatttattaatcttaaatcatgtactttttttctgtaatagaactcggattcttttgcatgatggggtaaagcttagcagagaatcatgggagctaacctttatcccacctttgacactaccctccaatcttgcaacactatcctgtttctcagaacagtttttaaatgccaatcatagagggtactgtaaagtgtacaagttactttatatatgtaatgttcacttgagtggaactgctttttacattaaagttaaaatcgatcttgtgtttcttcaaccttcaaaactatctcatctgtcagatttttaaaactccaacacaggttttggcatcttttgtgctgtatcttttaagtgcatgtgaaatttgtaaaatagagataagtacagtatgtatattttgtaaatctcccatttttgtaagaaaatatatattgtatttatacatttttactttggatttttgttttgttggctttaaaggtctaccccactttatcacatgtacagatcacaaataaatttttttaaatacaaaatgaaaaaaaaaaaaaaaaaaccaacaaaccaaaaacacaaccaaaaaccaacaaaaaacaaaaaaagataataatataaatgctcaatatatatttagttataaaacgagtcatctatagatcataattactagtcggtaggtgagggcgtagcttcgctgtaaagtattagttattattatgcgtatattaggagagagtggtcgataaaatagattgggtatgtagtgtgatgttagattttaattatcggtaggatttatatgtggaacgatatatagtgtgagtaagtgagtaagcagcaagagatgaatagaagtgaggtgctgaatagatacaggaatggatagatatattagaggtagtaagattgtgagcaatgagtgatttatagttgtgtgaatatgagtatatataatatatatacgagtgatggtgaggagataaatagaaatagagagaaggaataaaattgtttgtaagtgtagtactgatataagggagtgtagaggagagtggggtgcgacgagggaggaacgcgggagcggcgagagcggatacgaggagagtgtgagtggggaagaagagacaggaagaggagcggccgagaagaggagagggcggcaggggacacgcttgagtgacggggggacgaagagaagagaataagagagggaagaaggagaaggaggaagcgagaagggaggggtgagagagtgggaacgtgggcgcggtggagtggtcggagcggcgttgctgtgtgagaaggtggtagagagttgaggagagatggatcagagggtggaggagc

SEQ ID NO: 5621 - DNA, 980 bp, Homo sapiens
ccctctcgtatctgtgtgtcctgtggatttctttttttttttttttttttttgtgagaatagcttttaatttaaaacaattgaagcaataaatcatccatctctctttccatctcaggcaaataatctcccaaaacatttgatacagtttaacaacaactgtgactagtgcaaaataaaataaatacaaactctttcaggagccaacatcaaaacctgctggacaggtgggcacaggaacagactcagcctctgccaaggctgagacaagcggcacatcaagagtggcaggatttgtgcagtgtttcaacacacccagctttgaacagactcaacaatacctggggaggggaaaccacaagaggattttgcctacaatgaaacaaatatgcccaacaccctcaagtggctaatatccttggtacctagaagatgctagaagagcaaaggtagcagctcccaggcaaagctgaagacaggcagtttggggctcatttgcttttgtcttttaattgggatcatacatatatatattggtttttcggcagaaaaaaaaaatctgctttctgggagatgttctgtgcctcacagtgctcctgactccagcaaaaatatttgtgttgtttctgtctatttagatactttgcagaattgcgtttcctatttacggatttcactgcctaccccacaccatgtaagtctagagtggggctgtccaatagaagtataacgttatccacatgtctaatttgaagttctttaggggccacatttttaaaaaaataaaaatgggtgaaaagaattttaatttcaattatataaatatattaaattgttaatattttacttagtacatccaaaatagtgtcatttcagcatgttatcaatatgaaatattggtgaaatattttaaattcctttttggtaccaagccttcaaaatctggtgtgtattgtatgtgtacaacacagtctcgatttg

SEQ ID NO: 5622 - DNA, 1661 bp, Homo sapiens
  misc_feature (3)..(31): n is a, c, g, or t
agnnnnnnnnnnnnnnnnnnnnnnnnnnnnnaattcgcggccgcgtcgacacggctgcgattaggctagtaggaggggttctttattccggcacgaggctctcagaggcagcgtgcgggtgtgctctttgtgaaattccaccatggcgtaccgtggccagggtcagaaagtgcagaaggttatggtgcagcccatcaacctcatcttcagatacttacaaaatagatcgcggattcaggtgtggctctatgagcaagtgaatatgcggatagaaggctgtatcattggttttgatgagtatatgaaccttgtattagatgatgcagaagagattcattctaaaacaaagtcaagaaaacaactgggtcggatcatgctaaaaggagataatattactctgctacaaagtgtctccaactagaaatgatcaatgaagtgagaaattgttgagaaggatacagtttgtttttagatgtcctttgtccaatgtgaacatttattcatattgttttgattaccctcgtgttactacaagatggcaataaatactatgggattgtttgtattaaaaaatttacattgcttcttaaaaaaaaacagtagaaactttttacacagtaacaccattcgttgttggtatttagttttctgaagggtcgcagttgccttgagcacttggtattcgcagagcttggacctgtagattttgaggcagattaggaattctgcctgatgggtaagcttccagtattgggaggtggagaaggggagggttcagaaaaataaataagagttattgcactaacaaaagtcttcatcacttgtagttctggatgctggaataccagagtttctaacctaaatacgttgggtacattatttaatggggtcagtattgctcaacactctcattgagtcactgtgaggtctttgtgaattttatcgctaagatcagaatgtgagaagtatttggatataggggaaagaatgaagtgcctttcaagtacattaaaaatcagttaagagttttcagggaaagagaatgagaattggtaatcctgaaaagggaccccaagcatagctggtaggcaaattgttaggcagaataatggtatgttggagaaatacacctgtctcttattcttatctcttaagaattttggttcttcccccagtgattgctggttgaattcttatatggacaggtttcccttcccccagtatcgcacatggttctagttagaatcctgttagatagtgagcatctgctgttagctagacactgttgaatcaatacagtgaaacagacaggtaagcaggtggttttaatgcctcattctaagtgctatttaaattggatcttgaaagatgaataaggcctgccttaagttctgctaaaggcaatgttgttattaaggacgggtgaggaaggaccaagaagtctggctcctgcttttctacatgcctgtgaaggagacttttcatgaaactgaataaaagaaatcctttccgagatagaggagatttgtaggtgaatgcagaagtgtatccagctttgaaccatgcattccatctatattcctcctgtctgaactcatgctcttttgattatgttttgaaataaagggctgcattagttcttttaaaaaaaaaaaaaaaaa

SEQ ID NO: 5623 - DNA, 1111 bp, Homo sapiens
aaaagacttggacttatgtatgtttttattttatggctctcggcctaagcacttctttctaaatgtatcggagaaaaaatcaaatggactacaagcacgtgtttgctgtgcttgcaccccaggtaaacctgcattgtagcaatttgtaaggatattcagatggagcactgtcacttagacattctctgggggattttctgcttgtctttcttgagctttttggaaggataattctgataaggcactcaagaaacgtacaaccacagtgctttcttcaaatcatatgagaaatactatgcatagcaaggagatgcagagccgccaggaaaattctgagttccagcacaattttctttggaatctaacaggaatctagcctgaggaagaagggaggtctccatttctatgtctggtatttgggggttttgtttgtttttgctttagcttggtgaaaaaaagttcactgaacaccaagaccagaatggatttttttaaaaaaatagatgttccttttgtgaagcaccttgattccttgattttgattttttgcaaagttagacaatggcacaaagtcaaaatgaaatcaatgtttagttcacaagtagatgtaatttactaaagaatgatacacccatatgctatatacagcttaactcacagaactgtaaaagaaaattataaaataattcaacatgtccatctttttagtgataataaaagaaagcatggtattaaactatcatagaagtagacagaaaaagaaaaaaggactcatggcattattaatataattagtgctttacatgtgttagttatacatattagaagcatatttgcctagtaaggctagtagaaccacatttcccaaagtgtgctccttaaacactcatgccttatgattttctaccaaaagtaaaaagggttgtattaagtcagaggaagatgcctctccattttccctctctttatcagaggttcacatgcctgtctgcacattaaaagctctgggaagacctgttgtaaagggacaagttgaggttgtaaaatctgcatttaaataaacatctttgatcacaaaaaaaaaaaaaaaaaaaaaaaaaaaagattatac

SEQ ID NO: 5624 - DNA, 451 bp, Homo sapiens
  misc_feature (445)..(445): n is a, c, g, or t
tttttattaataaaattttttaatgcagatgactttttaaattttgaacatgttcatcaaaattattttgaacatctttaagtcacgttttgattgttttatgtaatcagactcttgattagaaagaataacagaaggaaccgtagatgcactcaaactcctaaagtaattatttacaagaaataaactttttgcaagatctaatgacattttatacaatgaaaatgtataatattttcaaagtaacagcaataaaataataagtaatggtcaaaataaatttcaaaatataaagcataaatgtcagaatcaatattggttttgccgcattagcttgaaaatttactggcggaaaaatagtaatggttaaacacacagaaaagataagtcataaatgtcagccagcccttattaactgcctctgaaggtactacaaggacagctntggctg

SEQ ID NO: 5625 - DNA, 5119 bp, Homo sapiens
  misc_feature (2285)..(2300): n is a, c, g, or t
  misc_feature (2404)..(2424): n is a, c, g, or t
  misc_feature (3099)..(3113): n is a, c, g, or t
  misc_feature (3259)..(3275): n is a, c, g, or t
acgcagagcgctgctgggctgccgggtctcccgcttcctcctcctgctccaagggcctcctgcatgagggcgcggtagagacccggacccgcgccgtgctcctgccgtttcgctgcgctccgcccgggcccggctcagccaggccccgcggtgagccatgattcgcctcggggctccccagtcgctggtgctgctgacgctgctcgtcgccgctgtccttcggtgtcagggccaggatgtccaggaggctggcagctgtgtgcaggatgggcagaggtataatgataaggatgtgtggaagccggagccctgccggatctgtgtctgtgacactgggactgtcctctgcgacgacataatctgtgaagacgtgaaagaatgattcagcctctgtgatccccattcgctggtagtgctgacgcttctcgtcgcagctgtccttcggtgtcagtgccaggatgtccggcaaccaggaccaaagggacagaaaggagaacctggagacatcaaggatattgtaggacccaaaggacctcctgggcctcagggacctgcaggggaacaaggacccagaggggatcgtggtgacaaaggtgaaaaaggtgcccctggacctcgtggcagagatggagaacctgggacccttggaaatcctggcccccctggtcctcccggcccccctggtccccctggtcttggtggaaactttgctgcccagatggctggaggatttgatgaaaaggctggtggcgcccagttgggagtaatgcaaggaccaatgggccccatgggacctcgaggacctccaggccctgcaggtgctcctgggcctcaaggatttcaaggcaatcctggtgaacctggtgaacctggtgtctctggtcccatgggtccccgtggtcctcctggtccccctggaaagcctggtgatgatggtgaagctggaaaacctggaaaagctggtgaaaggggtccgcctggtcctcagggtgctcgtggtttcccaggaaccccaggccttcctggtgtcaaaggtcacagaggttatccaggcctggacggtgctaagggagaggcgggtgctcctggtgtgaagggtgagagtggttccccgggtgagaacggatctccgggcccaatgggtcctcgtggcctgcctggtgaaagaggacggactggccctgctggcgctgcgggtgcccgaggcaacgatggtcagccaggccccgcaggtcctccgggtcctgtcggtcctgctggtggtcctggcttccctggtgctcctggagccaagggtgaagccggccccactggtgcccgtggtcctgaaggtgctcaaggtcctcgcggtgaacctggtactcctgggtcccctgggcctgctggtgcctccggtaaccctggaacagatggaattcctggagccaaaggatctgctggtgctcctggcattgctggtgctcctggcttccctgggccacggggtcctcctggccctcaaggtgcaactggtcctctgggcccgaaaggtcagacgggtgaacctggtattgctggcttcaaaggtgaacaaggccccaagggagaacctggccctgctggcccccagggagcccctggacccgctggtgaagaaggcaagagaggtgcccgtggagagcctggtggcgttgggcccatcggtccccctggagaaagaggtgctcccggaaaccgcggtttcccaggtcaagatggtctggcaggtcccaagggagcccctggagagcgagggcccagtggtcttgctggccccaagggagccaacggtgaccctggccgtcctggagaacctggccttcctggagcccggggtctcactggccgccctggtgatgctggtcctcaaggcaaagttggcccttctggagcccctggtgaagatggtcgtcctggacctccaggtcctcagggggctcgtgggcagcctggtgtcatgggtttccctggccccaaaggtgccaacggtgagcctggcaaagctggtgagaagggactgcctggtgctcctggtctgaggggtcttcctggcaaagatggtgagacaggtgctgaaggaccccctggccctgctggacctgctggtgaacgaggcgagcagggtgctcctgggccatctgggttccagggacttcctggccctcctggtcccccaggtgaaggtggaaaaccaggtgaccagggtgttcccggtgaagctggagcccctggactagtgggtcccaggggtgaacgaggtttcccannnnnnnnnnnnnnnncccggtgcccagggcctccagggtccccgtggcctccccggcactcctggcactgatggtcccaaaggtgcatctggcccagcaggcccccctggggctcaggnnnnnnnnnnnnnnnnnnnnntgcctggcgagaggggagcagctggtatcgctgggcccaaaggcgacaggggtgacgttggtgagaaaggccctgagggagcccctggaaaggatggtggacgaggcctgacaggtcccattggcccccctggcccagctggtgctaatggcgagaagggagaagttggacctcctggtcctgcaggaagtgctggtgctcgtggcgctccgggtgaacgtggagagactgggccccccgggaccagcgggatttgctgggcctcctggtgctgatggccagcctggggccaagggtgagcaaggagaggccggccagaaaggcgatgctggtgcccctggtcctcagggcccctctggagcacctgggcctcagggtcctactggagtgactggtcctaaaggagcccgaggtgcccaaggccccccgggagccactggattccctggagctgctggccgcgttggacccccaggctccaatggcaaccctggaccccctggtccccctggtccttctggaaaagatggtcccaaaggtgctcgaggagacagcggcccccctggccgagctggtgaacccggcctccaaggtcctgctggaccccctggcgagaagggagagcctggagatgacggtccctctggtgccgaaggtccaccaggtccccagggnnnnnnnnnnnnnnnaggcatcgtcggtctgcctgggcaacgtggtgagagaggattccctggcttgcctggcccgtcgggtgagcccggcaagcagggtgctcctggagcatctggagacagaggtcctcctggccccgtgggtcctcctggcctgacgnnnnnnnnnnnnnnnnntggacgagagggaagccccggtgctgatggcccccctggcagagatggcgctgctggagtcaagggtgatcgtggtgagactggtgctgtgggagctcctggagcccctgggccccctggctcccctggccccgctggtccaactggcaagcaaggagacagaggagaagctggtgcacaaggccccatgggaccctcaggaccagctggagcccggggaatccagggtcctcaaggccccagaggtgacaaaggagaggctggagagcctggcgagagaggcctgaagggacaccgtggcttcactggtctgcagggtctgcccggccctcctggtccttctggagaccaaggtgcttctggtcctgctggtccttctggccctagaggtcctcctggccccgtcggtccctctggcaaagatggtgctaatggaatccctggccccattgggcctcctggtccccgtggacgatcaggcgaaaccggccctgctggtcctcctggaaatcctggaccccctggtcctccaggtccccctggccctggcatcgacatgtccgcctttgctggcttaggcccgagagagaagggccccgaccccctgcagtacatgcgggccgaccaggcagccggtggcctgagacagcatgacgccgaggtggatgccacactcaagtccctcaacaaccagattgagagcatccgcagccccgagggctcccgcaagaaccctgctcgcacctgcagagacctgaaactctgccaccctgagtggaagagtggagactactggattgaccccaaccaaggctgcaccttggacgccatgaaggttttctgcaacatggagactggcgagacttgcgtctaccccaatccagcaaacgttcccaagaagaactggtggagcagcaagagcaaggagaagaaacacatctggtttggagaaaccatcaatggtggcttccatttcagctatggagatgacaatctggctcccaacactgccaacgtccagatgaccttcctacgcctgctgtccacggaaggctcccagaacatcacctaccactgcaagaacagcattgcctatctggacgaagcagctggcaacctcaagaaggccctgctcatccagggctccaatgacgtggagatccgggcagagggcaatagcaggttcacgtacactgccctgaaggatggctgcacgaaacataccggtaagtggggcaagactgttatcgagtaccggtcacagaagacctcacgcctccccatcattgacattgcacccatggacataggagggcccgagcaggaattcggtgtggacatagggccggtctgcttcttgtaaaaacctgaacccagaaacaacacaatccgttgcaaacccaaaggacccaagtactttccaatctcagtcactctaggactctgcactgaatggctgacctgacctgatgtccattcatcccaccctctcacagttcggacttttctcccctctctttctaagagacctgaactgggcagactgcaaaataaaatctcggtgttctatttatttattgtcttcctgtaagaccttcgggtcaaggcagaggcaggaaactaactggtgtgagtcaaatgccccctgagtgactgcccccagcccaggccagaagacctcccttcaggtgccgggcgcaggaactgtgtgtgtcctacacaatggtgctattctgtgtcaaacacctctgtattttttaaaacatcaattgatattaaaaatgaaaagattattggaaagtaaaaaaaaaaaaaaaaaaaaaaaaaaaaaaaaaaaaaaaaaa

SEQ ID NO: 5626 - DNA, 2206 bp, Homo sapiens; identical to SEQ ID NO: 5386
  misc_feature (1914)..(1915): n is a, c, g, or t
  misc_feature (1935)..(1936): n is a, c, g, or t
  misc_feature (2030)..(2030): n is a, c, g, or t
  misc_feature (2079)..(2079): n is a, c, g, or t

SEQ ID NO: 5627 - DNA, 4655 bp, Homo sapiens
  misc_feature (805)..(810): n is a, c, g, or t
  misc_feature (1990)..(1991): n is a, c, g, or t
atccttaattaaattaaattacgggctaggtcgaggcggcggcaccgcgcgggacggagcttggctgttggtcggtgggttcccgtgcggcggcggccaaggaggaggagacacagttggagcagctccgtgggctgactggggcgaggcctcagcagcgcgagcttgagtgcggccgagcctgcggcgccttcccctgcgggtggggacgagcgggccccgcggcgtcatcggcggcgaggtgagcggcggccggcgggcgggagctctggcgggagccgcgccggcctgacgcgctgtcgccgctggttgcaggagccgccgcgcctcggcctagcatgtcggaagcgggcgaggagcagcccatggagacgacgggcgccaccgagaacggacatgaggccgtccccgaaggcgagtcgccggccggggctggcacgggcgccgcggcgggggctggaggcgcgaccgcggcgcccccgagcgggaatcagaacggcgccgagggcgaccagatcaacgccagcaagaacgaggaggacgcgggaaaaatgttcgttggtggcctgagctgggatactagcaaaaaagatttaaaagactattttactaaatttggagaggtcgttgactgtacaataaaaatggatcccaacactggacggtcaagagggtttgggtttatcctgttcaaagatgcagccagtgtggagaaggtcctagaccagaaggagcacaggctggatggccgtgtcattgaccctaaaaaggccatggctatgaagaaggacccggtgaagaacannnnnntcgtgggggtctgaatcctgaagccactgaggaaaagatcagggagtactttggcgagtttggggagattgaggccattgaattgccaatggatccaaagttgaacaaaagacgaggttttgtgtttatcacctttaaagaagaagaacccgtgaagaaggttctggagaaaaagttccatactgtcagtggaagcaagtgtgagatcaaggtggcccagcccaaagaagtctatcagcagcagcagtatggctctgggggccgtggaaaccgcaaccgagggaaccgaggcagcggaggtggtggtggaggtggaggtcagggtagtacaaactacggcaagagccagcgacgtggtggccatcagaataactacaagccatactgaggcggcagcaggagcgaccaactgatcgcacacatgctttgtttggatatggagtgaacacaattatgtaccaaatttaacttggcaaactttctattgcctgtcccatgtgcatcttatttaaaatttcccccatggaaatcactctcctgttgactatttccagagctctaggtgtttaggcagcgtgtggtgtctgagaggccatagcgccatcatgggctgatttttattaccaggtcccccagaagcaggtgggaggctctgcttcctgctgccgctctgcagcctggacctgtggaccctggttgtaaagagtaaattgtatcttaggaaaccagtgtcacctttttttcaccttttaattttatattatttgcgtcatacatttcctgtaacggaagtgttaattttactgtactttttggtaccttttgggaatctaatgtattgtaaggtattttacacgtgtcctgattttgccacaacctggatattgaagctatccaagcttttgaaataaaatttaaaaacccccaagcctgggtgagtgtgggatatgctgtgtgagacctcttgctcagggtcgagggaggcgggggggggtgccaggtgccctggacttggggctttctcctgcagcaggctcttccagctgcaggcccagttgtgggggtatcctttaaggactgccctgcctagggctgagccccccttcaaagaaaggaatgagaggcctatggggagtgaggatggggcagtgatgagggcttacatccccggcaagcgtgnnccctcctgggacaccttggaacaccaaccttcttggctgatgaatgaaaaaatgggattctttacacactagggcagtgccagggccgtctgaattggggcacaatagtgctcctcctggctggtgaagaaaagcctgctctggcaggggatgtttattggctggattggagcccaactccaggtctggtatttagggcataagactaggtggttacaagaggcaagggtgggttggggttccacgtggatacagccccataggtttcaagggaggatatagctgttcctgccatcaagtgcaagctaagcattggagaatttccagtgttgaagaaactaacctttgggaaggagcatcagtcagaacaaaaaaaagtcttaaaaaaaggctcagcttgccgaggctgcttgctgctgatggtaaggaacccgctgtgcatcttcaagagtaagaagcaaggcccactcacctggagtacacttaggcagagcagggctggcttagggctggagcctcagcgtttcacaacttctcaccttctcttccatgtcagtcagaatggcatccagctttgccaccacctgccgtgcattgtccaggctgaagcacattgggggcttaaacttcaggatgttcctcccagggccatcagtgctcagcaaaacgtagttctccttcagccttgataccaagtaggcagcctcttcagttgctggtgtccttgtggcctcatctttgatcagatccacaccaatgaagagcccaacacccctgacatccccgacgatgggatgtttgatttttttgctgcccgaggagctgcatcaggaagctgcctacactggtggcatgatcctggagctgctccttctccaagacattcaggacggccagccccacagcgcaggacactgggctgcccccaaacgtgttgaagtactcaacgccggtggcttcaaatgccctcgccacaggctgggttgcggccacgcaggcaacagggtggccgttgccaatggacttgcccatggtgacgatgtcagggacgaagtcttttccctggagctggaaggcccagaagtgcttgcctacccggccaaagccaacctggatctcatctgcaacaaagacccctccggccttgcggatgtgctctgccacttgggagaagtagccagcagggggaatgatctgccctcccacactgggcagagactcagcgaagaaggctgcaatcttcctgcccttctcctgtgcactgctgaccacacgtttcacctcgttggcataggccatagctgggttggggtggtcctcccggtaggggccccggtaggtgtctgggagaggtgcctgtggggagtgacagcgccatgttatccgggcttggggacaggcaccgacctgttgttgagttgggcagtgcataccacgtggacccactccttctggccatccaggttgcggaacttgtagggactgatgtcaatcagggagctcaggtggccgtgatacgcactggggaggagaagggagggtaggctcgggtccgggcagcacctactccctggcccagtctgaccatcgtctccccacccctgaagacacacaagggaggccaactttcctgacagagcccccaagttcttgggctgggaaagagcacaagctttggagtcagcaacaattcttgcaagactgctgactggctatgtgacagcagctcatcatttaatctctctcggttgttttctctgctgtgaaatggggtgggatttcctccttctggtttataatgaatcttaaatgtgttgatattgtcagccccggctttgtgcacatcacatactcaattcatgggagcttttgatggagtagtttgaacatgtacaatgttgtgggaccacctttgagtttcttacaaagcgcactctgctccccagagctgccttcccagaatggtggcccagggtgacagagcctctgggaggtctcaggcctggtcctctgcctgccacacttgtcttcagtagcccaggccccttatcctccctgcctaaggcacccagagtcagtctcacggatcaccaagaagcctgtgggccaggcttctgggaacggtagggctgtgagttgcacttactgatctaataccaccacgtcctggtgtcccgtgtagtggcgagcaagactcagggccaggtcattggcttctgacctatgaccgaaaaggtgggcatgactgagagagtagtctaagagcttcccagagagaaatgctgagggcaggaggacccttccagcagcaagaagattctcaggacatcaactagtcagtcacttgcttgtttgtttggtatatatcaaatgcctcctatgtactagaagctgggggaaaaagagtaggtaaaacagacatgggcttggcccttctggaatttacattctcgtatgtgtcatgaaagttgttttgaaaaaacccaaaccattgtttttcctctgctttcacactacaacaaatcaacacagaagacttctgtgactccaaaaaatatgtaaggatttctccccaccaacaggcaagcaatcagttctgcagcggacaccagttgggtgtcctccaattcaattccaacactaatctacctagcacacagcatc

SEQ ID NO: 5628 - DNA, 2425 bp, Homo sapiens
  misc_feature (868)..(882): n is a, c, g, or t
gttgagggtagggaggggagttcctgttgttcctactcctagctcagtgattcctgcccatggtcctcataaggttcatgggggctgttgttgcaagatcatggtgggtccctgaagcccctctactgacctttgacactaaactcttcttttactcctgacaattcgcccaaacaacacagaaggcagagaactcttgcatctatttgcgatttcaggtctggtttagcaaccgccgtgcaagatggaggaagcaagctggggccaatcaactgatggctttcaaccatctcattcccggggggttccctcccactgccatgccgaccttgccaacgtaccagctgtcggagacttcttaccagcccacatctattccacaagcttgtgtcagatcccagcagcaccgttcacagacctcaaccgcttcctccaagcactgtacaccaaagcacgattccttccaacccagacagcagctctgcctactgcctccccagcaccaggcatggatttttccagctatacagacagctttgtgcctccgtcggggccctccaaccccatgaaccccaccattggcaatggcctctcacctcaggtaatgggactcctgaccaaccacggtggggtacctcatcagccccagactgattacgcgctctcccctctcaccgggggtctggaacctaccaccacggtgtcggccagctgcagtcagagactagaccatatgaagagcttggacagtctgccaacatctcagtcctactgtccacccacctatagcaccacaggctacagtatggaccctgtcacaggctaccaatatgggcagtatggacaaagtgcctttcattatctcaannnnnnnnnnnnnnnagtgaactgtccacttggagctaaaactggccctgtttctggtcttcgcagcctagatatgaagaatctgctctgaaaacaaaaaaaaattacccttttgttggggggggtggggcagtggtcccaataggagacaaaggagagtgattgattttcttcctccaatagttggtttcaaatccttttgaacacgttcgacaaaagcagtggagaagaggaagacctggagcaataaaagacaaatgcaacattttaaggcaatggtttcacatggttacatatcaaaacatcccaattctttagtgctgatcatcgaggagctagaacattccatttgcttgtgtgcgtgcgtgcgtgtgtgtgtgtgtgtgtgtattgagatttacccagactggtttgggcaagcagactgttctaaaatataatagaataccctaaagtataacatgtcgatgttcgatgctgatacttctacaactttaaaactgctcatttcatgaagcaagaatggaggaatccttgactcttacacactggaaattgaaataaagataaatgcaaccatttttaggaagctagactagctgtaaaggacctcctaaataaattatttgttactgtatcctcatttgtaatctagttgtcaataaatggcccggacatgtcttgctaacaggatatgggctaccaggaagaaggacttgtttccctttcctgtgtggggagaggtgtgtgacgtttttccagttcacatttatttggtagcccacctgggttggagtaagggcacggtggagagaaagtgacatgcattcacatatctgcttatcagtgtgcaatactgtgtacctcatggatgctttggcaatgcccaaggcgatataagcaaaatcagaagtatatttttgcaggtgcttttattttcacagcccataattcatagtgatagagtgcagtgatgtttgccatttgctggacaaccaacacccgggttgctcctttgattagagaccagatcagataattatgcttttaaactgattacgtttacattcttctcttttctatgaaaggcagggcaagaacagaagtgttcacatggctctcatgtacttttaaattatacaatgatatccaatattaaaagattataggaactgaggtttacatacgtttgtgtggtgacattttagaatgtcaataaatttgctttttgagatgttgagaggaacaagaaggtggaaggcagtgttatttatttctttctattcttggaaccacgaatgaggtaggcacaaatacattccttttagagttaagaactatgacgtagcgagttagtgagactagacatagtaccgaatttagttcatgcattggtcttagagggtgatggaacaagagaagtactatctttgtgttgcagcctcaaccaacaacaatgtgttgtaaaaatgtctttcatgtaaaaagtgcagtaaatatttactatttataatgaataaacagttatgaaaacttaaaaaaaaaaaaaagaaacagg

SEQ ID NO: 5629 - DNA, 1778 bp, Homo sapiens
  misc_feature (5)..(5): n is a, c, g, or t
  misc_feature (7)..(7): n is a, c, g, or t
  misc_feature (12)..(13): n is a, c, g, or t
  misc_feature (18)..(20): n is a, c, g, or t
  misc_feature (26)..(27): n is a, c, g, or t
  misc_feature (33)..(33): n is a, c, g, or t
  misc_feature (37)..(38): n is a, c, g, or t
  misc_feature (45)..(45): n is a, c, g, or t
  misc_feature (49)..(49): n is a, c, g, or t
  misc_feature (63)..(64): n is a, c, g, or t
  misc_feature (67)..(67): n is a, c, g, or t
  misc_feature (74)..(75): n is a, c, g, or t
  misc_feature (80)..(81): n is a, c, g, or t
  misc_feature (83)..(83): n is a, c, g, or t
  misc_feature (85)..(85): n is a, c, g, or t
  misc_feature (89)..(91): n is a, c, g, or t
  misc_feature (93)..(93): n is a, c, g, or t
  misc_feature (95)..(96): n is a, c, g, or t
  misc_feature (100)..(100): n is a, c, g, or t
  misc_feature (104)..(104): n is a, c, g, or t
  misc_feature (106)..(108): n is a, c, g, or t
  misc_feature (118)..(121): n is a, c, g, or t
  misc_feature (126)..(126): n is a, c, g, or t
  misc_feature (128)..(128): n is a, c, g, or t
  misc_feature (130)..(131): n is a, c, g, or t
  misc_feature (135)..(136): n is a, c, g, or t
  misc_feature (139)..(139): n is a, c, g, or t
  misc_feature (142)..(142): n is a, c, g, or t
  misc_feature (144)..(144): n is a, c, g, or t
  misc_feature (150)..(150): n is a, c, g, or t
  misc_feature (156)..(157): n is a, c, g, or t
  misc_feature (159)..(159): n is a, c, g, or t
  misc_feature (162)..(163): n is a, c, g, or t
  misc_feature (171)..(172): n is a, c, g, or t
  misc_feature (176)..(176): n is a, c, g, or t
  misc_feature (182)..(182): n is a, c, g, or t
  misc_feature (187)..(187): n is a, c, g, or t
  misc_feature (197)..(198): n is a, c, g, or t
  misc_feature (201)..(201): n is a, c, g, or t
  misc_feature (214)..(214): n is a, c, g, or t
  misc_feature (216)..(216): n is a, c, g, or t
  misc_feature (220)..(220): n is a, c, g, or t
  misc_feature (223)..(223): n is a, c, g, or t
  misc_feature (227)..(227): n is a, c, g, or t
  misc_feature (232)..(232): n is a, c, g, or t
  misc_feature (238)..(238): n is a, c, g, or t
  misc_feature (241)..(242): n is a, c, g, or t
  misc_feature (244)..(244): n is a, c, g, or t
  misc_feature (247)..(247): n is a, c, g, or t
  misc_feature (257)..(257): n is a, c, g, or t
  misc_feature (259)..(259): n is a, c, g, or t
  misc_feature (261)..(261): n is a, c, g, or t
  misc_feature (264)..(264): n is a, c, g, or t
  misc_feature (275)..(275): n is a, c, g, or t
  misc_feature (281)..(281): n is a, c, g, or t
  misc_feature (286)..(286): n is a, c, g, or t
  misc_feature (289)..(289): n is a, c, g, or t
  misc_feature (294)..(294): n is a, c, g, or t
  misc_feature (296)..(297): n is a, c, g, or t
  misc_feature (301)..(301): n is a, c, g, or t
  misc_feature (304)..(305): n is a, c, g, or t
  misc_feature (310)..(310): n is a, c, g, or t
aaaantnacccnntaaannntatatnnaaagancaannggactanggcnataatatcaaaaannccnacaaatnntaaannangnggannntncnncganaacnannnaaaattttgnnnnaaaancnanntggnnctncancnaagatngccccnnanttnnaaaaccannggcnaagttngaaanttataatgcnnccnccacaaaaaaggncnaaanttnggtnatttngggganccnnanccnaaaagaaaantntnaanatgatggcaanaataanctaantanaatgncnnaaanctnntttcntttttttttttttttttttttttttttttttttttatgaaagaggcttttaatgaaaatactgtacagtttatgtgaggcaaaggcagggggccttgtccaggaagggaagaggcccaagaggcttcctgtccccttgggggcagcagagccaaatgcttgggctcgggcccaagctgcctgccctgcaggggtccagggaggtcctgatgagtcctgccccttcccttccagagggcctgcctggcagccagcagcagggtgtttggggagcacctgttcccacacaagggtccttttagtccattccaacaggtgactccgagcagccctgaaggcttggggagggctcctgcctggcaagtgggcctggcacgagtagagggcagaggcccgccctgggtgaggaacatcatagccaggcgccgccgccgtgcgagtagctgtgctcctggccggcgacgaagccccgcagcagctcggcctcacccccaaacaccaggctctccacatccacctccagctcctcttggtctgagtctgagcgctcagaggagaggcctgaggagtccagactgtccgcccgcagccgctcccgctcggccgcccctgccagcccccggagctgctccagctgccgctgcaggctctgctgcttgctgcgcagcctctccttgagctgtcgggcccgctgctcctgatcctccagcttctggatgtgcatcctggcacggcgcagcaggctcagcgtggtgtaccgggcacagtcggcccccaggggcatctgctgcttcagccgctccaggcaccgcttcaactgggccctcctgcgcttctccagttcattgtgcactgaccgcccgctgtcctgcgcgccaggagcctgggggggtcgcttcttcctcctgtggatggggcctggactgcgatgcgggcacagggacgcataaccatgctcggcctctctctcacggcgctccaggaactcggccgcctgcagcaggacctggatgttgctggccaagggttccatgtcggcgacagctggcggcgggccggcctagggtgccggccggagcaagccctcgtgccttttgttacaaagtaactgacacggtgcaacaaacacaggggcccgccccgcccccgggacgccccgcccgcgggaacgcccagcccttggctccgcccctctggaacccgccacggagccgcagcccaccctccggcagccgccccgccccgagtggtctcagactttccaggggcaggtaagggcgctggctccaggcctggccctggagcgaaccctcaggctaaccggtgctgcttcttgcccgcctcactcatccacccacgccggctcattggcgtctttgatctcagcttccagccccgtgctagtgactagcccccaacatagcacggcgctctgggggcctggtggtcccctgaaagcgccgggccca

SEQ ID NO: 5630 - DNA, 6598 bp, Homo sapiens
tgctgatcgctcgtgccggtgcggccgttaaccgcccttgccggagccctaggctcaaaagcagccccttacccttcctgggcttcccccaacccctttcccggtctgccctggggcatgagcagcgatggccggctgcatccctgaggagaaaacttaccggcgcttcctggagctattcctgggcgagtttcgcggaccgtgcggcggcggcgagccggagccggaacccgaacccgaacccgaacccgaacccgaacccgagtccgagcccgagcccgaacctgaactggtagaagctgaggcggccgaggcttcggtagaggaacccggggaggaggcggccacggtagccgcgacggaggagggggaccaggagcaagacccggagcccgaggaggaggcggcggttgagggtgaggaggaggaggagggcgcggcgacggcggcggcagccccggggcactcggccgtgccgccgccgccgccccagctgccgcctttgcccccgctcccgcgaccgctgtcagagcgcatcaccccgcgaccgctgtcagagcgcatcacccgcgaggaggtggagggcgaaagcctggacctgtgcctgcagcagctctacaaatataattgcccttcctttttggctgctgctttagccagagccacatcagatgaagtccttcagagtgatctttctgcacattatatcccaaaggaaacggatggcacagaagggactgtggagattgagacagtgaaattggcccgttctgtcttcagcaaactacacgagatttgctgcagctgggtgaaagacttccccctccgcaggagaccccagctttattatgagacatcaatccatgccatcaaaaacatgcgcaggaaaatggaggacaaacatgtctgcattcctgactttaatatgctcttcaacctagaggaccaggaagaacaagcttactttgcagtgtttgatggccatgggggagtagatgctgctatttatgcctccattcacctccacgttaacttagtccgccaggagatgttcccccatgatcctgctgaggccctgtgcagggccttccgggtcactgatgagcggtttgtgcagaaagcagccagggagagcttaagatgtgggaccacaggagtggtgactttcatcagaggcaacatgctacatgtggcctgggtgggtgattcccaggttatgcttgtgagaaagggccaagctgttgaactaatgaagccacacaaaccagacagagaggatgaaaagcagagaattgaggcccttggaggttgcatagtctggtttggtgcctggagggtgaatggaagtctgtcggtttccagagctattggagatgctgaacataagccatatatctgtggggatgcagattctgcctccactgttctggatgggaccgaagactacctcattctggcctgtgatggcttctatgacaccgtgaaccctgatgaggcagtgaaagttgtgtccgaccacctgaaagagaataatggagacagcagcatggttgcccacaaattagtggcatcagctcgtgatgctgggtcaagtgataacatcacggttattgtggtattcctgagggacatgaacaaagctgtaaatgttagtgaggaatcagattggacagagaactcttttcaaggagggcaagaagatggtggggatgataaggagaatcatggagagtgcaaacgcccttggcctcagcaccagtgctcagcaccagccgacctaggctatgatgggcgtgtggattcattcactgatagaactagcctgagcccagggtcccaaatcaacgtgctggaagacccaggctacctagatctcacacaaatagaagcaagcaaacctcacagtgcccagtttttgctaccagttgagatgtttggtcctggtgcaccaaagaaagcaaatcttattaatgagttaatgatggagaaaaaatcagttcagtcatcattgcctgaatggagtggtgctggagagtttcccactgctttcaatttgggttcaacaggggagcagatatacagaatgcagagcttgtctcctgtctgttcagggttggaaaatgaacagttcaaatccccgggaaacagagtttctagattgtctcatttacgccaccactactcaaagaagtggcacagattcaggtttaatccaaagttttattcatttctctctgctcaagagccttcccacaaaataggcactagcctgtcctcacttactggaagtgggaagagaaataggataagaagttctctgccatggaggcaaaatagttggaaagggtacagtgaaaacatgaggaagctcagaaagactcatgatattccatgcccagatcttccttggagctataaaatagaataatttttctttcaagtaggttagctagctctcccccaataaaaataccactatcagagtagaaacaaggtagacatttctaaaacatatgtgcttcattatgaatccatggatggctcaattcttaaatgtaaatagatctctaggaaactcaaagtacagtgttttcaatctaaaaagaagtattggcagtttcacttgcaaaattacacagctggtccctgtgatgtgtctcgacaccaatacacaacccccttcccaccatccttcatgtcactagatacacaacccccttcccaccatcccttcagtcactagtggaagctttcaagttagttatttcagtcaggatatacagtgttgaaatctcaatgcagttgaaatctggtctgatgtgcctaatttatctgtggaaaatttaatgctgaattacatttggttgggaaatgtccctcaaaatcctgggcactatgaaggaaccccctgccccctcacctttttgggtaggtaaaagactaaaagccatatggattttaactgataacaatgaaagtggtaaatcagtgtaaaagtgtcatattctcagacttgtgaggcggtttatagtcagaaagatttacggatttttttcctgtaacataaaagattgtgaactttttttaattaaaaaatatttcctagggctgtagttatttgggagtttcataacctgttatggtgcttttggtggaatttttattatttagcattttaggagaccgctgtcaactggttttaatctatgatgctaatgtgttttccactgtaccctcatctcaggaataaaactgctttaacggagatgatgtcaggtacaaatacactatagagtcaaaataccatttacaaagaaaatcaaaagcatttctatattttgtctttttttagttcagacagcaaaggcatgtactactataaaatacaaagtgattttagagaatgaaaaatgctacttttatcttctctaaaattatttcccccaaggtagtgaagtaattggaatgaaggaggctgaaagtattgtctaaagtgagcccagaggccactgagaatgcagattactgacagccaggtctgtttagttgtaattggaagacacatgagtgtcctgcttacatgtagcttcagactgcagagacaggacgtgtgcttttcatttcaatatttagttatatttgatattttgaaactgtctgctttttgctatttctgcagtttcaagttagttagaagcatgttgtcaactaaagacaacaaactatcagattcattcattcagtgaagcagcctctgattctctaagagtcacgaatgtcttagtgttaccctcccctagtcaacagcagaccagcctggccaatgcctatgggtggcccctctggagtgctcactaacaagggtgagtgctctcgctaagaagtgtcccccgcctaatcatgtgtttataggatagtacacgttccccaggcccataacagaggactaaaatctctgaattttaaagacacagatgactggcatattttggataccagtatagctatatcaaatagacaaaaacagcttcactttagcaatgatcagattgttaatctacagattttattttttaaaatttggatgtaagtagagactttcagtatttgttttctcttgattttgaagtcatttcttcttctcacgtctgtgacaaatggttgaaaaggagtcaacatggccccaactatagtgccggaaccttttcatcattctgaggctttgccccacacatggtcctcactcatatctgtcaccttctgaagcctagatcttgttaacccatcaggtgcagtgtcagtttcaaatcaaattatctaagaaaacaagaaaacaaaggcagcagactattggtacacattatagtccaaagtgcttagcgaagtaaaaaaaaaagctttttaaaatttctattgttgtctattggtaatgtttttgatcagaataaagagggtaaagggaaaaagttactacacatgctaggctttctcagtggggaaaaaaatggctggatagaactgggacaaacacagacccatctttaggggtctggattttgtaggtccgactacacagcagtgttaactcatttctcatgccattagctctctacaaaataaagcaaagtagttctagtgtggtcgttataaaccaatattgtgaaaaatagcaactattcatttgttcacaacatgcgtatttatagagtagttaggtaccatttgtaaggtaaatcctttaaaattctataatacatactaaaatagtggttattggtctgatatatgctgctcttggttctataaactagataaaagcagtgctttgtgaaatgcagtgttctctcttaacgccactggtgataggaagtagttcccttcagttcaaatcctgtgcccttatttgctgcttgctgacgtaagcaataagtaaccctctaactaatggtatctacatatttctgtaacttgtatttaatgatggtgtacctggtgattgtaaaaatattagacagatataaaagtatctatataatatctataactgttaatgctgaggtatagtctgtgaattatgtgttttgtatttttattcattgtgtaatttagtggtggtgaaagttctacactcaatccttaaagagtggcagtatccctttttcaatttaacatggtctgcatcaatctgtttgcctgctaaacaagttagaataggaaatagtaaaataaatccaaacaagagtgtaatattggttagggaaacaaacttcaggtcaccaactgaagtcattacaaactccttgtacattcactgtgagtttcaaagggagtcagtccctaatttacaggtttcctttgttcactttctagatgtgtacttttgagggacatgaggttaggcaacattacagcaacacacactggggctattaatcccatttaggtctgtactaaagaggatgggtagaaacacatatgtatataccttttctttacctagaagtgccatccattgtccttgaattattatgattaaagttactgttgcatttaggaggctccttgaaagtaacaccttttccaaggacaatggcaacaatgtcaatgtcaacactgagtctaattttgaccacatttatagtggtatagtgtcaatactgcattttcatgacaaccacactccactgttgaaacactgtgccagtgagaagtgcaacatccagtgggcagatgaaaatgatgcatggccaagttcagtgtttacagataaaactgctgtggttcaagtgcttccttccccatcaaatccttgataaggctttgtgggaaaatgatctaaattattgttttaatttttaaacctaatttattcactcagtgaacattcttacctaagcaaggctataaaagggaatactacagttttgtccacactttaatttgagaccatttttctttgaatcgtaagttagcaaaagaaatttttttcacctttgaaaatcacgtgatgtgaaaggacaaatgcccactcttctattctgatctgcaaatagcttaaatgtctcttgcaaaacaaagtaagataccaccagtattacaacacaatgattttccagacaaatggtatggtgttgaaaaataactgttacttcttaaagcagcattttatcttctattttgaagactatttattgtaataattagaaaacatgaaatagggactgacacagcagttgtttttgaaaaggaaataaactttgatgaaattaggataatcccccagataccatcattgtaaactctctactactaggtgctctttggtgagagacaggctttgttctcttgttcataacatttctctgcaaagaattctctatggagtgaagcgaatgaagtgaataatttcttaccaaataaatttatcaatttacaaatctgctctacatctcacttttgagttcagttgtagtcatgagtgatccttcatattttattaaaagtgttcattcaggtaaggtgtatgttgaaattttgccaattatcttaataaaacctggcaatttaaaaaaaaaaaaaaaaaaaaaaaaaaaaaaaa

SEQ ID NO: 5631 - DNA, 1193 bp, Homo sapiens
ctagttcttgagccatcgcgagcggcctatcgtatgaacttttgagggaacacaaacatgcagtctgtagcagatggtaataggctgaaatattacacttgttgatgtaaatctgataggtttctttctctccaaggacagctttttaaatatttaacagtatcaataatttttcaggttctgtgagaattttataatttataatttgcagacttaatgtataatctattttgtcctaacaattacaaatatattttttatttcagattgtatatattcctaccagatggagataattacagctttaaaaatttttattttttcattttatttcacacattgacattaaatttttatggacacataataactgtacatatatatggggtagaatgtgatgttttaatacatgtactcaatgtgtaatgatcaaatcagggtaatttgcataatgatttttctgtagggagaaaattcaaaatctactcttctggctattttcaaatatataatatgttattgttaactatactcatcctactatgcaataggacaccagaacttattcctgggttctacatccgttaaggcaaccaaggattggaaatattggaaaaaaaaattgcgtctgtactgaacatgtacagacttttttcttgtccttattccttacacaatatagtacaataactatttgcatgacatttacatcggatattatgagtgatctagagttgatatgaagtatatgggaggatgtgcaaaggtgatgtgcaaatactatgtcatttatatcagggacttgagtatcctttgttaccctcaggagatcctgaaacagtcccccatggatactgagggctgactgttagtctatcctcacggaactttcattctactgggggaagactgactataaacaaaatatatgtaataggtggtggtaagtaccgggagaagtgacaaaggggcaaagtgactatacagtccctcttagaaaccctggagtacttcctagctaactcctggggttcctttgtctcttattcatgggatctgacatttgccctgtaggggtcagatggtctaccgaatacggcggcgagatatacacaaaggtcgcttacggccaacgcttgctaagctataaaaagggtatcaaggaccaacagtggaaggtcacaaatatagaa

SEQ ID NO: 5632 - DNA, 862 bp, Homo sapiens
aggtggaaaagtatatagcttttagcaaaaggtgtttgcccattctaagaaatgagcgaatatatagaaatagtgtgggcatttcttcctgttaggtggagtgtatgtgttgacatttctccccatctcttcccactctgttttctccccattatttgaataaagtgactgctgaagatgactttgaatccttatccacttaatttaatgtttaaagaaaaacctgtaatggaaagtaagactccttccctaatttcagtttagagcaacttgaagaagagtagacaaaaaataaaatgcacatagaaaaagagaaaaagggcacaaagggattggcccaatattgattcttttttataaaacctcctttggcttagaaggaatgactctagctacaataatacacagtatgtttaagcaggttcccttggttgttgcattaaatgtaatccacctttaggtattttagagcacagaacaacactgtgttgatctagtaggtttctatttttcctttctctttacaatgcacataatactttcctgtatttatatcataacgtgtatagtgtaaaatgtgaatgactttttttgtgaatgaaaatctaaaatctttgtaactttttatatctgcttttgtttcaccaaagaaacctaaaatccttcttttactacaaaaaaaaaaaaaaacaaacaaaaacaacaacatatgcgaccgaccggaaccacaagaaaaacgacgcaacaaaaacaacaacatcgagcgccgcgaggccccaaaacgacaagaaacacaagggcaacaacacgcgccacaagagaaaaacagggaacacacaagaacacgaagagccaccaaaaa

SEQ ID NO: 5633 - DNA, 3480 bp, Homo sapiens
  misc_feature (1020)..(1041): n is a, c, g, or t
  misc_feature (1696)..(1759): n is a, c, g, or t
ctgcgtctttggtcaggttgttccttggctaagagggcagtcgtcgcggacccacgcggttagcaaggcttagtgctcgggccggccgccttcacttccctcccggcttttcctcccgacttatccactttaggggcgtctcggagtgccggaggcccccggggaagagcggggtgccggtgtccgctccgggctcggatgggaagtggtgggaggagcgacccgggatgttcagtctgatggccagttgctgcggctggttcaagcggtggcgggagcctgtcagaataccctgaagatgtagctcctactgttggattttcaaaaattaaccttagacaaggaaagtttgaagtcaccatctttgacttgggaggtggaataagaattcggggaatctggaagaattactatgctgaatcctatggggtaatatttgttgtggattccagtgatgaagagagaatggaagagacaaaagaggctatgtcagaaatgctaagacatcctaggatatcgggaaagcctatattggtgttggcaaataaacaagataaagaaggagctttaggagaagctgatgtcattgaatgtctatctctggaaaaattggtcaatgagcacaagtgcctgtgtcagatagaaccatgttcagcaatctcggggtatggaaagaaaattgacaagtccattaaaaaaggcctttattggctgctacatgttattgcaagagactttgatgccttaaatgaacgcatccaaaaagagacaacagagcagcgtgctcttgaggaacaagagaaacaagaaagagctgaacgagtgcgaaaattacgagaagaaagaaaacaaaatgaacaggagcaggctgaactcgatggaaccagtggtctggctgagttggacccagaaccaacgaatcctttccagccaatagcatctgtaatcattgagaatgaaggaaaacttgaaagagagaaaaaaaaaccaaaaaatggagaaagacagtgatggctgccnnnnnnnnnnnnnnnnnnnnnntgagcaaatagagacacaaggccaggttaatcacaatggccaaaaaaataatgaatttggactagtagaaaattataaggaggcattaacacagcagttaaagaatgaagatgagacagaccggccatcattggaatcagctaatggtaaaaagaaaactaagaaactaagaatgaaaaggaaccaccgggtagaaccacttaatatagatgactgtgctcctgagagtccaacgccacccccaccccctcctcctgttggctggggaacccctaaagtcactagacttccaaaacttgagcctcttggtgaaacacatcataatgatttctataggaagccactgcctcccctggctgtgccacagcgacctaacagtgatgctcatgatgtgatctcataaacaagacgtatggaggagttctcttaatatcagcaaggtgaactgggacattcttctttctcagaagaagaaacatcttgtaaattgatgactggggcaagataaccataataattttagtgagaagattaatactcaaggacctgacttgataattacttatttgtgtttttcatggttaaaaaaataaaagaagcacaatgaccagtacatgaaatcagcatttggaccaaattagcaagatttactgtnnnnnnnnnnnnnnnnnnnnnnnnnnnnnnnnnnnnnnnnnnnnnnnnnnnnnnnnnnnnnnnnccaatggactcagcactttctttactatttgttcaatagcctatatttctagatattaaatattttttgtaagatatatgcacatagaagggggacttctaggaatttataaccaaaattttaaaactatttttatatttttttaaatctttaaaaattttaattactgtgatattgattatacaccttttttatagatgatttgtttaaattatatctggaaaatagagttgatttactttcagacatgaactatacaaacaggatatatttatatggcttgaggtatgttttgtaatagcgttgttctttaagtgtacatcgtaatttgacctaatttaaaaataatatattttcgaagtagtagattctcagatctttattctaacaattacatgatttgaaaacagtactcaatgagactggaaataccttttgtacctaaatgttttttaaattaatcaaaatacattctgtgagatactattaaaagtctcagtaaagtcctattttaaaggttagacactttcagagatcaaggtgctccctatactcccttgttccatcagaagctgcagcgactcttttacgtgattctaattctttcatgccttgaaattaaactatgaaattaaaggcagaaaaactggaaaacctactgcaggtccagagacttctgttttacaactgggaaacagcttgtgtactaaagtaatgagaataaaaatgttggcccaaaattacttttataaataaataattccaaaataatttcttaatttaaaatgatagcacttctcttgcacttaagaatggcatccataagattctgtatttggcatttagactaacttctagatgtatatttttaataatagattcataatgttacatttaattgaaaacaaacctttatatccaatgaaaatagtataaacagaatgatttttataccaccttgttaagattggtgcttttggtaacttgtactgacacaacagacatgtgctagtatctgataacattaagtacattttatgtcgtttaatataattatttactttaaaaattgtacttcagaacatcagattttattcacattttttaactcactgaactttaataatcaggtcacctgtactctagtcagcactgtatatattcttggagtttgtacatgggacttagcaaccacactgagtgaggtaaaagcatttgatttcagatctaaaattcgtaacaacctaaatttgagaggtggctgaaatgtgatgaaaagcaatacgaaaagacaatgtaaactttgaaaaggattttagagggaaaattgcatagctttttgtaacatttacttaattttaaaactaaactcatacttttgctatctttttaatatttatctcgtttgggagtatacgtgtttttaaaatttgtgttttctatctgtttactatagtgtagctactggcttcatttaataaaaataaatgattttgaaattaaatataatatagaattcacattttatatagctctctcaaaaattaatttttattccttaagcattttaaaaacattttaaaaaatgtattgtaaatccaggtgtattttaacaattaaatgcctattttgttatatgttatacttttattcttaattctgaattttgacattttcacacaataaaaataatttatatcgaaaaaaaaaaaaaaaaaaag

SEQ ID NO: 5634 - DNA, 1497 bp, Homo sapiens
gagcgcgcgggaaagagaccaatataaactgtggcgggatagttttcggggccttgtccagtgaaacaccctcggctgggaagtcagttcgttctctcctctcctctcttcttgtttgaacatggtgcggactaaagcagacagtgttccaggcacttacagaaaagtggtggctgctcgagcccccagaaaggtgcttggttcttccacctctgccactaattcgacatcagtttcatcgaggaaagctgaaaataaatatgcaggagggaaccccgtttgcgtgcgcccaactcccaagtggcaaaaaggaattggagaattctttaggttgtcccctaaagattctgaaaaagagaatcagattcctgaagaggcaggaagcagtggcttaggaaaagcaaagagaaaagcatgtcctttgcaacctgatcacacaaatgatgaaaaagaatagaactttctcattcatctttgaataacgtctccttgtttaccctggtattctagaatgtaaatttacataaatgtgtttgttccaattagctttgttgaacaggcatttaattaaaaaatttaggtttaaatttagatgttcaaaagtagttgtgaaatttgagaatttgtaagactaattatggtaacttagcttagtattcaatataatgcattgtttggtttcttttaccaaattaagtgtctagttcttgctaaaatcaagtcattgcattgtgttctaattacaagtatgttgtatttgagatttgcttagattgttgtactgctgccatttttattggtgtttgattattggaatggtgccatattgtcactccttctacttgctttaaaaagcagagttagatttttgcacattaaaaaattcagtattaattaaacattaaaaaaaaaaaaaaaaaaaaaagcaaggaggacaaatacgcaatgttggaaaaccttggatggatatcttctctttaaaaaaatgtaaagataatttggtcttgagggtttaaacggttgataatgcctctacaacaacaagaaaaaagataaaatactaggatagaatcatggtgggcacagtggcttctcaggaggctgaggagggaggtttgcttgagtccaggagttggagaccagcccaggcaacatagcgtaaaccctatctctaaaacaatttttagccaggtgcggtggctcacgcctgtaatcccagcactctgggaggccgaggcgggtggatcatgaggtcaggagatcgagaccatcctgcctaacaaggtgaaaccccgtctctactaaaaatacaaaaaattagccgggcgcggtggcgggcgcctgtagtcccagctactcgggaggctgaggcaggagaatggcgtgaacccgggaagtggagcttgcagtgagccgagattgcgccactgcagtcggcagtccggcttgggcgacagagcgagactccgtctcaaaaaaaaaaaaaaaaaaaaaaaa

SEQ ID NO: 5635 - DNA, 1657 bp, Homo sapiens
tccccctacgccctttagtattactcgcccatcgaacgccccttgcggagggggggtgcctctgtttggcgcttttgtgcgcgcccgggtctgttggtgctcagagtgtggtcaggcggctcggactgagcaggactttccttatcccagttgattgtgcagaatacactgcctgtcgcttgtcttctattcaccatggcttcttctgatatccaggtgaaagaactggagaagcgtgcctcaggccaggcttttgagctgattctcagccctcggtcaaaagaatctgttccagaattccccctttcccctccaaagaagaaggatctttccctggaggaaattcagaagaaattagaagctgcagaagaaagacgcaagtcccatgaagctgaggtcttgaagcagctggctgagaaacgagagcacgagaaagaagtgcttcagaaggcaatagaagagaacaacaacttcagtaaaatggcagaagagaaactgacccacaaaatggaagctaataaagagaaccgagaggcacaaatggctgccaaactggaacgtttgcgagagaaggataagcacattgaagaagtgcggaagaacaaagaatccaaagaccctgctgacgagactgaagctgactaatttgttctgagaactgactttctccccatccccttcctaaatatccaaagactgtactggccagtgtcattttattttttccctcctgacaaatattttagaagctaatgtaggactgtataggtagatccagatccagactgtaagatgttgttttaggggctaaaggggagaaactgaaagtgttttactctttttctaaagtgttggtctttctaatgtagctatttttcttgttgcatcttttctacttcagtacacttggtgtactgggttaatggctagtactgtattggctctgtgaaaacatatttgtgaaaagagtatgtagtggcttcttttgaactgttagatgctgaatatctgttcacttttcaatcccaattctgtcccaatcttaccagatgctactggacttgaatggttaataaaactgcacagtgctgttggtggcagtgacttcttttgagttaggttaataaatcaagccatagagcccctcctggttgatacttgttccagatggggcctttggggctggtagaaatacccaacgcacaaatgaccgcacgttctctgccccgtttcttgccccagtgtggtttgcattgtctccttccacaatgactgctttgtttggatgcctcagcccaggtcagctgttactttctttcagatgtttatttgcaaacaaccattttttgttctgtgtcccttttaaaaggcagattaaaagcacaagcgtgtttctagagaacagttgagagagaatctcaagattctacttggtggtttgcttgctctacgttacaggtggggcatgtcctcatcctttcctgccataaaagctatgacacgagaatcagaatattaataaaactttatgtactgctgtagcaaaaaaaaaaaaaaaaacccccaccaccgacaacccccccccaccaccccccccccacaccccccccaaacccgcgatccacacccgcgcacccacccacccggccttaccgcc

SEQ ID NO: 5636 - DNA, 2527 bp, Homo sapiens
  misc_feature (2468)..(2468): n is a, c, g, or t
tgatagacctaagaactgtattagtgttgtaccagcctattaacctcttgtctgtgcacagcttcaaatgttaccgtctagttagatttttatttaaaatatgaaaaactgcttttcccaagatgttttttaaaaacaaagctacaattttaatatttaacatatttaaagtttcaaagcacacctgtttggcttgggtgggggtggggtgggggggacattctttttcagtcttaatttttaaatatttgatcattttctattgtccaatcatttcagcacctccaaaggtccctaggacactttgcctctcttctccccctgccccccaccctgctcccacatctgggggcccatgggccaggagtggataagcctgcattaatacaacctttctccattcactttctatttacaaattaggaaagcaaccttttggtttatatatattttttttaatacctcagtgctgcaagtatcaccagagaggctatggaagaatttttttttaatttattgtagatgtaaacagaattttaaaaataaaaagtataaacatcactgcactgtgactggtgggaaaaactgacagtttcctctttgcacatgtttaacatttggctgttataatatatggtcctcggttggggaaagatacttatgatgaaggatattttttaatttaacttttttttaaatattggtaataggtcggcaacagcaactatagaagtacaactcaatagatggcattaaaacatattgtagtgtggatatatattttttcttttttaaaatgtgatattgacgttttattaatattttttaaattgttacgtttataaatttggtacttaaggcacagccagtatgagacactgaatgcgacatttattataaagagctgctgcactcctatttttataaattttactaacaaagtagactaatgtagacattcacagacatggtagggcaaaagcatcttcaaactaaagactccaaaatgctaactcagaaagaaagaaaaaacccgttttcaattctaatgaaacagcaacaacattttttttaattaaaaaaaaaatcatgttctttgtttttctaataaaatgttaggttgtttggtgaggtttttttgttgtttttttcctttctttgtttcttttcttttcccccaaacaaccagattaaatgctgagcgcttttaaaatatcaaaacttgttcaagtcataaaacaacaaaacataagttttatttaaaaaaaaaaaaagaaagaaaaaatagtaaattcccagaaattcagtgtttagacgagggaatttaattcctattttgtccatgttggtgatgtactgtacttcccttccttttctctgcatcccccatcacctcatagaagactctttgttgatcattgtatgttaataatgtataaaatggctatcttgtaagcgtgctgtcctggtactagtgtagcgactttttttctcctctttcttctagtacatattgataggtataacataattaaggtttaaaaaaaattagacatagttattcagatttaggaccagtaaggatagaactttctcttatttatgaaaaaaaatgctaataattttggggcagttttttcctttaattatttttttcaatttcaagtttaattttattttagctgatctgatgtgggtttcaactaacccaaggtctcaccatgtttaaatgccggcggactctacggcgttttgtagatcccccccccccacaccactgtgtgaggggtgccatactaccctttaatgctaatgctagatatgcaaaactggatttttttaaatttattttttaaaagaaaggaggcttggtatattaaaatgatttttctaagaagaaaaatattttttttaagaaatggtacaaagaaattgggataatcctgggtggaatataggttttaaaagtttatatacccctttttggaaaagaaccccctaaagccccttaaccccaaaatctttgggggaaaatccccaaatgggttttaaaagggggggtacaccaaggggttaaaagggtttcccgtttaaatcccccccccattttccatttttaaaaaaaatccctttttttggaaaaaatattttttggaaaaatttccctttttaaaaccctggaaatggttttccaacccctcccctctctttgggttttccagttaaaacctctcaattggggcgaaaacaatgggggaaaaccccccttttttcggcctttttccccgggggggggaaaaaaaaccccccccttggggttgggaaggcgcttttttcccccccgggaaatttttccaaaaacagcgccccacccggggggggactttttccggggccttttcccagaaatccaatcctggcccttggaaaaacccccccgaaaacttccttcttcccttttcccaagncaaaaagggcccaaaatggaaatgggccaattttaactttccccgggaacccccatttc

SEQ ID NO: 5637 - DNA, 3637 bp, Homo sapiens
ttatttgcacccgccccccgcccgcgtcggtctggggcttttgacttctccccgagcacatttcccctcccgtcgctgggtccctgcgatcgcccccagctggtggggctcgcggagctcaggggagcggggtcctctgcgccgctgcagcgcgagttaataaacagttaagtttggaagactctgcagacacgttgagggggagttaccaagcccaggcagcaaaaacatcctggcacattcctggggagtcctcagctgccagcatctgattagaaccatatctctcgccgggagtggccgcgcggctccgaagctcccggccggcggctatttaagcgaggcccgccgcatccgctgcgctgtagcctggaggctccgggcgcggggaagtcatgctcgcttcacggaggcaatagctagccggtgtctgtgggaggttatgtttatttgagacttctccatcgggatcgcctggtgtcaccaagtgtccactggtactgaggtttgctgcctgccttcttgccatgtctaacgaagtagaaacaagtgcaaccaatggtcagcccgaccaacaggccgcaccaaaagcaccctcaaagaaggaaaaaaagaaaggccctgaaaagacagatgaatatctcttagcaaggttcaaaggcgatggtgtaaaatataaggccaagctgattggcattgatgatgtgccagatgcaagaggggataaaatgagccaagactctatgatgaaactaaagggaatggcggcagctggtcggtctcagggacaacacaaacaaaggatctgggtcaacatttccctttctgggataaaaataattgatgagaaaactggggtaatagagcatgaacatccagtaaataagatttctttcattgcccgtgatgtgacagacaaccgggcatttggttacgtgtgtggaggagaaggccagcatcagttttttgccataaaaaccgggcaacaggctgaaccattagttgttgatcttaaagacctttttcaagttatctataatgtaaagaaaaaggaagaagaaaagaaaaagatagaggaagccagcaaagcagttgagaatgggagtgaggccctaatgattctagatgaccaaactaacaaactgaaatcgggtgttgaccagatggatttgtttggggacatgtctacacctcctgacctaaatagtccaacagaaagcaaagatatccctgttagtggatctaaactctgaaatcgacaccaatcgagaaattctttaagagaaaatccattcttaacaaacggcatcacctcctgttctcttcctcgaccaaacgcctcaggcatccttcttgcctgaaaatgccttttctgccaatctcaacttctttcccacccctaatcctgatcctttccgtgacgatcctttcacacagccagaccaatcgacaccttcttcgtttgattctctcaaatctccagatcagaagaaagagaattcgagtagctcgtctactccgctgagtaatgggcccctgaatggtgatgttgactactttggtcagcaatttgaccagatctctaaccggactggcaaacaggaagctcaggcaggcccatggcccttttcaagttcgcaaacccagccagcagtgagaactcacccttttgtgggaagccctcccaaaggactgtccatacagaatggcgtaaagcaggacttggaaagctctgtccagtcctcaccacatgactccatagccattatcccacctccacaaagtaccccaggaagaggcagaaggactgctaagtcttcagccaatgactggcttgcatcagacatctttgctcctcccgtctcagaaccttcaggccaggcgtcacccacaggacaacctacagccctgcagcccaaccctctggatctcttcaaaacaagtgctcctgccccagtggggcccctggtgggtctaggtggtgtaactgtcacactccctcaggcaggaccatggaacacagcatctttggtcttcaatcagtccccttcaatggctccgggagcatgatgggtggtcaaccttcaggttttagtcagcccgtcatttttggtacaagtccagctgtttcaggttggaaccagccttcaccctttgcagcctcaactccccctccagtgcctgttgtctggggcccttctgcatctgtggcacccaatgcttgggtcaacaacaagccctttggggaatccttttcagagcaatatttttccagctcctgctgtgtccactcagcccccatccatgcactcctctctcctggtcactcctcctcagccacctcccagagctggccctcccaaggacatctccagtgatgccttcactgccttagacccacttggggataaagagatcaaggatgtgaaagaaatgtttaaggatttccaactgcggcagccacctgctgtgcccgcgcggaagggagagcagacttcttctgggactttgagtgcctttgccagttatttcaacagcaaggttggcattcctcaggagaatgcagaccatgatgactttgatgctaatcaactattgaacaagatcaatgaaccaccaaagccagctcccagacaagtttccctgccagttaccaaatctactgacaatgcatttgagaaccctttctttaaagattcttttggttcatcacaagcctctgtggcttcttctcaacctgtatcttctgagatgtatagggatccatttggaaatccttttgcctaaattctgaacttggtctgcagaccatccagaggaataaaaaggttggccttagtagtcaaaaacaaagctgatagccagacacgttctgatttctgcccttgttccagctttgacgtattatctgttgccttatttctcattgcctcttctacttgtaaaatgcttttcactttctgtctaggttaaagctaaactgaatctatggctttaaataaattaagatcctaaactctctagcttaagtgtaaatgaagtacagtagtttccctactgaaccctgcctcttgtgtccctggaaccttctagaacacctgccttctaccctctggttgggagatgcagccaccacatcccttcatatcatactgttttgaataaattttcaaatccttaaaagtacagagaaaatggggggttctgtttcagagcataaaacctaaaggttatagtagaaacaaggcaacttcttaacaagaaaatcttgcttcagaaccatcagttaaagagaaatttcttaagtacaattgaacgagttacaattctccttaagactcttggaatctaaccacttagggactttttaaagagataggttctctttacttctgaagatcagttgctccaggccaggatggcttttccattcttgctagcatgcaaggggggaaaattcactcgctccccagtttgggaactatacacactggccggcaagtattcacccttagacactgcccgggaaaacaccacttcaaaaggggcgcatgaggtcgcgaaagaaggcaatacttagagcattcaaacgaagaagaagacaatcacgtccgccaaatgacaggctatgatctgg

SEQ ID NO: 5638 - DNA, 743 bp, Homo sapiens
ttttttttttttttttaaatctcatcactcttagattaacaggaaggttttgcctttctggtgtaggatgcagtaagttttcttggggagagaaatgagttcaggctttggaattattcatagtgaccagggacattgccagcactcccgggtcctgcataatctaagataatgctcctgtggccatgaagtctccctttacaaaatctgagggggaaaagagatcctggtgtctaggaacactggcctgggcctttcccaaggcagccttgggtctggtgaggagctggaatcccctctggcttttgtagcctgtcatatcagaacattccaagtcagcctgaggaagaaaaggctgctgctgggatttggtggggcctgtagatcaggagaacactggagctttctgtgtatgtcgatcttttcagataaacctggccttctacccaactccagctcaatcggggtctcttagaatgtaatggtaaactttaaacaatctttacgcttcaggatagaaaacaaatctgacaagcatccattttctaaagtgacttggtggactgtgccttttttttaaaggagaaaatgggttccattttctgcatccctctttggaaagggttggacactcaagtgtcctgaaaccccggaaaccttttttgggggttttcatttttaaaaaggtcctgtttttggaaaatggggcttcttggcagggaaggccaaattttcttaaaagg

SEQ ID NO: 5639 - DNA, 1372 bp, Homo sapiens
  misc_feature (1311)..(1311): n is a, c, g, or t
  misc_feature (1335)..(1335): n is a, c, g, or t
  misc_feature (1346)..(1346): n is a, c, g, or t
  misc_feature (1349)..(1349): n is a, c, g, or t
  misc_feature (1356)..(1356): n is a, c, g, or t
  misc_feature (1358)..(1358): n is a, c, g, or t
tagagggtggggggcaggaatgcttatgtaggatagaaagaatgtgggggtagctgtttggttatggtgatccagtcctttggaaccttacaaggctcctgtgggcatgtcaatgttaccattacagcctctacgacccacccacctttgaaaagtcagtacaagtagaccacagtttaaagtagttagtataattctactaaggtttaatcattatacttgttcacttcctggtgcatatttcctaaatatgcttggggtgtggggtggggggttgagttttcactgttccattgcgtgtcatcttatatttttctccatcctgtgactttggcatcttactcgactttctattttcttttcccttggcttattgcagtagtctgctggtgcaggtagagagctcagtgcacctattcccctgttactgctaattatcttgaatattgtcagaggttattttgatgttctaagaatataaagtcattttttacaaaatcatcttttccaagttaaaagcaaaataaaaaaatcccctgtgctagggtgcccatttcagcttttgacattgcccctgtacttttatagatgctctttttgtccgtgttggtagtaactaatgactagtgaattttcatgtaaatgaagcaaaataaatatttcagattttattaatctctcataacccagccaaatctgatgacttcattttaattgcttcccagaaagcacttcccctcctaccttctattctattctattctattctattctattctgttctattctgttctgttctattctgttctattctgtttttagaataacacactaggtaaagaaactttaactgcaaggagtcagtgacttttagtgctccctgataaatgatgttattgacaaaagtaaaaaattatttcattgtttttttcctgtattactatctcctctcctgtgcttttgacagtgtgtttagtggatggataatatgtatttctctttcccactcccagattccaaattccctgcctttttggcccacctcaccacaaaagctccatagtttattaatgtaagtttgaatggatgcttctttggggaaacttcaggagttaatggaagagtttcagaaaggaatgagaatgcctcaggagttgttctgtgatggaaattggtctgttgttctgttaatgctgatggaaagaaacttacaacgcttaataaaaatctattcttttagtaaaaaaaattgtgaaataaaaaaaaaaaaaaaaaaaaaaaaaaaaagggattcccgacagaatctggganacacggacgtttcaagtccatggnggacatccctnttntaaaaantnctcaggtctggaga

SEQ ID NO: 5640 - DNA, 4106 bp, Homo sapiens
  misc_feature (3797)..(3824): n is a, c, g, or t
ggtagaaagggagctgggtattgagagacaaggcgcgtctggggagaggggagtggggagtgaagagtaaaggagccatggttttgtaggggtgaatttaagagggagtgcgaggcgagtatgggtgggtgtgaaattgagtgaagtgagtgggcgtgctttgctgtgtctggcgccaacagtgggtttggggggttcgtgggttgtagcgttggtgagccatgcaacagttcgaatgattggagcaggaggacaagcaggtgtagctaggcttagtggtgccgagcagtggtggccccagcctagttgtgaagggaaaagccaaaggtaaaaatttggggcaatatttttaagggccggagttaaagctcctggggcccaattttattttcgaaagtcactgctgagaacatttgcacttgtgttttgctggaacaaaatcaggaccttttgcattgatgtgacgaggcaatgacgaacgttaggctaagaatgggaatctgtccccatgggtttcctccaaccccacgtcatttcctctctcttccgttttctcttgtacatactttcacacacatctcatcccaagctatcctaaggcactttgcttagaagatataaaaattaggcaggaacgcacaaagctaagaggttcttacggtctcaaaaagcagttttgcctctagatgaaagaaaagcaccatgtcaagcaaacttttctattggctatttacaaaaataatacaaaaattagtaataagctttacaggtagctgttaaatgtactaatctgtatgattttgaaaaatagtattttaactatagcattatacatatgctagaaaccattttaaccacagcatgggtgagagagggtgctacctgcccctttgtcatgtggacactgcaccaggcagttcacagtctttattatgaggtcactggcatctctccatcgtaaagctatgagcacagggcctgccctcatttaatcatctacatgcagtgtatgtaggtaagtatttacagatgacaaaaccaaacagagtttaagctacgatagtgaaagaagaagattttaataatcctgaaaaaattgtagatagtattgtcttcacagggtatgtgaatgacagattcaaaaaagtcttttgggatagcctttcaaacattctatttctctttgtgaggtttgatcttaactgaatgtaaaggatgtaataattttctttttaaaagtattatattttaaattcagctggcacatgtgccagtctgttacatgctgcttgtttgtgacatgttggttacatattgcagaatgctgaggtttgggcttctagtgaaagtgtaatgattttcaaaaacagccttgctctttctgttactccctcctgatcatttaaatgtttccagtgtccgaaaaatgcaacaactaaactgctctctcatttgcatctaattacaatctgataatagtgtgataatattaattgaaaagttgttttaaaggattttaaaattttaaattgagtaatttaagcttcatttaaaagttctgttttacagtgacttattcttcctttatatcagagtcccattgatttaaaaataaatctctttttagaaagaatagaaattctgagtgagctcatttttaagcctaagtgttgtgtgaatatcctggaagttgttaagagctatgttgaagtgctaactgtaaaaaattaagtgctttcacgacgaggctttcttaattcccactgattttctttccatgccgtaaacagctcataaaatgtcatatgtagctgtgagtgttaaaataattacacttaatattttaatagtgtgctgtgcaaatacatagttttttgttttgttttggcaaatgtttcattttgttttaatgacttcggtccaatataaagaaaatgaaatacagtgaatagttcttctttcaagatgagctgtatttattactggaacggaagttgtcatatccgtgatcattagctttgaactttaagcacgactgcttttcctccaaggactgtttttcttcaaatgactggcaccagcagcataagcatgacttaaagcagtttttgaatcttttgctcaccaaatacagagcaattgggttaatgcaggaattcagtgaagccatgttgataccaatatagtccaataccaacagaaagctcaaaagttcacatctattgggatcattctgattataaagagtgagcttcagaatcctgctgaggtgaaggggaagccagcagagggcaaagacaaggaccaggcaaaagacggttttggccacttcccgtctctgctttaggtgatcatttaaagcaatctgcatgccacttttctttctcaacatttcacaggtcattagtgtataaaaaaatgcagtgatggccaatggcaagcagaaatagaaactgaacagccaccaatcttttgctgtcttgtaaaactgcatgaaagctgtcttctgaacgggatgaagcaagcagattcgcagataacttcctttgtagtccatcgtaattatatcaaaacctatggcttcagggacagccagaaccacagagaccacccaaatcaaaacaatttctactgctgtccattttggaaccccaattcctttaattctactccaagaagcaacagctcgatatctgtcaatactcagagcacatagactcagcacagtgattcccacggaggctttctgtatgaaaggcaccagcttacacatctcagctccaaatggccagtcctctgccagcagcttgtagacattgatagggatgtcaatgacgatgtgcagcaggtctcccagagccaagctggcgatcaagatattgggaccgtttcgcatgcacttgttcttgtagataattctcagaagtgtggagttcccgatgatccccagcacgaacacaaggcaggacacaaccgtgttgatgtatttgaaagtctccttgatctcgatgggtccttggcacgggggaggggagatggtgcgtggcggagatcctgccgtcctgtctcctttaggcacctccgcaggtgccaacgaccgcgccagactggcgttggaacccttgggccataaggtcttagtgggtggcgtcattatctctgcggtttgcaaaagcggagtggccctgtcaggcgggaagcctctctcctctccccagatccgcgacaggccgcaggcaagaaccagcgcaaccagggcgcgtccgcacagacttggaggcggctgcatgctgctacctgctccagaaggcgtccggtggccgctccgcagtttcagagcctagagacaagcagaggaaggaagacaggacacttgggtcagctgcccgagccaagtcgctgcaaacgctaataccgcccgcagcctcttcgccagtatccacgctcaaaagtaactcaagtttgcgcgccagtgggaaacttggcgctcatgactcgccagcgcgggtcgaaactccttcctgatgccctctcagctgtttttcttcccccgcgtggccaggaggggtaaataatatgcagtggggcggggcgttctggaaggggtgtgccagggagggaatgatgggggtcccaggcaaagctccgaactctttcacgtaacgggaggaatacagacacgtcttagttaagcgtgcgtgggaaccgcggaattaaggcacctagaggccaagggcttgtgtcaagctctgcattttgccccgcaggggaacctctataccccgcgattgaactcnnnnnnnnnnnnnnnnnnnnnnnnnnnngctactccctggctggctgagctacagctcccgcagcgcgcccaggagtgcgccggagattcggaaacccgcagagacttctcaagtcagcaggaacttggaaaccgctgttccctccaaacggcttcaaacactcgcgctccttcctttacccaacctaattttaatttgccctctctataggcttaatttttatttttttaaaatcccaaactagtaagccaaaccgaagccccagaataaggttcaatcaatgattttaattcaacaccaagcccgaat

SEQ ID NO: 5641 - DNA, 3088 bp, Homo sapiens
  misc_feature (698)..(721): n is a, c, g, or t
ggcgctcttccagcgggcaggcagcatggcggccgtggagacgcgggtgtgcgagacagacggctgcagcagtgaggccaagctccagtgtcccacttgcatcaagctgggcatccagggctcgtacttctgctcgcaggaatgttttaaaggaagttgggctactcacaagttactacataagaaagcaaaagatgaaaaggcgaagcgagaagtgtcttcctggactgtggaaggtgatattaatactgacccatgggcaggttatcgatatactggtaaactcagaccacattatccactgatgccaacaaggccagtgccaagttatattcaaagaccagattatgctgatcatcccttaggaatgtctgaatctgaacaggctcttaaaggtacttctcagattaaattactctcatctgaagatatagaagggatgcgacttgtatgtaggcttgctagagaagttttggatgttgctgccggcatgattaaaccaggtgtaactactgaagaaatagatcacgctgtacacttagcatgtattgcaagaaattgctacccttctcccctgaattattataatttcccaaagtcttgttgtacctcagtgaatgaagtcatttgccatggaataccagacagaaggcccttacaagaaggtgacattgttaatgtggatatcactctttatnnnnnnnnnnnnnnnnnnnnnnnncctgaatgagacattttttgttggagaagtggatgatggagcacggaaacttgttcagaccacatatgagtgcctgatgcaagccattgatgcagtgaagcctggtgttcggtacagagaattgggaaacattatccagaagcatgcccaagcaaatgggttttcagttgttcgaagctattgtgggcatggaatccacaagctttttcatacagctcccaatgtaccccactatgctaaaaataaagcagttggagtgatgaagtcgggccatgtatttacaattgagccaatgatttgtgaaggcggatggcaggatgaaacctggccagatggttggactgcggtgacaagagacggaaagcggtctgctcagtttgagcacaccctcctggtcacagacactggctgtgaaatcctaacccggcgacttgacagtgcacggcctcacttcatgtctcaattttaatttctcccaagatggcacatctcagtaccttcttactgtgctatgcattttattgagagtacagaaaggaagaggaacctttttttaatcacttgttttgttttgactatagataagaaaggactacagcatttgatgtgtgtcctcaagaacttgtcttgggtctgaaaaagctgagaagaataaaggaaacattgctcaactcttcagccccctccccctgcacacctgttttctcatttgccctttgagcacttttacttaaacttgcttgtagttgcttttatcactgccgcaaaacagccatcaagagccatctgctttccaggtgaacattggaaatgagaatctttgaaacttagcaatatgtgttgcaccagattttttaaattatatatatggaaatatatatgtatacattttaagttctgtatacataattaccaaacactatgtgacctggagtttgtgttgtttctgctctgacaggtttatatgttcttacaaatggatccatagtttgcagtgatttaattcctggttgggatttggcctcccctctcccccatgctaattatttacccttgtaattgtgcatagggaagcactcacccaatgagactttctccaatgtggactctgtgtgtcagtgaatgaatgtagtaaaattcactttggaaggttatcaggcttttaaaaatctagtttatggcaaaaatagccattttccaagtggtggctgactgttgcagggaatgagaatttcataatacactgctatttcagacctctgtttggtcagaaatggaaaagaaaaagccccctttcttcccttttctgttttacttcaagggcataccttggaggtgctcagagaagcgtgaagtttgcactatggtggaggatggggaaagagttctaaagtgtctccagctgtgaaccaggaggtcaagtgggctattaaaatctaacgttgagtaaatgtgatagtgatgagaaaggaattttgtgtactgtaaccttgcagtagagatgcagctgtccttcgtgtgtggaaacacacctctcctttacatagttgggaacctcattagaaatgacctcagctgccccatatctacgttcctttcagcagttgtccaagtaggagtgtatccagtgaagacatatcaaatcacaaagtcattgtcattagagtgtacttgattactgggcatccttgtaatataatttcataccactgacacattatacttgtaagagaacatctttcccagagtgcctcagaccttattgctttaaaatataataatgttttcattacttttattatttgaatgatttagtaaagttgactgaatctggtatagactttgggagtatgtgtgtgaagtttttatcaaactgtaatatttgtgaatggaatgccttgcaatatgaatgttaatataatgtgtaaagggagattaaaaagtttgaatgattatcctaaaaaaaaaaaaaaaaaaaaaaaaaaaaaaaaaaaaaaaaaaaaaaaaaaaaaaaaaaaaaaaaaacacaaaagaagcaaaaaaaaaaaagcaacagcacagagacatagaaaaggggcgccccagagggcggaaaaaaaagagaagaaagaaaaaaacgaccgccaagcaaaaaatccaggctactaagcgcgcacccatcgtgaacgagcacaccaccaacacaccgaagcgcagtcgccacccatccctagggacaccactatccagacaaggacagtataccacccacaaggagaacatatcaaagtcacaaccaacacaagtgggaccacacacctgactaacaccgcactaaccgtctccgaccgcaccaacaacagtcatacaaggtcaaagaccaccact

SEQ ID NO: 5642 - DNA, 869 bp, Homo sapiens
ctgcgggtctcatattcctgctagaagctgttattgtgctgtgtaggaagaaagagagcaccaggagaggccctgctccagtggagcaagagcaaatcatctttaagttcctcttcttcaaaggctcagaaattaaattaagtattctttgtggtcaagaaggggaaagaacattgctttttaagagaccagaagtggtattcaccagcagttctaagggaccatacagagtattcctctcttcacaccaggaccagccactgttgcagcatgagttcccagcagcagaagcagccctgcatcccaccccctcagcttcagcagcagcaggtgaaacagccttgccagcctccacctcaggaaccatgcatccccaaaaccaaggagccctgccaccccaaggtgcctgagccctgccaccccaaagtgcctgagccctgccagcccaaggttccagagccatgccaccccaaggtgcctgagccctgcccttcaatagtcactccagcaccagcccagcagaagaccaagcagaagtaatgtggtccacagccatgcccttgaggagccggccaccagatgctgaatcccctatcccattctgtgtatgagtcccatttgccttgcaattagcattctgtctcccccaaaaaagaatgtgctatgaagctttctttcctacacactctgagtctctgaatgaagctgaaggtcttagtaccagagctagttttcagctgctcagaattcatctgaagagagacttaagatgaaagcaaatgattcagctcccttatacccccattaaattcactttcaattccaaaaaaaaaaaaaaaaaaaaaaaaaaaaaaaaaaaaagtagaagc

SEQ ID NO: 5643 - DNA, 1055 bp, Homo sapiens
gtacgccgttttttcggcaatgtggaaagtgtccccctcggtggcgcgcgcccccactggttttgtggtgggcccgcttggggaggatacttcccgggggagggggtttcgcacaaggttattattgtgtgttaagtgcggccccccccgttcagcgttgaaaagagcaaataggggttaagtctcttaagggagagaggccgtgtatagattgggaaatgtgaaaaaaagagtgccaactttagtggggaaaccccctaaggaaaaaggtggccttttggacaaattaattgggaatgtgggggggggtggcgtttttatttgaaagcccccccaagggagggtttgttttttgaggggccccgtgttcccccgccttgcgccaaaaaaaaagaaaaatttggttgaagttaaaaaagggcttcacgtttattaacattttggactaaaggaaaatcacccagctttaaagctgcttttaacaatgaagattgaacagagttcagcaattttgattaaattaagacttgggggtgaaactttccagtttactgaactccagaccatgcatgtagtccactccagaaatcatgctcgcttcccttggcacaccagtgttctcctgccaaatgaccctagaccctctgtcctgcagagtcagggtggcttttcccctgactgtgtccgatgccaaggagtcctggcctccgcagatgcttcattttgacccttggctgcagtggaagtcagcacagagcagtgccctggctgtgtccctggacgggtggacttagctagggagaaagtcgaggcagcagccctcgaggccctcacagatgtctaggcaggcctcatttcatcacgcagcatgtgcaggcctggaagagcaaagccaaatctcagggaagtccttggttgatgtatctgggtctcctctggagcactctgccctcctgtcacccagtagagtaaataaacttccttggctcctgaaaaaaaaaaaaaaaaaaaaaaaaaaaaaaaaaaaaagaactaggaaaaaaaattgcggaatt

SEQ ID NO: 5644 - DNA, 1372 bp, Homo sapiens; identical to SEQ ID NO: 5639
  misc_feature (1311)..(1311): n is a, c, g, or t
  misc_feature (1335)..(1335): n is a, c, g, or t
  misc_feature (1346)..(1346): n is a, c, g, or t
  misc_feature (1349)..(1349): n is a, c, g, or t
  misc_feature (1356)..(1356): n is a, c, g, or t
  misc_feature (1358)..(1358): n is a, c, g, or t

SEQ ID NO: 5645 - DNA, 1971 bp, Homo sapiens
tggggacggcgccctcaccgggagtcacttgtcagcccttgtcggaggcggaggcagccccgcgccgcgccggacccgagcatatttcattttctgtcattggactttgagccattagaaccatgagcaactacagtgtgtcactggttggcccagctccttggggtttccggctgcagggcggtaaggatttcaacatgcctctgacaatctctagtctaaaagatggcggcaaggcagcccaggcaaatgtaagaataggcgatgtggttctcagcattgatggaataaatgcacaaggaatgactcatcttgaagcccagaataagattaagggttgtacaggctctttgaatatgactctgcaaagagcatctgctgcacccaagcctgagccggttcctgttcaaaagcccacagtcaccagcgtgtgttccgagacttctcaggagctagcagagggacagagaagaggatcccagggtgacagtaaacagcaaaatgggaaaatcccacctaaacgcccaccaagaaaacacattgtggagcgctatacagagttttatcatgtacccactcacagtgatgccagcaagaagagactgattgaggatactgaagactggcgtccaaggactggaacaactcagtctcgctctttccgaatccttgcccagatcactgggactgaacatttgaaagaatctgaagccgataatacaaagaaggcaaaggaaaagataccccttcacgtctttagtcccaaatacacaaaattacgtgactggcaccatgaagtttcagcacgtgctcttaacgtacagtgatttatgagccttgccccccaagcagccagcacataccttttcatttactttttttttttcaacttcatagcaaaatctgtattaaatttgccttatgaaaaaatagaactttttctatacttttctaacaatttcctattgttgtgagaaaaggaagatgaacatgttttgtgctagttggtagctcacaaatgtaaaaccaaaaaaaaaaaaaatagaaaattaagggactagatctatttgtggatttgtatctgtttttgttgtgattagggtagtaatcttggaaaacgaattattttcataagttgaatttggttagttggttggttgaagcagaggataatgagcaaataaagtccttgtctaatttggaaaatactttctttatattattaacatctcccaagattactttttaagttcattattatgttacattcaaagttgattgtaaattattctaaataagtaaatataaggaggcaagaataaacaaagactttattaaagaagagtgcgtgcattgtagatttaggtatcttttaaagtaggtactattcaggatggctctatgaagaggaggaggtccagatttggctcctgaaaaaggaaagaagagaattttacccctatttgcaatggagaaatacagtattctttggtttggttggatttgcaaatcctatttcctatcaaaggaaatatctctagtggatatttttagaatatagacaatttctaggtattaactaataagatatggaaaagatagctttgctttttttaatcagaagaacataaaataaattacaatatgaatgattgtgagacatcagagaaatattttacttagtgacgtaaactactgtgcactgctgctattcctaggaagctgtgttttgggcaatacatggaagctaaatatatgaccagaaatgctttctgccttgtaatatagtgtattatatattagagctaaatttagtaataaatgcattttgaagtttggaaaagtattgtaataaagttgcctttaacttaaaaaaaaaaaaaaaaaaaaaaaaaaaaacaagacacagtgccatccaggacttattacagtataactgggtaaaataaacaattctctgacaaaaaaaaa

SEQ ID NO: 5646 - DNA, 968 bp, Homo sapiens
tttttttttttttttttttccatacaaagaattttttattgacattgtaagaaacatttttttttctttgttacaaaaggactaagtggttctgaaagcaaaggtagagttcatctgtggctgggctgcagcccctgggcttgaggtgggcgtgatcacggggaatgcaggcttgtccgaggaacgcctgggccagtcacatctgaacgctatgcctacaatacttaaatgtatttacatgtgtttcttttaaaaaaaggattacacattttattttttaaaaaaatctaaaaaaggtgaaaaaaatgaacttgtattttattttacatgtctgcaggatacacaagggtaacttgtcagaagagaacatcctcctatcagttcaaaacaacacatgaaaccaggatacaagacagcctcgactctgctaccaccgtgcgctctctggctggtgcacacacagccttggagtgctgattgggcaacaccaactggtccctctcattgacaagattaacataaaataaggcacatacatcgcaagaatcaaaactttgtggctcaagaggaagagccaatgtgtgaggagttgggaggggttaactttttcagaaaaataaaacaaaaatggttagaaaacgtttaacacagacattaagcaggagtagaatgtgtgagcctgcatgttttagaaaaggcaggatggtgacactagtgaggcggtcctctcgctctaaaatgcataggttagagaaatggagagaggcttggaggctgggggtgagtctcaagatatgagatgcctagcctacagaagatcccaaaaggatgtcccaaaaagatgcttctaagtgacctcaaaagaccttccttccactggactgccacaacagatcactgaaattctggaggagtatactttcttcttcctccctcctcacctctgtccttctgaaatttccatattg

SEQ ID NO: 5647 - DNA, 1045 bp, Homo sapiens
aggtagcgaggcctgggtggcgtttcaagacgagggacaaaaggggccgcgttggccggagcgggacgggcccggcgcgggagggagcgaagcagcgcgggcagcgagcgagatgcagcaccgaggcttcctcctcctcaccctcctcgccctgctggcgctcacctccgcggtcgccaaaaagaaagataaggtgaagaagggcggcccggggagcgagtgcgctgagtgggcctgggggccctgcacccccagcagcaaggattgcggcgtgggtttccgcgagggcacctgcggggcccagacccagcgcatccggtgcagggtgccctgcaactggaagaaggagtttggagccgactgcaagtacaagtttgagaactggggtgcgtgtgatgggggcacaggcaccaaagtccgccaaggcaccctgaagaaggcgcgctacaatgctcagtgccaggagaccatccgcgtcaccaagccctgcacccccaagaccaaagcaaaggccaaagccaagaaagggaagggaaaggactagacgccaagcctggatgccaaggagcccctggtgtcacatggggcctggcccacgccctccctctcccaggcccgagatgtgacccaccagtgccttctgtctgctcgttagctttaatcaatcatgccctgccttgtccctctcactccccagccccacccctaagtgcccaaagtggggagggacaagggattctgggaagcttgagcctcccccaaagcaatgtgagtcccagagcccgcttttgttcttccccacaattccattactaagaaacacatcaaataaactgactttttccccccaaaaaaaaaaaaaaaaaaaaagaatagagagaaagggagcgcgttaacgttcccggggcccttaaaaaaagtctcgaggggctttttttgtcggggggggggaaaaaagagggcaattggaattgggccaccgggaccaataagttggttttctgggcaccccacctttttttgtgacccaaaagtgtggaaaaag

SEQ ID NO: 5648 - DNA, 5606 bp, Homo sapiens; identical to SEQ ID NO: 5242
  misc_feature (102)..(186): n is a, c, g, or t

SEQ ID NO: 5649 - DNA, 5278 bp, Homo sapiens
  misc_feature (4714)..(4716): n is a, c, g, or t
agagcgcgagtgaggagcaggcgggcaggcggcgggcagccgggcagccgtggacagaggcccgggcacagccagttgctgtgccagagggtgtggtgtccggctacagattgccccaaagcggcctcacaccagagacgggttaagaagagggattggaggtccaccactccactagcccaggaaggacttatctttcgtctcagccagacctcaccccaattctgtgaatcagcggaggaaggcaaaagtgcagagagtcagaggaggctgtgtaaggagcagagaccagggctcacacagctggccccagcccaggccctggcccaggcccaggagcctgcttccctgcatcgctgaggaagaacagcaccatgctgggtcctcacctcccacctccgccccttgcacccagcgaagggaggcctaccccctgcgccttccagatccctgatggaagctacaggtgtctggctctggaagccgaggagagcagcggtgaggagggcctgcagggagaggtggggcctaccgacctggaagaggatgagggggtcagcaggagtggggacgactctgcctgcagagtcacccaggggacaccgcagctgcccaaagccctgggcatccaaccacccagctgctccagagaggaacgaggggcgtcccagcacgacgacagggccagccaggactgggatgtagtgaaggccgggcagatgatgacagccagccccagccctggccctgggcccagagtggcccagaaaccagcgttgggccggagcactagcctcacggagaaggatctgaaagaagccaaggcgcggagccagcagattgcagcccagctgaccacccctcccagctccaattcccgtggcgtccagctcttcaacaggcgccggcagagggtgaacgagttcaccttggagagccacggccagaggggacagaagcccagccaggagtccctcagagtgctcccttcaagcctcccaggccatgcaccggggctcagcctgagttccacctcgctgccggagccaggccctccacggcaccccagtccccagagccccgacagaggggtccctggccacagcatggaggggtactcagaggaggctagcttgctgcggcacctggagaaggtggccagtgaggaggaagaggtaccactggtggtttatctaaaggagaatgcagcactgctgacagccaatgggctgcacctgtcccaaaaccgagaggcccagcagtcctcaccggccccacctccagctgaggtccacagcccagctgcagatgtcaaccaaaaccttgcctcgcccagtgccacgctcaccacaccaacttctaacagcagccacaatccgccagccaccgatgtcaatcagaacccaccggcaactgttgtcccacagagcctgccactttctagcatccaacagaattcctcagaggcccaactcccatctaatggcacagggcctgcttccaaacccagcaccctgtgtgctgatgggcaaccccaggcaccggctgaggaggtgagatgcagcacactcctaattgacaaggtatcaactccagctaccaccaccagcaccttctccagagaagctacgctcatccccagctccaggcccccagcctcagatttcatgtccagctccctgctcattgacatccagcccaacaccctagtggtgtcagcagatcaagagatgtctgggcgagcagctgccaccacgcccaccaaggtctacagtgaggtccacttcacactggccaagcccccatcagtggtcaacaggacggccaggccttttgggatccaggcgccagggggcaccagccagatggagaggagccccatgctagagagacgacattttggggagaaggccccggctccccagccccccagtttgccagacaggagcccccggccacagagacacataatgtcccgcagccccatggtggaaaggaggatgatggggcagcgaagcccggcctcagagagacgccccttggggaacttcactgcaccccccacctacactgagaccttgtccacagcccctctggcttcctgggtgaggtctcctccctcatattctgtcctgtatcccagctccgaccccaagtcttctcatctgaagggccaggcggttcctgccagcaagacgggcattctggaggagtcgatggcccgccggggcagccgcaaatccatgtttactttcgtggagaagcccaaggtgaccccgaatccagacttgctggatctggtacagacagcggatgagaagcggcggcagagggaccagggggaggtaggcgtggaggaggagcccttcgcactgggggccgaggcctccaacttccagcaggagccagcacctcgtgacagggccagccccgcggcggcggaggaggtggtaccagagtgggcctcctgcctcaagtcaccccgcatccaggccaagccgaagcccaaacccaaccagaacctctccgaggcctctgggaagggagctgagctctacgcccgccgccagtcacggatggagaaatatgtcatcgagtcttcaagccacacgccagagctggcccgctgcccatcacctaccatgtccctgccttcctcctggaaataccccactaacgcccccggggccttccgagtggcatcccgaagcccagcccggaccccgcctgcctccctctaccatggctacctgcctgagaacggggtcctgcgcccagagcccaccaagcagccgccataccagctgcgcccctcgctctttgtcctctcacctatcaaggagcctgccaaggtctcaccaagagctgcctcgcccgccaagcccagctccttggacctggtgcccaacctgcccaagggggctctccctccatctcctgccctgcctcggccctcgcgctcctcaccgggcctctacacctcccccggccaggacagcctgcagcccactgccgtgagccctccttacggcggtgacatctcccccgtgtctccctccagggcgtggtctccccgagccaagcaggcccccaggccctccttctctacccggaacgccgggatcgaggctcaggtgtggaagccttccttctgcttcaagtaacgaaccccacgggggtcccactgccggtcaagttcccctccttgagggccagatggagagcagatgtggcaggaaatggcacagagctgagtgaggagaatggggagtccatggttcaaggtcagatgcggccaccagctggctttgtgaccttgggcgagtcgcctcccctctctgagctgaagccgcccctcccctactacaacaggggtcggactccatgtctgagcggggaggagggtcatggagagagaactgtctggcagccctgatgcggtagaggggcatcctctggcctttgtgagctgtagggatgcagagtctgatgccagcgtcttgctgggggagtggcctagaaggggatcctaacagggacttctggagcagacagagcctgccagtgcctgtggagtcagccagccgagggtctgcctcctcagctgccccaggggggcctccctcctgaggctcaagctcctggcgtctttcttcctgttgctggattctcacctccatgggcctgtctcttctgcctctgccttctggacaccgtttcctctccgctgcttcagagagctttgcctcgcctccgcctgcgctcccctccagggtccttctgctggctgcggactcggcccaccactgctgtctgacgcttttcttcctgccccctctgaggcctggctctgttttagggagatcactgggcccaggcctcagccccagttctacctggcttgctgtcaccgctctaggggtgggggacgtcccaggggatccccaggagaaggagagccctgtagggggctgtgcagatgtgggtgtgccacagggagggtggcccctagccatgtatccattggctgttttggcttcagattcaaccaagatctgcctgactaaaagaagccacctcagcgcagtggaacggggcccagggggaggcaggagaggagggttccggtcccatgtcaccttctcatttgctgtgtgactttggcccactcacattctctttgggcctcagttttatcatttatacaaggagggcttttctagctgtaacaatctgtgaggattgagaggataggctggtgctttgaagaaaggccttgtaagtgacaagacagtcccctgggaagaaagagaaaggaaatgggctattgccaaaggacaggtggcgttagatggctgtgagggtgacctggtgagggaagggttggaatgagctgctgcaggaggccaagggatgcctgggctgggctgggctgggctggcttaggctcaggattgcctggggacagtaggagcatggcaggagctggggcaggtgcatagcagtgcagtgggaagggacagaggagatcttagaattttgaggaaaatctgggacttgagacctggattctaacagaccaactgcatgtgtgtctgtaggtctcagtttccacattcatacagtgagggtgttaagtcaggtagctggagacttcccatcgcctctgacacttttggaggtgatatgatacagcccccgaccaaaccaggcnnnttgttgggggtgagagaatacagacacaagtggcaggattcagatggaagcttcgcaaggctgggggccgaggaccacccacttctctttcccagccctagttctgggttccccagtggggcaaggggtggtggaggcagtgcccatgctgggctgagcctgcagtttttgtgagctctgggcttgtctccatgggaacaggggtgccttcttagtgagctcatttcacacagatcgagggggtatgcgtgggggagttgtgagtgagctcagctccttcaggcctggcctctcccagaacagagtgaagcccctgccctggacccctgctcccttctacccttgagggccaccaatggaagagcccgcccttcattctgcagctcctgcggccaggctgagctctgcccccaactttgttttctctcatgttctcaatacactctgcctcaaaaaaaaaaaaaaaaaaaaaaaaaaaaaaaaaaaaaaaaaaaaaaaaaaaaaaaaaaaaaaaaaaaaaaaaaaaaaaaaaaaaaaaaaaaaaaaaaaaaaaaaaaaaaaa

SEQ ID NO: 5650 - DNA, 3228 bp, Homo sapiens
  misc_feature (17)..(17): n is a, c, g, or t
ttcattaacctttcctnaattcccgggatgctaaggaagggcctgtgggtttattataaggcggactcggcgggagaggtgcgggccgaatccgagccgagcgagaggaatccggcagtagagagcggactccagccggcggaccctgcagccctcgcctgggacagcggcgcgctgggcaggcgcccaagagagcatcgagcagcggaacccgcgaagccggcccgcagccgcgacccgcgcagcctgccgctctcccgccgccggtccgggcagcatgaggcgcgcggcgctctggctctggctgtgcgcgctggcgctgagcctgcagccggccctgccgcaaattgtggctactaatttgccccctgaagatcaagatggctctggggatgactctgacaacttctccggctcaggtgcaggtgctttgcaagatatcaccttgtcacagcagaccccctccacttggaaggacacgcagctcctgacggctattcccacgtctccagaacccaccggcctggaggctacagctgcctccacctccaccctgccggctggagaggggcccaaggagggagaggctgtagtcctgccagaagtggagcctggcctcaccgcccgggagcaggaggccaccccccgacccagggagaccacacagctcccgaccactcatcaggcctcaacgaccacagccaccacggcccaggagcccgccacctcccacccccacagggacatgcagcctggccaccatgagacctcaacccctgcaggacccagccaagctgaccttcacactccccacacagaggatggaggtccttctgccaccgagagggctgctgaggatggagcctccagtcagctcccagcagcagagggctctggggagcaggacttcacctttgaaacctcgggggagaatacggctgtagtggccgtggagcctgaccgccggaaccagtccccagtggatcagggggccacgggggcctcacagggcctcctggacaggaaagaggtgctgggaggggtcattgccggaggcctcgtggggctcatctttgctgtgtgcctggtgggtttcatgctgtaccgcatgaagaagaaggacgaaggcagctactccttggaggagccgaaacaagccaacggcggtgcctaccagaagcccaccaagcaggaggagttctatgcctgacgcgggagccatgcgccccctccgccctgccactcactaggcccccacttgcctcttccttgaagaactgcaggccctggcctcccctgccaccaggccacctccccagcattccagcccctctggtcgctcctgcccacggagtcgtgggtgtgctgggagctccactctgcttctctgacttctgcctggagacttagggcaccaggggtttctcgcataggacctttccaccacagccagcacctggcatcgcaccattctgactcggtttctccaaactgaagcagcctctccccaggtccagctctggaggggagggggatccgactgctttggacctaaatggcctcatgtggctggaagatctgcgggtggggcttggggctcacacacctgtagcacttactggtaggaccaagcatcttgggggggtggccgctgagtggcagggacaggagtcactttgtttcgtggggaggtctaatctagatatcgacttgtttttgcacatgtttcctctagttctttgttcatagcccagtagaccttgttacttctgaggtaagttaagtaagttgattcggtatccccccatcttgcttccctaatctatggtcgggagacagcatcagggttaagaagactttttttttttttttttaaactaggagaaccaaatctggaagccaaaatgtaggcttagtttgtgtgttgtctcttgagtttgtcgctcatgtgtgcaacagggtatggactatctgtctggtggccccgtttctggtggtctgttggcaggctggccagtccaggctgccgtggggccgccgcctctttcaagcagtcgtgcctgtgtccatgcgctcagggccatgctgaggcctgggccgctgccacgttggagaagcccgtgtgagaagtgaatgctgggactcagccttcagacagagaggactgtagggagggcggcaggggcctggagatcctcctgcagaccacgcccgtcctgcctgtggcgccgtctccaggggctgcttcctcctggaaattgacgaggggtgtcttgggcagagctggctctgagcgcctccatccaaggccaggttctccgttagctcctgtggccccaccctgggccctgggctggaatcaggaatattttccaaagagtgatagtcttttgcttttggcaaaactctacttaatccaatgggtttttccctgtacagtagattttccaaatgtaataaactttaatataaagtagtcctgtgaatgccactgccttcgcttcttgcctctgtgctgtgtgtgacgtgaccggacttttctgcaaacaccaacatgttgggaaacttggctcgaatctctgtgccttcgtctttcccatggggagggattctggttccagggtccctctgtgtatttgcttttttgttttggctgaaattctcctggaggtcggtaggttcagccaaggttttataaggctgatgtcaatttctgtgttgccaagctccaagccccatcttctaaatggcaaaggaaggtggatggccccagcacagcttgacctgaggctgtggtcacagcggaggtgtggagccgaggcctaccccgcagacaccttggacatcctcctcccacccggctgcagaggccagaggcccccagcccagggctcctgcacttacttgcttatttgacaacgtttcagcgactccgttggccactccgagaggtgggccagttctgtggatcagagaatgcaccaccaagccaagggaacctgtgtccggtattcgatactgcgactttctgcctggagtgtatgactgcacatgactcgggggtggggaaaggggtcggctgaccatgctcattttgttggttccctggggagggggcccaagccaaaggctgggttcttttttgtaacccccataaacgggccttgtcctttcgggccaaaaaaaaaaaaaaaaaaaaaaaaaaaaaaaaaaaaaaaaaaaaaaaaa

SEQ ID NO: 5651 - DNA, 3669 bp, Homo sapiens
  misc_feature (3402)..(3405): n is a, c, g, or t
  misc_feature (3407)..(3412): n is a, c, g, or t
  misc_feature (3414)..(3429): n is a, c, g, or t
  misc_feature (3431)..(3437): n is a, c, g, or t
  misc_feature (3440)..(3444): n is a, c, g, or t
  misc_feature (3447)..(3448): n is a, c, g, or t
  misc_feature (3450)..(3463): n is a, c, g, or t
ccacgcgtcgcccacgcgtcgagcgggagccgcgcgggagcagcgcagctacggcggcggcagcggcggcgcggttgcgattccgagccgttgagacgcctctgcggcagctggtggcgcaggtggcttgcgtggacgcgggtagaggcgaccggccagcaaccgcagcgtcggcgcccgcggccccggcagcaggcgcgtcgggacgccccgaggcatcctcccccgcccgcgggcccggtagctgggcccgcgtccgccgcccgcatccccgcgccgccgcatctcctcgccgcctcccgggcttcggacccccggtctcgcccccggaaacatgactcgcgatttcaaacctggagacctcatcttcgccaagatgaaaggttatccccattggccagctcgagtagacgaagttcctgatggagctgtaaagccacccacaaacaaactacccattttcttttttggaactcatgagactgcttttttaggaccaaaggatatatttccttactcagaaaataaggaaaagtatggcaaaccaaataaaagaaaaggttttaatgaaggtttatgggagatagataacaatccaaaagtgaaattttcaagtcaacaggcagcaactaaacaatcaaatgcatcatctgatgttgaagttgaagaaaaggaaactagtgtttcaaaggaagataccgaccatgaagaaaaagccagcaatgaggatgtgactaaagcagttgacataactactccaaaagctgccagaagggggagaaagagaaagcaggggacgaaaaaaatcatagttagaacatgcaggacgtactagaatattatacaaacaaatctaaaagtgagtcctaaaagaggacgacctgcagctacagaagtcaagattccaaaaccaagaggcagacccaaaatggtaaaacagccctgtccttcagagagtgacatcattactgaagaggacaaaagtaagaaaaaggggcaagaggaaaaacaacctaaaaagcagcctaagaaggatgaagagggccagaaggaagaagataagccaagaaaagagccggataaaaaagaggggaagaaagaagttgaatcaaaaaggaaaaatttagctaaaacaggggttacttcaacctccgattctgaagaagaaggagatgatcaagaaggtgaaaagaagagaaaaggtgggaggaactttcagactgctcacagaaggaatatgctgaaaggccaacatgagaaagaagcagcagatcgaaaacgcaagcaagaggaacaaatggaaactgagcagcagaataaagatgaaggaaagaagccagaagttaagaaagtggagaagaagcgagaaacatcaatggattctcgacttcaaaggatacatgctgagattaaaaattcactcaaaattgataatcttgatgtgaacagatgcattgaggccttggatgaacttgcttcacttcaggtcacaatgcaacaagctcagaaacacacagagatgattactacactgaaaaaaatacggcgattcaaagttagtcaggtaatcatggaaaagtctacaatgttgtataacaagtttaagaacatgttcttggttggtgaaggagattccgtgatcacccaagtgctgaataaatctcttgctgaacaaagacagcatgaggaagcgaataaaaccaaagatcaagggaagaaagggccaaacaaaaagctagagaaggaacaaacagggtcaaagactctaaatggaggatctgatgctcaagatggtaatcagccacaacataacggggagagcaatgaagacagcaaagacaaccatgaagccagcacgaagaaaaagccatccagtgaagagagagagactgaaatatctctgaaggattctacactagataactaggttgacatacctggaatatagagaacacttgagaagtttgtaatggttttcatttgaaatagactgctgaaagttttaaatttttataagcataggtttgatgttgaaaacttgttttgagggagaaaatccctttgttttaaagtaaagtaaacattatcgctaagtgtacttgtgcagtattaacagctacattatacagtaaatgtgggataaaatccatttagaaaatgttaaactgcttttccagacatggttgtagcatattttcaattagtgtgtgtatgttaatgtgtaattgatagtagaacaaagttacatttttaaaactgctacttgtataaaccttgcctcttttcccaaatactgtgggttttgtgcatagtttttacaaaccttggatttaccagactgtcttttcactgtttgtgggttttgtagaagttacacatttttatggtagataaaatgttacttctatacaagtactcactccctttttatcaaaagttaattttaatctcacagtctacattgtgctacattatccagcttctttggaacaatgtgtgctctgtatggttttttttggtatgacaactaattaagcaactgacattgaactgagaattctacaaactataaaacattaatttttgaaggtaatttagttttgtggctgggcattcagtgaagtcttaggacttctttgcagacaactgactgggtatatataggaatgaatctggctttagggttaaatcatttaaggtccttttataggcaggcactagtaactaaaactgaaaactaagtaagtttatttttgaggaatgttgttaaaaatgtctttaggaagtcactaaaacttaattggaagaaaaaatcatgatgcttatacaataaatatgaataaatgttatataaggaaactcacctatttgaaatcatggctatattgtttttattttctagattccaaaaatacaaacactagttgttccagcattgtactttgataagtctgtacattgacgtgtatggactaaatccagggtaaaatcaatgttacaaaatttaagggtatgttaactaaaggatagcatttctaagatattttgaatattagggtcatttggcacttctcagcaagtaggatacttctcatgttttgaaattatatgaatatggaaaaaaatggcttaagaccagcgtctctgtatgacattgtgtggttgaccctctgagataactgttttcatctacagaattgcatttttgcttttaaagaggtcttataatggaactaggaatcaccgttttgagagaacctgcatatataccagtcattatctgtttggtccttatacagttttaacttacttagatttattctagttaagccataagttcaacgtgtaaacttgttttcattaaagaatttttctatcaaaaaaaaaaaaaaaaaaaaaaannnngnnnnnncnnnnnnnnnnnnnnnngnnnnnnngcnnnnnccnncnnnnnnnnnnnnnnaaaagggcggccccctccaaaaaaacccctcccggggggccccaaagtttaccccctcacccccactttttttttgaaacaaaaagggggccccctaataaagggggcccgtattttaataaccctaagggcccctgggcccccccttttttttacaaccccctcgtgagaccgggggaaaaaaaaccgtcctaacctttgggggc

SEQ ID NO: 5652 - DNA, 5500 bp, Homo sapiens
  misc_feature (236)..(273): n is a, c, g, or t
  misc_feature (1896)..(1919): n is a, c, g, or t
gccggagccgactcggagcgcgcggcgcggccgggaggagccgagcgcgccgggcgcggcgtgggggcgccggctgccccgcgcgcccagggagcggcaggaatgtgacaatcgcgcgcccgcaccgtagcactcctcgctcggctcctagggctctcgccctctgagctgagccgggttccgcccgggctgggatcccatcaccctccacggccgtccgtccaggtagacgcacnnnnnnnnnnnnnnnnnnnnnnnnnnnnnnnnnnnnnnccttggtaaaagacaaggccttctccaagaagaatatgaaagtgttactcagacttatttgtttcatagctctactgatttcttctctggaggctgataaatgcaaggaacgtgaagaaaaaataattttagtgtcatctgcaaatgaaattgatgttcgtccctgtcctcttaacccaaatgaacacaaaggcactataacttggtataaagatgacagcaagacacctgtatctacagaacaagcctccaggattcatcaacacaaagagaaactttggtttgttcctgctaaggtggaggattcaggacattactattgcgtggtaagaaattcatcttactgcctcagaattaaaataagtgcaaaatttgtggagaatgagcctaacttatgttataatgcacaagccatatttaagcagaaactacccgttgcaggagacggaggacttgtgtgcccttatatggagttttttaaaaatgaaaataatgagttacctaaattacagtggtataaggattgcaaacctctacttcttgacaatatacactttagtggagtcaaagataggctcatcgtgatgaatgtggctgaaaagcatagagggaactatacttgtcatgcatcctacacatacttgggcaagcaatatcctattacccgggtaatagaatttattactctagaggaaaacaaacccacaaggcctgtgattgtgagcccagctaatgagacaatggaagtagacttgggatcccagatacaattgatctgtaatgtcaccggccagttgagtgacattgcttactggaagtggaatgggtcagtaattgatgaagatgacccagtgctaggggaagactattacagtgtggaaaatcctgcaaacaaaagaaggagtaccctcatcacagtgcttaatatatcggaaattgaaagtagattttataaacatccatttacctgttttgccaagaatacacatggtatagatgcagcatatatccagttaatatatccagtcactaatttccagaagcacatgattggtatatgtgtcacgttgacagtcataattgtgtgttctgttttcatctataaaatcttcaagattgacattgtgctttggtacagggattcctgctatgattttctcccaataaaagcttcagatggaaagacctatgacgcatatatactgtatccaaagactgttggggaagggtctacctctgactgtgatatttttgtgtttaaagtcttgcctgaggtcttggaaaaacagtgtggatataagctgttcatttatggaagggatgactacgttggggaagacattgttgaggtcattaatgaaaacgtaaagaaaagcagaagactgattatcattttagtcagagaaacatcaggcttcagctggctgggtggttcatctgaagagcaaatagccatgtataatgctcttgttcaggatggaattaaagttgtcctgcttgagctggagaaaatccaagactatgagaaaatgccagaatcgattaaattcattaagcagaaacatggggctatccgctggtcaggggactttacacagggaccacagtctgcaaagacaaggnnnnnnnnnnnnnnnnnnnnnnnnatgccagtccagcgacggtcaccttcatctaaacaccagttactgtcaccagccactaaggagaaactgcaaagagaggctcacgtgcctctcgggtagcatggagaagttgccaagagttctttaggtgcctcctgtcttatggcgttgcaggccaggttatgcctcatgctgacttgcagagttcatggaatgtaactatatcatcctttatccctgaggtcacctggaatcagattattaagggaataagccatgacgtcaatagcagcccagggcacttcagagtagagggcttgggaagatcttttaaaaaggcagtaggcccggtgtggtggctcacgcctataatcccagcactttgggaggctgaagtgggtggatcaccagaggtcaggagttcgagaccagcccagccaacatggcaaaaccccatctctactaaaaatacaaaaatgagctaggcatggtggcacacgcctgtaatcccagctacacctgaggctgaggcaggagaattgcttgaaccggggagacggaggttgcagtgagccgagtttgggccactgcactctagcctggcaacagagcaagactccgtctcaaaaaaagggcaataaatgccctctctgaatgtttgaactgccaagaaaaggcatggagacagcgaactagaagaaagggcaagaaggaaatagccaccgtctacagatggcttagttaagtcatccacagcccaagggcggggctatgccttgtctggggaccctgtagagtcactgaccctggagcggctctcctgagaggtgctgcaggcaaagtgagactgacacctcactgaggaagggagacatattcttggagaactttccatctgcttgtattttccatacacatccccagccagaagttagtgtccgaagaccgaattttattttacagagcttgaaaactcacttcaatgaacaaagggattctccaggattccaaagttttgaagtcatcttagctttccacaggagggagagaacttaaaaaagcaacagtagcagggaattgatccacttcttaatgctttcctccctggcatgaccatcctgtcctttgttattatcctgcattttacgtctttggaggaacagctccctagtggcttcctccgtctgcaatgtcccttgcacagcccacacatgaaccatccttcccatgatgccgctcttctgtcatcccgctcctgctgaaacacctcccaggggctccacctgttcaggagctgaagcccatgctttcccaccagcatgtcactcccagaccacctccctgccctgtcctccagcttcccctcgctgtcctgctgtgtgaattcccaggttggcctggtggccatgtcgcctgcccccagcactcctctgtctctgctcttgcctcgacccttcctcctcctttgcctaggaggccttctcgcattttctctagctgatcagaattttaccaaaattcagaacatcctccaattccacagtctctgggagactttccctaagaggcgacttcctctccagccttctctctctggtcaggcccactgcagagatggtggtgagcacatctgggaggctggtctccctccagctggaattgctgctctctgagggagaggctgtggtggctgtctctgtccctcactgccttccaggagcaatttgcacatgtaacatagatttatgtaatgctttatgtttaaaaacattccccaattatcttatttaatttttgcaattattctaattttatatatagagaaagtgacctattttttaaaaaaatcacactctaagttctattgaacctaggacttgagcctccatttctggcttctagtctggtgttctgagtacttgatttcaggtcaataacggtcccccctcactccacactggcacgtttgtgagaagaaatgacattttgctaggaagtgaccgagtctaggaatgcttttattcaagacaccaaattccaaacttctaaatgttggaattttcaaaaattgtgtttagattttatgaaaaactcttctactttcatctattctttccctagaggcaaacatttcttaaaatgtttcattttcattaaaaatgaaagccaaatttatatgccaccgattgcaggacacaagcacagttttaagagttgtatgaacatggagaggacttttggtttttatatttctcgtatttaatatgggtgaacaccaacttttatttggaataataattttcctcctaaacaaaaacacattgagtttaagtctctgactcttgcctttccacctgctttctcctgggcccgctttgcctgcttgaaggaacagtgctgttctggagctgctgttccaacagacagggcctagctttcatttgacacacagactacagccagaagcccatggagcagggatgtcacgtcttgaaaagcctattagatgttttacaaatttaattttgcagattattttagtctgtcatccagaaaatgtgtcagcatgcatagtgctaagaaagcaagccaatttggaaacttaggttagtgacaaaattggccagagagtgggggtgatgatgaccaagaattacaagtagaatggcagctggaatttaaggagggacaagaatcaatggataagcgtgggtggaggaagatccaaacagaaaagtgcaaagttattccccatcttccaagggttgaattctggaggaagaagacacattcctagttccccgtgaacttcctttgacttattgtccccactaaaacaaaacaaaaaacttttaatgccttccacattaattagattttcttgcagtttttttatggcatttttttaaagatgccctaagtgttgaagaagagtttgcaaatgcaacaaaatatttaattaccggttgttaaaactggtttagcacaatttatattttccctctcttgcctttcttatttgcaataaaaggtattgagccattttttaaatgacatttttgataaattatgtttgtactagttgatgaaggagttttttttaacctgtttatataattttgcagcagaagccaaattttttgtatattaaagcaccaaattcatgtacagcatgcatcacggatcaatagactgtacttattttccaataaaattttcaaactttgtactgttaaaaaaaaaaaaaaaaaagagacgaaaacgttgtgggagcgcgacaggaaccatcgaaaaaggtttgatagcaccactgcgggggcagcgagggacccacgggagtgcgtgcaccaggggccaagaggcgtctcaaggggaaaccggcgtcacgacatcaaggtcgtggagaatcaccgcacccaaacaaaaaaaaccgccgcggggggacaacagaacggttgaggaacaacaatccccatgaggacggccgggggacactaagggggacatatcaaccgggggggcacaggagaccggaataaaatagccgccgcgtggggggaaagcacgcagaaaagaagtagcgatgagcacgcagacgagat

SEQ ID NO: 5653 - DNA, 3471 bp, Homo sapiens
ggcacgaggggcacattggcggccagggccagtccgcccggcggctcgcgcacggctccgcggtcccttttgcctgtccagccggccgcctgtccctgctccctccctccgtgagtgtccgggttcccttcgcccagctctcccacccctacccgaccccggcgcccgggctcccagagggaactgcacttcggcagagttgaatgaatgaagagagacgcggagaactcctaaggaggagattggacaggctggactccccattgcttttctaaaaatcttggaaactttgtccttcattgaattacgacactgtccacctttaatttcctcgaaaacgcctgtaactcggctgaagccatgccttgtgttcaggcgcagtatgggtcctcgcctcaaggagccagccccgcttctcagagctacagttaccactcttcgggagaatacagctccgatttcttaactccagagtttgtcaagtttagcatggacctcaccaacactgaaatcactgccaccacttctctccccagcttcagtacctttatggacaactacagcacaggctacgacgtcaagccaccttgcttgtaccaaatgcccctgtccggacagcagtcctccattaaggtagaagacattcagatgcacaactaccagcaacacagccacctgcccccccagtctgaggagatgatgccgcactccgggtcggtttactacaagccctcctcgcccccgacgcccaccaccccgggcttccaggtgcagcacagccccatgtgggacgacccgggatctctccacaacttccaccagaactacgtggccactacgcacatgatcgagcagaggaaaacgccagtctcccgcctctccctcttctcctttaagcaatcgccccctggcaccccggtgtctagttggccgaatgccctttcgacgggcccctgcacgtccccatgaacccggagcccgccggcagccaccacgtggtggacgggcagaccttcgctgtgcccaaccccattcgcaagcccgcgtccatgggcttcccgggcctgcagatcggccacgcgtctcagctgctcgacacgcaggtgccctcaccgccgtcgcggggctccccctccaacgaggggctgtgcgctgtgtgtggggacaacgcggcctgccaacactacggcgtgcgcacctgtgagggctgcaaaggcttctttaagcgcacagtgcaaaaaaatgcaaaatacgtgtgtttagcaaataaaaactgcccagtggacaagcgtcgccggaatcgctgtcagtactgccgatttcagaagtgcctggctgttgggatggtcaaagaagtggttcgcacagacagtttaaaaggccggagaggtcgtttgccctcgaaaccgaagagcccacaggagccctctcccccttcgcccccggtgagtctgatcagtgccctcgtcagggcccatgtcgactccaacccggctatgaccagcctggactattccaggttccaggcgaaccctgactatcaaatgagtggagatgacacccagcatatccagcaattctatgatctcctgactggctccatggagatcatccggggctgggcagagaagatccctggcttcgcagacctgcccaaagccgaccaagacctgctttttgaatcagctttcttagaactgtttgtccttcgattagcatacaggtccaacccagtggagggtaaactcatcttttgcaatggggtggtcttgcacaggttgcaatgcgttcgtggctttggggaatggattgattccattgttgaattctcctccaacttgcagaatatgaacatcgacatttctgccttctcctgcattgctgccctggctatggtcacagagagacacgggctcaaggaacccaagagagtggaagaactgcaaaacaagattgtaaattgtctcaaagaccacgtgactttcaacaatggggggttgaaccgccccaattatttgtccaaactgttggggaagctcccagaacttcgtaccctttgcacacaggggctacagcgcattttctacctgaaattggaagacttggtgccaccgccagcaataattgacaaacttttcctggacactttacctttctaagacctcctcccaagcacttcaaaggaactggaatgataatggaaactgtcaagagggggcaagtcacatgggcagagatagccgtgtgagcagtctcagctcaagctgccccccatttctgtaaccctcctagcccccttgatccctaaagaaaacaaacaaacaaacaaaaactgttgctatttcctaacctgcaggcagaacctgaaagggcattttggctccggggcatcctggatttagaacatggactacacacaatacagtggtataaactttttattctcagtttaaaaatcagtttgttgttcagaagaaagattgctataaggtataatgggaaatgtttggccatgcttggttgttgcagttcagacaaatgtaacacacacacacatacacacacacacacacacagagacacatcttaaggggacccacaagtattgccctttaacaagacttcaaagttttctgctgtaaagaaagctgtaatatatagtaaaactaaatgttgcgtgggtggcatgagttgaagaaggcaaaggcttgtaaatttacccaatgcagtttggctttttaaattattttgtgcctatttatgaataaatattacaaattctaaaagataagtgtgtttgcaaaaaaaaagaaaataaatacataaaaaagggacaagcatgttgattctaggttgaaaatgttataggcacttgctacttcagtaatgtctatattatataaatagtatttcagacactatgtagtctgttagattttataaagattggtagttatctgagcttaaacattttctcaattgtaaaataggtgggcacaagtattacacatcagaaaatcctgacaaaagggacacatagtgtttgtaacaccgtccaacattccttgtttgtaagtgttgtattgtccgtgatgttgataaaaagaaagtttatatcttgattattttgttgtctaaagctaaacaaaacttgcatgcagcagcttttgactgtttccagagtgcttataatatacataactccctggaaataactgagcactttgaattttttttatgtctaaaattgtcagttaatttattattttgtttgagtaagaattttaatattgccatattctgtagtatttttctttgtatatttctagtatggcacatgatatgagtcactgcctttttttctatggtgtatgacagttagagatgctgattttttttctgataaattctttctttgagaaagacaattttaatgtttacaacaataaaccatgtaaatgaaaaaaaaaa

SEQ ID NO: 5654 - DNA, 6174 bp, Homo sapiens
  misc_feature (1148)..(1167): n is a, c, g, or t
  misc_feature (1170)..(1170): n is a, c, g, or t
  misc_feature (3150)..(3202): n is a, c, g, or t
  misc_feature (3230)..(3244): n is a, c, g, or t
  misc_feature (3564)..(3580): n is a, c, g, or t
  misc_feature (4197)..(4212): n is a, c, g, or t
gggacctggaagcgccccagccccgcagcgatcgcagattcggctttcaaacaaaagaggcgccccggggggtgggaccgggacctcacccggtcctcgcagagttgcggccgcccgccccttcagccccggctctccgtatgcgcatgagcagaggcgcctccctctgttcctcccaaggctaaactttctaattcccttctttgggctcgggggctcccggagcagggcgagagctcgcgtcgccggaaaggaagacgggaagaaagggcaggcggctcggcgggcgtcttctccactcctctgccgcgtccccgtggctgcagggagccggcatggggcttctccagttgctagctttcagtttcttagccctgtgcagagcccgagtgcgcgctcaggaacccgagttcagctacggctgcgcagaaggcagctgctatcccgccacgggcgaccttctcatcggccgagcacagaagctttcggtgacctcgacgtgcgggctgcacaagcccgaaccctactgtatcgtcagccacttgcaggaggacaaaaaatgcttcatatgcaattcccaagatccttatcatgagaccctgaatcctgacagccatctcattgaaaatgtggtcactacatttgctccaaaccgccttaagatttggtggcaatctgaaaatggtgtggaaaatgtaactatccaactggatttggaagcagaattccattttactcatctcataatgactttcaagacattccgtccagctgctatgctgatagaacgatcgtccgactttgggaaaacctggggtgtgtatagatacttcgcctatgactgtgaggcctcgtttccaggcatttcaactggccccatgaaaaaagtcgatgacataatttgtgattctcgatattctgacattgaaccctcaactgaaggagaggtgatatttcgtgctttagatcctgctttcaaaatagaagatccttatagcccaaggatacagaatttattaaaaattaccaacttgagaatcaagtttgtgaaactgcatactttgggagataaccttctggattccaggatggaaatcagagaaaagtattattatgcagtttatgatatggtggttcgaggaaattgnnnnnnnnnnnnnnnnnnnnggngaatgtgcccctgtggatggattcaatgaagaagtggaaggaatggttcacggacactgcatgtgcaggcataacaccaagggcttaaactgtgaactctgcatggatttctaccatgatttaccttggagacctgctgaaggccgaaacagcaacgcctgtaaaaaatgtaactgcaatgaacattccatctcttgtcactttgacatggctgtttacctggccacggggaacgtcagcggaggcgtgtgtgatgactgtcagcacaacaccatggggcgcaactgtgagcagtgcaagccgttttactaccagcacccagagagggacatccgagatcctaatttctgtgaacgatgtacgtgtgacccagctggctctcaaaatgagggaatttgtgacagctatactgatttttctactggtctcattgctggccagtgtcggtgtaaattaaatgtggaaggagaacattgtgatgtttgcaaagaaggcttctatgatttaagcagtgaagatccatttggttgtaaatcttgtgcttgcaatcctctgggaacaattcctggagggaatccttgtgattccgagacaggtcactgctactgcaagcgtctggtgacaggacagcattgtgaccagtgcctgccagagcactggggcttaagcaatgatttggatggatgtcgaccatgtgactgtgaccttgggggagccttaaacaacagttgctttgcggagtcaggccagtgctcatgccggcctcacatgattggacgtcagtgcaacgaagtggaacctggttactactttgccaccctggatcactacctctatgaagcggaggaagccaacttggggcctggggttagcatagtggagcggcaatatatccaggaccggattccctcctggactggagccggcttcgtccgagtgcctgaaggggcttatttggagtttttcattgacaacataccatattccatggagtacgacatcctaattcgctacgagccacagctacccgaccactgggaaaaagctgtcatcacagtgcagcgacctggaaggattccaaccagcagccgatgtggtaataccatccccgatgatgacaaccaggtggtgtcattatcaccaggctcaagatatgtcgtccttcctcggccggtgtgctttgagaagggaacaaactacacggtgaggttggagctgcctcagtacacctcctctgatagcgacgtggagagcccctacacgctgatcgattctcttgttctcatgccatactgtaaatcactggacatcttcaccgtgggaggttcaggagatggggtggtcaccaacagtgcctgggaaacctttcagagataccgatgtctagagaacagcagaagcgttgtgaaaacaccgatgacagatgtttgcagaaacatcatctttagcatttctgccctgttacaccagacaggcctggcttgtgaatgcgaccctcagggttcgttaagttccgtgtgtgatcccaacggaggccagtgccagtgccggcccaacgtggttggaagaacctgcaacagatgtgcacctggaacttttggctttggccccagtggatgcaaaccttgtgagtgccatctgcaaggatctgtcaatgccttctgcaatcccgtcactggccagtgccactgtttccagggagtgtatgctcggcagtgtgatcggtgcttacctgggcactggggctttccaagttgccagccctgccagtgcaatggccacgccgatgactgcgacccagtgactggggagtgcttgaactgccaggactacaccatgggtcataactgtgaaaggtgcttggctggttactatggcgaccccatcattgggtcaggtgatcactgccgcccttgcccttgcccagatggtcccgacagtggacgccagtttgccaggagctgctaccaagatcctgtnnnnnnnnnnnnnnnnnnnnnnnnnnnnnnnnnnnnnnnnnnnnnnnnnnnnnacgactgtgcctcaggatactttggcannnnnnnnnnnnnnngggggtcgtgtcagccttgccagtgtcacaacaacattgacacgacagacccagaagcctgtgacaaggagactgggaggtgtctcaagtgcctgtaccacacggaaggggaacactgtcagttctgccggtttggatactatggtgatgccctccggcaggactgtcgaaagtgtgtctgtaattacctgggcaccgtgcaagagcactgtaacggctctgactgccagtgcgacaaagccactggtcagtgcttgtgtcttcctaatgtgatcgggcagaactgtgaccgctgtgcgcccaatacctggcagctggcnnnnnnnnnnnnnnnnntgacccatgcaactgcaatgctgctcattccttcgggccatcttgcaatgagttcacggggcagtgccagtgcatgcctgggtttggaggccgcacctgcagcgagtgccaggaactcttctggggagaccccgacgtggagtgccgagcctgtgactgtgaccccaggggcattgagacgccacagtgtgaccagtccacgggccagtgtgtctgcgttgagggtgttgagggtccacgctgtgacaagtgcacgcgagggtactcgggggtcttccctgactgcacaccctgccaccagtgctttgctctctgggatgtgatcattgccgagctgaccaacaggacacacagattcctggagaaagccaaggccttgaagatcagtggtgtgatcgggccttaccgtgagactgtggactcggtggagaggaaagtcagcgagataaaagacatcctggcgcagagccccgcagcagagccactgaaaaacattgggaatctctttgaggaagcagagaaactgattaaagatgttacagaaatgatggctcaagtagaagtgaaattatctgacacaacttcccaaagcaacagcacagccaaagaactggatnnnnnnnnnnnnnnnngccgaaagcctagacaacactgtgaaagaacttgctgaacaactggaatttatcaaaaactcagatattcggggtgccttggatagcattaccaagtatttccagatgtctcttgaggcagaggagagggtgaatgcctccaccacagaacccaacagcactgtggagcagtcagccctcatgagagacagagtagaagacgtgatgatggagcgagaatcccagttcaaggaaaaacaagaggagcaggctcgcctccttgatgaactggcaggcaagctacaaagcctagacctttcagccgctgccgaaatgacctgtggaacacccccaggggcctcctgttccgagactgaatgtggcgggccaaactgcagaactgacgaaggagagaggaagtgtggggggcctggctgtggtggtctggttactgttgcacacaacgcctggcagaaagccatggacttggaccaagatgtcctgagtgccctggctgaagtggaacagctctccaagatggtctctgaagcaaaactgagggcagatgaggcaaaacaaagtgctgaagacattctgttgaagacaaatgctaccaaagaaaaaatggacaagagcaatgaggagctgagaaatctaatcaagcaaatcagaaactttttgacccaggatagtgctgatttggacagcattgaagcagttgctaatgaagtattgaaaatggagatgcctagcaccccacagcagttacagaacttgacagaagatatacgtgaacgagttgaaagcctttctcaagtagaggttattcttcagcatagtgctgctgacattgccagagctgagatgttgttagaagaagctaaaagagcaagcaaaagtgcaacagatgttaaagtcactgcagatatggtaaaggaagctctggaagaagcagaaaaggcccaggtcgcagcagagaaggcaattaaacaagcagatgaagacattcaaggaacccagaacctgttaacttcgattgagtctgaaacagcagcttctgaggaaaccttgttcaacgcgtcccagcgcatcagcgagttagagaggaatgtggaagaacttaagcggaaagctgcccaaaactccggggaggcagaatatattgaaaaagtagtatatactgtgaagcaaagtgcagaagatgttaagaagactttagatggtgaacttgatgaaaagtataaaaaagtagaaaatttaattgccaaaaaaactgaagagtcagctgatgccagaaggaaagccgaaatgctacaaaatgaagcaaaaactcttttagctcaagcaaatagcaagctgcaactgctcaaagatttagaaagaaaatatgaagacaatcaaagatacttagaagataaagctcaagaattagcaagactggaaggagaagtccgttcactcctaaaggatataagccagaaagttgctgtgtatagcacatgcttgtaacagaggagaataaaaaatggctgaggtgaacaaggtaaaacaactacattttaaaaactgacttaatgctcttcaaaataaaacatcacctatttaatgtttttaatcacattttgtatggagttaaataaagtacagtgcttttgtataaaaaaaaaaaaaaaaaaaaataactctcaacggaagcaaaacaacactcttcccggccaatcaacagtacacaataacaagaacacagttgtggtcgcgggccctagtcgcgcctcgagaaaaaggttttctcaacaaccacgtggtcgtgggggggcgcggcgccgcctagggaatgatgaacacctgggcccaacaggtgctgccagaggaacctcgggccaagacaggggcggcgggtccccccaaaaaaaaaaagcggcggggcacggcgcgttctcgacagcaaacccagaggggtctcggagcgacacagcggttcac

SEQ ID NO: 5655 - DNA, 2905 bp, Homo sapiens
  misc_feature (771)..(789): n is a, c, g, or t
cagacttatcctcagctcaagcgagtttggggcgttatggagccagccaagtctccccttgctggcgtgggtacttgtgcagaaacttcccgaggtgcttctgagactgcacagtgaagaccgccgcaccggaggtcagcgctccgccgcggactcccggctgactctgccactctcccaggaggaggcgctgtgcacctctgggtggtttccagggctcggctggcggtagagggagccttgaggttggaaaagatctagagctataatctccgaaaggaagatttgtaatgcactgcgagttagaaatgtttttctcactgcagcttccttgtttcaaaaagagaatttttgacagcactgcaaaggcacaagaaaccaggcacagtataaaatatacaaataaaacaggtaccaaggaacttaaaacattcaacccataacgtcgtctaggtttttctgctttaagaaaattgactcaattcttccaagagaataaccctattaaaggtcaaattcctggaaatatctggagggtaagaaccagtgaatggaaagagatggttaatgctttgcagtgaaggaaaagtgactcgcatcagtagattactatgaagctgcaagaggtcctattcactggaaggaatttttccctattgctgatggtgatcagcaatctccaattgagattaaaaccaaagaagtgaaatatgactcttccctccgaccacttagtatcaagtatgacccaagctcagctaaaatcatcannnnnnnnnnnnnnnnnnncaatgttgactttgatgacacagagaacaaatcagttctgcgtggtggtcctctcactggaagctacaggttacggcaggttcaccttcactgggggtccgctgatgaccacggctccgagcacatagtagatggagtgagctatgctgcagagctccatgttgttcactggaattcagacaaataccccagctttgttgaggcagctcatgaaccagatggactggctgtcttgggagtgtttttacaggtgtgcccctttgtcacaccccatactctccatgtgttgtaactcatgaacagagaatgcttcacggatggcaacaattccttgcctttggacaccaagtaggggtggttgcggcaggatccgggtgctttaaaaccttcagattggtgaacctaattcccaactgcaaaagattactgacactttggattccattaaagaaaagggtaaacaaactcgattcacaaattttgacctattgtctctgcttccaccatcctgggactactggacatatcctggttctcttacagttccacctcttcttgagagtgtcacatggattgttttaaagcaacctataaacatcagctctcaacaggtcctgaccactggcatgaacttttcccagtgctgagaacgagcccccagtgcctcttgtgagcaactggcgacctccacagcctatcaataacagggtggtgagagcttccttcaaatgaggctgctggatcttgccctcttcaggaaaggaaacctaccattggagagcttggttccttgcctccttctggtgctcttactccaagtctatttcatttttccacactgagcaatgaatgtgagagatgtggtcaccaagatctaagttacttgttgaaagaaagttactttcgacaagatctaatatgaaagcatagatttcacatttgatctctgtaataattatctttcctataaaagtagcatttttggtaaagtttcaaagaagaagaaacagagatggaagagtaaagatatttttaaaatggctagctattgggcaccagtttttctgttatctaaaatttcacacaacttcattgtttttatttttatattatgagttgtccatcttaaagaaatatgagtaattctacatgtagtagaggtgtatgaagatcatataacaattaaacataagccagaaattaaaatgactatagacagcaagaattgagctaataatatgttttaactcttaacaccagcaagaagtcagtcatttattgaagttttagctactaagattacttggttttgattaccagtgaaaagaaaacacaatacaatcaggagttttcaaatttttgattcagtatttgaatttcttcttcataaatgtagttgaatttatcctagtatttttctttacctgaagtagggccatttatttttaatttcactacatttttctttgcatgattattaaaataaaaactgcctctgttgtgtttctcactggaggctggaatgaatgatcactagaacacaaaagagtgaatgatgacacttgaagtcaaagcagttgtactgatcaccagaaccaataaagacataaatggaaaaaaaaaaaaaaaaaaaacacaaaaacaaagaaacaaataaacgcgcgggacatcaccataaacaaccgtccacaacaacacaaactgttcgggcggccacaccctccccccaaaaagatctttcaaaccacaccattctgtgggcggcgcgacgcccccctatagcacgagacatccaggccccacccttgcgccccacccaaccccgcgtgggccacaacacggccggatgcacccaaaaataaaccgccggggacacacaggtgctgtaacacaaccccaagagtggcgcgagccacggggctaataaagggccgcgcggctaataaaccccgcgcagtaaccactacgagacacaggactacctcaaccccacaccaacaggacacatcacaccacagaacgacaaacaccgcggcacacgacccaccgaccagcaacccacacacatcagcacaaactaaccacgcgatacaccacacaacgacaagcccatccc

SEQ ID NO: 5656 - DNA, 5450 bp, Homo sapiens
  misc_feature (271)..(307): n is a, c, g, or t
  misc_feature (905)..(966): n is a, c, g, or t
  misc_feature (1394)..(1410): n is a, c, g, or t
acctcgcactctcagtttcaccgctcgatcttgggacccaccgctgccctcagctccgagtccagggcgagtgcagagcacagcgggcggaggaccccgggcgcgggcgcggacggcacgcggggcatgaacctggagggcggcggccgaggcggagagttcggcatgagcgcggtgagctgcggcaacgggaagctccgccagtggctgatcgaccagatcgacagcggcaagtaccccgggctggtgtgggagaacgaggagaagagcnnnnnnnnnnnnnnnnnnnnnnnnnnnnnnnnnnnnnactacaaccgcgaggaggacgccgcgctcttcaaggcttgggcactgtttaaaggaaagttccgagaaggcatcgacaagccggaccctcccacctggaagacgcgcctgcggtgcgctttgaacaagagcaatgactttgaggaactggttgagcggagccagctggacatctcagacccgtacaaagtgtacaggattgttcctgagggagccaaaaaaggagccaagcagctcaccctggaggacccgcagatgtccatgagccacccctacaccatgacaacgccttacccttcgctcccagcccagcaggttcacaactacatgatgccacccctcgaccgaagctggagggactacgtcccggatcagccacacccggaaatcccgtaccaatgtcccatgacgtttggaccccgcggccaccactggcaaggcccagcttgtgaaaatggttgccaggtgacaggaaccttttatgcttgtgccccacctgagtcccaggctcccggagtccccacagagccaagcataaggtctgccgaagccttggcgttctcagactgccggctgcacatctgcctgtactaccgggnnnnnnnnnnnnnnnnnnnnnnnnnnnnnnnnnnnnnnnnnnnnnnnnnnnnnnnnnnnnnnacgtatgacgccagcaacctggaccaggtcctgttcccctacccagaggacaatggccacaggaaaaacattgagaacctgctgagccacctggagaggggcgtggtcctctggatggcccccgacgggctctatgcgaaaagactgtgccagagcacgatctactgggacgggcccctggcgctgtgcaacgaccggcccaacaaactggagagagaccagacctgcaagctctttgacacacagcagttcttgtcagagctgcaagcgtttgctcaccacggccgctccctgccaagattccaggtgactctatgctttggagaggagtttccagaccctcagaggcaaagaaagctcatcacagctcacgtagaacctctgctagccagacaactatattattttgctcaacaaaacagtggacnnnnnnnnnnnnnnnnngatttaccagaacacatcagcaatccagaagattaccacagatctatccgccattcctctattcaagaatgaaaaatgtcaagatgagtggttttctttttccttttttttttttttttttttgatacggagatacggggtcttgctctgtctcccaggctggagtgcagtgacacaatctcagctcactgtgacctccgcctcctgggttcaagagactctcctgcctcagcctccctggtagctgggattacaggtgtgagccactgcacccacccaagacaagtgattttcattgtaaatatttgactttagtgaaagcgtccaattgactgccctcttactgttttgaggaactcagaagtggagatttcagttcagcggttgaggagaattgcggcgagacaagcatggaaaatcagtgacatctgattggcagatgagcttatttcaaaaggaagggtggctttgcattttcttgtgttctgtagactgccatcattgatgatcactgtgaaaattgaccaagtgatgtgtttacatttactgaaatgcgctctttaatttgttgtagattaggtcttgctggaagacagagaaaacttgcctttcagtattgacactgactagagtgatgactgcttgtaggtatgtctgtgccatttctcagggaagtaagatgtaaattgaagaagcctcacacgtaaaagaaatgtattaatgtatgtaggagctgcagttcttgtggaagacacttgctgagtgaaggaaatgaatctttgactgaagccgtgcctgtagccttggggaggcccatcccccacctgccagcggtttcctggtgtgggtccctctgccccaccctccttcccattggctttctctccttggcctttcctggaagccagttagtaaacttcctattttcttgagtcaaaaaacatgagcgctactcttggatgggacatttttgtctgtcctacaatctagtaatgtctaagtaatggttaagttttcttgtttctgcatctttttgaccctcattctttagagatgctaaaattcttcgcataaagaagaagaaattaaggaacataaatcttaatacttgaactgttgcccttctgtccaagtacttaactatctgttcccttcctctgtgccacgctcctctgtttgtttggctgtccagcgatcagccatggcgacactaaaggaggaggagccggggactcccaggctggagagcactgccaggacccaccactggaagcaggatggagctgactacggaactgcacactcagtgggctgtttctgcttatttcatctgttctatgcttcctcgtgccaattatagtttgacagggccttaaaattacttggctttttccaaatgcttctatttatagaaatcccaaagacctccacttgcttaagtatacctatcacttacatttttgtggttttgagaaagtacagcagtagactggggcgtcacctccaggccgtttctcatactacaggatatttactattactcccaggattcagcagaagattgcgttagctctcaaatgtgtgttcctgcttttctaatggatattttaaattcattcaacaagcacctagtaagtgcctgctgtatccctacattacacagttcagcctttatcaagcttagtgagcagtgagcactgaaacattattttttaatgtttaaaaagtttctaatattaaagtcagaatattaatacaattaatattaatattaactacagaaaagacaaacagtagagaacagcaaaaaaataaaaaggatctccttttttcccagcccaaattctcctctctaaaagtgtccacaagaaggggtgtttattcttccaacacatttcacttttctgtaaatatacataaacttaaaaagaaaacctcatggagtcatcttgcacacacttttcatgcagtgctctttgtagctaaacagtgaagatttacctcgttctgctcagaggccttgctgtggagctccactgccatgtacccagtagggtttgacatttcattagccatgcaacatggatatgtattgggcagcagactgtgtttcgtgaactgcagtgatgtatacatcttatagatgcaaagtattttggggtatattatcctaagggaagataaagatgatattaagaactgctgtttcacggggcccttacctgtgaccctctttgctgaagaatatttaaccccacacagcacttcaaagaagctgtcttggaagtctgtctcaggagcaccctgtcttcttaattctccaagcggatgctccatttcaattgctttgtgacttcttcttctttgtttttttaaatattatgctgctttaacagtggagctgaattttctggaaaatgcttcttggctggggccactacctcctttcctatctttacatctatgtgtatgttgactttttaaaattctgagtgatccagggtatgacctagggaatgaactagctatggaaataactcagggttaggaatcctagcacttgtctcaggactctgaaaaggaacggcttcctcattccttgtcttgataaagtggaattggcaaactagaatttagtttgtactcagtggacagtgctgttgaagatttgaggacttgttaaagagcactgggtcatatggaaaaaatgtatgtgtctccccaggtgcattttcttggtttatgtcttgttcttgagattttgtatatttaggaaaacctcaagcagtaattaatatctcctggaacactatagagaaccaagtgaccgactcatttacaactgaaacctaggaagcccctgagtcctgagcgaaaacaggagagttagtcgccctacagaaaacccagctagactattgggtatgaactaaaaagagactgtgccatggtgagaaaaatgtaaaatcctacagtggaatgagcagcccttacagtgttgttaccaccaagggcaggtaggtattagtgtttgaaaaagctggtctttgagcgagggcataaatacagctagccccaggggtggaacaactgtgggagtcttgggtactcgcacctcttggctttgttgatgctccgccaggaaggccacttgtgtgtgcgtgtcagttacttttttagtaacaattcagatccagtgtaaacttccgttcattgctctccagtcacatgcccccacttccccacaggtgaaagtttttctgaagtgttgggattggttaaggtctttatttgtattacgtatctccccaagtcctctgtggccagctgcatctgtctgaatggtgcgtgaaggctctcagaccttacacaccattttgtaagttatgttttacatgccccgtttttgagactgatctcgatgcaggtggatctccttgagatcctgatagcctgttacaggaatgaagtaaaggtcagttttttttgtattgattttcacagctttgaggaacatgcataagaaatgtagctgaagtagaggggacgtgagagaagggccaggccggcaggccaaccctcctccaatggaaattcccgtgttgcttcaaactgagacagatgggacttaacaggcaatggggtccacttccccctcttcagcatcccccgtaccccactttctgctgaaagaactgccagcaggtaggaccccagaggcccccaaatgaaagcttgaatttcccctactggctctgcgttttgctgagatctgtaggaaaggatgcttcacaaactgaggtagataatgctatgctgtcgttggtatacatcatgaatttttatgtaaattgctctgcaaagcaaattgatatgtttgataaatttatgtttttaggtaaataaaaacttttaaaaagttgttaaaaaaaaaaaaaaaaaactccgaggaatcctatttccgggggcgggaaaaaaaaagtaatggaatggggcattgggtccataactgggtttcctgaacccagcttttcttggag

SEQ ID NO: 5657 - DNA, 1315 bp, Homo sapiens
  misc_feature (1193)..(1194): n is a, c, g, or t
  misc_feature (1202)..(1202): n is a, c, g, or t
  misc_feature (1206)..(1207): n is a, c, g, or t
  misc_feature (1220)..(1220): n is a, c, g, or t
  misc_feature (1230)..(1230): n is a, c, g, or t
  misc_feature (1233)..(1233): n is a, c, g, or t
  misc_feature (1265)..(1265): n is a, c, g, or t
aagagagagatgtacaagagaagagatgatctgtgtatgtgtctgtattcatggcccccttggttttgaccattaaaatagcactggagactgagagaccacctcaggtagaggtccacgtttggactattcgaaagggcattctccagcacttccatattgagaagatctccaagaggatgtttgaggagcttcctcacttcaagctggtgaccagaacaaccctgagccagtggaagatcttcaccgaaggagaagctcagatcagccagatgtgttcaagtcgtgtatgcagaacagagcttgaagatttagtcaaggttttgtacctggagagatctgaaaagggccactgttaggcaagacagacagtattggatagggtaaagcaagaaaactcaagctgcagctggactgcaggcttattttgcttaagtcaacagtgccctaaaactccaaactcaaatgcagtcaattattcacgccatgcacagcataatttgctcctttgtgtgtgtgtgtgtgtgtgtgtgtgtgtgtgtggtaaaggggggaaggtgttatgcggctgctccctccgtcccagaggtggcagtgattccataatgtggagactagtaactagatcctaaggcaaagaggtgtttctccttctggatgattcatcccaaagccttcccacccaggtgttctctgaaagcttagccttaagagaacacgcagagagtttccctagatatactcctgcctccaggtgctgggacacacctttgcaaaatgctgtgggaagcaggagctggggagctgtgttaagtcaaagtagaaaccctccagtgtttggtgttgtgtagagaataggacatagggtaaagaggccaagctgcctgtagttagtagagaagaatggatgtggttcttcttgtgtatttatttgtatcataaacacttggaacaacaaagaccataagcatcatttagcagttgtagccattttctagttaactcatgtaaacaagtaagagtaacataacagtattaccctttcactgttctcacaggacatgtacctaattatggtacttatttatgtagtcactgtatttctggatttttaaattaataaaaaagttaattttgaaaaatcaaaaaaaaaaaaaaaaaaaaaaaaaaaaacgaatataaaaaaaatagtnnaaaaaaanaaannaaatttttggggncttttaaaantantaactaatttttttttttttttttttacaccntattacaatttaatattccagtttttccccaattattcccctttggaacc

SEQ ID NO: 5658 - DNA, 2845 bp, Homo sapiens
agatcaggcatgccgcttaataccatcacatgatcctccccgaggccctgtatttaattaaaatagagagggaggcaccacagatgccagaagaacactgttgctcttggtggacgggcccagaggaattcagagttaaaccttgagtgcctgcgtccgtgagaattcagcatggaatgtctctactatttcctgggatttctgctcctggctgcaagattgccacttgatgccgccaaacgatttcatgatgtgctgggcaatgaaagaccttctgcttacatgagggagcacaatcaattaaatggctggtcttctgatgaaaatgactggaatgaaaaactctacccagtgtggaagcggggagacatgaggtggaaaaactcctggaagggaggccgtgtgcaggcggtcctgaccagtgactcaccagccctcgtgggctcaaatataacatttgcggtgaacctgatattccctagatgccaaaaggaagatgccaatggcaacatagtctatgagaagaactgcagaaatgaggctggtttatctgctgatccatatgtttacaactggacagcatggtcagaggacagtgacggggaaaatggcaccggccaaagccatcataacgtcttccctgatgggaaaccttttcctcaccaccccggatggagaagatggaatttcatctacgtcttccacacacttggtcagtatttccagaaattgggacgatgttcagtgagagtttctgtgaacacagccaatgtgacacttgggcctcaactcatggaagtgactgtctacagaagacatggacgggcatatgttcccatcgcacaagtgaaagatgtgtacgtggtaacagatcagattcctgtgtttgtgactatgttccagaagaacgatcgaaattcatccgacgaaaccttcctcaaagatctccccattatgtttgatgtcctgattcatgatcctagccacttcctcaattattctaccattaactacaagtggagcttcggggataatactggcctgtttgtttccaccaatcatactgtgaatcacacgtatgtgctcaatggaaccttcagccttaacctcactgtgaaagctgcagcaccaggaccttgtccgccaccgccaccaccacccagaccttcaaaacccaccccttctttaggacctgctggtgacaaccccctggagctgagtaggattcctgatgaaaactgccagattaacagatatggccactttcaagccaccatcacaattgtagagggaatcttagaggttaacatcatccagatgacagacgtcctgatgccggtgccatggcctgaaagctccctaatagactttgtcgtgacctgccaagggagcattcccacggaggtctgtaccatcatttctgaccccacctgcgagatcacccagaacacagtctgcagccctgtggatgtggatgagatgtgtctgctgactgtgagacgaaccttcaatgggtctgggacgtactgtgtgaacctcaccctgggggatgacacaagcctggctctcacgagcaccctgatttctgttcctgacagagacccagcctcgcctttaaggatggcaaacagtgccctgatctccgttggctgcttggccatatttgtcactgtgatctccctcttggtgtacaaaaaacacaaggaatacaacccaatagaaaatagtcctgggaatgtggtcagaagcaaaggcctgagtgtctttctcaaccgtgcaaaagccgtgttcttcccgggaaaccaggaaaaggatccgctactcaaaaaccaagaatttaaaggagtttcttaaatttcgaccttgtttctgaagctcacttttcagtgccattgatgtgagatgtgctggagtggctattaacctttttttcctaaagattattgttaaatagatattgtggtttggggaagttgaattttttataggttaaatgtcattttagagatggggagagggattatactgcaggcagcttcagccatgttgtgaaactgataaaagcaacttagcaaggcttcttttcattattttttatgtttcacttataaagtcttaggtaactagtaggatagaaacactgtgtcccgagagtaaggagagaagctactattgattagagcctaacccaggttaactgcaagaagaggcgggatactttcagctttccatgtaactgtatgcataaagccaatgtagtccagtttctaagatcatgttccaagctaactgaatcccacttcaatacacactcatgaactcctgatggaacaataacaggcccaagcctgtggtatgatgtgcacacttgctagactcagaaaaaatactactctcataaatgggtgggagtattttggtgacaacctactttgcttggctgagtgaaggaatgatattcatatattcatttattccatggacatttagttagtgctttttatataccaggcatgatgctgagtgacactcttgtgtatatttccaaatttttgtacagtcgctgcacatatttgaaatcatatattaagactttccaaagatgaggtccctggtttttcatggcaacttgatcagtaaggatttcacctctgtttgtaactaaaaccatctactatatgttagacatgacattctttttctctccttcctgaaaaataaagtgtgggaagagacaaaaaaaaaaaaaaaaaaaaaaaaaaaaaaaaaaaaaaaaaaaaaaaaaaaaaaaaaaaaaaaaaaaaaaaaaaaaaaaaaaaaaaaaaaaaaaaaaaaaaaaaaaaaa

SEQ ID NO: 5659 - DNA, 3750 bp, Homo sapiens
  misc_feature (253)..(267): n is a, c, g, or t
  misc_feature (683)..(700): n is a, c, g, or t
gccctctgggaccagcgctgtgccactaatgcctctctctctcccagcaggcactgggaaaaccccttatcagttcaccaccttgggacaggccactgcagagttttccaaaccactgggtcgcagtgggctgtctaaaaataatcccggtatctgcccattttccatccctccccttttctctcccacagcggggcaggtgggacatggggggctctctgccacttctagggtgtgccagtcccttctcccnnnnnnnnnnnnnnnagggatgcatgccccacctgccaccccagcacactctctatctggacttctgcctgctgcacaaggcgggtgtcttgggccaccctgaccccacccctgtttccattctcccctctctcatggctggcatgggattttctttctgggaactgagagatgaggcctgaattacccctcttaatctccactcaggatccctggaacccccctttccaaggctgctcccaccctcagatgcaggaagagacccaggttctttgctctgtctcctccccctcctccttgctcagtgccaacctgggaagggccaacccaactggcagcctggcagtgctcatcatgagcctgacctgctcatcctcgcttagagcagggcaggagaggggctttcccgagacagaccgcatgcagcctcnnnnnnnnnnnnnnnnnnggcccaggacagaccctgcttatttcttgagggcctcagcatccaggtcatggcctgtgtcttcccaggcgtccctgcaggctgatggctgacactgagagtgccttcactgtgctgtgaaccagagctcctttcaggtctgtctgggctgaggcgcagggagtcaaggcggccccgtcttagactagcatctttgcaaccaagctcagagagcgcacctgctccaggcctcttgggcttgccatcctaaccctgggtggcggccacaatgacagattcctgcacctctctaggccctagtctctggctagtgaaacaggggaggggccacaaagccagggagaaaaaaacatgaatttgggttttggatttccggcactctgtcccccgcctgcctgcggtgctccccagcacctggtttgctgcttatgagctgtgcaactcaggcagactgctgagctcatagatacggggccaggctcagtgaggagacatctacaaagtcccttccacagtgcttggcacaagtggggctccgtgaatgggaagcatcgtccaaacagcacaggggagtccaagtgagcgcctcctgccgggaaactctggcaggccatgcttatgcgtggcgctcctgggctctgggaaggggagggcccgtggtgtaaacctccggggtgggtgagtggaaatccctgcagagcagtgtgatgctgcgctggatgtgggggcaacactcccctgctgcctggtccagcccacctggccggctcctcctccttctgtctgctttgctgcctcctccctttggccagcctccccaggattttcggttgcggcaccctggctgctgcacgcgtgttcagacggctgcatttggtaatgggctggatgatgcttggtggtcactttggagaaggcagctgtgctgctctgggcccgggcacccctggccaccagcgctgctccctttgacctgaatctcttgtcttcccaggctatccctccctcatgcggagccaaagccccaaggcccagccccagacttggaaatctggcaagcagactatgctgtctcactaccggccattctacgtcaacaaaggcaacgggattgggtccaacgaagccccatgagctcctggcggaaggaacgaggcgccacacccctgctcttcctcctgaccctgctgctcttgccttctaagctactgtgcttgtctgggtgggagggagcctggtcctgcacctgccctctgcagccctctgccagcctcttgggggcagttccggcctctccgacttccccactggccacactccattcagactcctttcctgccttgtgacctcagatggtcaccatcattcctgtgctcagaggccaacccatcacaggggtgagataggttggggcctgccctaacccgccagcctcctcctctcgggctggatctgggggctagcagtgagtacccgcatggtatcagcctgcctctcccgcccacgccctgctgtctccaggcctatagacgtttctctccaaggccctatcccccaatgttgtcagcagatgcctggacagcacagccacccatctcccattcacatggcccacctcctgcttcccagaggactggccctacgtgctctctctcgtcctacctatcaatgcccagcatggcagaacctgcagcccttggccactgcagatggaaacctctcagtgtcttgacatcaccctacccaggcggtgggtctccaccacagccactttgagtctgtggtccctggagggtggcttctcctgactggcaggatgaccttagccaagatattcctctgttccctctgctgagataaagaattcccttaacatgatataatccacccatgcaaatagctactggcccagctaccatttaccatttgcctacagaatttcattcagtctacactttggcattctctctggcgatggagtgtggctgggctgaccgcaaaaggtgccttacacactgcccccaccctcagccgttgccccatcagaggctgcctcctccttctgattaccccccatgttgcatatcagggtgctcaaggattggagaggagacaaaaccaggagcagcacagtggggacatctcccgtctcaacagccccaggcctatgggggctctggaaggatgggccagcttgcaggggttggggagggagacatccagcttgggctttcccctttggaataaaccattggtctgtcaaaaaaaaaaaaaaaaaaaaaaaaaaaaaaaaaaaaaaaaaaagcgatgacgaaggaaagaaaaaaatactcacatggaagagaaaacagaaagaaaatgagaatacaggaaggatatagtagcaaaagagggggctcccatgagtggaggctatgataattaataggagagacattgcggcgtggttttaaaagacagttgtagtagggagacaaagttggaactggtggagggtaatgttttgtggaaaaaggggagcgcccatttgactttcgtgggggagtgaggacagaacaaattggggagaagatactatatcctaaaacgagagagagagtttaagacgccttgaagaaggggagaaaatcatataaaacattgttgtaagcagggggtgagaaaaatgggttggtaaaaaacaacagagtggacatatgttgtttagagtgagagatgggcgacgaaaaagcagtggggcgccaacacgaagggacgcaaaagtgagcacgtgcaggaggaaacagatattgtgtacacccccaggggagagcgcattcggctactagacgggggaaagacacaatgcggtatatgatattgagagtaaatatcgcaaagaaatagattaaaataacgatacgagggaggacagacatgataaaaatacaaaataggtaagagaagagaaacataagtgtgcaagaaagaggactaggagcacgaagagtacagggataggagaaaaaaaggagagtaacaacaggtagaaaaaaacaacaaacaaagaa

SEQ ID NO: 5660 - DNA, 4835 bp, Homo sapiens
  misc_feature (793)..(819): n is a, c, g, or t
  misc_feature (2992)..(3009): n is a, c, g, or t
cgagactcagccagaggagtacggattaaggggccgaagaaagaggagtgaggcaggggagcgaggcggacgctccgagcgcatcggactcacctgggccggcggcgagcggcgagtacgagtggactcttgccctccgcagcatgcgccccgcctgctaagtcgccgccgtctcgccctcacctagcaccgccaatcccgcctggatggagtcccctctagggttcccattggctcctgtgagtgcttgggtgttcgggagcctgtttttggcggaggggaaccaacttttgaagttcgcccagaagactgcgttccagccccagttccccggcagcgggacccggcgaagacgcgaccgcggcgcgagtcaccatgggaagcaaaggtgtctaccagtaccactggcaaagccacaatgtcaagcacagtggtgtggacgacatggtgctactgtccaagatcacagagaactccatcgtggagaatctgaagaagagatacatggatgactacatttttacatatataggatctgtattaatctcagtcaaccctttcaagcagatgccatattttggggaaaaggaaattgaaatgtaccaaggagcggcacagtatgaaaacccaccacatatctatgcccttgcagataatatgtacagaaacatgatcattgacagagagaaccagtgcgtcattatcagtggtgaaagtggtgctggaaaaacagtggctgccaaatatatcatgagctacatctccagagtgtctggaggagggaccaaagtcnnnnnnnnnnnnnnnnnnnnnnnnnnntccaacccgctgctggaggccttcgggaacgccaagaccgtccggaacaacaactccagccgatttggaaaatactttgaaatccagttcagtccaggtggggaaccagatggtggaaagatctccaacttccttctggaaaaatctagggtggtgatgaggaacccaggagagcggagttttcacatattttaccagctcatcgagggcgcctctgcagagcagaaacacagccttggcatcaccagcatggactattattactacctgagcctctcgggctcatacaaggttgatgacattgacgacaggcgggagtttcaggaaactctgcacgccatgaatgtgattgggatctttgcagaagagcaaacgctggtgttgcagatagtggcgggtattctccacctgggaaacatcagcttcaaagaagttggcaactacgcggctgtggagagtgaagagtttttagcttttcctgcatatctgctagggataaaccaggaccggttgaaagaaaagctaacaagccggcagatggatagcaagtggggaggcaaatccgaatccatccacgtgaccctcaacgtagagcaggcctgttacacccgggatgcgctcgccaaggccctgcacgcccgggtctttgatttcttggtagattccatcaataaagccatggagaaagaccatgaagaatacaacattggcgtcctagacatctatggctttgaaatattccagaaaaatggctttgaacagttttgtatcaattttgttaatgaaaaactgcagcagatttttattgaactgacattaaaggcagaacaggaagaatatgttcaagagggaataagatggacacccattgagtactttaataataaaatcgtatgtgacctcatagagaacaaagtgaaccctcctggcatcatgagcatcctggatgacgtgtgcgccacgatgcatgcggtgggtgagggggcagatcagacgctgctccagaaacttcagatgcagattgggagtcatgagcacttcaacagttggaaccaaggcttcatcattcatcattatgctgggaaggtatcctatgacatggatggcttttgtgaaaggaaccgggatgtgctttttatggatctcatcgagcttatgcagagcagcgagctgcctttcataaagtctttatttccggaaaatctgcaggctgacaagaaagggcgcccaactactgccggaagcaaaataaagaaacaagccaatgaccttgtgagcaccctgatgaaatgtacgccccactacattcgctgcatcaagccaaacgaaaccaagaagcccagagactgggaggaaagcagggtaaagcatcaagtcgaatatttgggtctgaaagagaacattcgagtgagaagagctggctatgcctatcggcgcatcttccaaaaattcctacagaggtatgccattctgaccaaagccacctggccttcttggcagggagaggagaagcaaggcgtcctgcacctgctgcagtcggtcaacatggacagcgaccagttccagctggggaggagtaaagtgttcatcaaagcccccgagtctctatttcttttagaagagatgagagagagaaagtatgatgggtatgctcgagtgatacagaaatcatggaggaaattcgtggcccggaagaaatacgttcaaatgagagaagaagcctcagacctcttattgaacaagaaggagagaaggagaaacagtattaacaggaactttataggggattatattgggatggaagagcacccagaactccagcagttcgtgggcaagagggagaagattgatttcgcagacacagtcaccaagtatgacaggaggttcaagggtgtaaagcgagacctgctccttaccccaaagtgcttgtacttaatcggacgagaaaaagtcaaacagggcccagacaagggcctggtgaaagaagtcctgaagcggaaaatcgagatagaacggatcttgtctgtgtccctcagtactatgcaggatgacatttttattctccatgagcaagagtatgacagtttgcttgaatctgtcttcaaaactgaattcctaagcctcttagcaaagcgttacgaggagaagacccagaagcaactacctctgaaannnnnnnnnnnnnnnnnnctgaagttgaaaaaggaaaactggggccctggagtgcagggtgcgggctcccggcaagtgcagttccaccaagggtttggggacctggctgtcctcaagcccagtaacaaagtgctgcaggtcagcatcggacctggactgcccaagaactcccgtcctaccagaaggaacactacccaaaatacaggttattccagtgggactcaaaatgccaactacccagtgagagctgcccctcctcccccaggataccatcagaacggagtcatcagaaaccagtatgtgccatatccccatgctcctggaagccagaggtccattcagaaaagcctgtacacctccatggcccgcccgcccttgcctcggcagcagtctaccagttcagaccgagtgtcacagacgccagagagcctggatttcctcaaggtcccggaccagggagctgcaggggtcaggagacaaacaaccagtcggcctcccccagctgggggcagacccaagccccagcccaagcccaagcctcaggttccacagtgcaaggctttgtatgcctatgacgctcaggacacagacgaactcagctttaatgccaatgacattattgatattatcaaagaagatccttctggctggtggacgggtcgactacgaggcaagccagggctgttccccaacaactatgtgaccaagatctgaggtgcccgtgactctgacacatggggcagaggagctccaggcacagaccaggtgaggggatatttaggtgctccccttacaatccacaatgagcaattgcttctccaaggcctggagctattctggtaccttccccatggaggacactgaaaaggctgggttggggacagggagtatcactccataagtgatcctaaaaggtagcctcttcataggaacccaggaggacaaaaccaccatgcattaagatttatttattgtatttaaacctggtgagaggacaagtgaggtctgctcagaccttgtaggcttctatcaaaacagcaccctgcttgctcaccaggcctagagaatggctgtaggtggccgctgacaagtgcctttagttgaagagcacatttctttcatctctcttgtccatacctgatagacacattcctctctgccaccttccttcagggaggacccgccctctgcagactgggcttagcgtgagcaggcacttcccatgtacgtgccaagggtaagctggcctgctgagcccagggcgacagaggggcactggtttacactttgccgggaccatcagggccgccaagcaggtcaggggctgggggctgggggctgggctgctggctttgctttctctgggtcttcaattagaatgtggctggcccatattggtttgtgtttaaatgctgtacttactacaagaaggatcttttttcaagcctgtacatttataaaaacagaatcatatactgtatatataaaaatcttgagatggtagaaacatgtatgaatgtactaagtagtaattcccactggtactcatttcctaaggtaggttttcttacaaaactcacaccaggtacttaaagatgtgctctgcttttttccaactacggagtgtcactgctttctaggtcagtccctgcagactcttctcaactctttccctataggaaacttactccgcgtcctgcccccacctcctaaataaataaaggaatcggcgaacaaaaaaaaaaaaaaaaaaaaactcgaagccatcttatttccgggttgcgagaaaaaaaggtaatggaaatgggcccatgggtccaatagctgttttccttgaccccact

SEQ ID NO: 5661 - DNA, 900 bp, Homo sapiens
  misc_feature (641)..(641): n is a, c, g, or t
  misc_feature (678)..(678): n is a, c, g, or t
tttcctattttatttagcaggcattttctttactgaggtttatattgtctgccaaaactaggaggaaaagaaaatattaacaaccctgaaagctctttcattctgaattattccttaatgtttttaatgatttattataaccacacaaatgtgatcttggggccatttggaagttattgagtttccttggagatgggacttggcattttccaaaccagagtttgcttttgtggcctggaagttgcaaggcatatatatttggaagactaaagattattccccaccaagaagttttgtcaacctgaccttctctactcttatgacgctgcacacacagcagtaatctctgcagaggagagcaaataaagtgaaggaaatataggcggtacgtgttatttttacatcctaaaagtaaatttcttcagcattaagggctgactgggggaattttccatctcagagttctcatgaatgctgctccactttggtgttgtctcttgaatgctttttattataggtctttgaaggaggtatttcttggtatttattcagccagagagagtagttgatgtggaatttgggaacacaggggtgtgggagcgctctctgggtgacctgtctctccgttgaccttcaggttntttatgtgcctcaccagtcaggtgaggctagtcaccnattagaacaatgtactagtctggtatgatctttgccagtctaatacttggaatggctcttaacctatgtccgggcaagatggggccccccttgaagccttaacctcggtaaagagagtttctctccgtggttgaggttcccaacgcttcaacccgcctcgcagttctgggtttgggttccccccccaaaaaaaaccgttggggcgtcttccaaaccttgtct

SEQ ID NO: 5662 - DNA, 3956 bp, Homo sapiens
  misc_feature (3825)..(3853): n is a, c, g, or t
gggcggacttccggcgaccgggcaagcgggaaccaggtggccacccggtgtcggtttcattttcctttggaatttctgctttacagacagaacaatggcagcccgagtacttataattggcagtggaggaagggaacatacgctggcctggaaacttgcacagtctcatcatgtcaaacaagtgttggttgccccaggaaacgcaggcactgcctgctctgaaaagatttcaaataccgccatctcaatcagtgaccacactgcccttgctcaattctgcaaagagaagaaaattgaatttgtagttgttggaccagaagcacctctggctgctgggattgttgggaacctgaggtctgcaggagtgcaatgctttggcccaacagcagaagcggctcagttagagtccagcaaaaggtttgccaaagagtttatggacagacatggaatcccaaccgcacaatggaaggctttcaccaaacctgaagaagcctgcagcttcattttgagtgcagacttccctgctttggttgtgaaggccagtggtcttgcagctggaaaaggggtgattgttgcaaagagcaaagaagaggcctgcaaagctgtacaagagatcatgcaggagaaagcctttggggcagctggagaaacaattgtcattgaagaacttcttgacggagaagaggtgtcgtgtctgtgtttcactgatggcaagactgtggcccccatgcccccagcacaggaccataagcgattactggagggagatggtggccctaacacagggggaatgggagcctattgtccagcccctcaggtttctaatgatctattactaaaaattaaagatactgttcttcagaggacagtggatggcatgcagcaagagggtactccatatacaggtattctctatgctggaataatgctgaccaagaatggcccaaaagttctagagtttaattgccgttttggtgatccagagtgccaagtaatcctcccacttcttaaaagtgatctttatgaagtgattcagtccaccttagatggactgctctgcacatctctgcctgtttggctagaaaaccacaccgccctaactgttgtcatggcaagtaaaggttatcctggagactacaccaagggtgtagagataacagggtttcctgaggctcaagctctaggactggaggtgttccatgcaggcactgccctcaaaaatggcaaagtagtaactcatgggggtagagttcttgcagtcacagccatccgggaaaatctcatatcagcccttgaggaagccaagaaaggactagctgctataaagtttgagggagcaatttataggaaagacgtcggctttcgtgccatagctttcctccagcagcccaggagtttgacttacaaggaatctggagtagatatcgcagctggaaatatgctggtcaagaaaattcagcctttagcaaaagccacttccagatcaggctgtaaagttgatcttggaggttttgctggtctttttgatttaaaagcagctggtttcaaagatccccttctggcctctggaacagatggcgttggaactaaactaaagattgcccagctatgcaataaacatgataccattggtcaagatttggtagcaatgtgtgttaatgatattctggcacaaggagcagagcccctcttcttccttgattacttttcctgtggaaaacttgacctcagtgtaactgaagctgttgttgctggaattgctaaagcttgtggaaaagctggatgtgctctccttggaggtgaaacagcagaaatgcctgacatgtatccccctggagagtatgacctagctgggtttgccgttggtgccatggagcgagatcagaaactccctcacctggaaagaatcactgagggtgatgttgttgttggaatagcttcatctggtcttcatagcaatggatttagccttgtgaggaaaatcgttgcaaaatcttccctccagtactcctctccagcacctgatggttgtggtgaccagactttaggggacttacttctcacgcctaccagaatctacagccattcactgttacctgtcctacgttcaggacatgtcaaagcctttgcccatattactggtggaggattactagagaacatccccagagtcctccctgagaaacttggggtagatttagatgcccagacctggaggatccccagggtcttctcatggttgcagcaggaaggacacctctctgaggaagagatggccagaacatttaactgtggggttggcgctgtccttgtggtatcaaaggagcagacagagcagattctgagggatatccagcagcacaaggaagaagcctgggtgattggcagtgtggttgcacgagctgaaggttccccacgtgtgaaagtcaagaatctgattgaaagcatgcaaataaatgggtcagtgttgaagaatggctccctgacaaatcatttctcttttgaaaaaaaaaaggccagagtggctgtcttaatatctggaacaggatcgaacctgcaagcacttatagacagtactcgggaaccaaatagctctgcacaaattgatattgttatctccaacaaagccgcagtagctgggttagataaagcggaaagagctggtattcccactagagtaattaatcataaactgtataaaaatcgtgtagaatttgacagtgcaattgacctagtccttgaagagttctccatagacatagtctgtcttgcaggattcatgagaattctttctggcccctttgtccaaaagtggaatggaaaaatgctcaatatccacccatccttgctcccttcttttaagggttcaaatgcccatgagcaagccctggaaaccggagtcacagttactgggtgcactgtacactttgtagctgaagatgtggatgctggacagattattttgcaagaagctgttcccgtgaagaggggtgatactgtcgcaactctttctgaaagagtaaaattagcagaacataaaatatttcctgcagcccttcagctggtggccagtggaactgtacagcttggagaaaatggcaagatctgttgggttaaagaggaatgaagccttttaattcagaaatggggccagtttagaaagaattatttgctgtttgcatggtggttttttatcatggacttggcccaaaagaaaaactgctaaaagacaaaaaagacctcacccttacttcatctatttttttaataaatagagactcactaaaaaaaaaaaaaaaaaaaaaaagcatatctgagacatacagttttcttggtcttttttatgctctttttctaaccgtcaccccctcttttttttttgggtattgcctgacaacatgatgaatcacctccatgtttataagttttatgttttcagctgggcacagtggctcacgcctgtaatcccagcactttgggaggccgaggcaggcggatcatgaggtcaggagatcgagactatcctgggctaacacagtgaaatcccatctctactaaaaatacaaaaaatagttagctggtgtggtggtacgcacctgttaatcccagcatactcagggtgggttgaagcaggagaattcggttgaacccccaggagggtgtgcggttgcgttcgagccaagattcatgcacttgaattccagcttggggaacaaagggagaattgctccaaaaatataatggcgggggtggggggttccaccccggaatacccaatagggggggggaggggaagaccaaggcaggaagagaacaccgtgtcannnnnnnnnnnnnnnnnnnnnnnnnnnnnggggcgaatcagtggggagcacaccttatgaccatagataataaagagacaaagagaaaggatattatacaacaaattttgttttatatatcattctgccaga

SEQ ID NO: 5663 - DNA, 520 bp, Homo sapiens
  misc_feature (35)..(36): n is a, c, g, or t
  misc_feature (445)..(445): n is a, c, g, or t
  misc_feature (448)..(448): n is a, c, g, or t
  misc_feature (461)..(461): n is a, c, g, or t
  misc_feature (473)..(473): n is a, c, g, or t
  misc_feature (504)..(504): n is a, c, g, or t
  misc_feature (516)..(516): n is a, c, g, or t
cagagtcctggccctgagcgggactcgcagtggcnnaggctgagcggcaggtagaaggggcgtctccggggcttcacagggaacacaggggcttcggccaaccacaagtacgcagttgcacatgccctacttttgcccattctttgcaaatcccctaaggaacgaacgcgcctcggtgcgggcctttctaatcttcgcttgtcccttcacttccacagctggaggtcgaattcaccacgtcacgtagagaaaaggggcggtgtctcgggtctccccgtgtgggcatcaaggcgggctccctataggagctggtgtggacgtccgggcgtggggttagggcggatgcgggggatcgcgggggcggtgtttgacattgttgctctcaccagggcggattcgccccgaccttcattcctgggctcttagtctcttgcctacccattgnttnagttgggccgttngtcccgggtttngttttcattggttggcccctttttttttttnccaagggaaganattt

SEQ ID NO: 5664 - DNA, 4986 bp, Homo sapiens
  misc_feature (288)..(309): n is a, c, g, or t
  misc_feature (2040)..(2061): n is a, c, g, or t
atacaatagtgctccgcgccgcctcagccgccgccgccgcccaaccgcctgcccagcgctgaggcctgacgggccgggcggacgagggccgagggcgggagctgaggcgcggggggcggccccggcggggggcgggggcgaggaggggattaaggggcaggtgcgagggagggaagagaagaaagcgagcggttaggggggcggttaccactccgaccggactcacccggcacattgccgggccgcggcgtggagccgggcaggagccgcgagccagctgctccggannnnnnnnnnnnnnnnnnnnnntaggcctgtcagcagcagtgacagttcagacgaaagtccttccacttcctttacttctggctcaatgtataggatcaagtcaaaaattccaaatgaacacaagaaacctgctgaggtattccggaaggacctcatcagtgccatgaaacttccagattctcaccacattaatcctgatagctattacctctttgctgatacatggaaggaagaatgggaaaagggagtccaggtaccagccagtccagacaccgttccacagccttctctcaggattatagctgagaaggtaaaggacgttctgtttatccgaccccggaagtatattcactgctccagcccagacaccacagagcctggctacatcaacatcatggagttggcagcatctgtttgccgctatgacctagatgacatggacatcttctggcttcaggaactcaatgaagaccttgcagaaatgggttgtgggccagttgatgagaatcttatggaaaagacagtagaagtcctggaacgccattgccatgaaaatatgaaccatgctattgagacagaggaagggctaggcatagagtatgatgaagatgtgatctgtgatgtgtgccggtctccagacagtgaagaagggaatgatatggtgttctgtgataagtgtaacgtctgtgtgcatcaggcctgctatggcatcctcaaggtcccagaaggcagctggctgtgtcgctcctgtgtcctgggcatttatccgcaatgtgtgttatgtccaaagaaaggtggagccctgaagaccaccaagacagggactaaatgggctcatgtcagctgtgccctgtggatcccagaggtcagcattgcttgtcctgagaggatggaaccgatcacgaagatctcccacatcccacccagtcggtgggccttagtctgcaacttgtgcaagttgaagacgggggcttgtattcagtgctctataaaaagctgcatcactgccttccacgtcacctgtgcctttgagcacggcctagagatgaagaccatcctagatgagggagacgaagtgaagttcaagtcatattgcctcaagcatagccaaaacaggcagaaacttggagaagctgagtacccccaccacagggctaaagagcagagccaggccaaaagtgagaaaaccagcctgcgggcacagaagcttcgggagctggaggaggagttctattccttggtacgagtggaagatgtggccgcagagctgggtatgcccacgctagctgtggactttatctataactactggaaactgaagcggaaaagtaacttcaataagccattatttcctccaaaggaggatgaagaaaatgggctggtgcagccaaaagaggaaagcattcacactcgaatgagaatgtttatgcatctacgccaggacctggagagggtccgaaatctgtgctatatgataagcagacgagagaagctgaagctgtcacacaacaaaatacaggaacagatcttcggtttgcaagtccagcttcttaaccaagaaattgatgcagggcttcctttgacaaatgcacttgaaaactcactgttttacccaccaccaagaattaccttgaagttaaaaatgcccaaatcaaccccagaagaccacagaaacagctccacagaaaccgatcagcagccccactctcctgacagcagctcatctgttcacagtataaggaacatgcaggnnnnnnnnnnnnnnnnnnnnnngagaacaaaatcgtatccgagatacccactagagagcaagaataaccgtttgctggccagtctcagccattctaggagtgaagcaaaggagtccagtcctgcttggagaaccccgtcctcggagtgctatcatgggcagtcactgggaaagcctctggtccttcaggctgccctccatggacagtcttccattgggaatgggaaaagtcagcctaactccaagtttgccaaatccaatggcctggagggcagctggtctgggaatgtcacccaaaaagacagctcgagtgagatgttctgtgaccaggagcctgtgttcagcccccacttggtcagtcagggcagctttagaaaatccactgtagaacactttagtaggtcctttaaagagaccaccaataggtgggtgaagaacacagaggacctccagtgctatgtgaagccaaccaagaatatgagccccaaggagcagttctggggtagacaggttctcaggcggtctgcagggagagctccatatcaggaaaatgatggctattgcccagatttggagctgagtgattcagaggcagaaagtgatgggaataaagaaaaagtcagggtaaggaaagatagctcagacagggaaaatcctccccatgactctagacgggattgccatggtaaaagcaagacacatcccctttcccacagttcaatgcaaaggtgattagaaacttccaaggatgacccaacctttgcctttgccccatatattggggaaaacccatacaccaaaaggattttagcatatgttaagaggaattgcagtgaaaaggataacatttttccatagtaaattgtcttgcagtttttgaaaatgtttcaagtctagtttttacaagcacattacagtaattgcaggttgtccagaggttggtttgtcagaggctattgggaacagctgggcccagggtatttgctcagtaaatattttggggcagctttccggttatataacacattgacaagtatatgtattaagagtccttgcattgttaactgatttgcaagagaccatgattatcagacactaaaactacttatcttttgaagctacagcatgtgactccccagagctcctgtctgtaggaagtttctaattccactggtatctataaacccttttcaggggagagaccaggagaccaccatcttagatactgtcaaactcactactgtcttcctttgttctgcacaaggttgagtttctttcacagtatcttaacttactgagtcaatactcctcatgcttatcagtgtccagtgcctgttcctaaacttgcttgttggggacacactcataactatttcacctgactgacaagcataaaaggctaacttgtggatagtgtttacaaaagtacaaaagtactacttccaaggaaaatgctctgattctctgtttaggcatttgtgaaggattccagagcctttcccaaagtgagaccatttctggggtatttgtaccaggtcagggtttttgtgttgttttcaaataagtttgactaaaataagtttggctgacagtttttgtatacctgctttaatgtttataaaatttttattgaggtataattaaaatatagtaaaatgcacagaggttaagtattcttacctgctttaattttgaaacagatttttattgtcaaacagaatttgaaagcatgtgtttaacacatggatataatttagctttgtgtcacctttgaatctgaggcagtttcccaaacaaaaaggctggagccatttttcagaagtgcttataccctgttcccaaactatcagccttgattaatttctagtaggaagagaataattacatttgcgggggggggggtggataaaaacatgtctgcttctcatttaaataagagagaaatgatgccgttttttaaatgtgaagcagactataattctcagctctcttttcttcttagccttaaattaatattctctttcttctagttttggaaagtgtagtgggaatattcagacaaaagaggccattttccatttttaaagcttcttactggtgaaacagcccagttgtagtaggtgccagtcagtcaaggcaggggccctctctccgtcaatatggaaaactcagcagttttcctctcccccagttgtgttcttgtaacgttgttaatgggttcctttgctttttgctttctccttttctgaaaatgtatgtgttttgcctctcttttggctacatcttcaaaatatttcttttgtgcctatgtacatgtgtaaacatgccatagcatgtgtggtaggtgtcctgtattttgtttgggaaaaaaactatcaaaatgaggaagagaatttcccctatttatgcactaggtttctgtgctttttctttgagttctctggagtagatattaatttgataccttcatggtaatgaaattatgatggagctgtgttataaattccttatgtcagaggccagtgcggtagcctttgtcccttcatgcctttcaattctgagtgggaggaaaagcaaacatcaaaacagtgcttcagccaaattccatatgtaatgccattgggagagtattgactaaaatatcattcgtcagggaaatatagttgtaatatttttacaggatattcctaggtaaatgaaggagccttcagttgtaaatttcaattaccccaaaatgtatttgctacattttgttgtttgaagtattacctcttaaccttctttgttaatttttttcattttgtcttatatagtccagttttccaagataagctcagtcctttttcaaatgtcccctttttaccaatactttttcattaaattatgaaaactgctaaaaaaaaaaaaaaaaaaaaaaaaaaccaagtacctgcccgggcggacgctcg

SEQ ID NO: 5665 - DNA, 4270 bp, Homo sapiens
atggagtggctaagccctgatatcgctctgcccagaagagatgagtggactcaaacttctccagccaggaagaggatcacgcatgccaaagtccagggtgcaggtcagctgaggctgtccattgatgcccaggaccgggttctgctgcttcacattatagaaggtaaaggcctgatcagcaaacagcctggcacctgggatccgtatgtgaagatttctttgatccctgaagatagtagactacgccaccagaagacgcagaccgttccagactgcagagacccggctttccacgagcacttcttctttcctgtccaagaggaggatgatcagaagcgtctcttggttactgtgtggaacagggccagccagtccagacagagtggactcattggctgcatgagctttggggtgaagtctctcctgactccagacaaggagatcagtggttggtactacctcctaggggagcacctgggccgggccaagcacttgaaggtggccaggcggcgactgcggccgctgagagacccgctgctgagaatgccaggaggtggggacactgagaatgggaagaaactaaagatcaccatcccgaggggaaaggacggctttggcttcaccatctgctgcgactctccagttcgagtccaggccgtggattccgggggtccggcggaacgggcagggctgcagcagctggacacggtgctgcagctgaatgagaggcctgtggagcactggaaatgtgtggagctggcccacgagatccggagctgccccagtgagatcatcctactcgtgtggcgcatggtcccccaggtcaagccaggaccagatggcggggtcctgcggcgggcctcctgcaagtcgacacatgacctccagtcaccccccaacaaacgggagaagaactgcacccatggggtccaggcacggcctgagcagcgccacagctgccacctggtatgtgacagctctgatgggctgctgctcggcggctgggagcgctacaccgaggtggccaagcgcgggggccagcacaccctgcctgcactgtcccgtgccactgcccccaccgaccccaactacatcatcctggccccgctgaatcctgggagccagctgctccggcctgtgtaccaggaggataccatccccgaagaatcagggagtcccagtaaagggaagtcctacacaggcctggggaagaagtcccggctgatgaagacagtgcagaccatgaagggccacgggaactaccaaaactgcccggttgtgaggccgcatgccacgcactcaagctatggcacctacgtcaccctggcccccaaagtcctggtgttccctgtctttgttcagcctctagatctctgtaatcctgcccggaccctcctgctgtcagaggagctgctgctgtatgaagggaggaacaaggctgccgaggtgacactgtttgcctattcggacctgctgctcttcaccaaggaggacgagcctggccgctgcgacgtcctgaggaaccccctctacctccagagtgtgaagctgcaggaaggttcttcagaagacctgaaattctgcgtgctctatctagcagagaaggcagagtgcttattcactttggaagcgcactcgcaggagcagaagaagagagtgtgctggtgcctgtcggagaacatcgccaagcagcaacagctggcagcatcacccccggacagcaagatgtttgagacggaggcagatgagaagagggagatggccttggaggaagggaaggggcctggtgccgaggattcacccagcaaggagccctctcctggccaggagcttcctccaggacaagaccttccacccaacaaggactccccttctgggcaggaacccgctcccagccaagaaccactgtccagcaaagactcagctacctctgaaggatcccctccaggcccagatgctccgcccagcaaggatgtgccaccatgccaggaaccccctccagcccaagacctctcaccctgccaggacctacctgctggtcaagaacccctgcctcaccaggaccctctactcaccaaagacctccctgccatccaggaatcccccacccgggaccttccaccctgtcaagatctgcctcctagccaggtctccctgccagccaaggcccttactgaggacaccatgagctccggggacctactagcagctactggggacccacctgcggcccccaggccagccttcgtgatccctgaggtccggctggatagcacctacagccagaaggcaggggcagagcatggctgctcgggagatgaggaggatgcaaaacaggccgaggaggtggaggagggggaggaaggggaggaggacgaggatgaggacaccagcgatgacaactacggagagcgcagtgaggccaagcgcagcagcatgatcgagacgggccagggggctgagggtggcctctcactgcgtgtgcagaactcgctgcggcgccggacgcacagcgagggcagcctgctgcaggagccccgagggccctgctttgcctccgacaccaccttgcactgctcagacggtgagggcgccgcctccacctggggcatgccttcgcccagcaccctcaagaaagagctgggccgcaatggtggctccatgcaccacctttccctcttcttcacaggacacaggaagatgagcggggctgacaccgttggggatgatgacgaagcctcccggaagagaaagagcaaaaacctagccaaggacatgaagaacaagctggggatcttcagacggcggaatgagtcccctggagcccctcccgcgggcaaggcagacaaaatgatgaagtcattcaagcccacctcagaggaagccctcaagtggggcgagtccttggagaagctgctggttcacaaatacgggttagcagtgttccaagccttccttcgcactgagttcagtgaggagaatctggagttctggttggcttgtgaggacttcaagaaggtcaagtcacagtccaagatggcatccaaggccaagaagatctttgctgaatacatcgcgatccaggcatgcaaggaggtcaacctggactcctacacgcgggagcacaccaaggacaacctgcagagcgtcacgcggggctgcttcgacctggcacagaagcgcatcttcgggctcatggaaaaggactcgtaccctcgctttctccgttctgacctctacctggaccttattaaccagaagaagatgagtcccccgctttaggggccactggagtcgagctcagcgttcacaccaggcgggctgggtcccctgcccacctgcctccctgccccctgtgacggagggggcaagcaagcccccagaggccgtgtctctggacagacggatagacatacggaagcgaggcctggaccaagagaggcccaggctactggaggagtagaaggatgggccccgtggggtccccactgccccggtacgagggggcccaagaccctggcaggtcaggggccctggccaagccagatctggagctgctgctccctgctgcggagaccgcggaggcttcgcgttgaccaagttccttaaagaactggctgatggggcaggaggtccaggcctgggctctcgggccctcctagagggccattggagcttgcagctcagacccccactttgagttttatttatttaaatagtagttggatgcttggcacgtcgtcctgtaataggaaacccttgcctcatcagttttcctgatttacaagtgcaatattttagccaatgccttgggagaagctgccatgcaaaggtggacaccattctccagcttcaggggatatgctcgtcccgggcaccggtggcaggcagctggccttctggactaaggcagcctggggggacactgcagtctggctacacacagagatctggcaccccctgggtggagtgtccctcgggggctttgggaaagcatggcaccctcagaccacacagtagccaagttctggagcaaataaaaggcctgtgttatttcttgttcttgaaaaaaaaaaaaaaaaaaaaaaagacaaaagaggggggcggaccgactccgaaaaaattatcgccacggagagggggaccccatatgttagtgccggctttacccacagtatgttgtggtgacacaagagggtgccccccattatggggcaatcgctttataacagcataggagatttgggccgtaattatacagacagtccag

SEQ ID NO: 5666 - DNA, 1537 bp, Homo sapiens
gctatccagacagagcagctaccctcagctctagctgatactacagacagtacaacagatcaagaagtatggcagtgacaactcgtttgacatggttgcacgaaaagatcctgcaaaatcattttggagggaagcggcttagccttctctataagggtagtgtccatggattccgtaatggagttttgcttgacagatgttgtaatcaagggcctactctaacagtgatttatagtgaagatcatattattggagcatatgcagaagagagttaccaggaaggaaagtatgcttccatcatcctttttgcacttcaagatactaaaatttcagaatggaaactaggactatgtacaccagaaacactgttttgttgtgatgttacaaaatataactccccaactaatttccagatagatggaagaaatagaaaagtgattatggacttaaagacaatggaaaatcttggacttgctctggatgaaagaaagattaaaggggtcattgagctcaggaagagcttactgtctgccttgtgaaattatgaaccatatggatccctggttcaacaaatacgaattctgctgctgggtccaattggagctgggaagtccaagcttttttcaactcagtgaggtttgttttcctagggcatgtaacgaatcaggctttggtgggcacttattcaactgggatatgtgataatgtttaggacattcttttttagagactggaaagattgcaaatacctgccgtttattctgtgtgactcactggggctgagtgagaaagaaggcggcctgtgcagggatgacatattctatatcttgaacggtaacattcgtgatagataccagtttaatcccatggaatcaatcaaattaaatcatcatgactacattgattccccatcgctgaaggacagaattcattgtgtggcatttgtatttgatgccagctctattcaatacttctcctctcagatgatagtaaagatcaaaagaattcgaagggagttggtaaacgctgctagaggaagtccaaagaaaacttggatttgctctttctgacatctcggtggttagcaattattcctctgagtgggagctggaccctgtaaaggatgttctaattctttctgctctgagacgaatgctatgggctgcagatgacttcttagaggatttgccttttgagcaaatagggaatctaagggaggaaattatcaactgtgcacaaggaaaaaaatagatatgtgaaaggttcacgtaaatttcctcacatcacagaagattaaaattcagaaaggagaaaacacagaccaaagagaagtatctaagaccaaagggatgtgttttattaatgtctaggatgaagaaatgcatagaacattgtagtacttgtaaataactagaaataacatgatttagtcataattgtgaaaaataataataatttttcttggatttatgttctgtatctgtgaaaaaataaatttcttataaaactcgggaataaaaaaaaaaaaaaaaaaaaa

SEQ ID NO: 5667 - DNA, 3491 bp, Homo sapiens
  misc_feature (339)..(339): n is a, c, g, or t
  misc_feature (3325)..(3325): n is a, c, g, or t
agcggagtgcaggcggagccgcgccgcgctcccaccccggccgggagctaggagccagcggccagccccgcgcagcgcagcgcagcccgcagaagcccggtcagcgcacatgcccgcgagacctgcaaacttgtgccaccggctctgcccgtccccggggagcccgaacgccccgcagccctcacccctcccgccagtctccagccatggtgaacagcagagctgaaatggaaattggcaggtaccactggatgtacccaggctcaaagaaccaccagtaccatcccgtgccaaccctgggggacagggctagccccttgagcagtccaggctgctttnaatgctgcatcaagtgtctgggaggagtcccctacgcctccctggtggccaccatcctctgcttctccggggtggccttattctgcggctgtgggcatgtggctctcgcaggcaccgtggcgattcttgagcaacacttctccaccaacgccagtgaccatgccttgctgagcgaggtgatacaactgatgcagtatgtcatctatggaattgcgtcctttttcttcttgtatgggatcattctgttggcagaaggcttttacaccacaagtgcagtgaaagaactgcacggtgagtttaaaacaaccgcttgtggccgatgcatcagtggaatgttcgttttcctcacctatgtgcttggagtggcctggctgggtgtgttggtttctcagcggtgcccgtgtttatgttctacaacatattggtcaacttgtgaagtcatcaagtcaccgcagaccaacgggaccacgggtgtggagcagatctgtgtggatatccgacaatacggtatcattccttggaatgctttccccggaaaaatatgtggctctgccctggagaacatctgcaacacaaacgagttctacatgtcctatcacctgttcattgtggcctgtgcaggagctggtgccaccgtcattgccctgatccacttcctcatgatactgtcttctaactgggcttacttaaaggatgcgagcaaaatgcaggcttaccaggatatcaaagcaaaggaagaacaggaactgcaagatatccagtctcggtcaaaagaacaactcaattcttacacataaatgtttgccagagtgtttcggccgacgtatttacagctctgacaaatcatcagacagctgctctgcagtacagatgtgtatcccaccaaactaatgtagatgtacaaacacttcactgtctgtctcaagctgctgggatgtatctctaggaaaaccttccagtgggtaaatctttttctttagaacaaatattgggaggtttcatgttagccattttaaaaggcaacactttgacaaaatgatcgttcatactttggggaatttgtgggcatgttcacatttattgctagggcaattctaccaaggacactcaatgggaatatgttcacactccttaatagggacctgtggactccttaataaggacctgtgacatgcccagcatcaagggataagaccgtaaattcacatatatgccatctgtcctcaagtgttatctacataggaaataaaatggaattgatgtaacagttccatttctgacagctgacatttattaaactttggatcaaagataatgtgattcttatgattgatttctcaaactagcttttccctcccaagtccaggacccattaatttcctgagccaatcagaacatatattgtttcaaataatgctaaaaaattaagcttacaatttctgctggaccctactattaaagaatctggatgctggactcattgacaagctttccagaagcaattttataacagatttcattttaacaaaatactgatccaattttcattattcttgagaaatgtcagctttgccttaatgagtatttgctttaaatttctaagaatttatatcataactagagacccaaatatctttcacagaattttgttccataaatgtttttcttaattattaagaagtgttaccttattaaaatgaccaccattctaaaccatttttcagtggtctggatacgaagtttacagtttcataccaactatctaaaacctaattgcaaattgaccacagacctctaacctcctacttttatagacttgaatacttaagtaatttaaattagggttggtatttcatttttttcttatctaaatcttagtttccttggaataataaagtttgatgttcagcaagagaactgccttgagtttaagcccatttttcaaaagaaacttgcccttttacattattgtgttcccagaacattaagtgactgtaggtactgggtattagtgatggtaaactttgtgttgctctttatgaaatgatccatataactgttgggtgcatcagtgcttttcaaaggggctgcttactatagggttaactatgtatattcattgttaagagttaacttgtggtttggctgtttcctggattttataacatacatgtgcagaaatgtattccaaatgaaaggaagcatacctttatcaagatgctattaaaattgaacatcaagtataatatttcatttggattctcttttttggttaatgcctaaaaatgcctatttgggatttttttttttttttaaattaagagaagctctcttctgtgtagaacagttgttccaaaatagcttagtgttttgttttcctgttgcatgacagatttaactattctttccagcagtggaggtgctgtcagagtccagtgttctagaagaggcagtgtctaaagcctaattttacttttctaattctggtagctattaccaggaatttttgaaagttttgtttaagtagtctaatattttttatgtaaagagcattaaattttgctatgtataaatttttgtaacctaacagtgaatcaatattttctatcagtgccaagggcttcctgtagttctattcaagtgttacaataaatatttgtagataatagtcaatacttgtgtatgcttattttaaagatctatttaggtggaaatagttgtggatgtactaagagtatgcaaataaattttggtacaaaaaaaaaaaaaaaaaacaaaacattttttgtgggcaccagggccgtaaaaaaagttccaaacaccacttgtttgtgggcggggccccaagtagagaaaggacatatgggcaacacggggtcccaaggggaacctcgtggcacaagaagatgtggtggcttcccccccaaaaaaaaaaagcgccggggagacggcgtttttgaccaaccaggagggtcggggcaactcngggtacacacggccacggacataaccaccccccgcgaggatgggaaaaacagagagaagagagaaatgagagaaagagaagagagaaaagaaggaagagagaaaagaaacaaaagagagaagacagacgagaaaagaataaaggagaaaagtaatgaaggaagaaa

SEQ ID NO: 5668 - DNA, 494 bp, Homo sapiens
taactttttggtatccaagtaaaagtcagtccaaactttagtacaatacttgcttgtaaagaggctggcattcctcatcccactggatacacacatttaccctatgggtgtcaggatgataatcccaggatacccaacgctccagagagtccagtggggtttaggaacagccctggactcgaagctggaaatggtttctagctccagctctgctgcctacttgctgtgccactttgggcaagccccatccactctctgggcctttgtttttcatctctagagcaaagaggacaggctgcctgattgcttgggagtctaaccatttactgggtttgctccacaccctggggtgggcggggtgggtagaggtgtctgggtcctctttctcgtaccccccacagcctctccaggggctagggaattaacctgcacacaaatgcaaaacaggtcccactttttaaacctatcagggatgattttcagatcctgaaaga

SEQ ID NO: 5669 - DNA, 1919 bp, Homo sapiens
gtccggaatttccgggatgcaggagggaggccggccccttagtaggaaatgagacacagtagaaataacactttataagcctcttcctcctcccatctcctggcctccttccatcctcctctgcccagactccgcccctcccagacggtcctcacttctcttttccctagactgcagccagcggagcccgcagccggcccgagccaggaacccaggtccggagcctcaacttcaggatgttgacaacattgctgccgatactgctgctgtctggctgggccttttgtagccaagacgcctcagatggcctccaaagacttcatatgctccagatctcctacttccgcgacccctatcacgtgtggtaccagggcaacgcgtcgctggggggacacctaacgcacgtgctggaaggcccagacaccaacaccacgatcattcagctgcagcccttgcaggagcccgagagctgggcgcgcacgcagagtggcctgcagtcctacctgctccagttccacggcctcgtgcgcctggtgcaccaggagcggaccttggcctttcctctgaccatccgctgcttcctgggctgtgagctgcctcccgagggctctagagcccatgtcttcttcgaagtggctgtgaatgggagctcctttgtgagtttccggccggagagagccttgtggcaggcagacacccaggtcacctccggagtggtcaccttcaccctgcagcagctcaatgcctacaaccgcactcggtatgaactgcgggaattcctggaggacacctgtgtgcagtatgtgcagaaacatatttccgcggaaaacacgaaagggagccaaacaagccgctcctacacttcgctggtcctgggcgtcctggtgggcggtttcatcattgctggtgtggctgtaggcatcttcctgtgcacaggtggacggcgatgttaattactctccagccccgtcagaaggggctggattgatggaggctggcaagggaaagtttcagctcactgtgaagccagactccccaactgaaacaccagaaggtttggagtgacagctcctttcttctcccacatctgcccactgaagatttgagggaggggagatggagaggagaggtggacaaagtacttggtttgctaagaacctaagaacgtgtatgctttgctgaattagtctgataagtgaatgtttatctatctttgtggaaaacagataatggagttggggcaggaagcctatggcccatcctccaaagacagacagaatcacctgaggcgttcaaaagatataaccaaataaacaagtcatccacaatcaaaatacaacattcaatacttccaggtgtgtcagacttgggatgggacgctgatataatagggtagaaagaagtaacacgaagaagtggtggaaatgtaaaatccaagtcatatggcagtgatcaattattaatcaattaataatattaataaatttcttatatttaaggcaaaaaaaaaataaaaaaaaaaaaaaaaaaaaaaagttggcaggattggccacaaacaaaaaaaggagaaagaagacaacgaaaagaaaacaaagaagagccgaggagacgctcgagacagcaacaggcgcacgacgaacacgcgaaaagaggcacaggcaatggcaagcggcgggagaggaaggagccaaagagaggcagaaaaaagaaagcagaggcgcgaagacaagacggccaggaggggacgaggagaaaaggaaacgacggaagaagacagggaaggaggaacacgagagcgcaagaggcggcaaggagacaaagaagcggggagacgaggtggagagagagaaggagaggcaagcgagagaggagcgaaagaaagagggggaaaacagagagggcgagagatttttgggaag

SEQ ID NO: 5670 - DNA, 3657 bp, Homo sapiens
  misc_feature (1963)..(1989): n is a, c, g, or t
agttattaatgaccgctgagcaggcagcaccatgtcagtgtgacaactgatcgggtgaacgatgcaccactaaccaccatggaaacaaggaaaaataaagccagctcacagggtctctcttcactggattgagagcctcagcctgccgactgagaaaaagagttccaggaaaaagaaggaatcccggctgcagcctcctgccttcctttatattttaaaatagagagataagattgcgtgcatgtgtgcatatctatagtatatattttgtacactttgttacacagacacacaaatgcacctatttataccgggcaagaacacaaccatgtgattatctcaaccaaggaactgaggaatccagcacgcaaggacatcggaggtgggctagcactgaaactgcttttcaaggaggtgaagcattccacagataatcagctactctattcagggaaggagtgtaaacatcaccactttttgcatgtttgcataaaaaaggcccactgaatcagttaaagacgaggaagaggaggagaaagagaaagaagaggaagatgttgggcaacatttatttaacatgctccacagcccggaccctggcatcatgctgctattcctgcaaatactgaagaagcatgggatttaaatattttacttctaaataaatgaattactcaatctcctatgaccatctatacatactccaccttcaaaaagtacatcaatattatatcattaaggaaatagtaaccttctcttctccaatatgcatgacatttttggacaatgcaattgtggcactggcacttatttcagtgaagaaaaactttgtggttctatggcattcatcatttgacaaatgcaagcatcttccttatcaatcagctcctattgaacttactagcactgactgtggaatccttaagggcccattacatttctgaagaagaaagctaagatgaaggacatgccactccgaattcatgtgctacttggcctagctatcactacactagtacaagctgtagataaaaaagtggattgtccacggttatgtacgtgtgaaatcaggccttggtttacacccagatccatttatatggaagcatctacagtggattgtaatgatttaggtcttttaactttcccagccagattgccagctaacacacagattcttctcctacagactaacaatattgcaaaaattgaatactccacagactttccagtaaaccttactggcctggatttatctcaaaacaatttatcttcagtcaccaatattaatgtaaaaaagatgcctcagctcctttctgtgtacctagaggaaaacaaacttactgaactgcctgaaaaatgtctgtccgaactgagcaacttacaagaactctatattaatcacaacttgctttctacaatttcacctggagcctttattggcctacataatcttcttcgacttcatctcaattcaaatagattgcagatgatcaacagtaagtggtttgatgctcttccaaatctagagattctgatgattggggaaaatccaattatcagaatcaaagacatgaactttaagcctcttatcaatcttcgcagcctggttatagctggtataaacctcacagaaataccagataacgccttggttggactggaaaacttagaaagcatctctttttacgataacaggcttattaaagtaccccatgttgctcttcaaaaagttgtaaatctcaaatttttggatctaaataaaaatcctattaatagaatacgaaggggtgattttagcaatatgctacacttaaaagagttggggataaataatatgcctgagctgatttccatcgatagtcttgctgtggataacctgccagatttaagaaaaatagaagctactaacaaccctagattgtcttacattcaccccaatgcatttttcagactccccaannnnnnnnnnnnnnnnnnnnnnnnnnntgctctcagtgcccttgcccatggtaccattgagtctctgccaaacctcaaggaaatcagcatacacagtaaccccatcaggtgtgactgtgtcatccgttggatgaacatgaacaaaaccaacattcgattcatggagccagattcactgttttgcgtggacccacctgaattccaaggtcagaatgttcggcaagtgcatttcagggacatgatggaaatttgtctccctcttatagctcctgagagctttccttctaatctaaatgtagaagctgggagctatgtttcctttcactgtagagctactgcagaaccacagcctgaaatctactggataacaccttctggtcaaaaactcttgcctaataccctgacagacaagttctatgtccattctgagggaacactagatataaatggcgtaactcccaaagaagggggtttatatacttgtatagcaactaacctagttggcgctgacttgaagtctgttatgatcaaagtggatggatcttttccacaagataacaatggctctttgaatattaaaataagagatattcaggccaattcagttttggtgtcctggaaagcaagttctaaaattctcaaatctagtgttaaatggacagcctttgtcaagactgaaaattctcatgctgcgcaaagtgctcgaataccatctgatgtcaaggtatataatcttactcatctgaatccatcaactgagtataaaatttgtattgatattcccaccatctatcagaaaaacagaaaaaaatgtgtaaatgtcaccaccaaaggtttgcaccctgatcaaaaagagtatgaaaagaataataccacaacacttatggcctgtcttggaggccttctggggattattggtgtgatatgtcttatcagctgcctctctccagaaatgaactgtgatggtggacacagctatgtgaggaattacttacagaaaccaacctttgcattaggtgagctttatcctcctctgataaatctctgggaagcaggaaaagaaaaaagtacatcactgaaagtaaaagcaactgttataggtttaccaacaaatatgtcctaaaaaccaccaaggaaacctactccaaaaatgaacaaaaaaaaaaaaaagcgaaagactgcagttgtgctaaaaacaaaacaaaacaaacaaacaaacaaaaaagtaaaaaaagattactttcgagagagaagtttaagcttcaccaatgctgctcctgaccaatggaaatatgtacaacttcagcattttaagtaactggcttcaaggggtactgtggcaaccaaataaaataactccattttctaaaactttcatgtaacttttatgtctggactacagttcaagtggacaaaaacatttctgtattttttttaagtaaataagagtagttgaactgagcaatacctcctcctgtgttgtattacacatattagccacgagtttttgcagtgaccagataaacttgaattgacacgtggtgtaataaaatggacaaattctgtagagtagacacagtgagtatgtggacctcttttataaggaaaaatacattttggattaaaatcaattgcttctgtcttgttttgtttctaaataaagaataatttctgggaaaaaaaaaaaaaaaaaaa

SEQ ID NO: 5671 - DNA, 1560 bp, Homo sapiens
gagcattataggagtttaagacatgcaatgccttcagaacagtggctagtgctccataatgttagtgattgctcctgtcattttatttagggaggtttgcctcactaagcatcaattattatttttgtcgtctttttcagggtggctcctcaggcaagggcaccaccctcagaggccgatctgacgctgacctggttgtcttcctcggtcctctcaccacttctcaggatcagttaaatcgccggggagagttcatccaggaaattaggagacagctggaagcctgtcaaagagagagtagcattttccgtgaagtttgaggtccaggctccacgctggggcaacccccgtgcgctcagcttcgtactcgagttcgctccagctcggggagggggtggagttcgatgtgctgcctgcctttgatgccctgggtcagttgactggcagctataaacctaacccccaaatctatgtcaagctcatcgaggagtgcaccgacctgcagaaagagggcgagttctccacctgcttcacagaactacagagagacttcctgaagcagcgccccaccaagctcaagagcctcatccgcctaagtcaagcactggtaccaaaattgtaagaagaagcttgggaagctgccacctcagtatgccctggagctcctgacggtctatgcttgggagcgagggagcatgaaaacacatttcaacacagcccagggatttcggacggtcttggaattagtcataaactaccagcaactctgcatctactggacaaagtattatgactttaaaaaccccattattgaaaagtacctgagaaggcagctcacgaaacccaggcctgtgatcctggacccggcggaccctacaggaaacttgggtggtggagacccaaagggttggaggcagctggcacaagaggctgaggcctggctgaattacccatgctttaagaattgggatgggtccccagtgagctcctggattctgctggctgaaagcaacagtgcagacgatgagaccgacgatcccaggaggtatcagaaatatggttacattggaacacatgagtaccctcatttctctcatagacccagcacactccaggcagcatccaccccacaggcagaagaggactggacctgcaccatcctctgaatgccagtgcatcttgggggaaagggctccagtgttatctggaccagttccttcattttcaggtgggactcttgatccagagaggacaaagctcctcagtgagctggtgtataatccaggacagaacccaggtctcctgactcctggccttctatgccctctatcctatcatagataacattctccacagcctcacttcattccacctattctctgaaaatattccctgagagagaacagagagatttagataagagaatgaaattccagccttgactttcttctgtgcacctgatgggagggtaatgtctaatgtattatcaataacaataaaaataaagcaaataccaaaaaaaaaaaaaaaaaaaaaaaaaaaatatcagggacgagaaag

SEQ ID NO: 5672 - DNA, 1404 bp, Homo sapiens
gacactacaaatatgtatacttgttatgtttatattgttttagagacagggtcgtcactctgtcacccaggctggagggcgagtggcgcttcacagctcactgcatcctcaaccttgggggctcacgcagtcctcccgcctcagcctcccaagtagctgggcatgcgccaccaagcccagctaattttgtatctttagtagagatggggtttcgccatgttgcccaggttggtgtggaattcctgggctccagttatatgcccacctcagcctcccaaagtgctgggattacagacgtgacccaccgcgcctggcgcaaatatgtattcttttaaaatttcctctgatactataagctttttgcatttatctgaagcagtatacatgcctttggtatcagcaattttaacagtttggatatacttatcagctatcttattccaaaactacatctacttcttccagtatagaatctggtgcttcctgaccaaaaagatgagaaaaacaatgttaaaaatatagatgctttccattgaaatggagtgaaaacattggttctatatgttttcttttaaaataattttcttattaaaaacttgctgtctttattatacttaccctttttatgcatatcaatagtatttataagatgtgttctataattatgtaattgtagatactgttatgcattgtccagtgacatcataaggcaggccctactgctgtatcttttctaccttcttatttgtaatagaaactatagaatgtatgactaaaaagtcactttgagattgacttttttaaaaaagttattaccttctgctgttgcaaagtgcaaaactgtgagtggaattgttttattctgacttaatgtgttagaaattagagaatacagtgggaggatttttagacattgctgctgctgttacccaaggtattttagataaaaaattttaaataaacatccctttggtatttaaagtggaacatttagcctgttcattttaatctaaagcaaaaagtaatttgggtcaaaatattggtatatttgtaaagcgccttaatatatccctttgtggaaggcactacacagtttacttttatattgtattgtgtatataagtattttgtattaaaattgaatcagtggcaacattaaagttttataaaatcatgctttgttagaaaaagaattacagctttgcaatataactaattgtttcgcataattctgaatgtaatagatatgaataatcagcctgtgtttttaatgaacttatttgtattttcccaatcattttctctagtgtaatgtttgctgggataataaaaaaaattcaaatctttcaaaaaaaaaaaaaaaaaagggcggccgctacaacacaaaaccacacaaaccacgag

SEQ ID NO: 5673 - DNA, 905 bp, Homo sapiens
cacacatacaccacaccactcaacaagtgttcatgtgtccctgtgtccaggcaagaagctctcttcctgactcacatggtattttaaatggaagtgtcttgtcctaactaacaaggcaggaaaagaaccatcagagctggaaaatggacgaaatgtaacctcagagaaacaactacaggaccactcacccaagtgtaagtgactggggcaggacacctcagctgtgggtatgaaagtactgttctgttcacaaggttttgtttgagttttatgtttttcttttaaacatttctctggttcgatgggttgactgtctacagccactgttaaacatttctgaatatgcagagaaagtcaagtgacatttgtatcttcttcagcattcgcagaccttctatagattccagcaaagggggaaaatgtatccactatctaacacttaggtagagaagggagggggtttaagcttagtgagggcaaaattactccattccaccttccgagaccagttagggttttgagagaggtttctgctcaacctgggatctggagggagagctttgatgttggtaaatctgccttgaattcattggtttaacttgcatcaaaataccatgtgagtgtgctcattctcatatatcccctaccaccatcaccaccattctgctgttcagtgtctcttgagagagcctctttgcatgttttccagaatcggggggggtttttcctttcttctcctttgttctttttgctcaaaggtgtgaccagtcattgcccctctggggctttcattctccaggagaaacatcccagaaccagcactgtttagcctgatacctttctaatgtccatgtcaattttcaataaaattcaaagaaatgctaaaaaaaaaaaaaaaaaaaaaa

SEQ ID NO: 5674 - DNA, 5698 bp, Homo sapiens
  misc_feature (5)..(24): n is a, c, g, or t
gagtnnnnnnnnnnnnnnnnnnnncgctaccgccgcgttctattctccgaagccggcgaccgccccacctcctccctccctcccgcccgcttcctctgcccacagcgccggccagagcgagctagacaagggcacgcggggcctcgcctagacccgagaagactgcgggcgcgcgcaagcggcggcgtggaagctgtgagcgcccccatcccggaggtctccgccggctcccgggtgaatcagctcccggccgactttaggattcttctggattttaaattttttctttttaaaaaaacttggacggataaaagatgtgccatggcaggatagcaccaaagagcacctcagtgtttgccgtggcctccgtgggacatggagtgttccttccgctagtgatcctttgcaccctgcttggagacggacttgcttccgtgtgccccctaccaccggagccagagaatggtggctacatctgccacccccggccctgcagagaccccctgacagcaggcagtgtcatcgaatacctgtgtgctgaaggctacatgttgaagggcgattacaaatacctgacgtgtaagaatggcgagtggaaaccagccatggagattagctgccgtctcaacgaggataaagacacccacacatcacttggggtccccacgctgtctatagtggcttctactgccagctccgtggcgctcattctcctcctcgtggtgctgtttgtgctgctgcagccaaagctgaagtctttccatcatagcaggcgtgaccagggggtatctggggaccaggtctccatcatggtggatggagtccaggttgcactaccatcatacgaggaggctgtatatggcagttctggtcactgtgtgccacctgctgaccccagagtacagattgtgctgtcagaagggtctgggcccagtgggaggagcgtgccaagggagcaacagctgccggaccaaggggcctgctcctctgcaggtggagaagatgaggccccaggccagtctggactatgtgaagcctggggctctcgggcctcagagactgtgatggtgcatcaggcaaccacctcttcctgggtggccggctcagggaaccgccaactggcacacaaagaaactgcagattcagagaacagtgacatacaaagccttttatccctcacgtcagaggagtacacagatgatattccactgttgaaagaagcatgagggcagcggccagcctttcctctctgcgaggttctctcagcccttcctccctctccctgtgggattgagcaccctgtactctccagccaccttacctggatacctgagctgccacctgtgtatctgtgtatctctgagggccctataggcccaccttgctggaaactcaaggaagattctcgccatctgcctgttggacagctggaggagctggctctttgcctggccccgccttcccatctgtcagagacatatttgaatgtgctggatcaaaccctcccttttcctaagcctctgggtcccctccagccagctctttggcggcagcccccaccagctcctgtgggcctgagtgctgctgtgtttacttgtgcctttcccccaccctgtccagtttccctgtcatgcagacttgttgctgtccacaagccttagtggctgcactgctgccccctgccacacagggggccgggcctgggtctgtcctgtttcctttgagggttgcccctactgccctttgcaggaacagatccaggtgtgagagctcttgagtcaagagtggcagaagtggctctaattggggtgagagtgtagtccctgggcttgccctgggttgaccctggtggcatatttccttggccgaggatggaagatttggagaatcatgtccatgctggcccaggacccagccatctggcccaaaggcacaagctcctggccctgttgagttgagagtttccaagaagcatccagaagatcccaagggagagaaggaaaatggctgataatgattgtcttcctaatatgcaagttctcacttcctacttccagcatcggccttcctggccttgtcttttttttgtttccctggagtataatgggaagttgcatgctgcctcctgggttttatcccagatagctctggctttcttgctgcccacaggggcctggggcaggaaggagacttgctgagatgccatggagtgcccatctggtcactggcagtctgggcaggttgcccctttctgggtttgtggtgacggaggggaggccgagaggcacagaccaagtccccgggtggctgcaggcagctccagcccggtcctgaggatcctcctcaccatggtcacgtgccttagtaactgtgcccaggaagtggcctgctgcttgctgtgctgctgcttttcctacttctgcccttccctgccacccctcgcatgtcacagctgacaagcaattccttgtcttccctggccccctgggggaagggctgagaaacagtccatgtgcaccccaaccttaatggcctgaggtgggcagaggggtgtggagcagcctggagtacagggccctgggggaggagcccactgatgaggggcgctctcccatagccatgtgttgaatgctaactaggctggggtggacgaactctgccaactgctgtcatcttagaagatagatgcagcagtaaggaatgtttgttttgcttttttctgaaattttctgaagcactgtggctgggaaacttcgaagcggaccctgtgctgcatgtctgctcctcccctgagcctgtctgcttgggggtggtaaaaataaaaatcccagtttattttcagtaccttacctaacagggttggctccaggcgtgggtggcctagaagatgaggggagtggtcttctcccagccttttaccctcttgcctcctgcctccgcgcttacacacgcactttaccacccggtcattccctggcctcttgctgccacttgtagtcttccttccttcctctcagggtaagggcagtgcctgctgtgcctgttggccactcccacacttcccctcccccaggagccctcatctgctgtgctgagtccaggaaagcatagttaggtagggagctggttggagaaggtgctagaactagaaggcagatgagactagcatgggcccacctggagggctgtccctaatggccccagtcgccttacctcacccacagcagtgcccttgtcttcctccaaaacagaaagcagtgacaaaagggggaggggtggtaatctgaagtctcactgctgagccttcagcttttatttttcactgtttcaaaacccgcattctattctagaatggtttttaaaatggaagatcttacctttttctatcttgttactctggggttttgtccccctaagagattgcactttttgtttggggtttattcagctgcatagatgaccagcttgatccctggtgaaatgaaaagccttccttctcctgaagcctctttccgccctgccctccactaacaacactgaggagcacaagcccaggcttgcccacctggtaggaaaggaagaaattagaacaatgggagccttggctcccctctcgtctcctcccctccttcttgtcactggctttgatgaggcccacttcccagaggctcctgggcctgtgagtgcaggagctcattctcccctcactgctgaagtctgtgacagcttcttcctccagttatgtctttcttccaaagcaatttcttaaccatcagccatgtgctgctatttctagggcttctgggctttgtcccttactgagagattagggactccacagctgccttgaggtagggcctggctgagagacaagggtagcagcaggtggcaggctgttaaaagacaggctgcctgaggagcctggagcaggtggaaacaggtggaagaaaccggccacagccctgctttaccgggctcacctctagggcattccagcaagaggctgatgcaggagaatggccagcaccaaaggacatttaaaagagtttttgggtttttttgtttgtttgttgttggtgtttgtttttttttttttttttttggcacacttgagctgactcagtgcaggtttaatatcctggtgacttgcagtcacattctaatgactttcaagggccagaatatggtgaaaatcacttaaaatatccgtcccttccatgccttagtttagcaggtaggctctatcttttgccatttctgtattttatgtgctgtgttcccgtttcactgggtatgaactgtgaaatcgactgaatcctggccactttatgagtttgtttggttttataaggcatttcaatgtacattctataaatacaagcactccatttgcaaacagatcttaagctaatattttctttcccattcatcttgccctccccctcctcccgccagctttaaagttcagtggagaagccagatggcaattcagacaaaggtatactcttcctgcttcatgggtggtggcacgggaatagatagcccttagccctttccctcccagtcccagctgagccctcagaccacttgcttcccacataacaatgtcgcctccatttccgaggaacatccttgcgtagagaatgaaatatgctgcaatcatttctgcatccttactcctcacccccaaagaaaaaaaaaaggcctagcagggaagcagcatgcaggcttcacagcttaatgccaaggacagcgagtgaggctgggagcttctcttgggcctgctgggtctgtcagctctcggaatagggacagtccttactggtgccccaaggtgggacttggagaatattttgcttggcatatgtttggtctgaatggtgtagttgctggttccctagagaggaaaaggtggcaggcccagctttgctgggaaatggctcttaatttccagttgaaaccctagtagaattgtgaatgaaaacctcaaggttgagcccctctgccaagcagcagagctagtagaaggggatgcaggggcaaagcactcagttgccaagcaaggaggagagatgtacgtgggctgtgtggcagtccccacaccctgccctggcttcttcaggttatcgcaccactatggaatcctttgcagaatggtactcatataatggtttaaaacaacacattcataattgactctgtgcaggatgtcactcaatcagtttgggtttgctttattttattttatatatatattttttggtatcctgtacattgcagtgggtgtgaagatagtattttaatatttgtacaaagtttaatttaattttaattgttctatgtatataactgcatttctaaataattaaaaaaaagttcttatgaaggcaaaaaaaaaaaaaaaaaaaaaaaaaaaaaaaaaaataaaaaaaaaaaaaaaaaaaaaaaaaaaaaaaaaaaaaataataaaaataaaaattaaaaaataaaaaaaaataatataaaaatggttaaaaaaaaaaaaaatatataaaaaaaaaaaatttttgggccctttgtgccacatgttctttatatctcgacaatttttttttttggcgcccaaattttgctcctctttgggaaaatcccccctatggggggggttataaaaaaataaggtggcgctttttaaacacactggggttgtgggagggcc

SEQ ID NO: 5675 - DNA, 2162 bp, Homo sapiens
agctgtctgaagtggttatgtatttattgtgtcattgttttttaagggaaaaaaagagttatcactaaatctctttaaaaataaattactttagcatctgctgacagtctgccagtgtttgcacctatgtattgcaaagacaggaatacctcccagtgccctagaaattgtaggtgaaatcttctgtctgcgtcttgaagctctcagctgtgtgtttgttttgttctttttctaggttacagcaccatgagcccacaggaggacagtgaaaatcctccatgcaacaatgaccccttgtcagccggggtcgatgtgggaaaccatgatgaggacttagacctggatacccccccctcagactgctgccctactaagtcacaagttccaccactaccggtcacaccaccctacacttcatcatagccaccacttacaggcggtcgtcacggtacacactgtcgatgcagaatgctaacaatctcctcacctccacgccaagatgagatctgggagctacagaatgttctggaaagaaaaagaaccggcttaaaacccacagcaagagacctcccttgtgtttgtgctttgtgcagagttgtttgagtcatttcctgcctgtcgacatggttaaaaacgagagaaacaacaacacagtcacatttgtgaagatgtgaggctggttctgaaatggaggggaaataagcctgatgaacagacctgccataacactaatggaaggtaacagaaggcgaacctccaaacacagagacggaacctgcaagtgaagctgagccagaggaatgttccaaagagccagaagcattcagctctccttaactggaagagagaaaaatctgctcacccagagactggaatgtggcacatgcagatacaaatgtgtgcattgaagatttcgctttgtttcttagcggtacctggataccacagttgctgtatggaactcatgttatgcctctaaacgatgcatctcagaatttctaagtaaaggattatttttctactatttattgaactttcaaacattctcaaactttggggaaaaggaaaggaaacacaggagaagttttcagcagttgccccgagctgttttgtgtgtaatgaagtggttctttgattaaggagctctatttcttatttaactgatatcccactgccccactccacaaaataggaaaatgaagaaatctttctctctgacttgtttacatcatttcacggaaacacatctttgtttgtaatgcagtattctttctctgtgtttgacagagatggggaggggcagaggaatttaagaggttttaaaagaaatgttatgtttcttatgacttgtttccactcctcgtacaatgctattcttaggtttctacgaaacctaatgttagaaccgcatcctttcagctaagggagggttggatttattttccttgttttagagactacaaatttttaaatatcccattttgactgagaatattgacatataagggaagaagttttctaaattgtgaaagtctggttcttaattaaagaattttttttttaatatcacggttaaaagctgctgccagttagccaagacattatccaccaaattgctttgtgatttatacagggattaatcaaatctggctactataacatggggcattgtaactttaaagtagtgttttaattacagtgatgtattttagactcacattttgtgattcaaatatgttataaaggcattcttgcaccatggtaaagaatgtgtgtggtaaatctccgtttatatgtagttggaaaaaattcactgaataatgttttaatgatagggtattatgatacaatgtaaaaaacaattggttcttcagcagtacagaaagtaaactatatatgtgctatcaggaaaccccttcatactgtgtataaaattgcaatctagtgaaataaactgtatgcaatggaaaaaaaaaaaaaaaaaaaaacaaaacaattacaacacaaacaacaaaagcgggccgccctaatctccgggggcaacgaccccacccctctgaaaggccccagggtgaaacagacgcggcttcacacgcgggaaccctggtctgagacctcttgtgctgcacccaagagccgaaaagggtccactccggttaacg

SEQ ID NO: 5676 - DNA, 3807 bp, Homo sapiens
  misc_feature (2234)..(2255): n is a, c, g, or t
gaattccctggatgggagcaaagacgtttcccgccggcgggagctgtggctgtgattgagagaggggttagaggcgggtcccagcgctgccgcaccatggcggaccagctttatctggaaaatatagacgagttcgtcacggaccaaaacaagatcgtgacatacaaatggctgagctatacactaggggttcatgttaaccaggccaaacagatgctgtatgattatgttgaaaggaaacgaaaagaaaattcaggagcccaactgcatgttacctacttggtgtctggcagtctcattcagaatggacattcctgccacaaggttgcagtagtgagagaagataaattggaagcagtgaagtccaagctagctgtgactgccagcatccatgtgtacagcatccagaaagccatgctaaaggacagtgggcctctgttcaatactgactatgacatccttaaaagcaacttgcagaactgcagcaaatttagtgctatacaatgtgcagctgccgtccctagagctcctgctgaatcctcttcgtcttccaaaaagtttgagcagtcacatcttcacatgtcaagtgagacacaagccaacaatgagctgaccaccaatggtcatggcccacctgcatccaagcaggtttcccagcagcccaaaggaattatgggaatgtttgcctccaaagctgctgctaaaacccaagaaaccaacaaggaaacgaaaacagaggctaaagaagtaacaaatgcatctgcagcaggcaacaaggcaccagggaaagggaatatgatgagcaacttttttggaaaagctgctatgaataaatttaaagtcaatttggactcagaacaagcagtgaaagaagaaaaaatagtggagcagcctacagtgtctgtcacggaaccaaagctggcaactcctgcaggcctgaaaaaatccagcaaaaaagcagagcctgttaaggtgctgcagaaggaaaaaaaaagggggaagcgagtagcattatctgatgatgagacaaaggaaactgaaaacatgaggaaaaagaggagaagaatcaaacttcctgaatctgatagcagtgaagatgaagtctttccagactctcctggggcttatgaagctgagtcaccatccccacctcctcctccgtctccacctcttgaaccagtgccaaagactgagcctgaacctccttctgtcaagagctcaagtggagaaaacaaaagaaaacgaaaacgcgtactaaaatctaaaacttacctggatggggaaggctgcatagtgactgaaaaagtctacgagagtgaatcctgcacagatagtgaagaggagcttaacatgaagacatcctcagtacacagaccccctgccatgactgtgaaaaaagaacccagagaggaacgaaagggccccaagaaagggactgctgctctgggcaaagccaacagacaggtgtccattactggcttcttccagaggaaataaactgccatctctggtagatcagagacttggagtggtcaagggagaagaccaagaaatgtactcctcacttactatgtaagttcatctagatctccacctcacctgtatcaaaagactgttctttcatcctgtgaggtttatactatttctggtttttaaccaaaaggaaatcatctggaagcaggaggcaaaaagctgttaccttctaatgacatttaaaaagcacagtctttgacctgtccaggagaaggatttactccaaaattatactggaacagttttcagaattctcactgaagccatttagtggctaacccactgtgctccactcaccctatgccctggtccgcatatggcacaggaattattccttcttgttcctctgtattctaagaattcatgtgggtgtttcttatccttacattctgctggatacgtttacccctcttgtcttcctgcagtaccacacttctgtcccctaacctcctgaggctgttctctgtaagtcttttaagttttggttggactaaaggctgaagtgaaaatctccctgtaatcctcttcctccattatgcagtacacggacacctggctacagaccaggacgtggcttgtgttctgttcctttcacaaaagctctctgggaccttcacttgcaattagtggttagggaaaagcctcaggcagaacacaaatagaaatttaatgatgtgttcaactccaccagaaattacctnnnnnnnnnnnnnnnnnnnnnngaggagctgccgtgctgctgatacggggtgtgctttatgctgctctttgcggtttgttgatcccctcctcccccactctcaatacctagagagtgaaacccgtacaatgagataaagactaaaaagagaaatcccttcctatatacagtgtgctacatttacaaaaaatttctccttaagaaaacagaatattcaaaaacagcacttttccaggaagttagtgaggaagataaggcacacatttatttataaatggatgttgctcctttgtatttttagcttccctatttgcttaaaagtacaggctccctaagagaggatggagagggagagactgaattgttagtaggtctaaacatcaaagaaaacatttttattagttacttatggaaaatcatctattacaatgataaccttcaagtgacttccattatggctggacaggcggtgagctcagtggattgcagtggtgtgctggtgattttgcacagtgagctctgcggaaggggtcaggctcaactgctgatgtgtctcacacgtagcagacaaggggtgtctgactggcttcttttgcctcaagatggtgtatgtcgtaagtgatgcaatcagctgtctgctttttaaggttgggattgtgctgactttgggattaacatgagtttctttagcacccaagcatgaacttgattaagaccagaagtttgggagatgagtcctggcattatgtctaggactaaagcagtggctttgtatagcaagctgagtaaaggttgacatattccaaaacccttctttttaaaatgaaaaaggatggagagaaggatggaaagcctggacttaaacctttagaaaaaacttctggagagaaatcccttttaaacagttacttttgtcattgcctctggtcatttgtctaaataggaatggaaaattaaaagaaaagcaacaatccaatcttttttctaaaaattatgctggggtctcgactaaaactgaatttgaattggaaaattctggtgttggttggagttccatcttgcaagggataatacaaatcctatgatctctatgcccaatatgctgcctcaactctgagctgtctgcaaggcttagtaagtattgagtggtgttttttttttctttttatacaataccatgttaaccacatgagttaaataaatttgagaagttgttttaaaaaaaaaaaaaaaactgagtatctgatgagtctcttatttgatggatggtaacagtgttgcaattatttaagctctgaatgggaagaaggctggttttcagttgatattgttaaaactgcatacccacagtctgagatgaacaagttatttgctgccttcatcgtttttttcagcactggggaaatgttagtttcagccaacctcattttttagttcatctagaagaaaatctagcacattgtattagtttggcttcatcacttgctagctgtatgactgtgggcaagtttcacagcctcaagttctttatcaaaataaaactaaaatgagttaacaaaaaaaaaaaaaaaaaa

SEQ ID NO: 5677 - DNA, 2630 bp, Homo sapiens
tatttaatagctgtgatcagtgattttcaaacctcaaatatagtatattaacaaattacattttcactgtatatcatggtatcttaatgatgtatataattgccttcaatccccttctcaccccaccctctacagcttcccccacagcaataggggcttgattatttcagttgagtaaagcatggtgctaatggaccagggtcacagtttcaaaacttgaacaatccagttagcatcacagagaaagaaattcttctgcatttgctcattgcaccagtaactccagctagtaattttgctaggtagctgcagttagccctgcaaggaaagaagaggtcagttagcacaaaccctttaccatgactggaaaactcagtatcacgtatttaaacatttttttttcttttagccatgtagaaactctaaattaagccaatattctcatttgagaatgaggatgtctcagctgagaaacgttttaaattctctttattcataatgttctttgaagggtttaaaacaagatgttgataaatctaagctgatgagtttgctcaaaacaggaagttgaaattgttgagacaggaatggaaaatataattaattgatacctatgaggatttggaggcttggcattttaatttgcagataataccctggtaattctcatgaaaaatagacttggataacttttgataaaagactaattccaaaatggccactttgttcctgtctttaatatctaaatacttactgaggtcctccatcttctatattatgaattttcatttattaagcaaatgtcatattaccttgaaattcagaagagaagaaacatatactgtgtccagagtataatgaacctgcagagttgtgcttcttactgctaattctgggagctttcacagtactgtcatcatttgtaaatggaaattctgcttttctgtttctgctccttctggagcagtgctactctgtaattttcctgaggcttatcacctcagtcatttcttttttaaatgtctgtgactggcagtgattctttttcttaaaaatctattaaatttgatgtcaaattagggagaaagatagttactcatcttgggctcttgtgccaatagcccttgtatgtatgtacttagagttttccaagtatgttctaagcacagaagtttctaaatggggccaaaattcagacttgagtatgttctttgaataccttaagaagttacaattagccgggcatggtggcccgtgcctgtagtcccagctacttgagaggctgaggcaggagaatcacttcaacccaggaggtggaggttacagtgagcagagatcgtgccactgcactccagcctgggtgacaagagagacttgtctccaaaaaaaaagttacacctaggtgtgaattttggcacaaaggagtgacaaacttatagttaaaagctgaataacttcagtgtggtataaaacgtggtttttaggctatgtttgtgattgctgaaaagaattctagtttacctcaaaatccttctctttccccaaattaagtgcctggccagctgtcataaattacatattccttttggtttttttaaaggttacatgttcaagagtgaaaataagatgttctgtctgaaggctaccatgccggatctgtaaatgaacctgttaaatgctgtatttgctccaacggcttactatagaatgttacttaatacaatatcatacttattacaatttttactataggagtgtaataggtaaaattaatctctattttagtgggcccatgtttagtctttcaccatcctttaaactgctgtgaatttttttgtcatgacttgaaagcaaggatagagaaacactttagagatatgtggggtttttttaccattccagagcttgtgagcataatcatatttgctttatatttatagtcatgaactcctaagttggcagctacaaccaagaaccaaaaaatggtgcgttctgcttcttgtaattcatctctgctaataaattataagaagcaaggaaaattagggaaaatattttatttggatggtttctataaacaagggactataattcttgtacattatttttcatctttgctgtttctttgagcagtctaatgtgccacacaattatctaaggtatttgttttctataagaattgttttaaaagtattcttgttaccagagtagttgtattatatttcaaaacgtaagatgatttttaaaagcctgagtactgacctaagatggaattgtatgaactctgctctggagggaggggaggatgtccgtggaagttgtaagacttttatttttttgtgccatcaaatataggtaaaaataattgtgcaattctgctgtttaaacaggaactattggcctccttggccctaaatggaagggccgatattttaagttgattattttattgtaaattaatccaacctagttctttttaatttggttgaatgttttttcttgttaaatgatgtttaaaaaataaaaactggaagttcttggcttagtaaaaaaaaaaaaaaaaaaaaaaaaaaaaactgccgcgaacacgctaaaaaaaaaaaaaaaaggggggggccgcttccaaagat

SEQ ID NO: 5678 - DNA, 2646 bp, Homo sapiens
  misc_feature (2465)..(2466): n is a, c, g, or t
  misc_feature (2468)..(2469): n is a, c, g, or t
  misc_feature (2471)..(2475): n is a, c, g, or t
  misc_feature (2478)..(2479): n is a, c, g, or t
  misc_feature (2481)..(2486): n is a, c, g, or t
ttccggcaagcctcgaggctcgcggggtttatgcacactaacttcactgagccaggagcacggaagttgtgccactgtgcaacttgggttttctttatcctgcagtctttacctcaaaagaaccgcacaccacagactccctccagctctttgtgtgtggctctctcagggtccaacaagagcaagctgtgggtctgtgagtgtttatgtgtgcttttattcacttcacacttattgaaaagtgtgtatgtgagagggtggggtgtgtgtgtcaaagagagtgaggaagagaaggagagagagatcaattgattctgcagcctcagctccagcatccctcagttgggagcttccaaagccgggtgatcacttggggtgcatagctcggagatgcagtccccctggaaaatccttacggtggcgcctctattcttgctcctgtctcttcagtcctcggcctctccagccaacgatgaccagtccaggcccagcctctcgaatgggcacacctgtgtagggtgtgtgctggtggtgtctgtaatagaacagcttgctcaagttcacaactcgacggtccaggcctcgatggagagactgtgcagctacctgcctgaaaaactgttcttgaaaaccacctgctatttagtcattgacaagtttggatcagacatcataaaactgcttagcgcagatatgaatgctgatgtggtatgtcacactctggagttttgtaaacagaacactggccaaccattgtgtcatctctaccctcttcccaaggagacatggaaatttacactacagaaggcaagacaaattgtcaagaagtccccgattctgaaatattctagaagtggttctgacatttgttcactcccggttttggccaagatctgccagaaaattaaattagctatggaacagtctgtgccattcaaagatgtggattcagacaaatacagcgttttcccaacactgcggggctatcactggcgggggagagactgtaatgacagcgacgagtcagtgtacccaggtagaaggccgaacaactgggatgtccatcaggattcaaactgtaatggcatttggggtgtcgatccaaaagatggagttccatatgagaagaaattctgtgaaggttcacagcccaggggaatcattttgctgggagactcagctggggctcattttcacatctctcctgaatggatcacagcgtcgcagatgtctttgaactctttcatcaatctaccaacagcccttaccaacgagcttgactggccccaactctctggtgctacaggatttctggactccactgttggaattaaagaaaaatctatttaccttcgcttatggaaaagaaaccactgtaatcacagggactaccagaatatttcaagaaatggtgcatcttcccgaaacctgaagaaatttatagaaagcttgtctagaaacaaggtgttggactatcccgccatcgttatatatgccatgattggaaatgatgtctgcagtgggaagagtgacccagtcccagccatgaccactcctgagaaactctactccaacgtcatgcagactctgaagcatctaaattcccacctgcccaatggcagccatgttattttgtatggcttaccagatggaacctttctctgggataatttgcacaacagatatcatcctctcggccagctaaataaagacatgacctatgcgcagttgtactccttcctgaactgcctccaggtcagcccctgccacggctggatgtcttccaacaagacgttgcggactctcacttcagagagagcagagcaactctccaacacactgaaaaaaattgcagccagtgagaaatttacaaacttcaatcttttctacatggattttgccttccatgaaatcatacaggagtggcagaagagaggcggacagccctggcagctcatcgagcccgtggatggattccaccccaacgaggtggctttgctgttgttggcggatcatttctggaaaaaggtgcagctccagtggccccaaatcctgggaaaggagaatccgttcaacccccagattaaacaggtgtttggagaccaaggcgggcactgagcctctcaggagcatgcacccctggggagcacagggaggcagaggcttgggtaaactcattccacaaaccctatgggggctgccacgtcacaggcccaaaggactcttcttcagcagcatctttgcaaaatgtctttctctcaatgaagagcatatctggacgactgtgcaatgctgtgtgctcccggggatcagtaacccttctgctgttcctgaaataacctttcataaagtgctttgggtgccattccaaaaaaaaaaaaaaaaaaaaaaaaaaaaaaaaaaaaaaaaaaaaaaaaaaaaaaaaaaaaaaaaaaaaaaaaaaaaaaaaaaaaaaaaaaaaaaannannannnnnaannannnnnnaggggggggggccctcataaaaaacccccccggggggccccaatttttcgcctaccccccttttttttttaaaaaagggcccccccattgggggcgccgttatataaaaaaaaggcctgcgcccccttttttaaaacacctggggaggggggaaaaagcg

SEQ ID NO: 5679 - DNA, 2100 bp, Homo sapiens
  misc_feature (1445)..(1477): n is a, c, g, or t
  misc_feature (1482)..(1482): n is a, c, g, or t
cctcatcaatgtaaataaacacacacacacacacacacacacacacacacacacacacacacacacacacacacacaaattagccgggcatggtggcacacgcctgtagtcccagcttcttgggaagctgaggcatgagaattgcctgaacctggaaggcggaggctacagtgagctgagattgcgccactgcactccagcctgggtgacagagcgagactctgtttcaggaaaaaaagaacagaaatacctgagactgggtaatttataaataaaagaggtttaagtggctcacagttctgcaggctgtgtaagcatggcaccagtgtctgctcggcttctggggagccctcagggagctttactcatggtgaaaggctaagtgggagcagagatgtcacatggcgaagcaggagcaagagagcagggaggtgccacacaccttcaaacaaccagattttgtgaaaactcactcattactgcaaggacagcaccaagccatgagggatccacccgcaggacccaaacaccttctattagggccaaccttcaacattggggattacatttcaatatgagattggagggacaagtatcccaactatatcaggcagaatatatgcattgatatatattgaaattataacattctctataatcaagtgactgtaaattatgtcgaatctgaccctggggaatgtgttacctaaagaatttgactaagaatcaggaactctgtgtccatgtcctggatgtatttctgtatgttcctataactctggacaaatcattaaacctctctgggcagcattttcctcatccatgaaatgaatgtgttcaatttgatctcaaagatctttccaaaatattaaatgccattaatcatggaatagaccaaattattgtatcacaggaacttgaatccagccagagaaaaattccctggacaattggataaacaaatatgattgctaccttatggatacaacggacttttacatttctttttagcctttttagtcagttgagggtaactcaagcagagtatgtccaatcattagcttcctttgatatttacattacaggtaaaaacggccaaaaatatattttaaggtctctccccaaataattgtttttatttttaaactatcaatgttgtttaaaataatcatgtacttgttgagttcctgaggtttggaacaaattacacataaaatttagaatactttatttctgaaaagcatatacatatatgttatgtttatttttccttgttgattagaaaggtgatggaatatgtgacaatgcaaaatgaattgataatttttctgtattttgagtgaaagttgtctgtaatatgtcaagcaagaatgttataattctacagtaatgtgtgacttcatgacagagctacattctgagaaatttgtcattaggtgatttcnnnnnnnnnnnnnnnnnnnnnnnnnnnnnnnnnacacnaacctaggtggtagagcctactgcacacctgggctagatggcaaagtctgtcgcttctgggctacagacctgtacagcatggtactgtattgaatactgtaggcaactgtaacacaatggtatctgtgtaatctaaacatagaacagataatacattgtgctacaatgtaacaatggctgtggcatcactaggtgataggaatttttcagttccattataatcttataggatctctgtcatatgtggtcaattgttgatcgaaacatgactgtatgtcgtattttcagaaaatggaataggtaatcatcacttgtgtgaattttaatcaaatgacttaggaaagaaactggatgtttcaaaagctgttgcatttattacaaatgtcacaaatacagctcttgccttttgagaatgttggagagatgtctttaaaaaatatgtttgtgtgtaaaaatgtgtctgtatgcaatagctagaaaaatgcctgtgtcttaagtcattactcatgttctaatttttgttctttgtactatttatctgtatgcttgttcttcagtatttcagactcaaaataaatttatttttttatgttaaaaaaaaaaaaaaaaaaaaaagaa

SEQ ID NO: 5680 - DNA, 3108 bp, Homo sapiens
ttgaaatcacaaagattagacacctttttagataggtgttcttcagcaccactgacaacacggttctgacagtatttcatgacagttatgtaacatttgtcctgcaagctgaggacagagaccttgtctgttgttgacagctacgtgaccagcacatagcatgaacctgatggatggtgacagttctacaacagatgcttctcaactaggaatctctgcagagctatattggaggaagtcattatgttatacagcctcatgatgatactgaggacagcatgaatgatcatgaagacacaaatggttcaaaagaaagtttcagagaacaagatatatatcttccaatagcaaacgtggctaggataatgaaaaatgccatacctcaaacgggaaagcattgcaaaagatgccaaagaatgtgttcaagaatgtgtaagtgagttcatcagttttataacatctgaagcaagtgaaaggtgccatcaagagaaacggaaaacaatcaatggagaagatattctctttgctatgtctactttaggctttgacagttatgtggaacctctgaaattataccttcagaaattcagagaggctatgaaaggagaaaagggaattggtggagcagtcacagctacagatggactaagtgaagagcttacagaggaggcatttactaaccagttaccagctggcttaataaccacagacggtcaacaacaaaatgttatggtttacacaacatcatatcaacagatttctggtgttcagcaaattcagttttcatgatctgaagaaatgatggaatggggagtgtagagaaatgagagtctgtatgattctggaacagagacatcagaaggaaagactggtgaaaagatgtatctttgtatattaatagctgtaatgtagcttcctgatgcttgactaattgaggtgttaattctgacttgagaatctttttcatgaatgattttaaagaaaaatttggattttaaaggtattaaaatatttttgttttgtacgagagtttgttgctctgtatgactcctgtatgcattgtatattgcaatttattactgtcagagatttgtagacagtttcttattttcatattgaatcatgttacttttgtaattcaagtaagcggctgggttaattcatgatgtttgcccttttaataaaatataagggtagagttcattttgaatgcaagttgcctttattataaatttgagtttgtcttggttataccttgcatgataacctagctagatttctagcatttgctgtatttattaaaattattatttttttggtaaaacattaatagtttaagcagcatcatttttttaaaaaatgtaattgaataagtgtgaatgcagaagcaaatattgtctgccctgttaaacttggtgcccattaacagtgtttacactgttcatcgtgcctgttaatgtagttttagttactggagcttttttaagactagatttggttttgagttacatttttaagaatgtgggaatatatttaagtttaatgtagtcctagtgctcttgaaatggtgcccctttcatttggtacatgattttttttcaaatcatatcttcaagtactatagtattctcttacagaagaggagttttatagtctgatggtaaatgtcttcattttacctttttaattgaaatgtcaagtttcctgttacactatggaaaccaagaaacatcagacatcattgcgtgtacagaccttttgcatgggtgagtggatgaaatggagaacagagtgagtgctgtgaacggtgtgaaatagaagccaacttctagtatgctgtcttcatctctgcaataaactaaacgtaaataatgtaaatagtataatttagtagtatgtacttggattgtttctttttgaaaagtgaggatttgtattttctcatctattctttttggtgttaattaacttgagggatttcttttttaagtttttaatatcaaaaattgctattgtatagtttgcctaaaaggaagttggagtgaatatcatctttgaaggacactcaaatttataaggtagaagcaatttcccagatataggctgaacagaaacatttactttgccagaaggagcctttaggagtatatgtgggctaatcagaggttaataatgtcctcatctcctactctccatttaaaaaacaaacttcattgtagtaaattcaaataggaaaaaatgggggagtagttaagcaaaatcaacagtcatcctactatgttgaaagaaccaatgttaatattttgataaatatcatttgtccttttactttgctaaatatgtatatttttataaaaatgggctcatattgtgcataccattttgtaacctgcttttttcacttaacaatatattgggaacatcttttccaggtcatgcatagtcttctgcatcatttttattggtttattattctgctgtatgactcaatcataattcatttaatcttctattggatattttgactatttacatcttttcacagttataaacagcacttcactgaatcccatgtacatccatgactgttttcttaaattctttgaattgctgggttaccaaatatgcaaaattttaaggcttttgatacttcgttatgagtgtatttttgagatattttccacttgatccaagcagtgtgtcactatataactgataaaagcacttggtctttgattatcagaaaacaaactctaaaattattttaaagattaatatttgtctcaagtagagaatgaagataaaaaaggaatttgaggccaggtatggggtgtctcatgcctataattccagcacttgggaggccaaggcaggcagatcactttgaggtcaggagtttgagaccagcctggccaacatggagaaccccccgtctctacaaaaaatacaaaattagcagggtgtggtggtgcacacctgtagtcccttactccctggtggctgaggcattatcccttgaacctgggaggcagagcctaaagtgagccgagctcgcgcactgactccagcctggtgacacagcaagactcttgtctcaaacaaacagga

SEQ ID NO: 5681 - DNA, 1048 bp, Homo sapiens
  misc_feature (810)..(810): n is a, c, g, or t
acctcccagagaaaggcacgaggctcagaccaaagttctaagacttctctaatgagtgagatgagaaacgcccagtctattggccgcagatgggagaaaccatctcctagtaatgtgactgaaaggaagaagcgtgggtcatcttgggaatcaaataatctttctgcagacactccctgtgcaacagttttagataaacaacacatttcaagtccagaattaaattgcaataatgagataaatggtcatactaatgaaacaaatactgaaatgcaaagaaataaacaggatcttcctggcttatcttctgagtctgccagagaacctaatgcagagtgcatgaatcaaattgaggataatgatgactttcaattgcagaaaactgtgtatgatgctgacatggatttaactgctagtgaagtcagcaaaattgtcacagtctcaacaggcattaaaaagaaaagtaataaaaaaacaaatgaacatggaatgaaaactttcagaaaagtgaaagattccagctctgaaaaaaaaaaaaaaaaatcaaagagacagtttaaaaatagttcagatgtcgatattggggaaaagattgaaaacaggacagaaagatctgatgtcctggatggcaaaaggggtgcagaagatcccggttttattttcaataatgaacagctggctcagatgaatgaacagctggctcaggtgaatgaactaaggaaattgacccttcaaactggctttgaacaaggtgacagagaaaatgtactgtgtaaaaaaaaaaaaaaaaaactcgagtttttttttttntttttttaggttttatatctttattcagaggtgattcaactatagaataaagcccttttagcactataaaatccaatgttttgaattttttttttttttttgctcagcaatacagttgcattttacaacttttataatcctgaagagatcctccttatttgggagttttttcatgcattcagggatttaccatgaaggcctgaatggggccaataataaagggtgccaatgaaagtac

SEQ ID NO: 5682 - DNA, 2555 bp, Homo sapiens
aatttaggtaagcattgattttgtatctagcgttagttacagattgaaaaaaaaaacaaaaaacattgctatttataacttagtatttcatagacttaagtgtattcctaatttaacggtgcaaatattaatgtatatactgtacagttcagattttaaagctgatatttttatatccctgaattgtaagccgtttgttacgctgcagtgctagatttgccagggaaccagaatttatggatgaactgattgcttatattttagtcagggtttataaatgtagatggtcaaatttacattgcctagtgatggaaaattcaactttttttgatttttttttccaatattaaaaaaggctctgtatgcatggtggggctatgtaagtactctttaaaactatggccctattaatcttacaagtgttacttatgggtcaagcaatgtaaactgtataaatgtaaaaacaacccctccacacacataacccctggaatatatggtaaaaacaagtagaagctgtttcagcgagtgggttttttccccctgcctgcggggggtgcctttctcattttcggcaaggtgatgattatctcatgggaaatgacaaagatctgcttttgtggcagaggactttgtagatttgttattttaagagaggttattcctttttattccttccctcccactaatttgttggcctttaacagcaattttgaaaactgggtcttctggttatgtttttgttttaaaatctttaaattagaggatgctgtgccattgagtactttaagttaatatgaggttctggttcaaggaaaacttacgttggatctgaaccaatgagcagatattttgatatgtgccactcttgcatatacatctcagtcctaactaaaggttctagtggcatccaggacctttagggaggcatttaataaacacttaataaataacaaaactacctttctgaatataaatctttgcaaatgtatccagataacttccattttgtgcctgtgttcaggcatgatttattttgcagttgccctaccattaacagacctccatttgtctcgtgtgtccacacgccccacttgtaggccagaaatagggcttcagacacagaggcttattttttccatatagactggagtggggaaaatttggccttagggaggacagacacaagtccaatgggtaaaccagcgagtagtaggtggacagccgtcccacacaagggtttgtatctgggctacacagattcccttcagaaaagcaccaatggtgagagagttcttcactcagtaacttacattccctggtctggtgcctttaaaaaaccatcagcaatgaaaaggaagtgcatacacatgacaaaaaaattcaaatagggcaaaagtcagagacagcatctcctttccattcttcatcccagtaccccaggtcctctccccagaagtaaccactcttacccagttttagtgtctccttcagacattcaaagcacattcgtataaatgtgtcttttaaaagtggtagtgacctatatgtgctgtgacatgcttttttccctttgtatgtggacatttcacgttagtgtatataggtctacccattctttcagtgactgcttgatagcctactcctaatgatggagttgactttcctcatacattgtgctacactggcacatgtgcacataaatcgggagcagcgtagttactgggacaaaggttacgtatttaagactgatggatattgccaattttcctccaaaagaaattctcctgatttacattaatgtaatgtaaatgagagtgtttgttccatcacaacctctcaatgtattagcagatttcttgattttgaagaaattttcagaacctgtgctgccacaagtgggcatccttttagaaaagactgttgcaatatgttgcttataaaggatggataataaatagtaaacaggtgatacttagcctgaagaaatgcaggtataaggtgaaggtactgccctcacttttcaagtacattctcaaaagataggggtaacatagcctgccaaaggcttaaggaaatgcagatatttattcacaataataatgtaactttcttttccttttttttttttttttgagatggagtttcgctcctgttgcccaggctggagcgcaacggcacaatctcagttcactgcaacctctgcctcccgggttcaagcaattctcctgtctcagcctccggagtagctgagattacaggtgcctgccaccatgctcggctaattttttatatttttagtagagacagtgtttcaccaagttggccaggctggtctcgaactcctgaccttcaggtgatccacctgcctcagcctcccaaagtgcaggggattacaggcatgagccactgcgtctggcaataatgtaactttgaagcttaaaaattaatcccagtttgtagcaataacagaagactatctacaacggaagaaagaagcaactgccttacagttctgtaaagaattggcaagaaaataaagcctatagttgccg

SEQ ID NO: 5683 - DNA, 506 bp, Homo sapiens
  misc_feature (417)..(417): n is a, c, g, or t
  misc_feature (432)..(432): n is a, c, g, or t
  misc_feature (440)..(440): n is a, c, g, or t
  misc_feature (451)..(451): n is a, c, g, or t
  misc_feature (459)..(459): n is a, c, g, or t
  misc_feature (479)..(479): n is a, c, g, or t
  misc_feature (493)..(493): n is a, c, g, or t
  misc_feature (504)..(504): n is a, c, g, or t
tttttttaaccaaactgttacatgtggctggccccagtaagctgacctggttgccatcttgagaccagacttaaatccccaaaaccaaatccacatttcaagtatcagtgaacaggtaatttttctgagaattttgaaaggagttagaagagagcttttccttggagtcacacaaaattacttaataaaacatcctaattagacgtttctgtcctgccccctagttcctaaagtcccctacagaatccagaagccccctcccacatctctagggtcctgcctctctccttcccttatgctgagcaaatcaacttctggcaggcagagaacaaggttgacagatggtacttgctggataaatacttttctcctgtcacagtattagggctcagaaaatgataccccaaaatatggtgncctggcatcctgagncactttgnaccaaggacantggaaggnctcgaagtcaagtctgtctngatcttctcctgancttctttctcntg

SEQ ID NO: 5684 - DNA, 2294 bp, Homo sapiens
  misc_feature (511)..(523): n is a, c, g, or t
  misc_feature (1278)..(1278): n is a, c, g, or t
gtcatacctgtgctcctgctgggcaggcccggtgtgttcaccatggaggcagcacgttcagctgtgcctgcctgcctggttatgccggcgatgggcaccagtgcactgatgtagatgaatgctcaggccgttgtcaacccggatattatggggatggatttcagtgcatacctgactccacctcaagcctgacaccctgtgaacaacagcagcgccatgcccaggcccagtatgcctaccctggggcccggttccacatcccccaatgcgacgagcagggcaacttcctgcccctacagtgtcatggcagcactggtttctgctggtgcgtggaccctgatggtcatgaagttcctggtacccagactccacctggctccaccccgcctcactgtggaccatcaccagagcccacccagaggcccccgaccatctgtgagcgctggagggaaaacctgctggagcactacggtgcaccccggatgaacagtatttgccacagcggggggannnnnnnnnnnnncttcatccccctgcagtgccacggaaagagcgacttctgctggtgtgtggacaaagatggcagagaggtgcagggcacccgctcccagccaggcaccacccctgcgtgtatacccaccgtcgctccacccatggtccggcccacgccccggccagatgtgacccctccatctgtgggcaccttcctgctctatactcagggccagcagattggctacttacccctcaatggcaccaggcttcagaaggatgcagctaagaccctgctgtctctgcatggctccataatcgtgggaattgattacgactgccgggagaggatggtgtactggacagatgttgctggacggacaatcagccgtgctggtctggaactgggagcagagcctgagacgatcgtgaattcaggtctgataagccctgaaggacttgccatagaccacatccgcagaacaatgtactggacggacagtgtcctggataagatagagagcgccctgttggatggctctgagccgcaaggtcctcttctacacagatctggtgaatccccgtggccatcgcctgtggatccaatccgaggcaacttgtactggacagactggaatagagaagctcctaaaattgaaacgtcatctttagatggagaaaacagaagaattctgatcaatacagacattggattgcccaatggcttaacctttgaccctttctctaaactgctctgctgggcagatcgcaggaaccaaaaaactnggagtgtacactacctgatggaactggacggcgtgtcattcaaaacaacctcaagtaccccttcagcatcgtaagctatgcagatcacttctaccacacagactggaggagggatggtgttgtatcagtaaataaacatagtggccagtttactggatgagtatctcccagaacaacgatctcacctctacgggataactgcagtctacccctactgcccaacaggaagaaagtaagtacagtaatgtaaaggaagacttggagtttacaatcagaacctggaccctaaagaacagtgactgcaaaggcaaagaaagtaaaaaaggaattggccattagacgttcctgagcatccaagatgaacattttgtagtgcaaaaagacttttgtgaaaagctgatacctcaatctttactactgtatttttaaaaatgaaggttgttattgcaagtttaaaaaggtaacagaattttaactgttgcttattaaagcaacttcttgtaaacatttatcattaatatttaaaagatcaaattcattcaactaagaattagagtttaagactctaaacctgatttttgccatggattccttctggccaagaaattaaagcacatgtgatcaatataacaatataatcctaaaccttgacagttggagaagccaatgcagaactgatgggaaaggaccaattatttatagtttcccaacaaaagttctaagattttttacctctgcatcagtgcatttctatttatatcaaaaggtgctaaaatgattcaatttgcattttctgatcctgtagtgcctctatagaagtacccacagaaagtaaagtatcacatttataaataccaaagatgtaacaattttaaaattttctagattactccaataaagtgttttaagttttcctatgaaaaaaaaaaaaaaaaagtctctaggacaaagctgggggttggcatatatgccttaaccacaaaggagaaaggtgatttatgcaaacatacagtaca

SEQ ID NO: 5685 - DNA, 1210 bp, Homo sapiens
  misc_feature (5)..(5): n is a, c, g, or t
  misc_feature (85)..(85): n is a, c, g, or t
  misc_feature (103)..(103): n is a, c, g, or t
  misc_feature (110)..(110): n is a, c, g, or t
  misc_feature (1078)..(1131): n is a, c, g, or t
catgntctggcatcacagttcactgtctgcagtgattaattctttgtagcataaaagaggaaaagagtcattaggtgtcttttanttcctttattcctagctntcatacntagatgttgaaggaaattccatcaatatggtgcaaatgacattcctgaaacttctgactgcctctgctcggcaaaatttcacctaccactgtcatcagtcagcagcctggtatgatgtgtcatcaggaagttatgacaaagcacttcgcttcctgggatcaaatgatgaggagatgtcctatgacaataatccttttatcaaaacactgtatgatggttgtgcgtccagaaaaggctatgaaaagactgtcattgaaatcaatacaccaaaaattgatcaagtacctattgttgatgtcatgatcaatgactttggtgatcagaatcagaagttcggatttgaagttggtcctgtttgttttcttggctaagattaagacaaagaacatatcaaatcaacagaaaatataccttggtgccaccaacccattttgtgccacatgcaagttttgaataaggatggtatagaaaacaacgctgcatatacaggtaccatttaggaaataccgatgcctttgtgggggcagaatcacatggcaaaagctttgaaaatcataaagatataagttggtgtggctaagatggaaacagggctgattcttgattcccaattctcaactctccttttcctatttgaatttctttggtgctgtagaaaacaaaaaaagaaaaatatatattcataaaaaatatggtgctcattctcatccatccaggatgtactaaaacagtgtgtttaataaattgtaattattttgtgtacagttctatactgttatctgtgtccatttccaaaacttgcacgtgtccctgaattccatctgactctaattttatgagaattgcagaactctgatggcaataaatatatgtattatgaaaaaataaagttgtaatttctgatgactctaagtccctttctttggttaataataaaatgcctttgtatataaaaaaaaaaaaaaaannnnnnnnnnnnnnnnnnnnnnnnnnnnnnnnnnnnnnnnnnnnnnnnnnnnnntttggggggggcccgaaaacccacatttcccaatggtggggtaaaaaaaaaaaaaagctgcgccccgtttacacatttt

SEQ ID NO: 5686 - DNA, 1675 bp, Homo sapiens
acagagatgtcatcatgaatctaaagtagtgctgcatatctaaaataataactaattatttctctgatttttcagagcagtaattgaaaagtttcattttctgtataatagtactagtttaagtttaagtacaagtttaggtactcgaatgacaaaattaccctgaagaaataaccttattatgtgttaaattgtattaaatgcatttaacatttggatgctaaatgataatgaaaattgctaaaggttctttaatatggttcaaatctataagacttttttcttttagtaatactcagagggtcattctgctgcttgttatgaatcatagattacattcatgtcagattgatcaatatgtatgttttatgatttaacagcaaaaacctcttcaaactgaaaatttgaaagaaaggtttcaatagaaaaattatatatatatttatacatatatatgtgtgtgtgttactctcacagttcaactactgttgaactcaatcttttaatttatagttatacgtaggctatttatgtgtccaattgtatacctagaatacttacttaaaacttagtttacaactctttttaagatgagaactaaggcaattttgatatgattcatggtctattctttaaaaaaaagatttcatttatgatagtatttgtaatgtttctgctggaaatcagaggcacgttccaagaggaaaatgtatataggagtacttttaaagaatatgtcactttgtaaattacatatcatgaaactaagcttttgacaagatacttaaaacctacagctgtaaaatacaggtttaaatggtgttcgtaatgctgagtgcatctgccagcccttttttattattaagtagaagattgtatctgtgccccttttttcgtagtggaaggtatatagccgagtataaaatggttttcttttgcattatctgtattcaaaaaacagggtagttatattaaagcttaccaaattgatggtgaatttatcagattaacctttttgtggtgcagatggttctaagtatcaggtgacagggtattctactctttctagtcaattaaaattgataatgcagcatgattcataaactaaccagctgtgcctccttttattttgaggaccctgtagtcactataataaatttctaagccaaatttttcaaacaagatagttcttatagaaggagaaataataaatatgtgtgtgttgatgcatgcacacagaatgacctgtgaaaggaaacttaaattttgccggtaaaacaaacatatctctacagactgtgattatacttcataagcatttaaatacagttttatttatttccttaaatatattacttgggtaattaattttagatttgattgcaaagagcactgtatagcagttgggaccagctcttggcttggcttggcttggcttattgttaagagtttattggatcaagactaacaaataactttgtgatgaaaattcttcaaaaatatagctactcttttcaagtataccatttaaaatatttcatcaggcagagccctgaccaggaaaaaaaaaaaaaaaaaaagaacgaaacgaaaacaaataattaaattgctccaaaacgtgttttcagtacgtcttcactggcccgacctgtgagaaacaaagggtaccgagact

SEQ ID NO: 5687 - DNA, 2133 bp, Homo sapiens
ggaaaaaggaagggagatcaaagattaggtgctggggactgaaaaataattttcatgtattaatactaccaaggatgatttggggaggaagacggagaaacagcaaggattatattttcctttgaagagttgctgggacctttcctaggttaggaattgtgtcttctcttatactggtggtataagaacaggaaataatacttattcctcaagggactatctgaggtaaaagacctgttctgttttatcttctgtcagctcctctggtgctatgcctgtggtactgattgagctaaagaagaaaagagaggaggttccctgggagggagtgggaaaggttagtaagaggggactagataggtatgctcatccttaaccttctaggagaaccggagccttaccatcaaacttcggaaacggaagccagagaaaaaggtagaatggacaagtgacactgtggacaatgaacacatgggccgccgctcatccaaatgctgctgtatttatgagaaacctcgggcctttggcgagagctccacggaaagtgatgaggaggaagaagagggctgtggtcatacacactgtgtacgtggccaccgcaaaggacggcgtcgtgcaaccctaggaccgacccccaccacccctccccagcctcctgacccttcccagccccctccagggccaatgcagcactaaatccctctctcctccagcattcctgtgtctgtctggccctaaatgtatccatgtggctacttctccagccccctccttccctctcttctgcctgatagagggaagaggaagaggaggacgaacagagatcctgaaattctgacttgctgctattccagaacccagcctcctgggtttccccagtcctcatttttcctcccaatacccacccttctctctcgagggatctaggcaccttggtcccagtgtcttccttttgttctcactgccaaactgcctgtcctgggatctagttatcttggccctgcactctcaacatgagtagcgaacacttaaattgggttttcaacagtcccagctttcactgccagggtcccagtcagattccaggaatttgcgccctaactttgcttgctaatcctggtttagagctatcccactaaaatatttaatcctaattcttagtccttgcctgtgagatatgaggtcttacaggagacctcagagctcccagcccttctcctcctgctaacccttctcacaccctcaagaggagttagaaaagaggtccttgtcattctcacctcttatggaaaatggaataagaaataatcatatcctttcttcccacccttctcctgttatttaggatttctgacaaagctggcttgagattggtcacttagagccgactgtctcctctgccttttgtttttcagcttcagagacagatccaatatagtcccagggacctgggtctctgggagaggaaggaagagggagggagcaaagagattggggtatgtcccctgtagtacactcttacctcttacttcctagactttgatttctccggcagcccagatgttcagttctcttggcccctctctaccccttactgggatctggttttcattttccggtccttttgccatacacagttacagagatcagtcaaatccataccaccactgagatctcatttattgccacagatgcacaaaataaataacccaaaatcacaaaaaaaaaaaaaaaaaaaagaaaacacaatataatcagaaaaaaaaaaaatatcaatcaaaataatataccctaaaagacacacaaacaaaaaaaaaaacaataaataaaatccccttccaagcaccctcaatcataattcaccaacacacaaaaaaggcggggggagcacgctgacctcctatattatcgcgccggcggcgagactaaggaacgccagcctcgatcttattgatagtgagggcgctcgcccactgaggtaagtcatatgcaagaatatgagctgaggcagcggcgcgaccacaacactagcacgccttgcgggacaagtcaatcacagtgcggttataagttgagtacgacccacctactctgtgggggagcgctatcaagaaccaacctatcatagtacat

SEQ ID NO: 5688 - DNA, 1428 bp, Homo sapiens
aaaaatttttatttggcccgggggccccttgggcaccacccaggggggttacccgtggggaggggcaaaggtcttggggccatccccgcccgcttttgcaaagtgggaggcagcttgggggaataatatattccttcggtgggcctggatcaaaggaggggcaacttcttgggctgtggggccaccaccagttgctgaggtggcagctatggggatgtgcagcagcagaaaccggtttcgaaatatgcccagtcactctgcccgagtgggctccctaagctggaacagctatatcctgtccagtggttcacgttctggcccacatccaccacccatgatgttcgggtagcagaacaccatgtggccacactgagtggccacagccaggaaagtgtgtgggctgcgctgggccccagatggacgacatttggccagtggtggtaatgataacttggtcaatgtgtggcctagtgctcctggagagggtggctgggttcctctgcagacattcacccagcatcaaggggctgtcaaggccgtagcatggtgtccctggcagtccaatgtcctggcaacaggagggggcaccagtgatcgacacattcgcatctggaatgtgtgctctggggcctgtctgagtgccgtggatgcccattcccaggtgtgctccatcctctggtctccccattacaaggagctcatctcaggccatggctttgcacagaaccagctagttatttggaagtacccaaccatggccaaggtggctgaactcaaaggtcacacatcccgggtcctgagtctgaccatgagcccagatggggccacagtggcatccgcagcagcagatgagaccctgaggctatggcgctgttttgagttggaccctgcgcggcggcgggagcgggagaaggccagtgcagccaaaagcagcctcatccaccaaggcatccgctgaagaccaacccatcacctcagttgttttttatttttctaataaagtcatgtctcccttcaaaaaaaaaaaaaaaaaactcggactagttcttctcttctcgcctcggcccctcaagaagttttcaagaccattcgctttgggccgccgggccccacaaggtaaagggaacatgggccaagcctcgcttcctaaggaaaatcctgggccatgaactacagccttgggatttctccccaaataaaaaaaagcccccgggggggcaaaccccacgcggttccttcaatacaaactcccgcgatccggggttccctcgaacggcccactttaccggggggaatcttatatcacacccggggggagcccccacagccgggaacatttccacacaattatcaaattactaatcgccgcggctgagcccccgttgggccacccatatccattggcgccagaatcaccagtgggtgagc

SEQ ID NO: 5689 - DNA, 1825 bp, Homo sapiens
gtgaaagctgaaagaaaattcattgaagatagggttaaaaaaataatagaactgattaggaaagtctgtggcgattcagataaaggatatgttgttattaatcaaaagggaatgaccccttttccttagatgctctttcaaaagaaggcatagtcgctctgcgcagtagctaaaaggagatatatggagaggcggactcttgcttgtggtggggtagccctgaattcttttgacgacctaagtcctgactgcttgggacatgcaggacttgtatatgagttatacattgggagaagtagaagtttacctttattgtagtatatgtaacttaccctcgtttctgtctactattattgatcaaaggaccaaataagcacacactcactcagatcaaagatgcagtgagggacggcttgagggctgtcaaaaatgctattgatgatggctgtgtggttccaggtgctggtgccgtggaagtggcaatggcagaagccctgattaaacataagcccagtgtaaagggcagggcacagcttggagtccaagcatttgctgatgcattgctcattattcccaaggttcttgctcagaactctggttttgaccttcaggaaacattagttaaaattcaagcagaacattcagaatcaggtcagcttgtgggtgtggacctgaacacaggtgagccaatggtggcagcagaagtaggcgtatgggataactattgtgtaaagaaacagcttcttcactcctgcactgtgattgccaccaacattctcttggttgatgagatcatgcgagctggaatgtcttctctgaaaggttgaattgaagcttcctctgtatctgaatcttgaagactgcaaagtgatcctgaggattacagctgtggaatttttgtccaagcttcaaataattttgaaagaaattttcccatatgaaaaaaggagagaacactggcatctgttgaaatttggaagttctgaaattatagtatttttaaaaattgcactgaagtgtatacacataaagcaggtcttttatccagtgaacaggatgttttgctttagcagcagtgacataaaattccatgttagataagcatatgttacttaccttgttattaaatatttcttgaaaagcaaattttaatggtttaattttatgtggacgtatgttaaattatccaactaccctattgttaagcatttggttttaaaatttttatgctaatataaatgctcaagtaatttaaaatattgaaagcatccctgttggtataaatttctgagtaaatgcattggatcagttggactttgaacgcctttgaaatggctttgctaaaatgctcccgccacaaagttgtaggaaatgggaagaggagtcacctagaggcaagggagttgagagagctgcaactgtaaagggcaagaacaggcagaggcaacaagatggatggaacgcggtgttgactaaggtccattggtttttgcgtggaattccgaaaaacgcccgtttccctgtaccctttcactccactggagctatgagcaaaattctctttccccccccccccgcctttgcccgccgcattccttctttcacggccatactctcggttgcccgcgcgtgtttgccgctcactagctctcgcggccgttaccgcgctgtcacgcctcccgggtacgggcccctgtcgcaccgggtccggcacgcgtttgtcccaccctcgcccattctctgccgctgcgcttacctacccattgtccatgtcctccgcgctatccgctccttcattaaactaatataccttttctccccctcc

SEQ ID NO: 5690 - DNA, 3787 bp, Homo sapiens
  misc_feature (1240)..(1261): n is a, c, g, or t
gaagggccgcagagcctggcgcggagccggcgagattttggtggggtctcacctgttgcgtgactcccccacagtccggccgcgggagtccgaccctgaatgcccagggagtgttgagagaaatctggacgagtttcgggtcccgctcccttgggagcacgtggcctaccagcctctcgattgcagggttgggtggtcgcgacaccggggtcgccttgaggccagtccggctgccgaggtctgcgggagtccacctccggccagctggcaattttgaaagactgccttactttccccatctcagtgccagggcaggggcccttggagtgacttggctggggtctgtggcccgatccccctgccgtccctcaggacccgggctttctgctgtacagacttctcgtgggcagcctcccctcggaactcgggcatcatggcctcagaggctcggggtggtctgggggcccctccgctgcagtctgcccgatccctgccgggccccgccccctgcctcaagcacttcccgctcgacctgcgcacgtctatggatggcaaatgcaaggagatcgccgaggagctgttcacccgctcactggctgagagcgagctccgtagtgccccgtatgagttccccgaggagagccccattgaacagctggaggagcggcggcagcggctggagcggcagatcagccaggatgtcaagctggagccagacatcctgcttcgggccaagcaagatttcctgaagacggacagtgactcggacctacagctctacaaggaacagggtgaggggcagggtgaccggagcctgcgggagcgtgatgtgctggaacgggagtttcagcgggtcaccatctctggggaggagaagtgtggggtgccgttcacagacctgctggatgcagccaagagtgtggtgcgggcgctcttcatccgggagaagtacatggccctgtccctgcagagcttctgccccaccacccgccgctacctgcagcagctggctgaaaagcctctggagacccggacctatgaacagggccccgacacccctgtgtctgctgatgccccggtgcacccccctgcgctggagcagcacccgtatgagcactgtgagccaagcaccatgcctggggacctgggcttgggtctgcgcatggtgcggggtgtggtgcacgtctacacccgcagggaacccgacgagcattgctcagaggtggagctgccatacccnnnnnnnnnnnnnnnnnnnnnntggctgacgtcaatgtgctgatggccctgattatcaatggccccataaagtcattctgctaccgccggctgcagtacctgagctccaagttccagatgcatgtgctactcaatgagatgaaggagctggccgcccagaagaaagtgccacaccgagatttctacaacatccgcaaggtggacacccacatccatgcctcgtcctgcatgaaccagaagcatctgctgcgcttcatcaagcgggcaatgaagcggcacctggaggagatcgtgcacgtggagcagggccgtgaacagacgctgcgggaggtctttgagagcatgaatctcacggcctacgacctgagtgtggacacgctggatgtgcacgcggacaggaacactttccatcgctttgacaagtttaatgccaaatacaaccctattggggagtccgtcctccgagagaatctttcatcaagacggacaaccagggtatctgggaagtacttgggtcacatcattaaggaggtgatgcggacctgggagagcaaataccagaatgcagagctgcggctctccatttacgggcgctcgagggatgagtgggacaagctggcgcgctgggccgtcatgcaccgcgtgcactcccccaacgtgcgctggctggtgcaggtgccccgcctctttgatgtgtaccgtaccaagggccagctggccaacttccaggagatgctggagaacatcttcctgccactgttcgaggccactgtgcaccctgccagccacccggaactgcatctcttcttagagcacgtggatggttttgacagcgtggatgatgagtccaagcctgaaaaccatgtcttcaacctggagagccccctgcctgaggcgtgggtggaggaggacaacccaccctatgcctactacctgtactacacctttgccaacatggccatgttgaaccacctgcgcaggcagaggggcttccacacgtttgtgctgaggccacactgtggggaggctgggcccatccaccacctggtgtcagccttcatgctggctgagaacatttcccacgggctccttctgcgcaaggcccccgtcctgcagtacctgtactacctggcccagatcggcatcgccatgtctccgctcagcaacaacagcctcttcctcagctatcaccggaatccgctaccggagtacctgtcccgcggcctcatggtctccctgtccactgatgatcccttgcagttccacttcaccaaggagccgctgatggaggagtacagcatcgccacccaggtgtggaagctcagctcctgcgatatgtgtgagctggcccgcaacagcgtgctcatgagcggcttctcgcacaaggtaaagagccactggctgggacccaactataccaaggaaggccctgaggggaatgacatccgccggaccaatgtgccagacatccgcgtgggctaccgctacgagaccctgtgccaggagctggcgctcatcacgcaggcagtccagagtgagatgctggagaccattccagaggaggcgggtatcaccatgagcccagggcctcaatgagcctggtccatgaagtgcccaccacatcgcagcacttttaccacgttttgtcctcagaccccgcccatgctgtgtggtctctgcatgtctccattcttctctgtctctgtcttgcatgtctcctaccatgtcactgtccctgggccacccagtgaaagcaaagcctgggaatctgctcattgttgtttgggctcaggtattgagcctgatggcccaggtattgagggcctcccctgctggtggccctgtcctgggatcctcagaagcctgactgtcctatgggcttctccagtgtccacaggggcttgggatggttgtggggggctggcccctctagcctttccggtccttcctgggcaaatctaagccttggccagggccgaagtttaggcccctgtcttgttcatgtagccgaggggcaggcgggggacctctacacctctgctgtgggcacggggctgctgagggtctgtggaactccagcagctctgcactgggtagagctgggcctagagctcagtcacaggcctgggcttcctggcctgagtgggtagacgcaggcggcagaggtgctggaccacatctccgccaagtcactgcccagcagccttctccgtcctgtccccagcccacgtgctccttgggtgtcagcttcctgtgcctctgtgggagagggcagctgccttgtgttatgtctggggccacagttgctgcaaagtcctggatctgccactcaaccccgggagtggtgttcccagtgtggctcccagagctttgaccagattgtgatcccagctggcccctatgttgtgttctggactgaggcctttgctgtgaactgcagtgtttcatacgaaccatctttcctagtgcatgagaaataaagattatttaagtaaaaaaaaaaaaaaaaaaaaatggtggacgctcagcggtggagctctgcagcaag

SEQ ID NO: 5691 - DNA, 2857 bp, Homo sapiens
tggccggggcagaggaacagagggcagaacggggcatccctggaaaccagggggagcctgggtccaaaggccagccgggcgactctggcgagatgggcttcccaggaatggcaggtctcttcggacccaagggcccgcctggagacattggcttcaaaggcatccagggccctcgggggccacctggcttgatgggaaaggaaggcatcgtcgggcccctcggaatcctgggaccttcgggactcccgggtccgaagggtgacaaaggcagccgtggggactggggattgcaaggtccgaggggtcctcccggccccagagggcggcccggccccccgggtcctccagggggtcctatccaattgcaacaagatgatcttggggcagctttccagacgtggatggacaccagtggagcactcaggccagagagttacagctatccagaccggctggtgctggaccagggaggagagatctttaccaaagagaaccccggccgggtctgcagggacctcatggactgtgagcagaagatggtggatggtacctactgggtggatccccttggctgctcctctgacaccatcgaggtctcctgcaacttcactcatggtggacagacgtgtctcaagcccatcacgggctccaaggtcgagtttgccatcagccgggtccagatgaatttcctgcacctgctaagctccgaggtgacccagcacatcaccatccactgccttaacatgaccgtgtggcaggagggcactgggcagaccccagccaagcaggccgtacgcttacgggcctggaatggacagatttttgaagctgggggtcagttccggcccgaggtgtccatggatggctgcaaggtccaagatggccgctggcatcagacactcttcaccttccggacccaagacccccaacagctgcccatcatcagtgtggacaacctccctcctgcctcatcagggaagcagtaccgcctggaagttggacctgcgtgcttcctctgacctctgacctcgtggccactctaggcctcatggaggagggaagaggaagaggcaaggggagggtactgaggggcagatggctccaggagaggcagctcccctgcccaagggtccttgggcagaccccagctgttgtttgcccagtaagaagtgggtgggggtaggaggggatagggtgtccttgggaacaatggatcccagcttagccccaaagaccaaccaaagagccagccagagtaagctggacctgcaacctgcctgagccccgtggcctctcagctctgcggccaccccgttccctccccagcttcctgcccaaagagccccacattcaagccaacttgagggaagggggcgtctcgtcagctggtccctgctagggagctattgatgtgcaatattagaaaggagacatgaaaaaaggagaaaaggaaagacagaagtgtatatatatattatttaaacaaacaaaaagaaggtgcgttactattttttttttcacccgggaaagaggtgagaggatgggaaggagcagccaggcgtgggaagcggcgagatcctcgggctgggggtgcccacgtttgctacctcccactgtgaaatcgctggtgctcacaattgtctctcacagtgtatgtgatttttttaaggaaaaaaaaaaaatccctatttaagattctgaaggtgctaccattattttgccacagactttgaagaaacttttggatgtggggcatcatccgcatctttctctctcctccaaatgacaaagtttggggaatttttgaattttcctagcatcgcccttgtgctcatcaggtaatctgctaaggaggaaaaaagaaaagaaaaaaggaaaaaaaaaaaaaaaaagcaaaacaaaaacaaaaacaaaaaccctaccagaaaccagaagtagagagatttaccatataacttatggactttgaaatgtctgtccttttaaggcagcagggaggcctgggtgcgaacatgttggcttggcccttcacggtcctggagggaggtgaggctggccttggaaggcgtgccctggagaggtcttgggtgaaaacttgaccttgaagaaaccaatcacaaaagcggcgttgggtcagggctaggcttagaggtgaagcatcaacatggaaccatctcaggaagccgcatcgcctcttccgaggtcctcacttccaggagcctgtccttgcaagatgcaatcatcgttcctgctttttcattgtcattaaattctgtagaaacccattgtcattagctccaagtgtaaatttgggtcaaggagacagaataataatgggaatctcggagttcgacaccatagtgacgttcagcgtcctctgaattgtgctacatcagcgaacaagtcggcgcttgaattggattttgaggttattttaaccatggaattatttttatagaaggggaaaatgtatgtgaaagtctctatttgtgtatttctctcctaaagttgtgtctctttgggaattggatttgatttttattatttaatacctcactttggcccgtcccccctcccaacacttctgtatcctcgccctgccgccccagcctggacgctctgcgtggaagtgcgtgtttgtagcagctcgggcctcatctcagcgctcggatccctcctgctgccagaatccactggcctctgtctcattcttgggttttcctgctgtcttcgtttacgtctctgtccacatgtcagtgtattaaaaccccaatgggttccgtttctccttttcccctctggattttaaataaatatttaaaactgaggcaatggaaaaaaaaaaaaaaaaaaaact

SEQ ID NO: 5692 - DNA, 3122 bp, Homo sapiens
atgcctgtggccggctcggagctgccgcgccggcccttgccccccgccgcacaggagcgggacgccgagccgcgtccgccgcacggggagctgcagtacctggggcagatccaacacatcctccgctgcggcgtcaggaaggacgaccgcacgggcaccggcaccctgtcggtattcggcatgcaggcgcgctacagcctgagagattattcaggacagggagttgaccaactgcaaagagtgattgacaccatcaaaaccaaccctgacgacagaagaatcatcatgtgcgcttggaatccaagagatcttcctctgatggcgctgcctccatgccatgccctctgccagttctatgtggtgaacagtggagctgtcctgccagctgtaccagagatcgggagacatgggcctcggtgtgcctttcaacatcgccagctacgccctgctcacgtacatgattgcgcacatcacgggcctgaagccaggtgactttatacacactttgggagatgcacatatttacctgaatcacatcgagccactgaaaattcagcttcagcgagaacccagacctttcccaaagctcaggattcttcgaaaagttgagaaaattgatgacttcaaagctgaagactttcagattgaagggtacaatccgcatccaactattaaaatggaaatggctgtttagggtgctttcaaaggagctcgaaggatattgtcagtctttaggggttgggctggatgccgaggtaaaagttctttttgctctaaaagaaaaaggaactaggtcaaaaatctgtccgtgacctatcagttattaatttttaaggatgttgccactggcaaatgtaactgtgccagttctttccataataaaaggctttgagttaactcactgagggtatctgaccaatgctgaggttatgaacaaagtgaggagaatgaaatgtatgtgctcttagcaaaaacatgtatgtgcatttcaatcccacgtacttataaagaaggttggtgaatttcacaagctatttttggaatatttttagaatattttaagaatttcacaagctattccctcaaatctgagggagctgagtaacaccatcgatcatgatgtagagtgtggttatgaactttaaagttatagttgttttatatgttgctataataaagaagtgttctgcattcgtccacgctttgttcattctgtactgccacttatctgctcagttccttcctaaaatagattaaagaactctccttaagtaaacatgtgctgtattctggtttggatgctacttaaaggagtatattttagacaataatagtgaatatattttgccctatttttctcattttaactgcatcttatcctccaaatataatgaccctttaggatagagtttttttttttttttaaacttttataaccttaaagggttattttaaaataatctatggactaccattttgccctcattagcttcagcatggtgtgacttctctaataatatgcttagattaagcaaggaaaagatgcaaaaccacttcggggttaatcagtgaaatatttttcccttcgttgcataccagatacccccggtgttgcacgactatttttattctgctaatttatgacaagtgttaaacagaacaaggaattattccaacaagttatgcaacatgttgcttattttcaaattacagtttaatgtctaggtgccagcccttgatatagctatttttgtaagaacatcctcctggactttgggttagttaaatctaaacttatttaaggattaagtaggataacgtgcattgatttgctaaaagaatcaagtaataattacttagctgattcctgagggtggtatgacttctagctgaactcatcttgatcggtaggattttttaaatccatttttgtaaaactatttccaagaaattttaagccctttcacttcagaaagaaaaaagttgttggggctgagcacttaattttcttgagcaggaaggagtttcttccaaacttcaccatctggatactggtgtttctttacagattcctcccttcatttctgttgagtagccgggatccttgggaggcatgtaggaagcccgctggatcatcacgggatacttgaaatgctcatgcaggtgggtcaacatactcacacacccttggaaatggtggcgtgccccagaatgtcatcaggggaggttggctcctcaatccacaatggcttgaacttggccagcttggacatccactccaccgccttcagggcaaaatccccagcgctggtttggcatcccatcattcaaagtcttttccggtccaatcatgtctcggatgatttggcatcttcgcatgtcatcctggagatcagcacccacctttactttaaacctggtccagccatccttcagcgcctgggcacagagctgcttcaacgtgtcatctgagtaccccagccaggcgcacgatgtcgtgtaagcagggtatccttgtgccagcatttgcttctctctttcttttttaccaatttgacctttctgcagtatttctagggcatcctcctcagtcaggacatcagtgatgtacctgaaatctatgcaggataccagcatcctgggatcctcactggggatccatgtccacaagtaacttccagacaggctttccctcctgcttggcccacaagtcccacaccgcgtttaggacggccgctgtcgccaggtgcaccacgcccttttctggaccaatccatctgagctgcccatcacttgtgagctgcctatagaagcctctgaagtcaccaacaatgtccttgaggtccttgttgagcacatggtgggcgagggcattcacagcacagacaacaacttcagtgccttttcccagagtgaaggtaattccacaccccttgattccatcttctgcatcagtttctatgacgacataggcagccgagtagtcagggtccgtgtgcatggcgtccgcgccgtggcccccaagcgacgtggggaagcgcacgtcccggaccgagagccgggagatcctgccgcgcaccatggcccctgcgccccgtggccgcggccctcgtccgaattgc

SEQ ID NO: 5693 - DNA, 2255 bp, Homo sapiens
  misc_feature (45)..(45): n is a, c, g, or t
ggacgcgtgggcttgggccaattggacctccaggtgtacgaggcnagtgtaggagaagcaggacctgagggccctcctggtgagcctggcccacctggccctccgggtccccctggccaccttacagctgctcttggggatatcatggggcactatgataacgcatgcgggatccactgccgtgagtttactgaagatcaggcggctcctgatgacaaaaacaaaacggacccaggggttcatgctaccctgaagtcactcagtagtcagattgaaaccatgcgcagccccgatggctcgaaaaagcacccagcccgcacgtgtgatgacctaaagctttgccattccgcaaagcagagtggtgaatactggattgatcctaaccaaggatctgttgaagatgccatcaaagtttactgcaacatggaaacaggagaaacatgtatttcagcaaacccatccagtgtaccacgtaaaacctggtgggccagtaaatctcctgacaataaacctgtttggtatggtcttgatatgaacagagggtctcagttcgcttatggagaccaccaatcacctaatacagccattactcagatgacttttttgcgccttttatcaaaagaagcctcccagaacatcacttacatctgtaaaaacagtgtaggatacatggacgatcaagctaagaacctcaaaaaagctgtggttctcaaaggggcaaatgacttagatatcaaagcagagggaaatattagattccggtatatcgttcttcaagacacttgctctaagcggaatggaaatgtgggcaagactgtctttgaatatagaacacagaatgtggcacgcttgcccatcatagatcttgctcctgtggatgttggcggcacagaccaggaattcggcgttgaaattgggccagtttgttttgtgtaaagtaagccaagacacatcgacaatgagcaccaccatcaatgaccaccgccattcacaagaactttgactgtttgaagttgatcctgagactcttgaagtaatggctgatcctgcatcagcattgtatatatggtcttaagtgcctggcctccttatccttcagaatatttattttacttacaatcctcaagttttaattgattttaaatatttttcaatacaacagtttaggtttaagatgaccaatgacaatgaccacctttgcagaaagtaaactgattgaataaataaatctccgttttcttcaatttatttcagtgtaatgaaaaagttgcttagtatttatgaggaaattcttcttcctggcaggtagcttaaagagtggggtatatagagccacaacacatgtttattttgcttggctgcagttgaaaaatagaaattagtgcccttttgtgacctctcattccaagattgtcaattaaaaatgagtttaaaatgtttaacttgtgatcgagacctacatgcatgtcttgatattgtgtaactataatagagactctttaaggagaatcttaaaaaaaaaaaaaacgtttctcactgtcttaaatagaatttttaaatagtatatattcaggggcattttggagaacaaagtgaatttacttcgacttcttaaattttggtaaaagactataagtttagacatctttctcattcaaatttaaagatatctttctcctcttgatcaatctatcaaatatggatagaagtcacactagtatttaccatttaatacattttacacttttcttatttaaagaaggatattgaacttgccaaattaattggacatttagaacttttacaaaacatttgtcccaagggactcctaaattgagactcttcccacattgtacaatctcatcagtcctgaagcctataatgaagaaaacagatctagaaactgaagttgtggagctgactctaatcaaatgtgatgatgggaatttgaccatttggctttgaacttccttggaaaattgacccaacattcttaagattgagtactcatttctaaagtggaatggacttactatcctgtatattttaagatactcgaaagggggacagcgcggtatattccaagactggatggccggtcaaaaggttttatttcctaagagggggaatctccttaaatttctaaaaaggtatccccctgtgaatacgcatatcccgttaaaaatgcaagtcgcccctataataatgtatttccacagaccccataagaggatatttaagccccattttttttc

SEQ ID NO: 5694 - DNA, 1998 bp, Homo sapiens
  misc_feature (261)..(266): n is a, c, g, or t
  misc_feature (275)..(304): n is a, c, g, or t
cttctgtgtgtgcacatgtgtaatacatatctgggatcaaagctatctatataaagtccttgattctgtgtgggttcaaacacatttcaaagcttcaggatcctgaaaggttttgctctacttcctgaagacctgaacaccgctcccataaagccatggcttgccttggatttcagcggcacaaggctcagctgaacctggctaccaggacctggccctgcactctcctgttttttcttctcttcatccctgtcttctgcnnnnnnatgcacgtnnnnnnnnnnnnnnnnnnnnnnnnnnnnnnccgaggcatcgccagctttgtgtgtgagtatgcatctccaggcaaagccactgaggtccgggtgacagtgcttcggcaggctgacagccaggtgactgaagtctgtgcggcaacctacatgatggggaatgagttgaccttcctagatgattccatctgcacgggcacctccagtggaaatcaagtgaacctcactatccaaggactgagggccatggacacgggactctacatctgcaaggtggagctcatgtacccaccgccatactacctgggcataggcaacggaacccagatttatgtaattgatccagaaccgtgcccagattctgacttcctcctctggatccttgcagcagttagttcggggttgtttttttatagctttctcctcacagctgtttctttgagcaaaatgctaaagaaaagaagccctcttacaacaggggtctatgtgaaaatgcccccaacagagccagaatgtgaaaagcaatttcagccttattttattcccatcaattgagaaaccattatgaagaagagagtccatatttcaatttccaagagctgaggcaattctaacttttttgctatccagctatttttatttgtttgtgcatttggggggaattcatctctctttaatataaagttggatgcggaacccaaattacgtgtactacaatttaaagcaaaggagtagaaagacagagctgggatgtttctgtcacatcagctccactttcagtgaaagcatcacttgggattaatatggggatgcagcattatgatgtgggtcaaggaattaagttagggaatggcacagcccaaagaaggaaaaggcagggagcgagggagaagactatattgtacacaccttatatttacgtatgagacgtttatagccgaaatgatcttttcaagttaaattttatgccttttatttcttaaacaaatgtatgattacatcaaggcttcaaaaatactcacatggctatgttttagccagtgatgctaaaggttgtatgcatatatacatatatatatatatttttatattttaatttgatagtattgtgcatagagccacgtatgtttttgtgtatttgttaatggtttgaatataaacactatatggcagtgtctttccaccttgggtcccagggaagttttgtggaggagctcaggacactaatacaccaggtagaacacaaggtcatttgctaactagcttggaaactggatgaggtcatagcagtgcttgattgcgtggaattgtgctgagttggtgttgacatgtgctttggggcttttacaccagttcctttcaatggtttgcaaggaagccacagctggtggtatctgagttgacttgacagaacactgtcttgaagacaatggcttactccaggagacccacaggtatgaccttctaggaagctccagttcgatgggcccaattcttacaaacatgtggttaatgccatggacagaagaaggcagcaggtggcagaatggggtgcatgaaggtttctgaaaattaacactgcttgtgtttttaactcaatattttccatgaaaatgcaacaacatgtataatatttttaattaaataaaaatatgtggtggtcgttttaaaaaaaaaaaaaaaaaaaaaaaaaaaaaaaaaaaaaaaaaaaaaaaaaaaaaaaaaa

SEQ ID NO: 5695 - DNA, 2744 bp, Homo sapiens
agcagtgagacaagggtaggcatgggaattgggaggtgcagccctgccccacgcctgttgggtaacactgagcatcaccccattgattaccccattgccaggcgtgggcacgggagttggtttgggagctgccaggctcctgggaggatcgcagtcagcagagcagagcagagcctgcgcatctggaggcagcatgtccaagaaagggagtggaggtgcagcgaaggacccaggggcagagcccacgctggggatggaccccttcgaggacacgctgcggcggctgcgtgaggccttcaactgagggcgcacgcggccggccgagttccgggctgcgcagctccagggcctgggccacttccttcaagaaaacaagcagcttctgcgcgacgtgctggcccaggacctgcataagccagctttcgaggcagacatatctgagctcatcctttgccagaacgaggttgactacgctctcaagaaccttcaggcctggatgaaggatgaaccacggtccacgaacctgttcatgaagctggactcggtcttcatctggaaggaaccctttggcctggtcctcatcatcgcaccctggaactacccactgaacctgaccctggtgctcctggtgggcgccctcgccgcagggaattgcgtggtgctgaagccgtcagaaatcagccagggcacagagaaggtcctggctgaggtgctgccccagtacctggaccagagctgctttgccgtggtgctgggcggaccccaggagacagggcagctgctagagcacaagttggactacatcttcttcacagggagccctcgtgtgggcaagattgtcatgactgctgccaccaagcacctgacgcctgtcaccctggagctgggggtcaagaacccctgctacgtggacgacaactgcgacccccagaccgtggccaaccgcgtggcctggttctgctacttcaatgccggccagacctgcgtggcccctgactacgtcctgtgcagccccgagatgcaggagaggctgctgcccgccctgcagagcaccatcacccgtttctatggcgacgacccccagagctccccaaacctgggccgcatcatcaaccagaaacagttccagcggctgcgggcattgctgggctgcggccgcgtggccattgggggccagagcaacgagagcgatcgctacatcgcccccacggtgctggtggacgtgcaggagacggagcctgtgatgcaggaggagatcttcgggcccatcctgcccatcgtgaacgtgcagagcgtggacgaggccatcaagttcatcaaccggcaggagaagcccctggccctgtacgccttctccaacagcagccaggttgtgaaccagatgctggagcggaccagcagcggcagctttggaggcaatgagggcttcacctacatatctctgctgtccgtgccattcgggggagtcggccacagtgggatgggccggtaccacggcaagttcaccttcgacaccttctcccaccaccgcacctgcctgctcgccccctccggcctggagaaattaaaggagatccgctacccaccctataccgactggaaccagcagctgttacgctggggcatgggctcccagagctgcaccctcctgtgagcgtcccacccgcctccaacgggtcacacagagaaacctgagtctagccatgaggggcttatgctcccaactcacattgttcctccagaccgcaggctcccccagcctcaggttgctggagctgtcacatgactgcatcctgcctgccagggctgcaaagcaaggtcttgcttctatctgggggacgctgctcgagagaggccgagaggccgcagaacatgccaggtgtcctcactcaccccaccctccccaattccagccctttgccctctcggtcagggttggccaggcccagtcacaggggcagtgtcaccctggaaaatacagtgccctgccttcttaggggcatcagccctgaacggttgagagcgtggagccctccaggcctttgctctcccctctaggcacacgcgcacttccacctctgccccatcccaactgcaccagcactgcctcccccagggatcctctcacatcccacactggtctctgcaccacccctctggttcacaccgcaccctgcactcacccacagcagctccatccactgggaaaactggggtttgcatcactccactgcacagtgttagtgggacctgggggcaagtcccttgacttctctgagcccagtttccttatgtgaaagttgctgggacccaaaatggagtcacttatgccaaactctaataaaatggagtcggggggccacatagaagccctcacacacacatgcccgtaacaggatttatcacaagacacgcctgcatgtagaccagacacagggcgtatggaaagcacgtcctcaagactgtagtattccagatgagctgcagatgcttacctaccacggccgtctccaccagaaaaccatcgccaactcctgcgatcagcttgtgacttacaaaccttgtttaaaagctgcttacatggacttctgtcctttaaaagcttccccttggctgtggccctctgtgtatgcctgggatccttccaagcactcatagcccagataggaatcctctgctcctcccaaataaattcatctgttctggagaaaaaaaaaaaaaaaaaaaaaaaaaggtcgtatcga

SEQ ID NO: 5696 - DNA, 5314 bp, Homo sapiens
  misc_feature (1845)..(1847): n is a, c, g, or t
ggagtcgggtttcagagcgcgggtgactcggggcgcgggccgggagccgggagttctgcccgccgccgccgctgccgagcgccgcctttgttccctgcaggaagggcgagcgcgcgggccagcgctcagccagcgcctcacgacccttcgtcctccgctaagctccaacgctctgctcgactagccgcgcgccttccggggctccgcagacccgcgagatggcaccaaggaggaacaacgggcagtgctggtgtctgctgatgctgctctcggtctccacgcccctccctgctgtcacccagacccgcggtgcgacagagactgcttcccagggtcacctggacctcacgcagctcatcggtgtcccgctgccctcgtccgtatcctttgtcacaggctatggtggcttcccggcctacagtttcgggcctggtgccaatgttggccgcccagccaggactctcatcccatccaccttcttcagggacttcgccatcagggtcgtggtgaagcccagcagcacccgtggtggcgtgctcttcgccatcactgacgccttccagaaggtcatctacctgggcctgcggctctcaggtgtggaggacggccaccagcggatcatcctctactacacggagccaggctcccatgtgtcccaagaagctgctgccttctcggtgcctgtgatgacccacaggtggaaccgcttcgccatgattgtccagggtgaggaagtgaccctcctcgtgaactgtgaggagcacagccgcatccccttccagcggtcctcccaggctttggcttttgagtccagcgctggaatcttcatgggcaatgcaggagctacagggctcgagagattcactggctccctccagcagctcaccgtgcaccccgaccccaggactcccgaggagctgtgtgaccctgaagagtcctcggcatctggagagaccagtgggctgcaggaggcagacggagtagctgagatcttagaagccgtcacctacactcaagcctcgcccaaagaagcaaaagttgaacccataaacacacctccaactccatcctccccctttgaagacatggaactttctggtgaacctgtacccgaggggaccctggaaaccaccaacatgagcatcatccagcacagcagccccaaacaagggtctggtgagatcctgaatgacacactggagggggttcattctgtggatggtgaccccattactgacagcggctcaggggctggggccttccttgacattgctgaagaaaagaatttagcagcaacagcagcggggctggccgaggtgcccatcagcactgctggagaagcagaggccagcagtgtgcccaccgggggaccaaccctctctatgtccacggagaacccagaggaaggggtcactccaggtccagataatgaagagcgtttacgagcaacagcagcaggggaggccgaggcactcgccagcatgcctggggaagtggaggccagtggtgtggcccccggggagctggacctctccatgtccgcccagagcctcggggaagaggccactgtgggtccaagcagtgaagacagtttaacaacagctgcagctgcaaccgaagtgtccctcagtacttttgaggatgaggaagccagtggggtccccacagatggcctggctcccctcacagccaccatggcccctgagcgggcagtcacttctggtcctggtgatgaagaagacttggcagcagccacaacagaggagcccctcatcacagctgggggtgaagagtccggcagccctccccctgatgggccaccgctgcccctgcccacagtggctnnngaaagatggatcactccagctcaaagagaacatgtgggaatgaaaggacaggctgggcccaaaggagaaaagggtgatgctggggaggagcttcctggccctcctgaaccttctgggcctgttggacccacggcaggagcagaagcagagggctctggcctaggctggggctcggacgtcggctctggctctggtgacctggtgggcagtgagcagctgctgagaggtcctccaggacccccagggccacctggcttacctgggattccaggaaaaccaggaactgatgttttcatgggaccccctggatctcctggagaggatggacctgctggtgaacctgggcccccgggccctgagggacagcctggagttgatggagccaccggccttcccgggatgaaaggggagaagggagcaagagggcctaatggctcagttggtgaaaagggtgaccctggcaacagaggcttacctggacccccggggaaaaagggacaagctggccctcctggggtcatgggacccccagggcctcctggaccccctgggcccccaggccctggatgcacaatgggacttggattcgaggataccgaaggctctggaagcacccagctattgaatgaacccaaactctccagaccaacggctgcaattggtctcaaaggagagaaaggagaccggggacccaagggagaaagggggatggatggagccagtattgtgggaccccctgggccgagagggccacctgggcacatcaaggtcttgtctaattccttgatcaatatcacccatggattcatgaatttctcggacattcctgagctggtggggcctccggggccggacgggttgcctgggctgccaggatttccaggtcctagaggaccaaaaggtgacactggtttacctggctttccaggactaaaaggagaacagggcgagaagggagagccgggtgccatcctgacagaggacattcctctggaaaggctgatggggaaaaagggtgaacctggaatgcatggagccccaggaccaatggggcccaaaggaccaccaggacataaaggagaatttggccttcccgggcgacctggtcgcccaggactgaatggcctcaagggtaccaaaggagatccaggggtcattatgcagggcccacctggcttacctggccctccaggcccccctgggccacctggagctgtgattaacatcaaaggagccattttcccaatacccgtccgaccacactgcaaaatgccagttgatactgctcatcctgggagtccagagctcatcacttttcacggtgttaaaggagagaaaggatcctggggtcttcctggctcaaagggagaaaaaggcgaccagggagcccagggaccaccaggtcctccacttgatctagcttacctgagacactttctgaacaacttgaagggggagaatggagacaaggggttcaaaggtgaaaaaggagaaaaaggagacattaatggcagcttccttatgtctgggcctccaggcctgcccggaaatccaggcccggctggccaaaaaggggagacagtcgttgggccccaaggacccccaggtgctcctggtctgcctgggccacctggctttggaagacctggtgatcctgggccaccggggcccccggggccaccaggacctccagctatcctgggagcagctgtggcccttccaggtccccctggccctccaggacagccagggcttcccggatccagaaacctggtcacagcattcagcaacatggatgacatgctgcagaaagcgcatttggttatagaaggaacattcatctacctgagggacagcactgagtttttcattcgtgttagagatggctggaaaaaattacagctgggagaactgatccccattcctgccgacagccctccaccccctgcgctttccagcaacccacatcagcttctgcctccaccaaaccctatttcaagtgccaattatgagaagcctgctctgcatttggctgctctgaacatgccattttctggggacatctacgttgattttcatgtgcttcaagcaggccagagctgcaggactgttgtccacctaccgagcattcttatcttcccatttgcaagatctgtccaccattgtgaggaaagcagagagatacagccttcccatagtgaacctcaagggccaagtactttttaataattgggactcaattttttctggccacggaggtcagttcaatatgcatattccaatatactcctttgatggtcgagacataatgacagatccttcttggccccagaaagtcatttggcatggctccagcccccatggcgtccgccttgtggataactactgtgaagcatggcgaaccgcggacacagcggtcacgggacttgcctccccgctgagcacggggaagattctggaccagaaagcatacagctgtgctaatcggctaattgtcctatgtatcgaaaacagtttcatgacagacgctaggaagtaatggccttctgatgattcttaaagagttttcaattttttcttatgtgaagagttgacactgaaatctaaaatgtttaattgttgtaaatattacagtttttttttttttactacatattctttacaacagcaaccaaagaaaacatacctcaatacactcaaaactgaagacatagaggactcagatcaaagacaaaatctgatccatatattggtgctagattctgcaggaaaccccagcagtgtgaacgcatcccaacataggttaagagcaagttgaaaacaaaggccatggcattctgccactgcatccttcagacagttatatcctccttttaaaccattgttgttgagtgtaagatgtccttcatgttttcttataaagtcagtgtttagaaatgttaccctttctaagttatatacagatcaaatgcttttttctttcacgtacatccatcatttgcaactgctgttcgtacacagaaacaggactgctcaaatgatcctatttgtattttctgatgctatcagactctaatgtttttttccctaaaatattattgccatcatgctttaggaattttatatttttacacaatcatattttagtatggtgtctgtttatgtaactctgacttgctggaaaagttgaaactccaaataatctgaaactagaaaagaaatagcacataattactaccttccccttggcggctctcctccccaacccccaccccacaattttatgacttccatttggcaattgttgaattataactgcgactgaaacaaacaggttcatagagatgaattttctgagaaacatatatctacatgttgtataattggattttttttccatgtaagtgaacataaaaacatcttttccggggtgctttcttcatttaaaaaaaaaaaaaataaaggcg

SEQ ID NO: 5697 - DNA, 2076 bp, Homo sapiens
gggatattggagtagcaagaggctgggaagccatcacttaccttgcactgagaaagaagacaaaggccagtatgcacagctttcctccactgctgctgctgctgttctggggtgtggtgtctcacagcttcccagcgactctagaaacacaagagcaagatgtggacttagtcagaaatacctggaaaaatactacaacctgaagaatgatgggaggcaagttgaaaagcggagaaatagtggcccagtggttgaaaaattgaagcaaatgcaggaattctttgggctgaaagtgactgggaaaccagatgctgaaaccctgaaggtgatgaagcagcccagatgtggagtgcctgatgtggctcagtttgtcctcactgaggggaaccctcgctgggagcaaacacatctgacctacaggattgaaaattacacgccagatttgccaagagcagatgtggaccatgccattgagaaagccttccaactctggagtaatgtcacacctctgacattcaccaaggtctctgagggtcaagcagacatcatgatatcttttgtcaggggagatcatcgggacaactctccttttgatggacctggaggaaatcttgctcatgcttttcaaccaggcccaggtattggaggggatgctcattttgatgaagatgaaaggtggaccaacaatttcagagagtacaacttacatcgtgttgcggctcatgaactcggccattctcttggactctcccattctactgatatcggggctttgatgtaccctagctacaccttcagtggtgatgttcagctagctcaggatgacattgatggcatccaagccatatatggacgttcccaaaatcctgtccagcccatcggcccacaaaccccaaaagcgtgtgacagtaagctaacctttgatgctataactacgattcggggagaagtgatgttctttaaagacagattctacatgcgcacaaatcccttctacccggaagttgagctcaatttcatttctgttttctggccacaactgccaaatgggcttgaagctgcttacgaatttgccgacagagatgaagtccggtttttcaaagggaataagtactgggctgttcagggacagaatgtgctacacggataccccaaggacatctacagctcctttggcttccctagaactgtgaagcatatcgatgctgctctttctgaggaaaacactggaaaaacctacttctttgttgctaacaaatactggaggtatgatgaatataaacgatctatggatccaggttatcccaaaatgatagcacatgactttcctggaattggccacaaagttgatgcagttttcatgaaagatggatttttctatttctttcatggaacaagacaatacaaatttgatcctaaaacgaagagaattttgactctccagaaagctaatagctggttcaactgcaggaaaaattgaacattactaatttgaatggaaaacacatggtgtgagtccaaagaaggtgttttcctgaagaactgtctattttctcagtcatttttaacctctagagtcactgatacacagaatataatcttatttatacctcagtttgcatatttttttactatttagaatgtagccctttttgtactgatataatttagttccacaaatggtgggtacaaaaagtcaagtttgtggcttatggattcatataggccagagttgcaaagatcttttccagagtatgcaactctgacgttgatcccagagagcagcttcagtgacaaacatatcctttcaagacagaaagagacaggagacatgagtctttgccggaggaaaagcagctcaagaacacatgtgcagtcactggtgtcaccctggataggcaagggataactcttctaacacaaaataagtgttttatgtttggaataaagtcaaccttgtttctactgttttaaaaaaaaaaaaaaaaaaaaaaaaaaaaaaaaaaaaaaaaaaaaaaaaaaaaaaaaaaaaaaaaaaaaaaaaaaaaaaaaaaaaaaaaaaaaaaaaaaaaaaaa

SEQ ID NO: 5698 - DNA, 1345 bp, Homo sapiens
  misc_feature (15)..(96): n is a, c, g, or t
tcgttagctttagcnnnnnnnnnnnnnnnnnnnnnnnnnnnnnnnnnnnnnnnnnnnnnnnnnnnnnnnnnnnnnnnnnnnnnnnnnnnnnnnnnntgtggtaagaagtgggctagggcatttttaatcttagagcgaaagcctatagtgacagcaccctcctgaaaactgcagcttccttctcaccttgaagaataatcctagaaaactcacaaaatgtgtgatgcttttgtaggtacctggaaacttgtctccagtgaaaactttgatgattatatgaaagaagtaggagtgggctttgccaccaggaaagtggctggcatggccaaacctaacatgatcatcagtgtgaatggggatgtgatcaccattaaatctgaaagtacctttaaaaatactgagatttccttcatactgggccaggaatttgacgaagtcactgcagatgacaggaaagtcaagagcaccataaccttagatgggggtgtcctggtacatgtgcagaaatgggatggaaaatcaaccaccataaagagaaaacgagaggatgataaactggtggtggaatgcgtcatgaaaggcgtcacttccacgagagtttatgagagagcataagccaagggacgttgacctggactgaagttcgcattgaactctacaacattctgtgggatatattgttcaaaaagatattgttgttttccatgatttagcaagcaactaattttctcccaagctgattttattcaatatggttacgttggttaaataaactttttttagatttagaaaaaaaaaaaaaaaaaaaaaaaaaaagcttatgatgtattcttagtcataactgagtgaaggaaatgggaaatttgcattatttctttgttctgatatgaataataacatatttcataataattcaaggtaaaaagggatatctatggatttccctaggtaggagataacaagtatgtaccattactgaatattaaatccttctttaccatagctacagttaagtaggtgtatctcagaaacctaaggtagttttaaatgtagtgaaattgtccacagcaagctggcccaagtgctcacattttatacccgctctgtcttagtgcgttgcaagagaggagtatatacagtagttcccccttatccacaggggtacattctaagacccccggtgggtgactgaaaccacagatagtaccgaatcttatacatactatgttttttttctaaacataaatacctacaataaagtttaatttttaaattaggcaccataattaataataaaacagaacagttataacaatatactataataaaataatgttgtttgtga

SEQ ID NO: 5699 - DNA, 7207 bp, Homo sapiens
  misc_feature (1279)..(1293): n is a, c, g, or t
  misc_feature (2028)..(2071): n is a, c, g, or t
aagacctcgctccctctccggtaatgagggggctgagctgtccctccgaggagggggcctggtgtggataaaagagacgaaaaagccgggggaggtttccaaaaataaaaccgtccgggtccccttcagacggctgcaggcacagggaggaggcgcgaaggtgcagcagccgtgcgagcccagctggagtaggagcgcggactcgaggctcggggcgcgcagccctcgttccgccgagagccgggcccccagtcggccgcttcagggccccctagactcagagaagctggccgccgggcggggccgggagaacagcccgcgggcgtccagcgtgccgaccacaaagctcttcgcggtgcccgcgcgcaccactctccagccgccccgcgccatgaggccgcggaccaaagcccgcagcccggggcgcgccctgcggaacccctggagaggcttcctgccgctcaccctggctctcttcgtgggcgcgggtcatgcccaaagggaccccgtagggagatacgagccggctggtggagacgcgaatcgactgcggcgccctgggggcagctacccggcagcggctgcagccaaggtgtacagtctgttccgggagcaggacgcgcctgtcgcgggcttgcagcccgtggagcgggcccagccgggctgggggagccccaggaggcccaccgaggcggaggccaggaggccgtcccgcgcgcagcagtcgcggcgtgtccagccacctgcgcagacccggagaagcactcccctgggccagcagcaaccagcaccccggacccgggccgcgccggctctcccacgcctggggaccccacagcggtctggggctgcgcccccaaccccgccgcgagggcggctcacggggaggaacgtctgcgggggacagtgctgcccaggatggacaacagcaaacagcaccaaccactgtatcaaacccgtttgcgagccgccgtgccagaaccggggctcctgcagccgcccgcagctctgtgtctgccgctctggtttccgtggagcccgctgcgaggaggtcattcccgatgaggaatttgacccccagaactccaggctggcacctcgacgctgggccgagcgttcacccaacctgcgcaggagcagtgcggctggagagggcaccttggccagagcacagccgccagcaccacagtcgccgcccgcaccacagtcgccaccagctgggaccctgagtggcctcagccagacccacccttcccagcagcacgtggggttgtcccgnnnnnnnnnnnnnnncccgactgccacggccagtagccagctctcttccaacgccctgcccccgggaccaggccttgagcagagagatggcacccaacaggcggtacctctggagcacccctcatccccctgggggctgaacctcacggagaaaatcaagaagatcaagatcgtcttcactcccaccatctgcaagcagacctgtgcccgtggacactgtgccaacagctgtgagaggggcgacaccaccaccctgtacagccagggcggccatgggcacgatcccaagtctggcttccgcatctatttctgccagatcccctgcctgaacggaggccgctgcatcggcagggacgaatgctggtgccccgccaactccaccgggaagttctgccacctgcctatcccgcagccggacagggagcctccagggagggggtcccgccccagggccttgctggaagccccactgaagcagtccactttcacactgccgctctccaaccagctggcctccgtgaacccctccctggtgaaggtgcacattcaccacccacccgaggcctcagtgcagatccaccaggtggcccaggtgcggggcggggtggaggaggccctagtggagaacagcgtggagaccagacccccgccctggctgcctgccagccctggccacagcctctgggacagcaacaacatccctgctcggtctggagagccccctcggccactgcccccagcagcacccannnnnnnnnnnnnnnnnnnnnnnnnnnnnnnnnnnnnnnnnnnnggacagtgtgccaaccctctgctggagctgactacccaggaggactgctgtggcagtgtgggagccttctggggggtgactttgtgtgccccatgcccacccagaccagcctccccggtgattgagaatggccagctggagtgtcctcaggggtacaagagactgaacctcactcactgccaagatatcaacgagtgcttgaccctgggcctgtgcaaggacgcggagtgtgtgaataccaggggcagctacctgtgcacatgcagacctggcctcatgctggatccatcgcggagccgctgtgtgtcggacaaggcaatctccatgctgcagggactgtgctaccggtcgctggggcccggcacctgcaccctgcctttggcccagcggatcaccaagcagatatgctgctgcagccgcgtgggcaaagcatggggcagcgagtgtgagaaatgccctctgcctggcacagaggccttcagagagatctgccctgccggccacggctacacctacgcgagctccgacatccgcctgtccatgaggaaagccgaggaggaggaactggcaaggcccccaagggagcaagggcagaggagcagcggggcactgcccgggccagcagagaggcagcccctccgggtcgtcacggacacctggcttgaggccgggaccatccctgacaagggtgactctcaggctggccaggtcacgaccagtgtcactcatgcacctgcctgggtcacagggaatgccacaaccccaccaatgcctgaacaggggattgcagagatacaggaagaacaagtgaccccctccaccgatgtgctggtgaccctgagcaccccaggcattgacagatgcgctgctggagccaccaacgtctgtggccctggaacctgcgtgaacctccccgatggatacagatgtgtctgcagccctggctaccagctgcaccccagccaggcctactgcacagatgacaacgagtgtctgagggacccctgcaagggaaaagggcgctgcatcaaccgcgtggggtcctactcctgcttctgctaccctggctacactctggccacctcaggggcgacacaggagtgtcaagatatcaatgagtgtgagcagccaggggtgtgcagcggggggcagtgcaccaacaccgagggctcgtaccactgcgagtgtgatcagggctacatcatggtcaggaaaggacactgccaagatatcaacgaatgccgtcaccccggtacctgccctgatgggagatgcgtcaattcccctggctcctacacttgtctggcctgtgaggagggctaccggggccagagtgggagctgtgtagatgtgaatgagtgtctgactcccggggtctgtgcccatggaaagtgcaccaacctagaaggctccttcagatgctcttgtgagcagggctatgaggtcacctcagatgagaagggctgccaagatgtggatgagtgtgccagccgggcctcatgccccacaggcctctgcctcaacacggagggctccttcgcctgctctgcctgtgagaacgggtactgggtgaatgaagacggcactgcctgtgaagacctagatgagtgtgccttcccgggagtctgcccctccggagtctgcaccaacacggctggctccttctcctgcaaggactgcgatgggggctaccggcccagccccctgggtgactcctgtgaagatgtggatgaatgtgaagacccccagagcagctgcctgggaggcgagtgcaagaacactgtgggctcctaccagtgcctctgtccccagggcttccagctggccaatggcaccgtgtgtgaggatgtgaatgagtgcatgggggaggagcactgcgcaccccacggcgagtgcctcaacagccacgggtctttcttctgtctgtgcgcgcctggcttcgtcagcgcagaggggggcaccagctgccaggatgtggacgagtgtgccaccacagacccgtgtgtgggagggcactgtgtcaacaccgagggctccttcaactgtctatgtgagactggcttccagccctccccagagagtggagagtgtgtggatattgacgagtgtgaggactatggagacccggtgtgtggcacctggaagtgtgaaaacagccctggctcctaccgctgtgttctgggctgccagcctggcttccacatggccccgaacggagactgcattgacatagacgagtgcgccaacgacaccatgtgtggcagccacggcttctgtgacaacactgatggctccttccgctgcctctgtgaccagggcttcgagatctctccctcaggctgggactgtgtggatgtgaacgagtgtgagcttatgctggcggtatgtggggccgcgctctgtgagaacgtggagggctccttcctgtgcctctgtgccagtgacctggaggagtacgatgcccaggaggggcactgccgcccacggggggctggaggtcagagtatgtctgaggccccaacgggggaccatgccccggcccccacccgcatggactgctactccgggcagaagggccatgcgccctgctccagtgtcctgggccggaacaccacacaggctgaatgctgctgcacccagggcgctagctggggagatgcctgtgacctctgcccgtctgaggactcagctgaattcagcgagatctgccctagtggaaaaggctacattcctgtggaaggagcctggacgtttggacagaccatgtacacagatgcggatgagtgtgtgatattcgggcctggtctctgcccgaacggccggtgcctcaacaccgtgcctggttatgtctgcctgtgcaatcccggcttccactacgatgcttcccacaagaagtgtgaggatcacgatgagtgccaggacctggcctgtgagaatggcgagtgcgtcaacacggagggctccttccactgcttctgcagccccccgctcaccctggacctcagccagcagcgctgcatgaacagcaccagcagcacggaggacctccctgaccacgacatccacatggacatctgctggaaaaaagtcaccaatgatgtgtgcagcgaacccctgcgtgggcaccgcaccacctacacggaatgctgctgccaggacggcgaggcctggagccagcagtgtgctctgtgtcccccgaggagctctgaggtctatgctcagctgtgcaacgtggctcgcattgaggcagagcgggaggccggggtccacttccggccaggctatgagtatggccccgggcccgatgacctgcactacagcatctatggcccagatggggcccccttctacaactacctgggccccgaggacaccgtccctgagcctgccttccccaacacagccggtcactcagcggaccgcacacccatccttgagtctcctttgcagccctcagaactccagccccactacgtggccagccatccagagcccccagccggcttcgaagggcttcaggcggaggagtgcggcatcctgaacggctgtgagaatggccgctgtgtgcgcgtgcgggagggctacacctgtgactgttttgagggcttccagctggatgcggcccacatggcctgcgtagatgtgaatgagtgtgatgacttgaacgggcctgctgtgctctgtgtccatggttactgcgagaacacagagggctcctaccgctgccactgctccccgggatatgtggctgaggcagggcccccccactgcactgccaaggagtagcagtcaggggtcagtgtggcaactaccctggaaatggctccagtcacaggcaggggccttgaggatgatttcctagctgggaagacaccgtgacatcaggccagaggtttccaatcagccttgcctgctttcatctctcccagcttagcctctggctgtaagcttcggtcattgcctccatgcccttgcttggctcaagcaccaccaatcgctttaatgcttcagccaccgcatgaggccctgtccaccacctttcctggccttgctatgggatgcttaccaaaggatggccctcatccaccctcccaagctgtgcgagcatgcaaggccccatggcctcacactgcagacacccctttccagccacaatccaccatcatcctgacgatcccacaactgggacagaggctacatctgccctagggaggtccttcagaatctgtggagcaagaaaggatttggggaagcttggggactgactccagagccccctcctaagaaccatcaccaccactcagccaatctgttctgggccctgattttgccacacctccatcctgtagcccattctctgaccccaaggagtggcagaagatcccttcactcagagaagcaaggctgatattagcttgttgaatgtaagagacacaaatgaagaagaacaaagagcctgagaaagcagcaagaggacatgatgaaaaatacgtggagttgatgagaaaggggagccaaggctttatacgtctaaagaaaatattcagtagctgaatccgcccagtgatagcctgtgggcaccagcagcaagggctgccatgggatacagcacccatctacaaagacctctattacataaacactgcttcttacaggaaacaaacctcttctgggatctccttttgtgaaaaccagtttgatgtgctaaaagtaaaaagtctattttccagtgtggtcttgttcagaagcagccagatttccaatgttgtttttcccctccactcagaaacccctgccctttcccttcagaaaacgatggcaggcattcctctgagtttacaagcagagactcactccaacccaaactagctgggagttcagaaccatggtggaataaagaaatgtgcatctggtccaaaaaaaaaaaaaaaaaaaaaaaaaaaaaaaaaactttagcatgttgggtaagtctagatattagagatgaggtgtgcctaatccctggcaggtctggtgaatagactatgatgggttccatgggaaaatgactcttttactattaaaagacaaagaaaggttgatgcggattttggtgaaggatgtgatggacaaggtccaggggaggcgctggaagga

SEQ ID NO: 5700 - DNA, 5132 bp, Homo sapiens
  misc_feature (974)..(1005): n is a, c, g, or t
gagtggagttctggaggaatgtttaccagacacagagcccagagggacagcgcccagagcccagatagagagacacggcctcactggctcagcaccagggtccccttccccctcctcagctccctccctggcccctttaagaaagagctgatcctctcctctcttgagttaacccctgattgtccaggtggcccctggctctggcctggtgggcggaggcaaagggggagccaggggcggagaaagggttgcccaagtctgggagtgagggaaggaggcaggggtgctgagaaggcggctgctgggcagagccggtggcaagggcctcccctgccgctgtgccaggcaggcagtgccaaatccggggagcctggagctggggggagggccggggacagcccggccctgccccctcccccgctgggagcccagcaacttctgaggaaagtttggcacccatggcgtggcggtgccccaggatgggcagggtcccgctggcctggtgcttggcgctgtgcggctgggcgtgcatggcccccaggggcacgcaggctgaagaaagtcccttcgtgggcaacccagggaatatcacaggtgcccggggactcacgggcacccttcggtgtcagctccaggttcagggagagccccccgaggtacattggcttcgggatggacagatcctggagctcgcggacagcacccagacccaggtgcccctgggtgaggatgaacaggatgactggatagtggtcagccagctcagaatcacctccctgcagctttccgacacgggacagtaccagtgtttggtgtttctgggacatcagaccttcgtgtcccagcctggctatgttgggctggagggcttgccttacttcctggaggagcccgaagacaggactgtggccgccaacacccccttcaacctgagctgccaagctcagggacccccagagcccgtggacctactnnnnnnnnnnnnnnnnnnnnnnnnnnnnnnnnctccaggtcacggcccccagcgcagcctgcatgttccagggctgaacaagacatcctctttctcctgcgaagcccataacgccaagggggtcaccacatcccgcacagccaccatcacagtgctcccccagcagccccgtaacctccacctggtctcccgccaacccacggagctggaggtggcttggactccaggcctgagcggcatctaccccctgacccactgcaccctgcaggctgtgctgtcagacgatgggatgggcatccaggcgggagaaccagaccccccagaggagcccctcacctcgcaagcatccgtgcccccccatcagcttcggctaggcagcctccatcctcacaccccttatcacatccgcgtggcatgcaccagcagccagggcccctcatcctggacccactggcttcctgtggagacgccggagggagtgcccctgggcccccctgagaacattagtgctacgcggaatgggagccaggccttcgtgcattggcaagagccccgggcgcccctgcagggtaccctgttagggtaccggctggcgtatcaaggccaggacaccccagaggtgctaatggacatagggctaaggcaagaggtgaccctggagctgcagggggacgggtctgtgtccaatctgacagtgtgtgtggcagcctacactgctgctggggatggaccctggagcctcccagtacccctggaggcctggcgcccagggcaagcacagccagtccaccagctggtgaaggaaccttcaactcctgccttctcgtggccctggtggtatgtactgctaggagcagtcgtggccgctgcctgtgtcctcatcttggctctcttccttgtccaccggcgaaagaaggagacccgttatggagaagtgtttgaaccaacagtggaaagaggtgaactggtagtcaggtaccgcgtgcgcaagtcctacagtcgtcggaccactgaagctaccttgaacagcctgggcatcagtgaagagctgaaggagaagctgcgggatgtgatggtggaccggcacaaggtggccctggggaagactctgggagagggagagtttggagctgtgatggaaggccagctcaaccaggacgactccatcctcaaggtggctgtgaagacgatgaagattgccatctgcacgaggtcagagctggaggatttcctgagtgaagcggtctgcatgaaggaatttgaccatcccaacgtcatgaggctcatcggtgtctgtttccagggttctgaacgagagagcttcccagcacctgtggtcatcttacctttcatgaaacatggagacctacacagcttcctcctctattcccggctcggggaccagccagtgtacctgcccactcagatgctagtgaagttcatggcagacatcgccagtggcatggagtatctgagtaccaagagattcatacaccgggacctggcggccaggaactgcatgctgaatgagaacatgtccgtgtgtgtggcggacttcgggctctccaagaagatctacaatggggactactaccgccagggacgtatcgccaagatgccagtcaagtggattgccattgagagtctagctgaccgtgtctacaccagcaagagcgatgtgtggtccttcggggtgacaatgtgggagattgccacaagaggccaaaccccatatccgggcgtggagaacagcgagatttatgactatctgcgccagggaaatcgcctgaagcagcctgcggactgtctggatggactgtatgccttgatgtcgcggtgctgggagctaaatccccaggaccggccaagttttacagagctgcgggaagatttggagaacacactgaaggccttgcctcctgcccaggagcctgacgaaatcctctatgtcaacatggatgagggtggaggttatcctgaaccccctggagctgcaggaggagctgaccccccaacccagccagaccctaaggattcctgtagctgcctcactgcggctgaggtccatcctgctggacgctatgtcctctgcccttccacaacccctagccccgctcagcctgctgataggggctccccagcagccccagggcaggaggatggtgcctgagacaaccctccacctggtactccctctcaggatccaagctaagcactgccactggggaaaactccaccttcccactttcccaccccacgccttatccccacttgcagccctgtcttcctacctatcccacctccatcccagacaggtccctccccttctctgtgcagtagcatcaccttgaaagcagtagcatcaccatctgtaaaaggaaggggttggattgcaatatctgaagccctcccaggtgttaacattccaagactctagagtccaaggtttaaagagtctagattcaaaggttctaggtttcaaagatgctgtgagtctttggttctaaggacctgaaattccaaagtctctaattctattaaagtgctaaggttctaaggcctacttttttttttttttttttttttttttttttttttgcgatagagtctcactgtgtcacccaggctggagtgcagtggtgcaatctcgcctcactgcaaccttcacctaccgagttcaagtgattttcctgccttggcctcccaagtagctgggattacaggtgtgtgccaccacacccggctaatttttatatttttagtagagacagggtttcaccatgttggccaggctggtctaaaactcctgacctcaagtgatctgcccacctcagcctcccaaagtgctgagattacaggcatgagccactgcactcaaccttaagacctactgttctaaagctctgacattatgtggttttagattttctggttctaacatttttgataaagcctcaaggttttaggttctaaagttctaagattctgattttaggagctaaggctctatgagtctagatgtttattcttctagagttcagagtccttaaaatgtaagattatagattctaaagattctatagttctagacatggaggttctaaggcctaggattctaaaatgtgatgttctaaggctctgagagtctagattctctggctgtaaggctctagatcataaggcttcaaaatgttatcttctcaagttctaagattctaatgatgatcaattatagtttctgaggctttatgataatagattctcttgtataagatcctagatcctaagggtcgaaagctctagaatctgcaattcaaaagttccaagagtctaaagatggagtttctaaggtccggtgttctaagatgtgatattctaagacttactctaagatcttagattctctgtgtctaagattctagatcagatgctccaagattctagatgattaaataagattctaacggtctgttctgtttcaaggcactctagattccattggtccaagattccggatcctaagcatctaagttataagactctcacactcagttgtgactaactagacaccaaagttctaataatttctaatgttggacacctttaggttctttgctgcattctgcctctctaggaccatggttaagagtccaagaatccacatttctaaaatcttatagttctaggcactgtagttctaagactcaaatgttctaagtttctaagattctaaaggtccacaggtctagactattaggtgcaatttcaaggttctaaccctatactgtagtattctttggggtgcccctctccttcttagctatcattgcttcctcctccccaactgtgggggtgtgcccccttcaagcctgtgcaatgcattagggatgcctcctttcccgcaggggatggacgatctcccacctttcgggccatgttgcccccgtgagccaatccctcaccttctgagtacagagtgtggactctggtgcctccagaggggctcaggtcacataaaactttgtatatcaacgaaaaaaaaaaaaaaaaaaaaaaaaaaaaaaaaagaaaaaaaaagcacacaaggaggacaaaccaaagaactacacagaagggcccaacaaacaacaataaacaaaaatgacaacaaaaagaacaa

SEQ ID NO: 5701 - DNA, 20489 bp, Homo sapiens
  misc_feature (565)..(584): n is a, c, g, or t
  misc_feature (2938)..(2955): n is a, c, g, or t
  misc_feature (3329)..(3364): n is a, c, g, or t
  misc_feature (4556)..(4586): n is a, c, g, or t
  misc_feature (4721)..(4735): n is a, c, g, or t
  misc_feature (4997)..(5011): n is a, c, g, or t
  misc_feature (5108)..(5138): n is a, c, g, or t
  misc_feature (6237)..(6300): n is a, c, g, or t
  misc_feature (7520)..(7566): n is a, c, g, or t
  misc_feature (12014)..(12037): n is a, c, g, or t
  misc_feature (12123)..(12146): n is a, c, g, or t
  misc_feature (13258)..(13277): n is a, c, g, or t
  misc_feature (13918)..(13942): n is a, c, g, or t
  misc_feature (15219)..(15248): n is a, c, g, or t
  misc_feature (15262)..(15280): n is a, c, g, or t
  misc_feature (15309)..(15381): n is a, c, g, or t
  misc_feature (15662)..(15682): n is a, c, g, or t
  misc_feature (17286)..(17303): n is a, c, g, or t
  misc_feature (17413)..(17430): n is a, c, g, or t
tgcctaccagcagcccacactccggccgctgcccagagcccccatagagagaggtccccgccgccaccgtcatggatcagccacagttcagcggggcgccccgctttctcacccggcccaaggccttcgtggtgtcggtgggcaaggacgccaccctcagctgccagatcgtgggtaatcccacgccacaggtgagctgggagaaggaccagcagccggtgacggccggcgcgcgcttccgtctggcccaggacggcgacctctaccgcctcactatcctggacctggcgctgggcgacagtgggcaatacgtgtgccgcgcgcgcaatgccataggcgaggccttcgctgccgtgggcctgcaggtggacgcggaggccgcgtgcgccgagcaggcgccgcacttcctgctgcggcccacgtccatccgcgtgcgcgagggctcagaggccaccttccgctgccgcgtgggtggctccccgaggccggcagtgagctggtccaaggacgggcggcgcctgggtgagcccgacggcccccgcgtgcgcgtggaggagctcggcgnnnnnnnnnnnnnnnnnnnncgggcggcgcggccgcgcgacggcggcacttacgaggtccgcgccgagaacccgctgggcgctgccagcgccgccgcggcgctagtggtggactcggacgccgcggacacggccagccggcccgggacctccacggccgcgctcctggcgcacctgcagcggcggcgcgaggctatgcgcgccgagggcgcccccgcctcaccgcccagcaccggcacgcgcacctgcacggtgactgaaggcaagcacgcgcgcctcagctgctacgtgaccggcgagcccaagcccgagacggtgtggaagaaggacggccagctggtgaccgagggccggcgccacgtggtgtacgaggacgcgcaggagaacttcgtgctcaagatcctcttctgcaagcagtcggaccgcggcctctacacctgcacggcgtccaacctcgtgggccagacctacagctctgtgctggtcgtagtgcgcgagcccgcggttcccttcaaaaagcggctgcaagatctggaggtgcgggagaaggagtcggctacgttcctatgtgaggtgccccagccgtccactgaggccgcgtggttcaaggaggagacgcggttgtgggcgagcgccaagtacggcatcgaggaggagggcaccgagcgccgcctgaccgtgcgcaatgtctcggccgacgacgacgcggtgtacatctgcgagacgccagagggcagccgcacggtggcggagctcgcagtccaaggaaacctcctccgaaagctccctcggaagacggcggtgcgcgtgggcgacacggctatgttttgcgtggagctggcggtcccggtgggccccgtccactggctgcggaaccaggaggaagtggtggcggggggccgcgtggccatctccgcggagggcacgcgccacacactgaccatctcccagtgctgcctggaggatgtgggccaggtggcctttatggctggcgactgccagacgtccacccggttctgcgtgtcggcccccaggaagcctcccctgcaaccccctgtggatcctgtggtaaaggccaggatggagagttccgtgattctcagctggtccccaccaccccatggggaacgccctgtcactatcgacggctacctggtagagaagaagaagcttggcacctacacctggatcaggtgccacgaggctgaatgggtggctacacctgagctgaccgtggctgatgtggcggaggaggggaacttccagttccgagtgtccgctctcaacagctttggtcagagtccctacctcgagttcccggggactgtccacctggcccccaagctggccgtgaggacaccgctgaaggcggtgcaggcggtagagggtggcgaggtcactttctccgtggacctcacggtggcctcagcgggtgagtggttcctggatgggcaggccctgaaggccagcagtgtgtatgagatccactgtgatcgcacccggcacacgctcaccatccgggaggtgcccgccagcctgcacggggcgcagctgaagttcgtggccaacggcattgagagcagcatccggatggaggtccgggcggccccagggctgactgccaacaagccgccagccgcagctgcccgggaggtgctggctcggctgcacgaggaggcgcagctgctggctgagctgtcagatcaggctgcggctgtgacgtggctgaaggatggtcgcacactgtccccaggccccaagtatgaggtgcaggcatcggccgggcggcgggtgctccttgtgcgagatgtggcccgggacgatgcaggcctctacgagtgcgtcagccgcgggggccgcatcgcctaccagctctccgtgcaaggcctcgcgcgctttctgcacaaggacatggcgggcagctgtgtggatgccgtggctgggggcccggcgcagtttgagtgtgagacctccgaagcccacgtccacgtgcactggtacaaggatggcatggagctgggccactccggtgagcgcttcttgcaggaggatgtggggacgcggcaccggctggtggcagccacagtcaccaggcaggatgaaggcacctactcctgccgcgtgggcgaggactctgtggacttccggctccgcgtctctgagcccaaggtggtgtttgctaaggagcagctggcacgcaggaagctgcaggcagaggcaggagccagtgccacactgagctgcgaggtggcccaggcccagacggaggtgacgtggtacaaggatgggaagaagctgagctccagctcgaaagtgtgcatggaggccacaggctgcacgcgcaggctggttgtgcagcaggcaggccaggcggnnnnnnnnnnnnnnnnnngcgaggctgggggccagcggctctccttccatctggatgtcaaagagcccaaggtggtgtttgccaaggaccaggtggcacacagtgaggtgcaggctgaggcaggggccaatgccacgctgagctgcgaggtggcccaggcccaggcggaggtgatgtggtacaaagatgggaagaagctgagctccagcttgaaagtgcatgtagaggccaaaggctgcagacggaggctggtggtgcagcaggcaggcaagacggatgccggggactacagctgcgaggccaggggccagagggtctccttccgcctgcacatcacagagcccaagatgatgtttgcaaaggagcagtcagtgcataatgaggtgcaggcnnnnnnnnnnnnnnnnnnnnnnnnnnnnnnnnnnnnggcccaggcccagacggaggtgacgtggtacaaggatgggaagaagctgagctccagctcaaaagtgggcatggaggtcaaagggtgcacacggaggctggtgctgccacaggcgggcaaagcagatgctggggagtacagctgtgaggctgggggccagagagtctccttccacctgcacatcacagagcccaagggggtgtttgcgaaggagcagtcagtgcataatgaggtgcaggctgaggcggggaccactgccatgctgagctgtgaggtggcccagccccagacggaggtgacgtggtacaaggacgggaagaagctgagctccagctcaaaagtacgcatggaggtcaagggctgcacacgaaggctggtagtgcagcaggtgggcaaagcagatgctggggagtacagctgcgaggctgggggccagagagtctcctttcaactgcacatcacagagcccaaggcagtgtttgccaaggagcagttggtgcataatgaggtgcggactgaggcaggggccagtgccacactgagctgtgaggtggcccaggcccagacagaggtgacgtggtacaaggatgggaagaagctgagctccagttcgaaagtgcgcatagaggctgcgggctgcatgcggcagctggtggtgcagcaggcaggccaggcagatgctggggagtacacctgtgaggctgggggccagcggctctccttccacctggatgtttcagagcccaaggcggtgtttgcaaaggagcagctggcacacaggaaggtgcaggccgaggcgggggccattgccacgctgagctgcgaggtggcccaggcccagacagaggtgacgtggtacaaggacgggaagaagctgagctccagctcgaaagttcgaatggaggctgtgggctgcacacggaggctggtggtgcagcaggcatgccaggcggacaccggggagtatagctgcgaggccgggggccagcggctctccttcagcctggacgtggcagagcccaaggtggtgtttgccaaggagcagccagtgcacagggaggtgcaggcccaggcgggggccagcaccacactcagctgcgaggtggctcaggcccagacggaggtgatgtggtacaaggacgggaagaagctgagcttcagctcgaaagtgcgcatggaggctgtgggctgnnnnnnnnnnnnnnnnnnnnnnnnnnnnnnncaggcggacgccggggagtacagctgcgaggcggggagccagcggctctccttccacctgcacgtggcagagcccaaggcggtgtttgccaaggagcagccagcgagcagggaggtgcaggctgaggcggggacnnnnnnnnnnnnnnnctgcgaggtggcccaggcccagacagaggtgacgtggtacaaggacgggaagaaactgagctccagctcgaaagtgcgaatggaggccgtgggctgcacacggaggctggtggtgcaggaggcaggccaggcggacgccggggagtacagctgcaaggccggggatcagcggctgtccttccacctgcacgtggcagagcccaaggtggtgtttgccaaggagcagccagcacacagggaggtgcaggctgaggcgggggcnnnnnnnnnnnnnnnctgcgaggtggcccaggcccagacagaggtgacgtggtacaaggatgggaagaagctgagttccagctcgaaagtgcgcgtggaggccgtgggctgnnnnnnnnnnnnnnnnnnnnnnnnnnnnnnncaggcggatgctggggagtacagctgtgaggcggggggccaacggctgtccttccgcctgcacgtggcagagctggagccccaaatttcagagagaccctgccgcagggagcctctggtggtcaaggagcatgaagacatcatcctgaccgccacactggccacaccctctgcggccacggtgacctggctcaaggatggtgtggagattcgccgcagcaagcggcatgagacagccagccagggggacacccacaccctgaccgtgcatggcgcccaggttctggacagcgccatctacagctgccgtgtgggcgcagaggggcaggacttcccagtgcaggtggaagaggtggccgccaagttctgccggctgctggagcctgtgtgcggcgagctgggtggcacggtgacactggcctgcgagctaagcccagcgtgtgcagaggtggtgtggcgctgcggcaacacgcagcctcgggtgggcaagcgcttccagatggtggccgaggggcccgtgcgctcactcactgtgttggggctgcgcgcagaggacgcaggggagtacgtgtgtgagagccgtgatgaccacaccagtgcgcagctcaccgtcagtgtgccccgagtggtgaagtttatgtctgggctgagcaccgtggtcgcagaggagggcggcgaggccaccttccagtgcgtggtgtcccccagtgatgtggcagtcgtgtggttccgggacggtgccctgcttcagcccagcgagaagtttgccatatcacagagtggcgccagccacagcctgaccatctcagacctggtgctggaggacgcgggccagatcaccgtggaggctgagggcgcctcatcctctgctgccctgagggtccgagaggcgcctgtgctgttcaaaaagaagctggagccgcagacggtggaggagcggagctcggtgaccctggaggtggagctgacgcggccgtggccggagctgaggtggacacggaacgcgacggccctggcgccgggaaagaacgtggagatccacgccgagggcgcccgccaccgcctggttctgcacaacgtaggttttgccgaccgtggcnnnnnnnnnnnnnnnnnnnnnnnnnnnnnnnnnnnnnnnnnnnnnnnnnnnnnnnnnnnnnnnntacggctcgtacggggcctgcaggcagtggaggcacgggagcagggcacggctaccatggaggtgcagctgtcgcatgcggacgtggatggcagctggactcgtgacggtctgcggttccagcaggggcccacgtgccacctggctgtgcggggccccatgcacaccctcacactctcggggctgcggccagaggatagtggccttatggtcttcaaggccgaaggagtgcacacgtcggcgcggctcgtggtcaccgagcttcccgtgagcttcagccgcccgctgcaggacgtggtgaccactgagaaggagaaggttaccctggagtgcgagctgtcgcgtcctaatgtggatgtgcgctggctgaaggacggtgtggagctgcgggcaggcaagacgatggccatcgcagcccagggcgcctgcaggagcctcaccatttaccggtgcgagttcgcggatcagggagtgtatgtgtgtgatgcccatgatgcccagagctctgcctccgtgaaggtacaaggaaggacatacactctcatctaccggagagtcctggcggaagatgcaggagagatccaatttgtagccgaaaatgcagaatcgcgagcccagctccgagtgaaggagctgccagtgaccctcgtgcgcccgctgcgggacaagattgccatggagaagcaccgcggtgtgctggagtgtcaggtgtcccgggccagcgcccaggtgcggtggttcaagggcagtcaggagctgcagcccgggcccaagtacgagctggtcagtgatggcctctaccgcaagctgatcatcagtgatgtccacgcagaggacgaggacacctacacctgtgacgccggtgatgtcaagaccagtgcacagttcttcgtggaagagcaatccatcaccattgtgcggggtctgcaggacgtgacagtgatggagcccgctcctgcctggtttgagtgtgagacctccatcccctcagtgcggccacctaagtggctcctggggaagacggtgttgcaggctggggggaacgtgggcctggagcaggagggcacggtgcaccggctgatgctgcggcggacctgctccaccatgaccgggcccgtgcacttcaccgttggcaagtcgcgctcctctgcccgcctggtggtctcagacatccccgtagtcctcacacggccgttggagcccaagacagggcgtgagctnnnnnnnnnnnnnnnnnnnnnnnnnnnnnnnnnnnnnnnnnnnnnnntgcagtggtacaaggatgacacgcccctgtctccctctgagaagtttaagatgagcctggagggtcagatggctgagctgcgcatcctccggctcatgcctgctgatgctggtgtctaccggtgccaggcgggcagtgcccacagcagcactgaggtcactgtggaagcgcgggaggtgacagtgacagggccgctacaggatgcagaggccacggaggagggctgggccagcttctcctgtgagctgtcccacgaggatgaggaggtcgagtggtcgctcaacgggatgcccctgtacaacgacagcttccatgagatctcacacaagggccggcgccacacgctggtactgaagagcatccagcgggctgatgcgggcatagtacgcgcctcctccctgaaggtgtcgacctctgcccgcctggaggtccgagtgaagccggtggtgttcctgaaggcgctggatgacctgtccgcagaggagcgcggcaccctggccctgcagtgtgaagtctctgaccccgaggcccatgtggtgtggcgcaaagatggcgtgcagctgggccccagtgacaagtatgacttcctgcacacggcgggcacgcgggggctcgtggtgcatgacgtgagccctgaagacgccggcctgtacacctgccacgtgggctccgaggagacccgggcccgggtccgcgtgcacgatctgcacgtgggcatcaccaagaggctgaagacaatggaggtgctggaaggggaaagctgcagctttgagtgcgtcctgtcccacgagagtgccagcgacccggccatgtggacagtcggtgggaagacagtgggcagctccagccgcttccaggccacacgtcagggccgaaaatacatcctggtggtccgggaggctgcaccaagtgatgccggggaggtggtcttctctgtgcggggcctcacctccaaggcctcactcattgtcagagagaggccggccgccatcatcaagcccctggaagaccagtgggtggcgccaggggaggacgtggagctgcgctgtgagctgtcacgggcgggaacgcccgtgcactggctgaaggacaggaaggccatccgcaagagccagaagtatgatgtggtctgcgagggcacgatggccatgctggtcatccgcggggcctcgctcaaggacgcgggcgagtacacgtgtgaggtggaggcttccaagagcacagccagcctccatgtggaagaaaaagcaaactgcttcacagaggagctgaccaatctgcaggtggaggagaaaggcacagctgtgttcacgtgcaagacggagcaccccgcggccacagtgacctggcgcaagggcctcttggagctacgggcctcagggaagcaccagcccagccaggagggcctgaccctgcggctcaccatcagtgccctggagaaggcagacagcgacacctatacctgcgacattggccaggcccagtcccgggcccagctcctagtgcaaggccggagagtgcacatcatcgaggacctggaggatgtggatgtgcaggagggctcctcggccaccttccgttgccggatctccccggccaactacgagcctgtgcactggttcctggacaagacacccctgcatgccaacgagctcaatgagatcgatgcccagcccgggggctaccacgtgctgaccctgcggcagctggcgctcaaggactcgggcaccatctactttgaggcgggtgaccagcgggcctcggccgccctgcgggtcactgagaagccaagcgtcttctcccgggagctcacagatgccaccatcacagagggtgaggacttgaccctggtgtgcgagaccagcacctgcgacattcctatgtgctggaccaaggatgggaagaccctgcgggggtctgcccggtgccagctgagccatgagggccaccgggcccagctgctcatcactggggccaccctgcaggacagtggacgctacaagtgtgaggctgggggcgcctgcagcagctccattgtcagggtgcatgcgcggccagtgcggttccaggaggccctgaaggacctggaggtgctggagggtggtgctgccacactgcgctgtgtgctgtcatctgtggctgcgcccgtgaagtggtgctatggaaacaacgtcctgaggccaggtgacaaatacagcctacgccaggagggtgccatgctggagctggtggtccggaacctccggccgcaggacagcgggcggtactcatgctccttcggggaccagactacttctgccaccctcacagtgactgccctgcctgcccagttcatcgggaaactgagaaacaaggaggccacagaaggggccacggccacgctgcggtgtgagctgagcaagacagcccctgtggagtggagaaaggggtccgagaccctcagagatggggacagatactgtctgaggcaggacggggccatgtgtgagctgcagatccgtggcctggccatggtggatgccgcggagtactcgtgtgtgtgtggagaggagaggacctcagcctcactcaccatcaggcccatgcctgcccacttcataggaagactgagacaccaagagagcatagaaggggccacagccacgctgcggtgtgagctgagcaaggcggcccccgtggagtggaggaaggggcgtgagagcctcagagatggggacagacatagcctgaggcaggacggggctgtgtgcgagctgcagatctgtggcctggctgtggcagatgctggggagtactcctgtgtgtgtggggaggagaggacctctgccactctcaccgtgaaggccctgccagccaagttcacagagggtctgaggaatgaagaggccgtggaaggggccacagccatgttgtggtgtgaactgagcaaggtggcccctgtggagtggaggaaggggcccgagaacctcagagatggggacagatacatcctgaggcaggaggggaccaggtgtgagctgcagatctgtggcctggccatggcggacgccggggagtacttgtgtgtgtgcgggcaggagaggacctcagccacgctcaccatcagggctctgcctgccaggttcatagaagatgtgaaaaaccaggaggccagagaaggggccacggctgtgctgcagtgtgagctgaacagtgcagcccctgtggagtggagaaaggggtctgagaccctcagagatggggacagatacagcctgaggcaggacgggactaaatgtgagctgcagattcgtggcctggccatggcagacactggggagtactcgtgcgtgtgcgggcaggagaggacctcggctatgctcaccgtcagggctctacccatcaagttcacagagggtctgaggaacgaagaggccacagaaggggcaacagccgtgctgcggtgtgagctgagcaagatggcccccgtggagtggtggaaggggcatgagaccctcagagatggagacagacacagcctgaggcaggacggggccaggtgtgagctgcagatccgcggcctcgtggcagaggacgctggggagtacctgtgcatgtgcgggaaggagaggacctcagccatgctcaccgtcagggccatgccttccaagttcatagagggtctgaggaatgaagaggccacagaaggggacacggccacgctgtggtgtgagctgagcaaggcggcaccggtggagtggaggaaggggcatgagaccctcagagatggggacagacacagcctgaggcaggacgggtccaggtgtgagctgcagatccgtggcctggctgtggtggatgccggggagtactcgtgtgtgtgcgggcaggagaggacctcagccacactcactgtcagggccctgcctgccagattcatagaagatgtgaaaaaccaggaggccagagaaggggccacggccgtgctgcaatgtgagctgagcaaggcggcccccgtggagtggaggaaggggtctgagaccctcagaggtggggacagatacagcctgaggcaggatgggaccagatgtgagctgcagattcatggcctgtctgtggcagacactggggagtactcgtgtgtgtgcgggcaggagaggacctcggccacactcaccgtcagggccccacagccagtgttccgggagccgctgcagagtctgcaggcggaggagggctccacggccaccctgcagtgtgagctgtctgagcccactgctacagtggtctggagcaagggtggcctgcagctgcaggccaatgggcgccgggagccacggcttcagggctgcaccgcggagctggtgttacaggacctacaacgtgaagacactggcgaatacacttgcacctgtggctcccaggccaccagtgccaccctcactgtcacagctgcgcctgtgcggttnnnnnnnnnnnnnnnnnnnnnnnnccaggaggtggatgagggaggcaccgcacacttatgctgcgagctgagccgggcgggtgcgagcgtggagtggcgcaagggctccnnnnnnnnnnnnnnnnnnnnnnnntaccagatggtgcaggatggtgcagctgcagagctgctggtacgcggagtggagcaggaggatgcgggtgactacacgtgtgacacgggccacacgcagagcatggccagcctctctgtccgtgtccccaggcccaagttcaagacccggcttcagagtctggagcaggagacaggtgacatagcccggctgtgctgtcagctgagtgatgcagagtcgggggccgtggtgcaatggctcaaggagggcgtggagctgcatgcgggccccaagtacgagatgcggagccagggggccacgcgggagctgctgatccaccaactggaggccaaggacacgggcgagtatgcctgtgtgacaggcggccagaaaaccgctgcctccctcagggtcacagagcctgaggtgaccattgtacgggggctggttgatgcggaggtgacggccgatgaggatgttgagttcagctgtgaggtgtccagggctggagccacaggcgtgcagtggtgcctacagggcctgccactgcaaagcaatgaggtgacagaggtggctgtgcgggatggccgcatccacaccctgcggctgaagggcgtgacgcccgaggacgctggcactgtctccttccatttgggaaaccatgcttcctctgcccagctcaccgtcagagctcctgaggtgaccatcctggagcccctgcaggacgtgcagctcagtgagggccaggatgccagcttccagtgccggctatccagagcttcaggccaggaggcccgctgggctttaggaggggtgcccctgcaggccaacgagatgaatgacatcactgtggagcagggcacactccacctgctcaccctgcacaaggtgacccttgaggatgctggaactgtcagtttccacgtgggcacgtgtagctctgaggcccagctgaaagtcacagccaagaacacggtggtgcgggggctggagaatgtggaggcgctggagggcggcgaggcgctgttcgagtgccagctgtcccagcccgaggtggccgcccacacctggctgctggacgacgaacccgtgcgcacctcggagaacgccgaggtggtcttcttcgagaacgnnnnnnnnnnnnnnnnnnnnctcaaaaacttgcggccacaagacagctgccgggtgaccttcctggctggggatatggtgacgtccgcattcctcacggtccgaggctggcgcctggagatcctggagcctctgaaaaacgcggcggtccgggccggcgcacaggcacgcttcacctgcacgctcagcgaggcggtgcccgtgggagaggcgtcctggtacatcaatggcgcggcagtgcagccggatgacagcgactggactgtcaccgccgacggcagtcaccaagccctactgctgcgcagcgcccagccccaccacgccggggaggtcaccttcgcttgccgcgacgccgtggcctctgcacggctcaccgtgctgggcctccctgatcccccagaggatgctgaggtggtggctcacagcagccacactgtgacactgtcttgggcagctcccatgagtgatggaggcggtggtctctgtggctaccgcgtggaggtgaaggagggggccacaggccagtggcggctgtgccacgagctggtgcctggacccgagtgtgtggtggatggcctggcccccggggagacctaccgcttccgtgtggcagctgtgggccctgtgggtgctggggaaccggttcacctgccccagacagnnnnnnnnnnnnnnnnnnnnnnnnntgtgcctccccagccctcagcccctgagagccggcaggtggcagctggtgaagatgtctctctggagcttgaggtggtggctgaggctggtgaggtcatctggcacaagggaatggagcgcatccagcccggtgggcggttcgaggtggtctcccagggtcggcaacagatgctggtgatcaagggcttcacggcagaagaccagggcgagtaccactgtggcctggctcagggctccatctgccctgcggctgccaccttccaggtggcactgagcccagcctctgtggatgaggcccctcagcccagcttgccccccgaggcagcccaggagggtgacctgcacctactgtgggaggccctggctcggaaacgtcgcatgagccgtgagcccacgctggactccattagcgagctgccagaggaggacggccgctcgcagcgcctgccacaggaggcagaggaggtggcacctgatctctctgaaggctactccacggccgatgagctggcccgcactggagatgctgacctctcacacaccagctctgatgatgagtcccgggcaggcaccccttccctggtcacctacctcaagaaggctgggaggccaggcacctcaccactggccagcaaggttggggccccagcagccccctctgtgaagccacagcagcagcaggagccactggctgctgtgcgcccaccactgggagacctgagcaccaaagacctgggtgatccctcaatggacaaggcagctgtgaagatccaggctgcctttaagggctacaaggtccggaaggagatgaagcagcaggaagggcccatgttctcccacacatttggggacaccgaggcacaggtgggggatgccctgcggctggagtgtgtcgtggccagcaaggcagatgtgcgagcccgctggctgaaggatggtgtggagctgaccgatgggcggcaccatcacatcgaccagcttggggatggcacctgctctctgctgatcgctggcctggaccgtgctgatgctggctgctacacctgtcaggtgagcaacaagtttggccaggtgacccacagtgcctgtgtggtggtcagtgggtcagagagtgaagccgagagctcctctgggggtgagctggacgatgccttccgccgggctgcccgtcggctgcaccggctcttccgcaccaaaagtccggctgaagtttcagatgaggagctcttcctgagtgcagacgagggccctgcagagccagaggagcccgcggacnnnnnnnnnnnnnnnnnnnnnnnnnnnnnnatctgcatccgttnnnnnnnnnnnnnnnnnnnccgccaggcggtaactcgcttccaggagnnnnnnnnnnnnnnnnnnnnnnnnnnnnnnnnnnnnnnnnnnnnnnnnnnnnnnnnnnnnnnnnnnnnnnnnntcagcaaagagactcctgcccctgtggtgcctccagagccattgcccagcctactgacttctgacgctgccccagtgttcctgactgagttgcagaaccaagaagtgcaggatgggtatcctgtgagctttgactgcgtggtgacaggtcagcccatgcccagtgtgcgctggttcaaggatgggaagttgttggaggaggatgatcactacatgattaatgaagaccaacagggtggccatcagctcatcatcacagccgtggtgccagcagacatgggnnnnnnnnnnnnnnnnnnnnngaacagcatgggtgtctcctccaccaaggctgagctccgtgtggacttgacaagcacagactatggcactgcagcagatgccacggagtcctcatcctacttcagtgcccaaggctacctgtccagccgggagcaggagggaacagagtccaccactgatgagggccagctgccccaggtggtggaggagctgagagacgtccaggtggcccctggcacacgcctggccaagttccagctcaaggtgaaaggctaccctgctcccagattatactggttcaaagatggccagcccctgaccgcatctgcccacatccgcatgactgacaagaagatcctgcacaccctggagatcatctccgtcacccgggaggactctggccagtatgcagcctatatcagcaatgccatgggtgctgcctactcgtctgcccggctgctggttcgaggccctgatgagccagaagagaagcctgcatcagatgtgcatgagcagctggtgccgccccgaatgctggagaggttcacccccaagaaagtgaagaaaggctccagcatcaccttctctgtgaaggtagaaggacgcccggtgcccaccgtgcactggctcagggaggaggctgagagaggcgtgctgtggattggccctgacacaccgggctacaccgtggccagctctgcgcagcagcacagcctggtcctgctggacgtgggccggcagcaccagggcacctacacatgcattgccagcaacgctgccggccaggccctctgctccgccagcctgcacgtctcgggcctgcctaaggtggaggagcaggagaaagtgaaggaagcgctgatttccactttcctgcaggggaccacacaagccatctcagcacaggggttggaaactgcgagttttgctgaccttggtgggcagaggaaagaagagcctctggctgccaaggaggccctcggccacctgtccctcgctgaggtgggcacagaggagttcctgcagaaactgacctcccagatcactgagatggtatcggccaagatcacgcaggccaagctgcaggtgcccggaggtgacagtgatgaggactccaagacaccatctgcatccccccgccatggccgatcacggccatcctccagcatccaggagtcttcctcagagtcagaggacggcgatgcccgaggcgagatctttgacatctacgtggtcaccgctgactacctgcccctaggggctgagcaggatgccatcacgctgcgggaaggccagtatgtggaggtcctggatgcagcccacccactgcgctggcttgtccgcaccaagcccaccaagtccagcccctcacggcagggctgggtgtcaccagcctacctggacaggaggctcaagctgtcacctgagtggggggccgctgaggcccctgagttccctggggaggctgtgtctgaagacgaatacaaggcaaggctgagctctgtgatccaggagctgctgagttctgagcaggccttcgtggaggagctgcagttcctgcagagccaccacctgcagcacctggagcgctgcccccacgtgcccatagctgtggccggccagnnnnnnnnnnnnnnnnnnaatgtgcgggacatcggccgcttccacagcagcttcctgcaggagttgcagcagtgcgacacggacgacgacgtggccatgtgcttcatcaagaaccaggcggcctttgnnnnnnnnnnnnnnnnnntggtggggcgtgtgcaggctgagtcggtggtcgtcagcacggccatccaggagttctacaagaaatacgcggaggaggccctgttggcaggggacccctctcagcccccgccaccacctctgcagcactacctggagcagccagtggagcgggtgcagcgctaccaggccttgctgaaggagctgatccgcaacaaggcgcggaacagacagaactgcgcgctgctggagcaggcctatgccgtggtgtctgccctgccacagcgcgctgagaacaagctgcacgtgtccctcatggagaactacccaggcaccctggaggccctgggcgagcccatccgccagggccacttcatcgtgtgggagggtgcaccgggggcccgcatgccctggaagggccacaaccgtcacgtgttcctcttccgcaaccacctggtaatctgcaagccccggcgagactcccgcaccgataccgtcagctacgtgttccggaacatgatgaagctgagcagcatcgacctgaacgaccaggtggagggggatgaccgcgccttcgaggtgtggcaggagcgggaggactcggtgcgcaagtacctgctgcaggcacggacagccattatcaagagctcgtgggtgaaggagatctgtggcatccagcagcgtctggccctgcctgtgtggcggcccccggactttgaagaggagctggccgactgcacagccgagctgggtgagacagtcaagctggcctgccgcgtgacgggcacacccaagcctgtcatcagctggtacaaagatgggaaagcagtgcaggtggacccccaccacatcctcattgaagaccctgatggctcgtgtgcactcatcctggacagcctgaccggtgtggactctggccagtacatgtgcttcgcggccagcgccgctggcaactgcagtaccctgggcaagatcctggtgcaagtcccaccacggttcgtgaacaaggtccgggcctcaccctttgtggagggagaggacgcccagttcacctgcaccatcgaaggcgccccgtacccgcagatcaggtggtacaaggacggggccctgctgaccactggcaacaagttccagacactgagtgagcctcgcagcggcctgctagtgctggtgatccgggcggccagcaaggaggacctggggctctacgagtgtgagctggtgaaccggctgggctccgcgcgggctagtgcggagctgcgcattcagagccccatgctgcaggcccaggagcagtgtcacagggagcagctcgtggctgcagtggaagtcactgagcaagagactaaagtccccaagaaaaccgtcatcatagaagagaccatcaccactgtggtgaagagcccacgtggccaacgacggtcccccagcaagtccccctcccgctcaccttcccgctgctctgccagcccgctgaggccaggcctactggcccccgacctgctgtaccctgccaggtgctggccagccccgcaggccggaggcagaaccaggccagaagcccgtggtgcccacactgtatgtgacggaggccgaggcccactctccagctctgcccggactctcggggccccagcccaagtgggtggaggtggaggagaccattgaagtccgggtgaagaagatgggcccgcagggtgtgtctcccaccacagaggtgcccaggagctcatcggggcatctcttcacactgcccggtgcgacccccggaggggaccccaattccaacaactccaacaacaagctgctggcccaggaggcctgggcccagggcacagccatggtcggcgtcagagagccccttgtcttccgcgtggatgccagaggcagtgtggactgggctgcttctggcatgggcagcctggaggaggagggcaccatggaggaggcgggagaggaagagggggaagacggagatgcctttgtgacggaggagtcccaggacacacacagccttggggatcgtgaccccaagatcctcacgcacaacggccgcatgctgacactggctgacctggaagattacgtgcctggggaaggggagaccttccactgtggtggccctgggcctggcgcccctgatgaccctccctgcgaggtctcggtgatccagagagagatcggggagcccacggtggggcagcctgtgctgctcagcgtggggcatgcactgggtccccgaggccctctcggcctctttaggcctgagccccgtggggcgtcaccaccgggaccccaggtccgtagccttgagggcacctccttcctcttgcgggaggccccggctcggcctgtgggcagtgctccctggacgcagtctttctgcacccgcatccggcgttctgcggacagtggccagagcagcttcaccacagagctttccacccagaccgtcaacttcgggacagtgggggagacggtcacccttcacatctgcccagacagggatggggatgaggcggcacagccctgatgctgctgccatggtggcttggggcagcggggagaaaggagtgtccttgaggcctaggacgctgcccggcctcagcagcagccctgggagcctcctgagggccctccctgtccctggccacgggcccttcttacctcactcaacttcagccaggaggactgggtggtgcttgcaatgttggaatgaccggctcaaagacctcagctctgggctgtttcctgtcagcctggcaggagcctcaggactgtggacgaaggatgtggccttgggcatttgtcctgttcccacatgggcctggtccctccctcctggccccagccacagctgccaggcctgacatggccttgcctctcctgcagtcttggtgactgagacccttgggtggcgcttcccagctctgcaggccctcctggccttttctgcagggtggacacagggtctgtgtgtgggcagcagcccctgtctctcagcaagaataaagcagcttcctgtgcaaaaaaaaaaaaaaaaaaaaaaaaaaaaaaaaaagaaaaaaaaaaaaaaaaaaa

SEQ ID NO: 5702 - DNA, 3537 bp, Homo sapiens
aagagtaaacgcgcgactccagcgcgcggctacctacgcttggtgcttgctttctccagccatcggagaccagagccgccccctctgctcgagaaaggggctcagcggcggcggaagcggagggggaccaccgtggagagcgcggtcccagcccggccactgcggatccctgaaaccaaaaagctcctgctgcttctgtaccccgcctgtccctcccagctgcgcagggccccttcgtgggatcatcagcccgaagacagggatggagaggcctctgtgctcccacctctgcatgctgcctggcctatgctggcacctcctgtcccccctgagcctggcacagtatgacagctggccccattaccccgagtacttccagcaaccggctcctgagtatcaccagccccaggcccccgccaacgtggccaagattcagctgcgcctggctgggcagaagaggaagcacagcgagggccgggtggaggtgtactatgatggccagtggggcaccgtgtgcgatgacgacttctccatccacgctgcccacgtcgtctgccgggagctgggctatgtggaggccaagtcctggactgccagctcctcctacggcaagggagaagggcccatctggttagacaatctccactgtactggcaacgaggcgacccttgcagcatgcacctccaatggctggggcgtcactgactgcaagcacacggaggatgtcggtgtggtgtgcagcgacaaaaggattcctgggttcaaatttgacaattcgttgatcaaccagatagagaacctgaatatccaggtggaggacattcggattcgagccatcctctcaacctaccgcaagcgcaccccagtgatggagggctacgtggaggtgaaggagggcaagacctggaagcagatctgtgacaagcactggacggccaagaattcccgcgtggtctgcggcatgtttggcttccctggggagaggacatacaataccaaagtgtacaaaatgtttgcctcacggaggaagcagcgctactggccattctccatggactgcaccggcacagaggcccacatctccagctgcaagctgggcccccaggtgtcactggaccccatgaagaatgtcacctgcgagaatgggctgccggccgtggtgagttgtgtgcctgggcaggtcttcagccctgacggaccctcgagattccggaaagcgtacaagccagagcaacccctggtgcgactgagaggcggtgcctacatcggggagggccgcgtggaggtgctcaaaaatggagaatgggggaccgtctgcgacgacaagtgggacctggtgtcggccagtgtggtctgcagagagctgggctttgggagtgccaaagaggcagtcactggctcccgactggggcaagggatcggacccatccacctcaacgagatccagtgcacaggcaatgagaagtccattatagactgcaagttcaatgccgagtctcagggctgcaaccacgaggaggatgctggtgtgagatgcaacacccctgccatgggcttgcagaagaagctgcgcctgaacggcggccgcaatccctacgagggccgagtggaggtgctggtggagagaaacgggtcccttgtgtgggggatggtgtgtggccaaaactggggcatcgtggaggccatggtggtctgccgccagctgggcctgggattcgccagcaacgccttccaggagacctggtattggcacggagatgtcaacagcaacaaagtggtcatgagtggagtgaagtgctcgggaacggagctgtccctggcgcactgccgccacgacggggaggacgtggcctgcccccagggcggagtgcagtacggggccggagttgcctgctcagaaaccgcccctgacctggtcctcaatgcggagatggtgcagcagaccacctacctggaggaccggcccatgttcctgctgcagtgtgccatggaggagaactgcctctcggcctcagccgcgcagaccgaccccaccacgggctaccgccggctcctgcgcttctcctcccagatccacaacaatggccagtccgacttccggcccaagaacggccgccacgcgtggatctggcacgactgtcacaggcactaccacagcatggaggtgttcacccactatgacctgctgaacctcaatggcaccaaggtggcagagggccacaaggccagcttctgcttggaggacacagaatgtgaaggagacatccagaagaattacgagtgtgccaacttcggcgatcagggcatcaccatgggctgctgggacatgtaccgccatgacatcgactgccagtgggttgacatcactgacgtgccccctggagactacctgttccaggttgttattaaccccaacttcgaggttgcagaatccgattactccaacaacatcatgaaatgcaggagccgctatgacggccaccgcatctggatgtacaactgccacataggtggttccttcagcgaagagacggaaaaaaagtttgagcacttcagcgggctcttaaacaaccagctgtccccgcagtaaagaagcctgcgtggtcaactcctgtcttcaggccacaccacatcttccatgggacttccccccaacaactgagtctgaacgaatgccacgtgccctcacccagcccggcccccaccctgtccagacccctacagctgtgtctaagctcaggaggaaagggaccctcccatcattcatggggggctgctacctgacccttggggcctgagaaggccttgggggggtggggtttgtccacagagctgctggagcagcaccaagagccagtcttgaccgggatgaggcccacagacaggttgtcatcagcttgtcccattcaagccaccgagctcaccacagacacagtggagccgcgctcttctccagtgacacgtggacaaatgcgggctcatcagcccccccagagagggtcaggccgaaccccatttctcctcctcttaggtcattttcagcaaacttgaatatctagacctctcttccaatgaaaccctccagtctattatagtcacatagataatggtgccacgtgttttctgatttggtgagctcagacttggtgcttccctctccacaacccccaccccttgtttttcaagatactattattatattttcacagacttttgaagcacaaatttattggcatttaatattggacatctgggcccttggaagtacaaatctaaggaaaaaccaacccactgtgtaagtgactcatcttcctgttgttccaattctgtgggtttttgattcaacggtgctataaccagggtcctgggtgacagggcgctcactgagcaccatgtgtcatcacagacacttacacatacttgaaacttggaataaaagaaagatttatgaaaaaaaaaaaaaaaaaaacagcaagctaacaaaaaacaaacagagaaaaaaagaaaacaaccaaaaacaacaaaccaagaaggggg

SEQ ID NO: 5703 - DNA, 1105 bp, Homo sapiens
cccacacgtacccgtcctaaatgtcaagcatatctaaaacaaagagaccttgggggtagtgatagagagtaagtttggagagagagaagcaaaaggatgttttataggaaaatctggttacttcttgatattagaactttatggattaaagctaccttgttattatggggttaggctagaagtagcccaaaggaaaaaagggtaaatttgctaaagaaatttcacaaaatttaagttgtctttaaaaagtgggattaatatgtattattttaaatcataaaagtagtttttaaaatcagtaagtagtttttttcttttctcggtatttgggagaaagctctttaactccatattaaaaaataataatttctacaaaacacccacatctcactgttcatccctttataataatcaatttaacaaaatctttttttaatcacatcaactgaatccttctgttttccagatctcctactcaccatttgattctaacaaacattttatactttctataatagtcccttaaaactttttctttccttctcttttcatctttatgttgttgggactgttgaagttaattgatttccagaaaggaaaaaccaaaacactaaaagctcttatttacttggaactcttttctatctgatgtttctgggttagagatgcaagaaaagatactggacttgaagccacatatagaaatggtggctcttccttaggaacagggatcatcttaacatagaccctattcagataaacaatagcaccaagaaagaaaattgctccatattgaaaccaaaagaaatcttatttggggccaggcgtggtggctcacacctgtcatctcagcactttgggaggtcgaggcaggcagatcacttgagcccaggaggtcgagaccagcctagccaacatggtgaaattccatctctgctaaaaatagaaaaaattagccaagcgtggtggcacatgcctgtagtctcagctacttgggaggctgaggtgggaggttcatctgaaccctaggaagtcaaggctgcagtgagccgtgattgtgccactgtactccagcctaggcaacaggagtgagaccctgtttcaa

SEQ ID NO: 5704 - DNA, 1353 bp, Homo sapiens
gagagagagagagagagagagagagagagagattgtgaggtagggtagcgcgagatcgtgcacgcggttgtagctgccggggggcggcagaagcggcgctcgcgccaagggacgtgtttctgcgctcgcgtggtcatggaggcgctgccgctgctagccgcgacaactccggaccacggccgccaccgaaggctgcttctgctgccgctactgctgttcctgctgccggctggagctgtgcagggctgggagacagaggagaggccccggactcgcgaagaggagtgccacttctacgcgggtggacaagtgtacccgggagaggcatcccgggtatcggtcgccgaccactccctgcacctaagcaaagcgaagatttccaagccagcgccctactgggaaggaacagctgtgatcgatggagaatttaaggagctgaagttaactgattatcgtgggaaatacttggttttcttcttctacccacttgatttcacatttgtgtgtccaactgaaattatcgcttttggcgacagacttgaagaattcagatctataaatactgaagtggtagcatgctctgttgattcacagtttacccatttggcctggattaatacccctcgaagacaaggaggacttgggccaataaggattccacttctttcagatttgacccatcagatctcaaaggactatggtgtatacctagaggactcaggccacactcttagaggtctcttcattattgatgacaaaggaatcctaagacaaattactctgaatgatcttcctgtgggtagatcagtggatgagacactacgtttggttcaagcattccagtacactgacaaacacggagaagtctgccctgctggctggaaacctggtagtgaaacaataatcccagatccagctggaaagctgaagtatttcgataaactgaattgagaaatacttcttcaagttatgatgcttgaaagttctcaataaagttcacggtttcattaccaaaaaaaaaaaaaaaaaaaaaaaaaaaaaaaagggccgcctcctctaaaggtatccccctcgaagggggccccaggctttagcgcggtacccccagcttttctttggtaacaaaagggggcccccctatagtgggaagtcgtaaattataaagcatagggcaacctgggcccggtcgggtttttaaccaacggtccgtgggacctggggaaaaaacctggcctaacccttgggggaacccttttggcgggaaggggaacccccttaaccttttccgggggggcgggtgtaaaaataaattggggggaccaaaaacttacccttacccgggagaaatttttt

SEQ ID NO: 5705 - DNA, 1234 bp, Homo sapiens
  misc_feature (1142)..(1220): n is a, c, g, or t
ggacgcgtgggcggaagcgttggtctacctctagcccaccagcggctgccgcccaggacccgcagcagagacgacgcctgcagcaaggagaccaggaaggggtgagacaaggaagaggatgtctgagctggagaagggcatggtggccctcatcgacgttttccaccaatattctggaagggagggagacaagcacaagctgaagaaatccgaactcaaggagctcatcaacaatgagctttcccatttcttagaggaaatcaaagagcaggaggttgtggacaaagtcatggaaacactggacaatgatggagacggcgaatgtgacttccaggaattcatggcctttgttgccatggttactactgcctgccacgagttctttgaacatgagtgagattagaaagcagccaaacctttcctgtaacagagacggtcatgcaagaaagcagacagcaagggcttgcagcctagtaggagctgagctttccagccgtgttgtagctaattaggaagcttgatttgctttgtgattgaaaaattgaaaacctctttccaaaggctgttttaacggcctgcatcattctttctgctatattaggcctgtgtgtaagctgactggccccagggactcttgttaacagtaacttaggagtcaggtctcagtgataaagcgtgcaccgtgcagcccgccatggccgtgtagaccctaacccggagggaaccctgactacagaaattaccccggggcacccttaaaacttccactacctttaaaaaacaaagccttatccagcataaaaaaaaaaaaaaaatgttctttaaatgcgttcctcatccatgcagataacagctggttggccggtgtggccctgcaagggcgtggtggcttcggcctgcttcccgggatgcgcctgatcaccaggtgaacgctcagcgctggcagcgtcctggaaaaagcaactccatcagaactcgcaatccgagccagctctgggggctccagcgtggcctccgtgacccatgcgattcaagtcgcggctgcaggatccttgcctccaacgtgcctccagcacatgcggcttccgagggcactaccgggggctctgagccaccgcgagggcctgcgttcaataaaaagnnnnnnnnnnnnnnnnnnnnnnnnnnnnnnnnnnnnnnnnnnnnnnnnnnnnnnnnnnnnnnnnnnnnnnnnnnnnnnnggccttcggccctt

SEQ ID NO: 5706 - DNA, 664 bp, Homo sapiens
  misc_feature (631)..(635): n is a, c, g, or t
  misc_feature (637)..(646): n is a, c, g, or t
  misc_feature (651)..(652): n is a, c, g, or t
  misc_feature (659)..(660): n is a, c, g, or t
gcggccgcaagctcggcactcacggctctgagggctccgacggcactgacggccatggcgcgttcgaacctcccgctggcgctgggcctggccctggtcgcattctgcctcctggcgctgccacgcgacgcccgggcccggccgcaggagcgcatggtcggagaactccgggacctgtcgcccgacgacccgcaggtgcagaaggcggcgcaggcggccgtggccagctacaacatgggcagcaacagcatctactacttccgagacacgcacatcatcaaggcgcagagccagctggtggccggcatcaagtacttcctgacgatggagatggggagcacagactgccgcaagaccagggtcactggagaccacgtcgacctcaccacttgccccctggcagcaggggcgcagcaggagaagctgcgctgtgactttgaggtccttgtggttccctggcagaactcctctcagctcctaaagcacaactgtgtgcagatgtgataagtccccgagggcgaaggccattgggtttggggccatggtggagggcacttcaggtccgtgggccgtatctgtcacaataaatggccagtgctgcttcttgcaaaaaaaaaaaaaaaaaaaaaannnnnannnnnnnnnnaaaannaaaaaannaaaa

SEQ ID NO: 5707 - DNA, 1271 bp, Homo sapiens
  misc_feature (807)..(807): n is a, c, g, or t
gacccgaggggggcccccacgcccgctctggcctctcaggtcaggccctcccctcccctcccctcccctcccccgcccctgtgtctccgcgagccggctgtgtgcctgcgagagcgtgcacacccgcgggaccttcccttttgttccaccctgacctctaccttctctaccttgtgctgaccccgctggggtgcaggggttcccttcggaggaggccggggctcaaggtgtgcagctcggccgcctctccctaactctgcaccagcgccttctctctctctctctctctctctctctctctctctctctctctctctctctctctctcaagatctccctcctgctaagtctgcgctgctgcaggagggctgggggaagggcaggggtgtggagagggggtgcctggtgtcttctttctctctctgcccccaccaagtgcggacgcatcgagcttcggcccccacccctgcattcgcgattggctcccggaggaggtggctggtgctgccgccgctgcagcatctcctagggagccgcgaccctgcgcccgccgccgctgccgctgtcaccagcccggccccaggggtgccctgggctccgcggctgaggcacctagggagttgcccccctagtggacggcctctcaggagatcctgaccaccctctgggaacctggactcctccaagcatcgtctttctcgcctgcatcttcggagagaggtgctgagcccttcctcatggatacggggtcccgggaggcagccttcaccagggacctgcccaggaaaccagcagatttcccagctntagctttgcattgatggcgccgtgcggcccggccgcaggtcccgcagccgtggagaggacccagcaggtggcgcggggagagcccggctcggcacgtggtcagctccaagtcagccctgaaatgtccattactcacaaagaaaaggaaaatgctcatttgaaagaaattcttctctttgtcaatgctgaggcattctctcagccccagccccacagtgctccagtgtgtgaagggcaacagctgacggggaagttcagcacatctgtgctgaccagggctggaggcgatgccagtccgtgcagctgggaacgcctcctctgctatggctggagccactgctgaagggactccacctggcacctatgccaccaatggcccctgaacgggtatctaggcccacccttaataaagatgagctgctcataaaaaaaaaaaaaaaaaaaaaaaaaaaaaaaaaaaaaaa

SEQ ID NO: 5708 - DNA, 526 bp, Homo sapiens
tttttttttttttttttttaacaattctaggtttggtggaattaaaaagagctttgcccagtctgagctgtaaaagacctcatggcggaggagtgctccgggcctggaggccggatctctgctgtgagctcaggctgtgccatgggtgatccctgggcatgacacctcaggtctctcagccttcaggtcctcatcactcaaagaagggaactgttcagccctgaaatcatcagatttgggactctagggatttcagaatcaggattcctccaagattgaaaccatatcagtgtatatacatgatccccagagaaatatgccaagaggaaaaaagccaatcccaaaagggtcacacacgtatgggctccatttattttaacttacatggaaatgacaaggtttttaggaaatgaggatggggtccagtgggtttttcaggggttctgggttgggtaggggctttggaggggattggtccttaaaggcaacagggggggtcccttgagggcagaatttcccgttttcc

SEQ ID NO: 5709 - DNA, 2624 bp, Homo sapiens
accaggagctccgaacatgcaggcccaaattggaataggagatggattttgataaaagaggttaaataacaggtttttccatttcaccttatacgaacgggatggggggtgggggtgctgggcctccagccaatagaggaccaagagttgtcaggagggcttataaagcttgctatttctggcattttttcctctttctctgctgattatgcagcagactcgcacagaggctgtcgcgggcgcgttctctcgctgcctgggcttctgtggaatgagactcgggctccttctacttgcgagacactggtgcattgcaggtgtgtttccgcagaagtttgatggtgacagtgcctacgtggggatgagtgacggaaacccagagctcctgtcaaccagccagacctacaacggccagagcgagaacaacgaagactatgagatccccccgataacacctcccaacctcccggagccatccctcctgcacctgggggaccacgaagccagctaccactcgctgtgccacggcctcacccccaacggtctgctccctgcctactcctatcaggccatggacctcccagccatcatggtgtccaacatgctagcacaggacagccacctgctgtcgggccagctgcccacgatccaggagatggtccactcggaagtggctgcctatgactcgggccggcccgggcccctgctgggtcgcccggcaatgctggccagccacatgagtgccctcagccagtcccagctcatctcgcagatgggcatccggagcagcatcgcccacagctccccatcaccgccggggagcaagtcagcgaccccctctccctccagctccactcaggaagaggagtcggaagtgcatttcaagatctcgggagaaaagagaccttcagccgacccaggaaaaaaggccaagaacccgaagaagaagaaaaagaaggaccccaatgagccgcagaagcctgtgtcggcctacgcactcttcttcagagacactcaggccgccatcaagggtcagaaccccagtgccactttcggtgacgtgtccaaaatcgtggcctccatgtgggacagcctgggagaggaacagaagcagagctccccagatcaaggtgagaccaagagcactcaggcaaacccaccagccaaaatgctcccacccaagcagcccatgtatgccatgccaggcctggcctccttcctgacgccgtcggacctgcaggccttccgcagtggggcctcccctgccagcctcgcccggacgctgggctccaagtctctgctgccaggcctcagtgcgtccccgccgccgccaccctccttcccgctcagccccacactgcaccagcagctgtcactgccccctcacgcccagggcgccctcctcagtccacctgttagcatgtccccagccccccagccccctgtcctgcccacccccatggcactccaggtgcagctggcgatgagcccctcacctccagggccacaggacttcccgcacatctctgagttccccagcagctcgggatcctgctcacctggcccatccaaccccaccagcagcggggactgggacagcagctaccccagtggggagtgtggcatcagcacctgcagcctgctccccaggaacaaatcgctctacctcacctaatcccgcctccctaccatccctgaggctcgctggaaggcactgctcagagcctgaagggctgacagcagaaaagaggccctggccagaggcagggtggcccatcggagagagcagtgacacacccattgcccgggggctgagtctcttcctcaacctcccaccagactctgcagaggcagcccactgcccaccaccagcccaaagaacctgcaggaaccttccgcccgctgacctgcttgctccagggtaactgtggaccctgtcctcgccctgcgcacggtaccctatgtctggacacccggccccagctccagccccagcccaggtgggccgcccctggcggggtcgcttaccaacggacacccaccccagatgcatgggccagagggccggcccccggcatagatgtgcacatcggttttccagtgtgaacaaaagattacgaaacctagaaactgttggttccgtgtaagtagttgactacgtgttttagaactgtgctgaagacatctgtaagactattttgtgggggaaaaaagtagtttcctttaaggtaaaaagcattttatatgatccttagcacatttttaagttttatcttaagggagacgcgcacaaaagcggctgccaaaccgtttcgtcatcctcacagcaaggaccggacgcttgctagccaccccggagcactgctctccttttaatcatgtattcatctattttaaattgccggcgacgacttttgtctatttatgaagaaaccttgagaacgaagttacagcttatcctaccgtgtgtgtggttttggggtttcgtttgggtttgggttcttgacgtcgtttgcagctgtttcctggccctggcgagtgtctgtcttggtgcccagtgcttctctcaaatctctttataataaaacttctgaaaagctgaaaaaaaaaaaaaaaaaaaggac

SEQ ID NO: 5710 - DNA, 2526 bp, Homo sapiens
tgtcgcacagatgcctctgcacgctgcagacggtgcctctcctctcctatggaccctcgtcgggggcaggcatcggccgggtccaaacttgctgctgtcctcgaggctggcactgctatctccagggctgggttgactcaagccagacagggggaaggaattggttctgcaggacagtgagagggtctgtgtcccggcacccctgggacagcgctcggctgcctgtgctcactgcatgagaaaactcagagggtgcattctccctctggcatggctgtgtctgggcgccttgggctgcggcagggggcaggccccacgtggggaagcctcgtgcttggtcagctttctgtctctcccaggccagtgacaactggcttcccgaggaaggaggtgaggtaccagggaccctgggcaggacctggtgtcgggcagggcggtgccagcactggggaaggacagggagccctcccggagccccaccctgcacctgccgctggggtcagggagtgtctcggggtgcctttgggggcagcatgagctccaccaggggccccggcccccacctcagcctatggcccttccccatggctaaggtcatgccttttctgaacagctttggccttgagtgcacacatctgtgccaggctcacggcacgttcccgttggatgtcagggtccttgtccaaaccaaactcacagctgcccctgtgcagccttcagagttgagctggggtctcagtctccaacctgtcctttctgaccctcccatggctgcccagggagggcggggttcactgtgccacgtgctgggtgcccccctctgcagacagccagtccaggagatggaccaacagaggtcaaggggcagctggccaggccgcaccggggtccccgagttctgagctgtgctatgcaaacaagaatgctcctgtgtgggggggcatggccgttggaggtatagctgggcgggtagtggaaggactggaaatctctgttgttgtttggggaagtccatgcttcagtccttcggagtatgcgtggattgttcgaagtgtgactatggcccgggagccagggcagcatgaactcctttctctgaaatttcgaggcctccttgggttccctgaactccgggctgatgttcccaggacccagcaccaggagaccccagtcccgccagcagccgccgctacccaggagggctgggcgacattggccgcctcccaccagctccccctcctcgcccacagcctcttgtcactgccaagcccccgttccttttgcccaaatcacgcaggcggaagctgcagtgccagctggagggatgttcatagggcttcctgtgcccatccctgctccaaacagctggacagcttcccctctacccccaccctggtgagcccctgggggccagagaaagatggggttcctgcaccttcccagctccacctctgaacttgagttagcgttagctaagcatacaatcagtgtcgaacgtctctcttccttaagcttgtagatacgactgcctataatcaggggactcccactggaggccgggaggccaatgctggccaggtgcgagggcatggtttggttcctttagggaatttttgttttgcaaacaggagaaacctgtgctgcaggttggagtggcaggaacgactggccttggtcagcaggcagcccccagcctagggccacagtcctcttcagggcctgggcagccccaatttctggcccagcaggtttctctttgtagtgtctttcagcacatccaaaatgctaggcctcctgccaccaacgtgtcagagcaatgtccaactgtcaggctctcagagatgcctcagtttccctagcatgagcaccagccgacacacacagtccactgagatgataattctgttctctccaaagcaaaaagctgggcgaggggtagtctcaatttctgtcagtgctcaaaggaataacaccaaaagaatcaacacagaatctcccagacacacgtgacccagctcgtggcgccgtgggtccgtaggagggacagtacctcacaacaggcccagcgggggaccacctctctgtacaattggaacgcgttttacttttcttttctctccttttttcattccgattttttttgcatgtttctttttgaaatgggcaaaatgtgtagcagcctgcatgagcacagttgttttggggaaagatactggagtatgatgtactcacacctgcaaatctgagcatcgcgaggttaaacgttccacctttttttgtaatcgtcaacagcacaactattttgtattgttgtttgtatcattttgtaccaaaaaaaaaaaaaaaaaaaaaaaaaaagagagttgatgttttcagtgtgtttccagtgccagacagtcttggtcctgaactcagtagacccttgcggagcggttgtgcgcgggcaggcggggcgcgctgctccagagaatgaataaagtcccccttttccgtaaaaaaaaaaaaaaaaaaaaaaaaaaaaaaaaa

SEQ ID NO: 5711 - DNA, 2040 bp, Homo sapiens
  misc_feature (430)..(430): n is a, c, g, or t
  misc_feature (499)..(500): n is a, c, g, or t
  misc_feature (598)..(598): n is a, c, g, or t
  misc_feature (799)..(799): n is a, c, g, or t
ggagggcgtgaagcggggtggtatataggcgtgtggggggggcgacctaatagggcttggggcgcgatccggcgccgccacgcgctgtttcctagtggggccgggcggcgtgtgtgagggaggttgtagtatttggagagatagttgagcagccgcggggtattgcaatgggggcgaaggcgagggggggggcgagacatacactcgcgcacggagggctgccgctctgctccctcacgcggtgcacgctgggtagacgcgcacaaaaaaggtgatagagagagcgtggaaccgctcgcagcgcgacctatccgcggtgagagggggctcgcccacttggtcatggggcacgacctggggacgggcgacgtagtgcctgggcgggcgatctggtgagacatcttcatgcgcgctgggccgtaggatctanatggtgtgcatgtgatcgtgctcctacgcacgttcggtgggtgcgtgtcccgcggcctccgacgcgcannaagcgctgagatattgagagctctccgcggatggttgcaggagtgttgcgcagtattccaagggctgtagcgagagcgcagcgcgggtgctcacgtcncgacgacgcgggtgtgaggtgaatgagcggcgacgcgacgaggggacaaactgtggctgccgagaagacaggtaggcgcgacgagccaaagtggaggaacgaggggggcgtgataatggtatggcgggggcgctggactaaacaagcgccggcgttagttcgtgtaggcaaacggtgctgcgccggcagaacctccgcgancggccaacccgcccggcgcagagaagctagggagcagtgccgcgccccgcggcatcccaccggcgggggcgctaccagcctcgctaacccgaatgtgcgagcgccaaccgcccggttcgcccactgatgcggccgcagcagcgccgcctcgtcccccgccgccggccgctcgcccgccgaccaccgcggctacgccagcctgcgcgccgcctcgcccgccccgtccagcgcgccctcgcacgcgtcctcctcggcctcgtcccactcctcctcttcctcctcctcgggctcctcgtcctccgacgacgagttcgaagacgacctgctcgacctgaaccccagctcaaactttgagagcatgtccctgggcagcttcagttcgtcgtcggcgctcgaccgggacctggattttaacttcgagcccggctccggctcgcacttcgagttcccggactactgcacgcccgaggtgagcgagatgatctcgggagactggctcgagtccagcatctccaacctggttttcacctactgaagggcgcgcaggcagggagaagggccggggggggtaggagaggagaaaaaaaaagtgaaaaaaagaaacgaaaaggacagacgaagagtttaaagagaaaagggaaaaaagaaagaaaacagtaagcagggctggcttcgcccgcgttctacgtcgtcggatcaaggagcgcggcggcgtatgggacccgagctcccataccccaaccttcccgggccggggacccactctgcccagccggagggacgcggaggcaggaaagagggtagcacaggggcgaaccgtgtgaataggtacgtaatggacagtccgtgagtcgaatggcaacaaaacaaaacaggcagactccaaaattggcccccctttggcctggaagaagaccccctcacccactatcacaagcgagagcacatcccccggaccttggtcacgtggaccccgcccccaacagaaacacagccaaggggcccgcgaataggagctcatgagcctaagagagacccttcgtcaccggacgacgacattcatccccccccgatatcccggtgcagttccaccagagcagtgggcgaagaaggagagaaaatgaaggaggctgtactgtggggccacacacgcacaaggcggcagcgcgggacgaaaccaccagggcgacacaccccgtgcccccgccatgttgatagttaaagaacgagcggtgaacgca

SEQ ID NO: 5712 - DNA, 1488 bp, Homo sapiens
accccatcttcatctggccttgactctgcccttgaggggcctaggggtgcagccagcctgctccgagctcccctgcagatggaggaggccatcctggtcccctgcgtgctggggctcctgctgctgcccatcctggccatgttgatggcactgtgtgtgcactgccacagactgccaggctcctacgacagcacatcctcagatagtttgtatccaaggggcatccagttcaaacggcctcacacggttgccccctggccacctgcctacccacctgtcacctcctacccacccctgagccagccagacctgctccccatcccaagatccccgcagccccttgggggctcccaccggacgccatcttcccggcgggattctgatggtgccaacagtgtggcgagctacgagaacgagggtgcgtctgggatccgaggtgcccaggctgggtggggagtctggggtccgtcctggactaggctgacccctgtgtcgttacccccagaaccagcctgtgaggatgcagatgaggatgaggacgactatcacaacccaggctacctggtggtgcttcctgacagcaccccggccactagcactgctgccccatcagctcctgcactcagcacccctggcatccgagacagtgccttctccatggagtccattgatgattacgtgaacgttccggagagcggggagagcgcagaagcgtctctggatggcagccgggagtatgtgaatgtgtcccaggaactgcatcctggagcggctaagactgagcctgccgccctgagttcccaggaggcagaggaagtggaggaagagggggctccagattacgagaatctgcaggagctgaactgagggcctgtggaggccgagtctgtcctggaaccaggcttgcctgggacggctgagctgggcagctggaagtggctctggggtcctcacatggcgtcctgcccttgctccagcctgacaacagcctgagaaatccccccgtaacttattatcactttggggttcggcctgtgtcccccgaacgctctgcaccttctgacgcagcctgagaatgacctgccctggccccagccctactctgtgtaatagaataaaggcctgcgtgtgtctgtgttgagcgtgcgtctgtgtgtgcctgtgtgcgagtctgagtcagagatttggagatgtctctgtgtgtttgtgtgtatctgtgggtctccatcctccatgggggctcagccaggtgctgtgacaccccccttctgaatgaagccttctgacctgggctggcactgctgggggtgaggacacattgccccatgagacagtcccagaacacggcagctgctggctgtgacaatggtttcaccatccttagaccaagggatgggacctgatgacctgggaggactcttttagttcttacctcttgtggttctcaataaaacagaacgtaaaaaattaaaaaaaaaaaaaaaaaaa

SEQ ID NO: 5713 - DNA, 1681 bp, Homo sapiens
gccccgtcgggggcccggagggggactcggagctgggccaaggggcggctccggcgggcggactcggagcgggcggcggagtgacccggacagctgtcctctctgacaccaccccggcctgcctctttgttgccatgagagctgcctacctcttcctgctattcctgcctgcaggcttgctggctcagggccagtatgatctggacccgctgccgccgttccctgaccacgtccagtacacccactatagcgaccagatcgacaacccagactactatgattatcaagaggtgactcctcggccctccgaggaacagttccagttccagtcccagcagcaagtccaacaggaagtcatcccagccccaaccccagaaccaggaaatgcagagctggagcccacagagcctgggcctcttgactgccgtgaggaacagtacccgtgcacccgcctctactccatacacaggccttgcaaacagtgtctcaacgaggtctgcttctacagcctccgccgtgtgtacgtcattaacaaggagatctgtgttcgtacagtgtgtgcccacgaggagctcctccgagctgacctctgtcgggacaagttctccaaatgtggcgtgatggccagcagcggcctgtgccaatccgtggcggcctcctgtgccaggagctgtgggagctgctagggtggtgctggcatcctgagtcctggccctcctgggatctggggccctcgggccctgcctgacctggtgcttttttccccatccccatgttccttttattctgtaaaaagttagtggactgcagccctgggggttgcaggctgcggtgcctcaggcccctccttcagcctgtggccacctctggggcacgatgggggctccccactgcccagtctgcccctcgggttgggggagtatcccaggcctctctgtgggacctgggcccctgacgggccttctcagcccgttttgaggacagacagtcccccgaggtaggctacatccccccaccccagctggtctgcttggatttcctacagcccccgtgggcatggaccacctttattttatacaaaattaaaaacaagtttttacaaaaaaaaaaaaaaaaaaaaaaaaaaaaaaaaaaaaaaaaaaaaaaaaaaaaaaaaaaaaaaaaaaaaaaaaaaaaaaaagaagcgacgaacacgcaaaaaaataagccgcagcaaaaggaggccaacaacaacgaacgcggagccaacagcgtagaatagcacggcggcggctcctcaacagaacgacggacacatcttagagagcacaggcacacagctgcggcatctcatagcgacgcgtcgcaacctaggtgagaacgcagaccggcgcggccaggagcgcgcgctagtcccacagacaaccaccaccagacgacaaaacccacgcctggcgcggcccaagccccgagggcagcagcaccaccccaccaccacgcacggacgccaccggacccgaagcagaggagacgacaacctcacgcactaatgaaccgaagatgcagtgagtacgggggcggcagcagcaagcgacgctcagtactatcacgcggacgcgaatgggccgaaacgcgagccgttgtacggacagggctgcaagccgcgcgagaccacagcgcagggcctatacagccaccgcaa

SEQ ID NO: 5714 - DNA, 1967 bp, Homo sapiens
  misc_feature (1910)..(1910): n is a, c, g, or t
  misc_feature (1924)..(1924): n is a, c, g, or t
  misc_feature (1932)..(1932): n is a, c, g, or t
  misc_feature (1943)..(1943): n is a, c, g, or t
tctgtgtgtgtgcatgtgtggcagaggggcttcctaacccctgcctgataggtgcagaattcgggatcagggcaagcattgtggagcggttccttatgccaggctgccatgtgagatgatccaagaccaaaacaaggccctagactgcagtaaaacccagaactcaagtagggcagaaggtggaaggctcatatggatagaaggcccaaagtataagacagatggtttgagacttgagacccgaggactaagatggaaagcccatgttccaagatagatagaagcctcaggcctgaaaccaacaaaagcctcaagagccaagaaaacagagggtggcctgaattggaccgaaggcctgagttggatggaagtctcaaggcttgagttagaagtcttaagacctgggacaggacacatggaaggcctaagaactgagacttgtgacacaaggccaacgacctaagattagcccagggttgtagctggaagacctacaacccaaggatggaaggcccctgtcacaaagcctacctagatggatagaggacccaagcgaaaaaggtatctcaagactaacggccggaatctggaggcccatgacccagaacccaggaaggatagaagcttgaagacctggggaaatcccaagatgagaaccctaaaccctacctcttttctattgtttacacttcttactcttagatatttccagttctcctgtttatctttaagcctgattcttttgagatgtactttttgatgttgccggttacctttagattgacagtattatgcctgggccagtcttgagccagctttaaatcacagcttttacctatttgttaggctatagtgttttgtaaacttctgtttctattcacatcttctccacttgagagagacaccaaaatccagtcagtatctaatctggcttttgttaacttccctcaggagcagacattcatataggtgatactgtatttcagtcctttcttttgaccccagaagccctagactgagaagataaaatggtcaggttgttggggaaaaaaaagtgccaggctctctagagaaaaatgtgaagagatgctccaggccaatgagaagaattagacaagaaatacacagatgtgccagacttctgagaagcacctgccagcaacagcttccttctttgagcttaggtgagcaggattctggggtttgggatttctagtgatggttatggaaagggtgactgtgcctgggacaaagcgaggtcccaaggggacagcctgaactccctgctcatagtagtggccaaataatttggtggactgtgccaacgctactcctgggtttaatacccatctctaggcttaaagatgagagaacctgggactgttgagcatgtttaatactttccttgatttttttcttcctgtttatgtgggaagttgatttaaatgactgataatgtgtatgaaagcactgtaaaacataagagaaaaaccaattagtgtattggcaatcatgcagttaacatttgaaagtgcagtgtaaatttgaagcattatgtaaatcaggggtccacagtttttctgtaaggggtcaaatcataaatactttagactctgggccatatggtttctgttacatatttgttaggctatagtgtcttgcccgaattcaaaatcattcttagtttttgagccaattggatttggcctgctgttcatagcttaccaccccctgatgtattatttgttattcagagaaaatttctgaatactactagtttccttttctgtgcctgtccctgtgctaggcactaaaaatgcaatgattattgatatccaggtgacctgaaaaaaatgtgatgtgcttgtaactgtaagactgatccactggatagcgtgtgatccagaagngcagctaaaaggcnctccaagnttggcttgcgnccaggatgttggaatgataatttg

SEQ ID NO: 5715 - DNA, 2516 bp, Homo sapiens
  misc_feature (475)..(489): n is a, c, g, or t
ccatatggtttctgttacatatttgttttttaaacaacgtttttataaggtcaaaatcattcttagtttttgagccaattggatttggcctgctgttcatagcttaccaccccctgatgtattatttgttattcagagaaaatttctgaatactactagtttccttttctgtgcctgtccctgtgctaggcactaaaaatgcaatgattattgatatctaggtgacctgaaaaaaaatagtgaatgtgctttgtaaactgtaaagcacttgtattctactgtgataagcgttgtggatacaaagaaaggagcaagcataaaaaagtgctctttcaaaaggatatagtactatgcagacacaaggaattgtttgataaatgaataaattatatgtatatttgaggccaatttgtgtttgctgctctggtaattttgagtaaaaatgcagtattccaggtatcagaaacgaaaacannnnnnnnnnnnnnntaaactttaaaatatactgaaaacataagggactaagcttgttgtggtcacctataatgtgccagataccatgctgggtgctagagctaccaaagggggaaaagtattctcatagaacaaaaaatttcagaaaggtgcatattaaagtgctttgtaaactaaagcatgatacaaatgtcaatgggctacatatttatgaatgaatgaatggatgaatgaatattaagtgcctcttacataccagctattttgggtactgtaaaatacaagattaattctcctatgtaataagaggaaagtttattctctatactattcagatgtaaggaatgatatattgcttaattttaaacaatcaagactttactggtgaggttaagttaaattattactgatacatttttccaggtaaccaggaaagagctagtatgaggaaatgaagtaatagatgtgagatccagaccgaaagtcacttaattcagcttgcgaatgtgctttctaaattataaagcacttgtaaatgaaaaatttgatgctttctgtatgaataaaactttctgtaagctaggtattgtctctacaaaattctcattgtatagttaaaccacagtgagaagggttctataagtagttatacaaaccaagggtttaaatacctgttaaatagatcaattttgattgcctactatgtgaactcactgttaaaggcactgaaaatttatcatatttcatttagccacagccaaaaataaggcaatacctatgttagcattttgtgaactctaaggcaccatataaatgtaactgttgattttctcacttggtgctgggtactaggtttataaaattgtatgatagttattatattgtgcaaataaagtaggaaaatttgaataacaatgattatcttttgaatacgcatacgcaagggattggttgtctgaagaatgccactatagtagttatctattgtgtgccaatctcattgctaggcattggggatgcaaagataaaccatctttattgtgtcttgggtagcagaagaaaatatgtgtaaaatcaatttataatttgtaaactgccacccatatataagctatatctgctgaatgatcattgattactcttatccttagagataacaactgggggcacaaacatttattatcattattgaacctacaacagagatctatgtgtagatttacgaagcctacagttctatacagataggaatgaactattggcttactgaatggtgattactttctgtggggctcggaactacatgccctaggatataaaaatgatgttatcattatagagtgctcacagaaggaaatgaagtaatataggtgtgagatccagaccaaaagtcatttaacaagtttattcagtgatgaaaacatgggacaaatggactaatataaggcagtgtactaagctgagtagagagataaagtcctgtccagaagatacatgcttcctggcctgattgaggagatggaaaatttttgcaaaaaacaaggtgttgtggtcttccatccagtttcttaagtgctgatgataaaagtgaattagacccaccttgacctggcctacagaagtaaaggagtaaaaataaatgcctcaggcgtgctttttgattcatttgataaacaaagcatcttttatgtggaatataccattctgggtcctgaggataagagagatgagggcattagatcactgacagctgaagatagaagaacatctttggtttgattgtttaaataatatttcaatgcctattctctgcaaggtactatgtttcgtaaattaaataggtctggcccagaagacccactcaattgcctttgagattaaaaaaaaaaaaaaaaagggaacgaaaattgcaagttctttccaaaattaaggacgcccttttcccaaatttccaggaatccccaaatccatttcaccaatgggaataaggtaaaagcccggaaactggataaaagggccaagggatgggcttacaatcatag

SEQ ID NO: 5716 - DNA, 4094 bp, Homo sapiens
gcaggatgtgatggaaatgaaaaaaacaaaggttcgcctaatgaaacaaatgaaagaagaacaagagaaagccagactgactgagtctagaagaaacagagagattgctcagttgaaaaaggatcaacgtaaaagagatcatcaacttagacttctggaagcccaaaaaagaaaccaagaagtggttctacgtcgcaaaactgaagaggttacggctcttcgtcggcaagtaagacccatgtcagataaagtggctgggaaagttactcggaagctgagttcatctgatgcacctgctcaggacacaggttccagtgcagctgctgtcgaaacagatgcatcaaggacaggagcccagcagaaaatgagaattcctgtggcgagagtccaggccttaccaacgccggcaacaaatggaaacaggaaaaaatatcagaggaaaggattgactggccgagtgtttatttccaagacagctcgcatgaagtggcagctccttgagcgcagggtcacagatcatacatagcagaagatgaccatttccaacatggaggcagatatgaatagactcctcaagcaacgggaggaactcacaaaaagacgagagaaactttcaaaaagaagggagaagatagtcaaggagaatggagagggagataaaaatgtggctaatatcaatgaagagatggagtcactgactgctaatatcgattacatcaatgacagtatttctgattgtcaggccaacataatgcagatggaagaagcaaaggaagaaggtgagacattggatgttactgcagtcattaatgcctgcacccttacagaagcccgatacctgctagatcacttcctgtcaatgggcatcaataagggtcttcaggctgcccagaaagaggctcaaattaaagtactggaaggtcgactcaaacaaacagaaataaccagtgctacccaaaaccagctcttattccatatgttgaaagagaaggcagaattaaatcctgagctagatgctttactaggccatgctttacaagatctagatagcgtaccattagaaaatgtagaggatagtactgatgaggatgctcctttaaacagcccaggatcagaaggaagcacgctgtcttcagatctcatgaagctttgtggtgaagtgaaacctaagaacaaggcccgaaggagaaccaccactcagatggaattgctgtatgcagatagcagtgaactagcttcagacactagtacaggagatgcctccttgcctggccctctcacacctgttgcagaagggcaagagattggaatgaatacagagacaagtggtacttctgctagggaaaaagagctctctcccccacctggcttaccttctaagataggcagcatttccaggcagtcatctctatcagaaaaaaaaattccagagccttctcctgtaacaaggagaaaggcatatgagaaagcagaaaaatcaaaggccaaggaacaaaagcactcagattctggaacttcagaggctagtctttcacctccttcttccccaccaagccggccccgtaatgaactgaatgtttttaatcgtcttactgtttctcagggaaacacatcagttcagcaggataagtctgatgaaagtgactcctctctctcggaggtacacagatcctccagaaggggcataatcaacccatttcctgcttcaaaaggaatcagagcttttccacttcagtgtattcacatagctgaagggcatacaaaagctgtgctctgtgtggattctactgatgatctcctcttcactggatcaaaagatcgtacttgtaaagtatggaatctggtgactgggcaggaaataatgtcactggggggtcatcccaacaatgtcgtgtctgtaaaatactgtaattataccagtttggtcttcactgtatcaacatcttatattaaggtgtgggatatcagagattcagcaaagtgcattcgaacactaacgtcttcaggtcaagttactcttggagatgcttgttctgcaagtaccagtcgaacagtagctattccttctggagagaaccagatcaatcaaattgccctaaacccaactggcaccttcctctatgctgcttctggaaatgctgtcaggatgtgggatcttaaaaggtttcagtctacaggaaagttaacaggacacctaggccctgttatgtgccttactgtggatcagatttccagtggacaagatctaatcatcactggctccaaggatcattacatcaaaatgtttgatgttacagaaggagctcttgggactgtgagtcccacccacaattttgaaccccctcattatgatggcatagaagcactaaccattcaaggggataacctatttagtgggtctagagataatggaatcaagaaatgggacttaactcaaaaagaccttcttcagcaagttccaaatgcacataaggattgggtctgtgccttgggagtggtgccagaccacccagttttgctcagtggctgcagagggggcattttgaaagtctggaacatggatacttttatgccagtgggagagatgaagggtcatgatagtcctatcaatgccatatgtgttaattccacccacatttttactgcagctgatgatcgaactgtgagaatttggaaggctcgcaatttgcaagatggtcagatctctgacacaggagatctgggggaagatattgccagtaattaaacatgaatgaagataggttgtaaactgaatgctgtgataatactctgtattctttatggaaaatgttgtcctgtacttactaggcaaaacgtatgaatcggattaactggaaaatatatctgaattcaactgctgactataaatggtattctaataaaattgtgtactatcctgtgtgcttagttttaagatcaaccaatagatatatatcctacaattgatatattgctttattcacacttttattgtggctgaatttttgtgcctatctataaaacacactttcaaattatttgaattaccaagacgtctgcttttgtgacagtcagaaaacacacctggaatacgatgcagcccaccattaactcattcatgtagtttattcaagtgatttatgtatttaaactaaatattgaaaatgttagtcaaattgtggtttgcttgtcaggtatttatatcagtctgtagtggattcccaaatttcaaagctcttttaatgtaatggacaaaaataagatatgagaatattattgatgaattttcataaggtggaattgatcttaatctactaacagagaagggtagacagtttgtgttaaatgttggcatttacttgtattgaccaaagttttgcagctctactatattctgtgctcaggactaaaatgctgttaatttttttttttttttccagtgctgtgcatatattctgtgatgggaaacattgttgatgtcctaacagaaatatattttgatctattttcctatggagttgtttctattatgaccatttaattttgtttttatttaatagtagtatttccttcccttttatctaattttttatatgctgctaaatatattttaaatatactatgtttgcgaaccttggtagctatgatgagagctattatcatctgtggtgggaaaagctatgtaaataggtagattgtatagagagactatcttgtgttgtgcctgtatgaatttttaaaagttgttgactggattttgcaaaaggatgtataatatttctgtctgctcagaatattaatttgtaaattctgcaagtttaatttttatgtagatggtataacatttgaaaatattgtcttatgtgattttttcccctgaaaatatttgcttgtaaatgaaaacttagctagggcttaaataaacatgttgctatgaaattaaaaaaaaaaacaaacagaaaaaaaaaaaaacaacacacaaacaaacaagaaaacacagacagccacacccgagccacaccaaacgcagagcaaccccgcacaccccccacagccacaccgaccaacacgggggcgcgccccacaaccccgcg

SEQ ID NO: 5717 - DNA, 8008 bp, Homo sapiens
  misc_feature (1012)..(1043): n is a, c, g, or t
  misc_feature (1240)..(1258): n is a, c, g, or t
  misc_feature (4512)..(4533): n is a, c, g, or t
  misc_feature (6057)..(6099): n is a, c, g, or t
gtggatccataggtacaaaacaagcaaagtctcccataactgaaacagaggattctgttttagaaaaaggcccagctgagcttaggagcagagaaggaaaagaagaaaatagagagctttgtgcatcttctacgatgcctgcaatttcagagctttcatcattgcttagggaggaatctcagaatgaagaaaataaaccttttctctcccaagatcgtcagcctagagtcgaaagaaccacctgcctctgtagctgaaggaggcaacccagaagaatttcagccatttactttttctttaaaaggattatcagaggaggttagccatccagccgactttaaaaagggaggaaatcaagaaataggcccattaccaccaactggaaatttgaaggcacaagtcatgggagatattttagataagctaagtgaagaaacaggccacccaaattcatcccaggtactccagagtataacagaaccatcaaagattgctccttctgacctccttgtggaacaaaaaaagacagaaaaagcacttcattcagatcaaactgttaaattacctgatgtaagcacctcttctgaagataaacaagatctgggtattaagcagttttcacttatgagagagaatttgcctttggaacaatcaaaatcatttatgacaaccaagcctgcggatgtcaaagaaacaaaaatggaagaattctttatttctccaaaggatgaaaactggatgttgggaaagccagaaaatgtggctagtcaacacgaacagagaatagcaggatctgtgcagctggattcctctagcagcaatgagctgaggccagggcagctcaaggctgctgtgtccagtaaggaccatacatgtgaagtgagaaagcaggtcctgccgcattctgctgaagaatctcatttgtcatcacaagaagcagtatctgctcttgatacttccagtggtaatacagagaccttatcaagtaaaagttactcttctgaagaagtannnnnnnnnnnnnnnnnnnnnnnnnnnnnnnnagctggaaatgtagagagaaacatagcagaggggaaggagattcattctttgatggagagtgaaagtttgctattggagaaagcaaacacagagctttcctggccttccaaagaagatagccaggaaaaaattaaactacctcctgaaagattcttccagaaaccagtgtctggcctatcagtggaacaggtgaagnnnnnnnnnnnnnnnnnnnctgtcaaaacagcccatttcccggcagaaggtgtggaacctgcattgggcaatgaaaaagaagcacacaggagcacacctccttttcctgaagagaagccattggaagaatcaaaaatggttcagtcaaaggttattgatgatgctgatgagggaaagaaaccatcacctgaagtaaaaatacccacacaaagaaaacccatctcctcaatccatgcaagagagcctcaatccccagaagcacctgaggtgacacaaaatccacctacacaaccaaaggtggctaagccggaccttcctgaggaaaagggaaagaaaggaatttcatctttcaaatcgtggatgtccagcttgttttttggatcgagcactccagataacaaagttgctgaacaagaagacttagaaacacagccaagtccatccgtagaaaaagcagtgactgtgatagatcctgaaggtacaattcccaccaattttaatgtagctgagaaaccagctgatcattcattatcagaggtaaaacttaaaactgctgatgaacccagaggtactttagtaaaatctggtgacggtcaaaacgttaaagaaaaatccatgattttatcaaatgtagaagatttacaacagccaaaattcatttctgaggtgtctagggaagattatggaaaaaaagaaatctcaggcgattcagaggaaatgaacataaactcagtagttacttctgctgatggtgagaaccttgaaattcaatcttattcactaatcggtgagaaattggttatggaagaagccaaaactattgttcctcctcatgttactgatagtaaaagagtccagaagccagcaatcgctcctccatctaaatggaatatttctatttttaaggaagagccaagaagtgatcaaaaacaaaaatcactcctttcatttgatgtagtagataaggtgccacaacagccaaaatcagcttcctccaactttgcaagtaaaaatatcacaaaggaatcagagaaaccagagtcaattattttgccagtagaagaatcaaaaggcagtttaattgatttcagtgaagacagactcaagaaagaaatgcaaaatcctacttccttgaaaatttctgaagaggaaacaaaactcaggtctgttagtccaactgagaagaaagataatttggaaaacagatcatataccttggcagaaaagaaggtgctggcagaaaaacaaaactctgtggccccattagagcttagagatagtaatgaaatagggaagacacaaattacacttggatctagatctactgaactgaaagaatcaaaagccgatgctatgccacagcacttctatcaaaatgaagactacaatgaaagacccaaaatcattgttggttctgaaaaggagaaaggtgaagaaaaagaaaatcaggtatatgtgctttcagaaggaaagaagcagcaggaacatcagccttattctgtgaatgtagccgagtctatgagtagagaatcagatatctctttaggtcattctttgggtgaaactcaatcattttcattagttaaagctacatcagttactgaaaaatcagaagccatgctcgcagaggctcacccagaaatcagagaagcaaaggcagtaggaacccaaccacatcctttagaagaaagtaaagttttggtggagaaaaccaagactttcctgccggtggctctttcttgtcgtgatgaaatagagaaccactctttatctcaggaaggaaatctagtattagaaaagtcaagcagagatatgccagatcacagtgaagaaaaagaacagttcagagagtcagagctatcgaaaggcggttcagtagatatcacaaaagaaactgtgaaacaaggatttcaagaaaaggcagtaggaacccaaccacgtcctttagaagaaagtaaagttttggtggagaaaactaagactttcctgccagtggttctttcttgtcatgatgaaatagagaaccactctttgtctcaggaaggaaatctagtgttagaaaagtcaagcagagatatgccagatcacagtgaagaaaaagaacagttcaaagagtcagagctatggaaaggtggttcagtagatatcacaaaagaaagtatgaaagaaggatttccatctaaagaatccgaaaggactttagctcgtccttttgatgaaactaagagctcagaaacaccgccatatttgctgtcacctgtaaaaccacaaactcttgcttcaggagcttctccagaaattaacgcagtgaagaaaaaagaaatgccacgatcagaattgactccagaaaggcatacagttcatactattcagacatctaaagatgacacatccgatgtgcctaaacaatctgttcttgtttcaaagcaccacttggaggctgcggaagatacccgtgtaaaggaaccactgtcttcagcaaaaagcaactatgctcaatttatatctaatacatcagcaagcaatgctgataaaatggtttctaataaagaaatgcccaaggaacctgaagacacatatgcaaaaggtgaagactttacagtgactagtaagccagccggactttcagaagatcagaagactgcctttagtatcatttctgaaggctgtgagatattgaatattcatgctccggcctttatttcttcaatcgatcaggaagaaagtgaacaaatgcaagataaattagaatatttggaagagaaagcctcatttaaaaccataccactccctgatgatagtgaaacagttgcttgtcataaaacattaaagagcaggttagaagatgaaaaagttaccccattgaaagaaaataaacaaaaggaaactcataagacaaaagaagagatatccacagattcagaaactgatttatcatttattcagcccacaattcccagtgaagaggattattttgaaaaatatactttgattgattataacatctccccagacccagaaaaacagaaagctccacagaaattaaatgttgaagagaaactctcaaaggaagttacagaagaaactatctctttcccagtaagttcagtggaaagtgcactagaacatgaatatgacttggtgaaattagatgaaagtttttatggaccagaaaagggccacaacatattatctcatccagagacccaaagccaaaactcagctgacaggaatgtttcaaaggacacaaagagagatgtggactcaaagtcnnnnnnnnnnnnnnnnnnnnnngcagaggaaggagttctatcacgaacccagatatttcctaccactattaaagtcattgatccagaatttctggaggagccacctgcacttgcatttttatataaggatctgtatgaagaagcagttggagagaaaaagaaggaagaggagacagcttctgaaggtgacagtgtgaattctgaggcatcatttcccagcagaaattctgacactgatgatggaacaggaatatattttgagaagtacatactcaaagatgacattctccatgacacatctctaactcaaaaggaccagggccaaggtctggaagaaaaacgagttggtaaggatgattcataccaaccgatagctgcagaaggggaaatttggggaaagtttggaactatttgcagggagaagagtctggaagaacagaaaggtgtttatggggaaggagaatcagtagaccatgtggagaccgttggtaacgtagcgatgcagaagaaagctcccatcacagaggacgtcagagtggctacccagaaaataagttatgcggttccatttgaagacacccatcatgttctggagcgtgcagatgaagcaggcagtcacggtaatgaagtcggaaatgcaagtccagaggtcaatctgaatgtcccagtacaagtgtccttcccggaggaagaatttgcatctggtgcaactcatgttcaagaaacatcactagaagaacctaaaatcctggtcccacctgagccaagtgaagagaggctccgtaatagccctgttcaggatgagtatgaatttacagaatccctgcataatgaagtggttcctcaagacatattatcagaagaactgtcttcagaatccacacctgaagatgtcttatctcaaggaaaggaatcctttgagcacatcagtgaaaatgaatttgcgagtgaggcagaacaaagtacacctgctgaacaaaaagagttgggcagcgagaggaaagaagaagaccaattatcatctgaggtagtaactgaaaaggcacaaaaagagctgaaaaagtcccagattgacacatactgttacacctgcaaatgtccaatttctgccactgacaaggtgtttggcacccacaaagaccatgaagtttcaacgcttgacacagctataagtgctgtaaaggttcaattagcagaatttctagaaaatttacaagaaaagtccttgaggattgaagcctttgttagtgagatagaatccttttttaataccattgaggaaaactgtagtaaaaatgagaaaaggctagaagaacagaatgaggaaatgatgaagaaggttttagcacagtatgatgagaaagcccagagctttgaggaagtgaagaagaagaagatggagttcctgcatgagcagatggtccactttctgcagagcatggacactgccaaagacaccctggagaccatcgtgagagaagcagaggagcttgatgaggccgtcttcctgacttcgtttgaggaaatcaatgaaaggttgcaaggnnnnnnnnnnnnnnnnnnnnnnnnnnnnnnnnnnnnnnnnnnnttttcccttttcgaacattatgatgacagctcggcaagaagtgaccagatgttaaaacaagtggctgttccacagcctcctagattagaacctcaggaaccaaattctgccaccagcacaacaattgcagtttactggagcatgaacaaggaagatgtcattgattcatttcaggtttactgcatggaggagccacaagatgatcaagaagtaaatgagttggtagaagaatacagactgacagtgaaagaaagctactgcatttttgaagatctggaacctgaccgatgctatcaagtgtgggtgatggctgtgaacttcactggatgtagcctgcccagtgaaagggccatctttaggacagcaccctccacccctgtgatccgcgctgaggactgtactgtgtgttggaacacagccactatccgatggcggcccaccaccccagaggccacggagacctacactctggagtactgcagacagcactctcctgagggagagggcctcagatctttctctggaatcaaaggactccagctgaaagttaacctccaacccaatgataactactttttctatgtgagggccatcaatgcatttgggacaagtgaacagagtgaagctgctctcatctccaccagaggaaccagatttctcttgttgagagaaacagctcatcctgctctacacatttcctcaagtgggacagtgatcagctttggtgagaggagacggctgacggaaatcccgtcagtgctgggtgaggagctgccttcctgtggccagcattactgggaaaccacagtcacagactgcccagcatatcgactcggcatctgctccagctcggctgtgcaggcaggtgccctaggacaaggggagacctcatggtacatgcactgctctgagccacagagatacacatttttctacagtggtattgtgagtgatgttcatgtgactgagcgtccagccagagtgggcatcctgctggactacaacaaccagagacttatcttcatcaacgcagagagcgagcagttgctcttcatcatcaggcacaggtttaatgagggtgtccaccctgcctttgccctggagaaacctggaaaatgtactttgcacctggggatagagcccccggattctgtaaggcacaagtgatccttggctttcagaatttgcaagaacagcgatttgaattttgggggggtctgctgttcattcctttaggtgctatacattattcaaaaagtctcccgcgcatttgcactaatgatggctgcatgcatagcaatcagcatgtgagcaaaatcgacaagaaaaccttgactttacagagcagtgtgtgagtaaacagaatgaaaacaacaacctccactctttagtttatataagtttgagttctttcctaaattaaaagatctacacttgagttgggaaccgaaagagaaaaatggacttccatctgttttactggtaaaggaaatcctctgatggacaggtcagagtgaaggaaggttgtgctggtaagacatctctgacgaagagccatggatgctttccacaaaatgtcacctcgctgcactaaaggatgatgaatcctaatcattaaaggaattgtttcagctgatttaaatttataatgaactcttttgtaataatgtatactgtagaacatgagtctctcctccctaaaattttaaatgtagaaaagtgctatatattagaaatttccattttgttaaataaatggttagagtctataaaaaaaaaaaaaaaaaaaaaaaaaatgggggtgggcgagaagttttaaactggggggggggcaagaagaacggaaggtcaaagatcgggaaatggggttcaaaaggcgggggggtggaaagggtgggaggaacggagg

SEQ ID NO: 5718 - DNA, 2432 bp, Homo sapiens
  misc_feature (689)..(708): n is a, c, g, or t
gttgagcttgagcgtgagccggctgctgaagacttgcgaacatttcggagccagcgagagcgcgccagagagagcgagagtgagggagtgagtgcgaggggatctagaggagtcagggcgagaaagcgagggccggaggacccacgatagagacagagtgaccatggctgtctccgcatctccagtgatctctgcaacttccagcggcgccggcgtcccggggggcttattccgggccgaacccctgtactcgactcccagagagccccctcgtcttactcctaatatgatcaatagtttcgtggttaataaccacagcaacagtgccggaggcggcggcaggggcaacaccaacaccaacgagtgccgcatggtcgacatgcacgggatgaaggtggcttcgttcctgatggacggccaggaactgatctgcctgccgcaagtctttgatctttttctcaagcacctggtgggaggcttgcacactgtgtacaccaagctgaagagactggatatatcccccgtggtgtgtactgttgagcaggtccggatcctccgcgggctgggggccatccagcccggggtaaaccgctgcaaactcatcaccaggaaagacttcgaaactttgttcaccgattgcaccaatgccagttcaagacccggcaggccccctaagcgttctttgggannnnnnnnnnnnnnnnnnnnccttctgacccatgcagtcccaggcctcttatcgccaggacttatcactccgacaggtataacagctgcagcgatggctgaggcgatgaaacttcagaagatgaagcttatggctatgaacactcttcagggaaatggaagccaaaatgggaccgaatcagagcctgatgatcttaattctaacacaggtggaagtgaatcctcctgggataaagataagatgcagtctccatttgctgcacctggaccccaacatggaattgctcatgcagccctagctggccagccaggcattgggggtgctccaaccctcaatccactgcagcagaaccacctgctaaccaatagactggatctgccatttatgatgatgcctcatcccctacttccagtcagcttacctcctgcatcagttgccatggcaatgaatcagatgaaccatctcaatactattgccaacatggctgctgcagcacagattcacagtccactctccagagctggtacctctgttataaaggagcggatcccagagagtccttctcctgctccttctctagaagagaatcatcgtcctgggagccagacctcttcccacaccagcagcagtgtgtccagctctccctctcagatggatcatcatttggaaagaatggaagaggtaccagttcaaattccaataatgaagtcacccttggacaagatacagctgactcctgggcaggcattgcccgctggattccctggaccattcatttttgctgatagtctgtcctccgtggagactctgttgaccaacattcagggtctgctgaaagttgctttggataatgctcgcatccaggagaagcagattcaacaagaaaagaaggagctgcgactggagctctatagagagagagaaattagagaaaaccttgaaagacaacttgcagttgagcttcaaagcagaactactatgcaaaagcgcctgaagaaggagaaaaaaaccaagagaaaattgcaggaagccttggaatttgaatcaaagcgccgggagcaagtggagcaggcacttaagcaagccaccactagtgacagtggcctgaggatgttaaaagatactggaattccagatattgaaatagaaaacaatgggactcctcatgatagtgctgctatgcaagcctgaacactgatgccggaactccaactgatcataggcacgaatagggaggtaactattactgtttagaaatggcacaacagttgtattcagcctgaaaggtcctcgctggctttacataaatgaagatgcttgtgattccagtttatctctgaaactattcaacatggagttatttcagttttgtttatcagcaaagctttgtttactgaaggagctatttaatctatgttacattaaaaaagaaacgcgtgtacattttaaaagcaatgatgtaaactttgttcttgcattagactgaccagtttaaaaatatgaactaaagcctaatggctaaagtaacttgaccatatttgatgcttttctatgctcatttcaacttggctttttgtcttttaaatttttaaaaaatgcagtagtgtgttagagactagaaagttatatgtatggtttccctgttctactatacataacgttaaagtacaccttctttgttaaaaatgtacttgctaaacttcagcgtaaataaaaacattttgactttgaaaaaaaaaaaaaa

SEQ ID NO: 5719 - DNA, 908 bp, Homo sapiens
  misc_feature (696)..(707): n is a, c, g, or t
gcggccgctcgcgatctagtctccggcgagttgttgcctgggctggacgtggttttgtctgctgcgcccgctcttcgcgctctcgtttcattttctgcagcgcgccagcaggatggcccacaagcagatctactactcggacaagtacttcgacgaacactacgagtaccggcatgttatgttacccagagaactttccaaacaagtacctaaaactcatctgatgtctgaagaggagtggaggagacttggtgtccaacagagtctaggctgggttcattacatgattcatgagccagaaccacatattcttctctttagacgacctcttccaaaagatcaacaaaaatgaagtttatctggggatcgtcaaatctttttcaaatttaatgtatatgtgtatataaggtagtattcagtgaatacttgagaaatgtacaaatctttcatccatacctgtgcatgagctgtattcttcacagcaacagagctcagttaaatgcaactgcaagtaggttactgtaagatgtttaagataaaagttcttccagtcagtttttctcttaagtgcctgtttgagtttactgaaacagtttacttttgttcaataaagtttgtatgttgcatttaaaaaaaaaaaaaaaaaaaaaaaaaaacgacaaaaaaaataaaaaaaaaaaaaaaaaaaaggggggnnnnnnnnnnnnggcccaaaagggggttataaaaaagaacgcgcgcggtaaacacgcgggggaaactctccgctctgggagcctcggcggggacgggcccccagagagcgggaaaaactggtagtgcccccccgcgttgctcgtatacaacaactcctcagactagtggcgcgagacatcaacgcccacatgcgcgacaggcgcatgatgaag

SEQ ID NO: 5720 - DNA, 781 bp, Homo sapiens
ggcacgaggctcaccctggggaattccaagacattgtccttgaactaggctccaagctcaggacctcaggatgggagatgaggagaagcggaacagggccatcacggcccgcaggcagcacctgaagagcgtgatgctgcagatagcggccacggagctggagaaggaggagagccgccgtgaggcagagaagcagaactacctggcggagcactgcccgccgctgcatatcccgggctccatgtctgaagtgcaggagctctgcaaacagctgcacgccaagatcgatgcggctgaagaggagaagtacgacatggaggtgagggtgcagaagaccagcaaggagctggaggacatgaaccagaagctatttgatctgcggggcaagttcaagcggcccccactgcggagggtgcgcatgtcggccgatgccatgctcaaggccctgctgggctcgaagcacaaggtgtgcatggacctgagggccaacctgaagcaggtcaagaaggaggacacagagaaggagcgggacctgcgagacgtgggtgactggaggaagaacatcgaggagaagtctggcatggagggccggaagaagatgtttgagtccgagtcctaggccactcgctgcccctacgcctgccccggtgcccggctcccagcagaacatactagggagatgcacccagagcctgccagggagggctggcctcaccaccaccgtcaataaaggatttgaatccccaaaaaaaaaaaaaaaaaaaaaaaaaaaaaaggggcg

SEQ ID NO: 5721 - DNA, 1193 bp, Homo sapiens
ctgagtagctgggagtacgaggtgcccaccaccatgccgggctaattttttgtctttttagtagaaatggggtttcacgatgttggccaggatggtctcgatctcctgacctcgtgatccgcctgcctcggcttcaaagtgctgggattacaggtgtgagccaccacacccagcaatgttttcttaataagtatagtttttctagggaaagttaattcatttttgtctagtacatatatgtaaatatattaatgttgtttttgtgtttgtgatgtagtaaggagatgtacatagaaattcattgaggtatatagatactcatctgtctaggcagttcccaattttctgaagaatgttttacagcaaaattttctattttcttttattaaatagtgacacgtcaaacaatgtcacatccaaaacactagtttcatcaatttctagcagtaataatagacttgctgtaagtattgttttctgatgccatacccttgtcatacatattattaaatgaccaatattatgtatgaagtagacaaaaaaatttactcaaacttcattcaaatcctaattgtgataatttttgttttatatttaattataaaccaaaatacatttgcatttttaagctaatttgtctcaaaattttgctttatatttttggatcaggttaaagtcctgtggatcccctgaatgttattgtccctcttgattggtttttacttctgagctatacgtcaaaagacacataagcttcaaaagtcaagacaaacctcatttgccataaaaatcaagatatagatgttctgttccgtaaactccttgaaaaacattttaaagtcatcaatatgatctgtttcccatgaaacttaagttagctttcttattggagttatttcttttctgtaagtctgaaaagtagagattttgttttacgcattttagtaacctgcaacaaccaactctaaaaaagatttggcttgtaatgacggtctctgcttttttgggtttggagtacacaattgtaatatttacttagttatttgtgtttttctttgttcaaggtattgactagtttcataaattttttgaaagtttttctttcattggttggaaagcagattacattttgcactattaaaataagtttattactttaaaaaaaaaaaaaaaaaaaaaataagaaaaaaaaa

SEQ ID NO: 5722 - DNA, 1358 bp, Homo sapiens
cccacgcgtccgggcagcgggagacggccacgagattcccccatctctttgaatataattttagattgagattcagattaaatccgaggggaaaacactttatgaggctgaaagctgtgtcgttgccagagacagggttatgagctatcaaatgcaattacattaagacagattatactgggcaaattgagccatttagaaggtgagaatcaaagaaacggctctgatcctcttttcccccttctctctccctctccctctctctctaaattgcagttcgtagttccttccaattcggaggcacaaaagtaggtgagactgcttttgtatctgcgaagtgcttcactcctgaatgtaattctagctgagtgcaatctaggttaagagccggacaagcgggtaattagagcccgctagctgcccgaggaccggccgccccgccaaagcgcgccccgagtcggcgcccttctcccggccgagcctagctgcggctggacacggagcgcccgagatgatggtgctggacaaggaggacggcgtgccgatgctctccgtccagcccaaagggaagcagaagggctgtgcgggctgtaaccgcaagatcaaggaccgctatctgctgaaggcattggacaagtactggcacgaagactgcctcaagtgtgcgtgctgtgactgccgcctgggcgaggtgggctccaccctctacaccaaggccaacctcatcctgtgccgacgcgactacctgaggctctttggcaccacagggaactgtgctgcttgcagcaagctgatcccagccttcgagatggtgatgcgggcccgggacaacgtgtatcacctcgactgcttcgcctgccagctctgcaaccagagattttgtgtgggagacaaattcttcctgaagaacaacatgatcttgtgtcagatggactatgaggaagggcagctcaatggcacctttgaatcccaagttcagtaacgcccggcgcctggcctccaggcccgtctgtccatctgcccgcctgcccacctgcctggccggccagccagccactctaccagtgcaggctggccagccgctctcctgccacattagaacttctccgtcctcgatgggagggatggcccttcctcctccaccaccgcccgtctgtgtgtgacccctcctggggccaggccgggcctgtacagtctgtcttctgtatataaatgggaacatttattttatgagaaatgtaatgcgattttattactggcgtggattaaacttatgaatgtttccgggaaaaaaaaatgcgttgttcacatgactgacacaaaaaaaacccggcctttcgggggaaaaataaaaccgc

SEQ ID NO: 5723 - DNA, 1809 bp, Homo sapiens
ttttttttttttttttttttttttttttgcctttacagatatgtttattagacacaaagagggttcatagatgacctaggtcaaaggctagaacatgcagacatacttttaagaacaataaatttagaaatgctttgaaacaaatgacaaccacagatataaaaaagtgctttttaatttttagccagaatggtcaagttgatgtagattttttttactggaatactcataataatgtctgtctatatgccttaagcaagattattatttaataaaagatggcaggaagttgtaatttatggaaaatttacaattattctttaaaatacttttataaaattataaattgataataatccccccaaactgaagtgaaatacttttaatactacttgaaattaaagtacagttgtttatacaacaatgaataaggacaagatatcaaactgaaaattcaaaaataaacagaagaaatgtaaacagttctaaaatatcagtatttataaatgttgcttagaggaaggctattcaaagcatggtccattaactatttgtgagctgtccagaatgaaagaggcttgtgccagaatgaaaatcaattacatcactaatcatactggctcagttgactttttttaaataacaagacttctttgataaaggaagcaatgtgttgatttatattctggcacaagtaccttattactgactagagcaggggtccccagtccccaggccacgaccgggctgcatagaaggtggggggcggtgccaagcattactgcctgagctcagtttcctgttagatcagccatggcattagattctcaaaggagctcgaatcctgctgtgaaccgcacgtgcaagagatctaggttgcatgctccttatgagaatctaatgataaatgtaatgtacttgaatcatcctgaaaccatccccctaaacccccagtcctgtggaaaaattttcttccacaaaacccgtccctagtgccaaaacagttggagatcgctccactagagaacagttaacggcttacttcctttaaagtgccattacaatttcactgctcagagctaggttctttactgtagggaaaataattaaaatgacaattgcaattgtcatctatatatcatctatttaaaaatcccatctatttagggatcctacccaaaaagcaaatttaactttaaattatcacaacataacacttatcttctcatgtgttcaagtgttactgacatttgtccactcacaggggctctctagattcctactttagagaaatacattatgcttttcaatcttgggagaaaaagagtaagaattgaatcatttgctaaaaagctcttaaatgattggtctattttcatattccaatcaataacgttatttaaattcacacctttgtaaaaagagtggatttttatattctttgtgcaatcactagttgcttttttactataaaacttaatatcaggaaaaaaggcatggaaatttacagctctgtattctactacttaaaggtagatgtaaagtattttaagattttcagacatttgtaaaaatgtcttttaacaaatgaacttataatttaaaattcaaatatttcttgattttttgggggatggcatgattcctctaaaaattaaaaatataatatggtcttcagaaacataatcatttcattatccatgacttactaaactttacttgcattatcttaataccaaggcaagtaaatggacatcaacatttagaaacactcatcagttttagatatacagggctcatttagatata

SEQ ID NO: 5724 - DNA, 1772 bp, Homo sapiens
  misc_feature (1760)..(1762): n is a, c, g, or t
agcgcactcacagtagcaaactttccattccagatcactggagctgacttccgcaatcccgatggaataaatctagcacccctgatggtgtgcccacactttgctgccgaaacgaagccagacaacagatttccatcagcaggatgtgggggctcaaggttctgctgctacctgtggtgagctttgctctgtaccctgaggagatactggacacccactgggagctatggaagaagacccacaggaagcaatataacaacaaggtggatgaaatctctcggcgtttaatttgggaaaaaaacctgaagtatatttccatccataaccttgaggcttctcttggtgtccatacatatgaactggctatgaaccacctgggggacatgaccagtgaagaggtggttcagaagatgactggactcaaagtacccctgtctcattcccgcagtaatgacaccctttatatcccagaatgggaaggtagagccccagactctgtcgactatcgaaagaaaggatatgttactcctgtcaaaaatcagggtcagtgtggttcctgttgggcttttagctctgtgggtgccctggagggccaactcaagaagaaaactggcaaactcttaaatctgagtccccagaacctagtggattgtgtgtctgagaatgatggctgtggagggggctacatgaccaatgccttccaatatgtgcagaagaaccggggtattgactctgaagatgcctacccatatgtgggacaggaagagagttgtatgtacaacccaacaggcaaggcagctaaatgcagagggtacagagagatccccgaggggaatgagaaagccctgaagagggcagtggcccgagtgggacctgtctctgtggccattgatgcaagcctgacctccttccagttttacagcaaaggtgtgtattatgatgaaagctgcaatagcgataatctgaaccatgcgggttttggcagtgggatatggaatccagaagggaaacaagcactggataattaaaaacagctggggagaaaactggggaaacaaaggatatatcctcatggctcgaaataagaacaacgcctgtggcattgccaacctggccagcttccccaagatgtgactccagccagccaaatccatcctgctcttccatttcttccacgatggtgcagtgtaacgatgcactttggaagggagttggtgtgctatttttgaagcagatgtggtgatactgagattgtctgttcagtttccccatttgtttgtgcttcaaatgatccttcctactttgcttctctccacccatgacctttttcactgtggccatcaggactttccctgacagctgtgtactcttaggctaagagatgtgactacagcctgcccctgactgtgttgtcccagggctgatgctgtacaggtacaggctggagattttcacataggttagattctcattcacgggactagttagctttaagcaccctagaggactagggtaatctgacttctcacttcctaagttcccttctatatcctcaaggtagaaatgtctatgttttctactccaattcataaatctattcataagtctttggtacaagtttacatgataaaaagaaatgtgatttgtcttcccttctttgcacttttgaaataaagtatttatctcctgtctacagtttaataaatagcatctagtacacataaaaaaaaaaaaaaaaaaaaaaaaattaaacattcaannnctcgaggggc

SEQ ID NO: 5725 - DNA, 2507 bp, Homo sapiens
tctttctctgtctctctctgtctgtctctctctgtctctgccccatctctgtctgtctctgtctctgcctctctctgtttctctccatctctctgtctctggctctggctctgcccatctctgtctgtctctgcctctctctgtttctccccatctctcttatcgcttgaacaatttatgcagctcctgccctgtgctaggtcctggggactcaaggctgaggagcagcagaagctcccacccctgaggctcacaccctggctccatgctagtccctgtggtcaggctgtctcgagggcaggactgtggccctggcagccctgccatcctcagcacatcctgctgtgctctcctctgtgtcattagctgacactggggacttgcactgagaggagaagtggagacgggtctaaaccgctgggccaggcagggccaggacaacagaaacactcgcccccaagagtaaccgctctctgcccgcagaaactctcctccagggtcttcctggatcacaacgccctccccgacaccctgaaagtcacctacgactccttctgcagcaatggagtgacgcacaggaaccagcccagaggtgactgtgatggcgtgcagatcaatgtcccgatcaccttccaggtgaaggtcacggccacagagtgcatccaggagcagtcgtttgtcatccgggcgctgggcttcacggacatagtgaccgtgcaggttcttccccagtgtgagtgccggtgccgggaccagagcagagaccgcagcctctgccatggcaagggcttcttggagtgcggcatctgcaggtgtgacactggctacattgggaaaaactgtgagtgccagacacagggccggagcagccaggagctggaaggaagctgccggaaggacaacaactccatcatctgctcagggctgggggactgtgtctgcgggcagtgcctgtgccacaccagcgacgtccccggcaagctgatatacgggcagtactgcgagtgtgacaccatcaactgtgagcgctacaacggccaggtctgcggcggcccggggagggggctctgcttctgcgggaagtgccgctgccacccgggctttgagggctcagcgtgccagtgcgagaggaccactgagggctgcctgaacccgcggcgtgttgagtgtagtggtcgtggccggtgccgctgcaacgtatgcgagtgccattcaggctaccagctgcctctgtgccaggagtgccccggctgcccctcaccctgtggcaagtacatctcctgcgccgagtgcctgaagttcgaaaagggcccctttgggaagaactgcagcgcggcttgtccgggcctgcagctgtcgaacaaccccgtgaagggcaggacctgcaaggagagggactcagagggctgctgggtggcctacacgctggagcagcaggacgggatggaccgctacctcatctatgtggatgagagccgagagtgtgtggcaggccccaacatcgccgccatcgtcgggggcaccgtggcaggcatcgtgctgatcggcattctcctgctggtcatctggaaggctctgatccacctgagcgacctccgggagtacaggcgctttgagaaggagaagctcaagtcccagtggaacaatgataatccccttttcaagagcgccaccacgacggtcatgaaccccaagtttgctgagagttaggagcacttggtgaagacaaggccgtcaggacccaccatgtctgccccatcacgcggccgagacatggcttgccacagctcttgaggatgtcaccaattaaccagaaatccagttattttccgccctcaaaatgacagccatggccggccgggtgcttctgggggctcgtcggggggacagctccactctgactggcacagtctttgcatggagacttgaggagggagggcttgaggttggtgaggttaggtgcgtgtttcctgtgcaagtcaggacatcagtctgattaaaggtggtgccaatttatttacatttaaacttgtcagggtataaaatgacatcccattaattatattgttaatcaatcacgtgtatagaaaaaaaataaaacttcaatacaggctgtccatggaaaaaaaaaaaaaaaaaaaaaaaaaaaaaaaaaaaaaaaaaaaaaaaaaaagggggggcgcccccaaaaattctcccccggggggccccattccgtcccccattttttcgagcgaagaaggtggggccccctaaatgagggaggcgctcgcgtatctattaaaatcccggtagccggcagcggagggccccggctgtttaaacaaacaaagcatgtcgatgtagcgtggagaacacaaatgggcgccactacgggggggaatatccctggggggaggagacaacccctaaacgtcgggggggggaggagacacattttggggggggaacaacattgcccccaagaagaattataaagcggtcccggaggggagaaaattacactc

SEQ ID NO: 5726 - DNA, 1876 bp, Homo sapiens
aagcaggtggatcactttgaggtcaaggggtttcgagaccaagccctgccaaacatggttgaaaccccgctcttttactataaatacaaaatttaggccggggttggtgacacatgcctgtaattccagctacttggggagcttgaggcaaggggaattgctccagccccaggtgccggaggtttgcagtgagccaaagattggcaccacgtgcactccagcctgtgtgacagggcgagactccaactccaaaaacaaaacaaaacaaaacaaaaaccaaatacttggataagatgaccacttcatcaaattcaacttcatgttgaattaatttaattactggcatgtaaaccaaacattattgagaggttatcaacaaatactgctctgacttgaagcaagagaaaagcctcagtctacagccagagagaaggatggcatcattacttatgcaatcatctttcaattccatttccttggctctacaagtaaatgaaaaagaagagatggaatacaaagtttttcatatatatgagttaaaatttcagagaactaaatttttgtcaataaatactaataaatgttccattgcccaggagcttaggaaagccttgctactgaggcaaaagcagaggaagtgttaaagaatgctatctaggccaatctccccaggagggctgagaaatgcaaaacctctacagtccatctagtcagaataacatatttcaattgctccaagtgtttctttttttaaaatactttatggttgtgcttttcttaaagaatacaaaaagcacaaggctctgtccttcaaaatatcatacattaatgcaacaaaaagctatttcttatattcttttattctgcgttgcatccaaacattgtttcactttgatcattcatctccataaaatttgaattgctaaataaggcctactccctagataccaaactccatacctaacaaaatggcagtttacaaaggtcttagatactatatcccaagaagtatatgcagcatagaggtggccaatattcagaagctacattttcttatactgcccaagtgatcatgaataaccaaaacatttgaaatgaattaaaattacttatggtcagaaatgcacttgaggataaatcccaggaatgcaaacacaggagaaaaaaagtaagtgtagaattcattctgtatcacccagtaatatttgctatagtgagtccattttcaaggcagattcctaggtttttaatgtttgtaatgaaaacctttatgagaggactctgattttgagaaatgccgtgtggaactctgctggtttgtaaaatgagtgtaatccgcatcttcaccatctgtcatgataggtggtggtggccgtgctggcctttcattcttagaatggtgaggttcatcactctcttttgacttggaatttgctgctttagctgtttttggcttccactcggggtcttgctttcttttgtccaaagatgatttctcccgctccttggcttttttgtaagctttcttttcttcagccattagaagtcgagcgatttcttcatcttgagctacttgagcggctctcatgtccacctgggtagccaaaagttcttcttcttgcagttttctggcaatttcagcatcataccattcctgatccctgtgggccattcgtgatggagtagatacagcttctttcatcactcttggcttcattcctccatcttcataatagtaactatctgcataagcacggttgcagggaactctggaaagtgtttctttctctttttctcttcctgtaactccttttctccaaaggcgagctatgtcctcatccttcttctcctgatgcgtccgggatctcagagtcac

SEQ ID NO: 5727 - DNA, 1486 bp, Homo sapiens
acagaaggacgaaccagtgagctaagctgcggggcgcgggctcggccggggcaccggtgagtcgccggcgctgcagagggaggcggcactggtctcgacgtggggcggccagcgatgaagccgcccagttcaatacaaacaagtgagtttgactcatcagatgaagagcctattgaagatgaacagactccaattcatatatcatggctatctttgtcacgagtgaattgttctcagtttctcggtttatgtgctcttccaggttgtaaatttaaagatgttagaagaaatgtccaaaaagatacagaagaactaaagagctgtggtatacaagacatatttgttttctgcaccagaggggaactgtcaaaatatagagtcccaaaccttctggatctctaccagcaatgtggaattatcacccatcatcatccaatcgcagatggagggactcctgacatagccagctgctgtgaaataatggaagagcttacaacctgccttaaaaattaccgaaaaaccttaatacactgctatggaggacttgggagatcttgtcttgtagctgcttgtctcctactatacctgtctgacacaatatcaccagagcaagccatagacagcctgcgagacctaagaggatccggggcaatacagaccatcaagcaatacaattatcttcatgagtttcgggacaaattagctgcacatctatcatcaagagattcacaatcaagatctgtatcaagataaaggaattcaaatagcatatatatgaccatgtctgaaatgtcagttctctagcataatttgtattgaaatgaaaccaccagtgttatcaacttgaatgtaaatgtacatgtgcagatattcctaaagttttattgacaaaaaaaaaaaaaaaaaaccaaaacatttccccccacgcccccaaaatataggtccacctccctaaccccctttttccgccccccaaaaacctttggtgggcccccttgcgcccctccaaaaaactttcttaaaaccattttttttgggccccccgggccccccgaagggtaaaggtaaaaccgggtccaaaacctggttccccaaaggaaaaccctgggccaaataaccaaaagtgccgcgaactcccctccccaaataaaaaaacaccccccggggggcacccccaaacgtgtttcgtaaaacaattccccaaagggaggtttccggagggggcccttactggggatatttaccaccccgggagacccccagagcgaaacctcccaatacaaaatatttaagccccccgcccttggttaatcttctttcgcaaaaaaacgggggggtaaattccccctaagaccctttcccttccccgaaattggcaaatccccctccccacaaaccggcatttgatggacacccttaaattaccccccgcggggggtaattcaaacccccctttggtcgccccttgtgccataataaaatattt

SEQ ID NO: 5728 - DNA, 2188 bp, Homo sapiens
  misc_feature (34)..(35): n is a, c, g, or t
ggccgaggcggccgacatggttccatttataatnnctttttcactgcgggaaacacacaggggtgtttagagtttggcgaaaggctggtgagctctgggcactgacccgtcaccagctatttttcaaggagtctgagaggtgttaacctgcggtctaccccgtgagattgctcagagtgtaggaggatatggtttactagctccggaaagcagctattataactgaggaggaaatgaagcttgactggctagaacagaagcaacaatggaggcccatggagggattttccaggcccctattcctgatctccatggtggcgctgcttcccttattctgcagtcttgctttgagaccagacaattctgtactctgtctgtgccttcttccttctcagcagccctgcctctgccacctgccccagaagggctctgggtcctctcatctcaggacagacaagggtttttgtaattatcttcttgggtaacctccctgtaaggaataggagaggttatctggtcctggtcttttgggagagcattgagaagaaaaagttaaaccagtgggcagcccaggctgcatacatcctgggaatattgcgattattctctccagtaatctacggaaatctactggttgttctgcagaaaaagaattaagagagacaaggagacctgttgtctaagactaaggcaggatgacgtttacctagtaactgatgatgctaggctgaggcactcagtgacttgtctctacatttgtccctgcctacctagccaatctgtccctgtttgggacactggactcccgtgagctggaaggaacagatttaatatctaggggctgggtatccccacatcactcatttggggggtcaagggacccgggcaatatagtattctgctcagtgtctggagatcatctacccaggctggggcttctgggacaggcgaggacccacggaccctggaagagctggtccaggggactgaactcccggcatctttacagagcagagcatgatcacattcctgccgctgctgctggggctcagcctgggctgcacaggagcaggtggcttcgtggcccatgtggaaagcacctgtctgttggatgatgctgggactccaaaggatttcacatactgcatctccttcaacaaggatctgctgacctgctgggatccagaggagaataagatggccccttgcgaatttggggtgctgaatagcttggcgaatgtcctctcacagcacctcaaccaaaaagacaccctgatgcagcgcttgcgcaatgggcttcagaattgtgccacacacacccagcccttctggggatcactgaccaacaggacacggccaccatctgtgcaagtagccaaaaccactccttttaacacgagggagcctgtgatgctggcctgctatgtgtggggcttctatccagcagaagtgactatcacgtggaggaagaacgggaagcttgtcatgcctcacagcagtgcgcacaagactgcccagcccaatggagactggacataccagaccctctcccatttagccttaaccccctcttacggggacacttacacctgtgtggtagagcacattggggctcctgagcccatccttcgggactggacacctgggctgtcccccatgcagaccctgaaggtttctgtgtctgcagtgactctgggcctgggcctcatcatcttctctcttggtgtgatcagctggcggagagctggccactctagttacactcctcttcctgggtccaattattcagaaggatggcacatttcctagaggcagaatcctacaacttccactccaagtgagaaggagattcaaactcaatgatgctaccatgcctctccaacatcttcaaccccctgacattatcttggatcctatggtttctccatccaattctttgaatttcccagtctcccctatgtaaaacttagcaacttgggggacctcattcctgggactatgctgtaaccaaattattgtccaaggctatatttctgggatgaatataatctgaggaagggagttaaagaccctcctggggctctcagtgtgccatagaggacagcaactggtgattgtttcagagaaataaactttggtggaaaaaaaaaaaaaaaaaaaaaaaaaaagggaaaaaaaaaaaaaaaaa

SEQ ID NO: 5729 - DNA, 2474 bp, Homo sapiens
  misc_feature (1738)..(1739): n is a, c, g, or t
  misc_feature (1741)..(1756): n is a, c, g, or t
  misc_feature (1760)..(1760): n is a, c, g, or t
  misc_feature (1764)..(1768): n is a, c, g, or t
  misc_feature (1770)..(1771): n is a, c, g, or t
  misc_feature (1778)..(1779): n is a, c, g, or t
  misc_feature (1781)..(1785): n is a, c, g, or t
  misc_feature (1788)..(1791): n is a, c, g, or t
  misc_feature (1794)..(1794): n is a, c, g, or t
  misc_feature (1796)..(1796): n is a, c, g, or t
  misc_feature (1798)..(1803): n is a, c, g, or t
  misc_feature (1807)..(1809): n is a, c, g, or t
  misc_feature (1813)..(1815): n is a, c, g, or t
  misc_feature (1817)..(1817): n is a, c, g, or t
  misc_feature (1819)..(1820): n is a, c, g, or t
  misc_feature (1824)..(1828): n is a, c, g, or t
  misc_feature (1830)..(1830): n is a, c, g, or t
  misc_feature (1832)..(1835): n is a, c, g, or t
  misc_feature (1838)..(1838): n is a, c, g, or t
  misc_feature (1840)..(1842): n is a, c, g, or t
  misc_feature (1844)..(1844): n is a, c, g, or t
  misc_feature (1846)..(1847): n is a, c, g, or t
  misc_feature (1850)..(1852): n is a, c, g, or t
  misc_feature (1856)..(1858): n is a, c, g, or t
  misc_feature (1861)..(1861): n is a, c, g, or t
  misc_feature (1863)..(1864): n is a, c, g, or t
  misc_feature (1867)..(1868): n is a, c, g, or t
  misc_feature (1874)..(1876): n is a, c, g, or t
  misc_feature (1886)..(1886): n is a, c, g, or t
  misc_feature (1890)..(1890): n is a, c, g, or t
  misc_feature (1894)..(1895): n is a, c, g, or t
  misc_feature (1908)..(1909): n is a, c, g, or t
  misc_feature (1913)..(1913): n is a, c, g, or t
  misc_feature (1915)..(1917): n is a, c, g, or t
  misc_feature (1922)..(1922): n is a, c, g, or t
  misc_feature (1938)..(1938): n is a, c, g, or t
  misc_feature (1948)..(1948): n is a, c, g, or t
  misc_feature (1956)..(1956): n is a, c, g, or t
  misc_feature (2007)..(2009): n is a, c, g, or t
  misc_feature (2026)..(2027): n is a, c, g, or t
  misc_feature (2040)..(2042): n is a, c, g, or t
  misc_feature (2044)..(2044): n is a, c, g, or t
  misc_feature (2047)..(2047): n is a, c, g, or t
  misc_feature (2050)..(2051): n is a, c, g, or t
  misc_feature (2060)..(2063): n is a, c, g, or t
  misc_feature (2065)..(2066): n is a, c, g, or t
  misc_feature (2068)..(2073): n is a, c, g, or t
  misc_feature (2076)..(2076): n is a, c, g, or t
  misc_feature (2078)..(2080): n is a, c, g, or t
  misc_feature (2082)..(2082): n is a, c, g, or t
  misc_feature (2086)..(2089): n is a, c, g, or t
  misc_feature (2092)..(2096): n is a, c, g, or t
  misc_feature (2098)..(2099): n is a, c, g, or t
  misc_feature (2103)..(2114): n is a, c, g, or t
  misc_feature (2117)..(2118): n is a, c, g, or t
  misc_feature (2123)..(2127): n is a, c, g, or t
  misc_feature (2129)..(2131): n is a, c, g, or t
  misc_feature (2137)..(2139): n is a, c, g, or t
  misc_feature (2145)..(2151): n is a, c, g, or t
  misc_feature (2153)..(2153): n is a, c, g, or t
  misc_feature (2158)..(2158): n is a, c, g, or t
  misc_feature (2161)..(2162): n is a, c, g, or t
  misc_feature (2169)..(2177): n is a, c, g, or t
  misc_feature (2179)..(2187): n is a, c, g, or t
  misc_feature (2198)..(2198): n is a, c, g, or t
  misc_feature (2202)..(2203): n is a, c, g, or t
  misc_feature (2212)..(2212): n is a, c, g, or t
  misc_feature (2222)..(2222): n is a, c, g, or t
  misc_feature (2225)..(2225): n is a, c, g, or t
  misc_feature (2228)..(2228): n is a, c, g, or t
  misc_feature (2230)..(2231): n is a, c, g, or t
  misc_feature (2235)..(2236): n is a, c, g, or t
  misc_feature (2240)..(2240): n is a, c, g, or t
  misc_feature (2248)..(2248): n is a, c, g, or t
  misc_feature (2250)..(2250): n is a, c, g, or t
  misc_feature (2252)..(2253): n is a, c, g, or t
  misc_feature (2255)..(2258): n is a, c, g, or t
  misc_feature (2263)..(2266): n is a, c, g, or t
  misc_feature (2270)..(2274): n is a, c, g, or t
  misc_feature (2276)..(2277): n is a, c, g, or t
  misc_feature (2281)..(2286): n is a, c, g, or t
  misc_feature (2293)..(2295): n is a, c, g, or t
  misc_feature (2306)..(2306): n is a, c, g, or t
  misc_feature (2315)..(2321): n is a, c, g, or t
  misc_feature (2325)..(2336): n is a, c, g, or t
  misc_feature (2340)..(2342): n is a, c, g, or t
  misc_feature (2344)..(2347): n is a, c, g, or t
  misc_feature (2350)..(2360): n is a, c, g, or t
  misc_feature (2367)..(2381): n is a, c, g, or t
  misc_feature (2386)..(2386): n is a, c, g, or t
  misc_feature (2388)..(2395): n is a, c, g, or t
  misc_feature (2397)..(2401): n is a, c, g, or t
  misc_feature (2403)..(2410): n is a, c, g, or t
  misc_feature (2412)..(2419): n is a, c, g, or t
  misc_feature (2424)..(2429): n is a, c, g, or t
  misc_feature (2431)..(2431): n is a, c, g, or t
  misc_feature (2434)..(2434): n is a, c, g, or t
  misc_feature (2436)..(2436): n is a, c, g, or t
  misc_feature (2441)..(2442): n is a, c, g, or t
  misc_feature (2445)..(2447): n is a, c, g, or t
  misc_feature (2456)..(2456): n is a, c, g, or t
  misc_feature (2458)..(2459): n is a, c, g, or t
  misc_feature (2463)..(2463): n is a, c, g, or t
  misc_feature (2469)..(2469): n is a, c, g, or t
  misc_feature (2471)..(2471): n is a, c, g, or t
ggcagccccgggcggtccatggggcgggcacggcgtcgctgcaggcgccggcagccctggagggcagcctgcttagtgtgctgcgctcttgtccccgcaggtcgcagccacgggcggctggggctgcgcccagccccggcccctggagcgcccgacgcggtccccacctccatggacgccttcaaggtggggcatgagccttggatgctggctgcctggaggggctcctggccgcctgactgcatgccaccccatgacatggggcccgcacttccacggtggccctggacctgccgaccccctgctgagccgctcgagaactccgccagcgagtcgtctgacacggaagcttgccagacgaaggagcagcggcggggaacccaaggggcccgaggacagtggtgcgggaggcacgggcttgcggcggccgcagacgacccagccaagaagaagaagcagcggcggcaacgtacgcacttcacaatgccagcagttgcaaggagctagaggccacgttccagaggaaccgctaccccgacatgagcatgaggggaggagatcgcccgtgtggaccaacctcaccgagccgcgcgtgcgggtctggttcaagaacaggcgagccaagtggcgtaagcgcgagcgtaaccagcagctggacctgtgcaagggtggctacgtgccgcagttcagcggcctagtgcagccctacgaggacgtgtacgccgccggctactcctacaacaactgggccgccaagagcctggcgccagcgccgctctccaccaagagcttcaccttcttcaactccatgagcccgctgtcgtcgcagtccatgttctcagcacccagctccatctcctccatgaccatgccgtccagcatgggcccaggcgccgtgcctggcatgcccaactcgggcctcaacaacatcaacaacctcaccggctcctcgctcaactcggccatgtcgccgggcgcttgcccgtacggcactcccgcctcgccctacagcgtctaccgggacacgtgcaactcgagcctagccagcctgcggctcaagtccaaacagcactcgtcgtttggctacggcggcctgcagggcccggcctcgggcctcaacgcgtgccagtacaacagctgaccgccccgccgcaccacgcgggccggcggccggagcggggaagggcgcgggcgcgggcgcggaggacgcacgcggggccccggctcgcaagccccagctcaccgcgccgcggacctcacacctgcgcagccccctcctcccacttcccactccgggttggttttgtgtttgcttttccggaccccactctgccctccaaaaagacaaaaaaaaaaaaaaaaaaaaaaaagcaaaaagacgtcggagaaaagtgccgcgaaaaaatggatgagttgcaatttctctcgggatggcgcgggtggtgtgtgtgtgttcccacgggccccggaggcccactccgcggagggcacgcggcgcggtaggcgagcaccgaggcccagcggccgggggaggacgacctcgtatcccgcgtccccgccgcgctggatccggactgagtggccgggcctgcggactggatgtgcggggcctggacttgcctaggatttcccgaccccgtacaaaccaagttgccctctccgagctaggcccggccgagagcgccttagctcgagtcggatccgtgttggggcgggcgttggggttgggggggacggnngnnnnnnnnnnnnnnnngatngggnnnnntnngtggagnngnnnnnggnnnnggngngnnnnnntggnnngagnnntngnntggnnnnngngnnnnggngnnntntnnttnnngggnnnggngnnggnngggggnnntgtgtgggtntggngtgnnggggggggggggnntttntnnntttgnttgggggtgtgggggnggttgggggntggggtgntgtggggggggtggtgggtttggtggtgttggtttttgtggtgggttttgnnngtgttgggggttttttnngttgggggggggnnntnttnttnnttttttttnnnntnntnnnnnnttntnnntntttnnnnttnnnnntnntttnnnnnnnnnnnnttnnttttnnnnntnnntttttnnntttgtnnnnnnntnggggnttnnttttgtnnnnnnnnngnnnnnnnnntttttgtggtntttnntgggggttngggggttggntgnggngnntgtnngttntgggggtntntnntnnnnttttnnnntttnnnnntnntttnnnnnnttttttnnnttttttggggntttttggtnnnnnnntttnnnnnnnnnnnntggnnntnnnnttnnnnnnnnnnntttgggnnnnnnnnnnnnnnnttttntnnnnnnnntnnnnntnnnnnnnntnnnnnnnnttttnnnnnntnttntnttttnnttnnnttttttttntnntttntttttntntaa

SEQ ID NO: 5730 - DNA, 4118 bp, Homo sapiens
  misc_feature (885)..(899): n is a, c, g, or t
gtgccaaggcggctgggggcggcgagcggggccgcgggcgcgcaccgactcaagagccgactgtcagcctcggcgggccggagttctccggcgctgggacaggggcgctgggacaggggcgctgggggcgagccctggcgggggccaggtccgaggaccctgggcgcggcggccccgccaggaggtccggccgcgagcgtgacctcacggggaggggccagcgcggcggcctgggcgctgagccgagcgccgggagagcagcgcagaagccgagccgcgaggagcgcactccgtggccccgatggagcggtacaaagccctggaacagctgctgacagagttggatgacttcctcaagattcttgaccaggagaacctgagcagcacagcactggtgaagaagagctgcctggcggagctcctccggctttacaccaaaagcagcagctctgatgaggagtacatttatatgaacaaagtgaccatcaacaagcaacagaatgcagagtctcaaggcaaagcgcctgaggagcagggcctgctacccaatggggagcccagccagcactcctcggcccctcagaagagccttccagacctcccgccacccaagatgattccagaacggaaacagcttgccatcccaaagacggagtctccagagggctactatgaagaggctgagccatatgacacatccctcaatgaggacggagaggctgtgagcagctcctacgagtcctacgatgaagaggacggcagcaagggcaagtcggccccttaccagtggccctcgccggaggccggcatcgagctgatgcgtgacgcccgcatctgcgccttcctgtggcgcaagaagtggctgggacagtgggccaagcagcnnnnnnnnnnnnnnnacaacaggcttctgtgctacaaatcctccaaggaccacagccctcagctggacgtgaacctactgggcagcagcgtcattcacaaggagaagcaagtgcggaagaaggagcacaagctgaagatcacaccgatgaatgccgatgtgattgtgctgggcctgcagagcaaggaccaggctgagcagtggctcagggtcatccaggaagtgagcggcctgccttccgaaggagcatctgaaggaaaccagtacaccccggatgcccagcgctttaactgccagaaaccagatatagctgagaagtacctgtcggcttcagagtatgggagctccgtggatggccaccctgaggtcccagaaaccaaagacgtcaagaagaaatgttctgctggcctcaaactgagcaacctaatgaatctgggcaggaagaaatccacctcactggagcctgtggagaggtccctccgagacatccaagttacctgaaccgtgctggtgagccagtggaagtctcgctggtgctctgtcagggacaatcacctgcacttctaccaggaccggaaccggagcaaggtggcccagcaacccctcagcctggtgggctgcgaggtggtcccagaccccagccccgaccacctctactccttccgcatcctccacaagggcgaggagctggccaagcttgaggccaagtcttccgaggaaatgggccactggctgggtctcctgctctctgagtcaggctccaagacagacccagaagagttcacctacgactatgtggatgccgatagggtctcctgtattgtgagtgcggccaaaaactctctcttactgatgcagagaaagttctcagagcccaacacttacatcgatggcctgcctagccaggaccgccaggaggagctgtatgacgacgtggacctgtcagagctcacagctgcggtggagcctaccgaggaagccacccctgttgcagatgacccaaatgagagagaatctgaccgggtgtacctggacctcacacctgtcaagtcctttctgcatggccccagcagtgcacaggcccaggcctcctccccgacgttgtcctgcctggacaatgcaactgaggccctcccggcagactcaggcccaggtcccaccccagatgagccctgcataaagtgtccagagaacctgggagaacagcagctggagagtttggagccagaggatccttccctgagaatcaccaccgtcaaaatccagacggaacagcagagaatctccttcccaccgagctgcccggatgccgtggtggccaccccacctggtgccagcccacctgtgaaggacaggttgcgcgtgaccagtgcagagatcaagcttggcaagaatcggacagaagctgaggtgaagcggtacacagaggagaaggagaggcttgaaaagaagaaggaagaaatccgggggcacctggctcagctccggaaagagaaacgggagctaaaggaaaccctactgaaatgcacagacaaggaagtcctggcgagcctggagcagaagctgaaggaaattgacgaggagtgccggggcgaggagagcaggcgcgtggacctggagctcagcatcatggaggtgaaggacaacctgaagaaggctgaggcagggcctgtgacgttaggcaccaccgtggacaccacccacctggagaatgtgagcccccgccccaaagctgtcacacctgcctctgccccagactgtaccccagtcaactctgcaaccacactcaagaacaggcctctctcggtcgtggtcacaggcaaaggcactgtactccagaaagccaaggaatgggagaagaaaggagcaagttagaaaacaagcttcatctaaagactctcatgtcaatgtggaccttggtgacaatcctgctttgttaaagcaaaaactatgcgaaagggtgagtctgtttagaagaaaaagcaaagactgaggtactgtgaatggagagcttcagctaagaggaggctctgtcccttttcagagccaaaggaaataatacaacaaaaaggaggcttctttggagacctaagtctattggatgtaaacaagacgttgtatttagggatgttctgtgtttctttcttttttgaagttgtcatcaattgctttactaagatttttaaatagtgaaaacctcctgtttagactttggtggaagatgaatcaaggaagcagggccctgtcttatgggtcacatgtctttggtgagtgagaagacctaaactcctggccatcatctcttatccaatacttagcagttggggattaaaccatccttgccttcagttctctccaatattaccaggcccaactcagtcttcagtgattttaaacagcattgacatcatctgtaaaaccatcatctgtaaaaccatctatgacatgagttttgagaaacaataatggggaaaatatttgggaccaagctgaagcactaatcccactaagttaaagacttctttccagtccaaggcaggcctgaatcaactgtctttaaataaaattttaagtgatgctgtattatatataggaaaaaatgcttaaaatcctgtcatttagaacagtgaaaagtatcttttgagattaaagtgactctttactgtaggaaaaatattactctgtgtttacagattcattgctgtggtcaggccatttttaagggaagagttatttaatataaatagtctctgattttaagttctgtttaatgttcattctccttccaagaacaaagtggtgatttttggttagggtgatcgccctcttaaaattggcagtgctgttccttgtgctgcccctgtcttttcctctgatggcatttttttttttttttttttttaacacaggttgaaacatttcatctattatctctgcctcatttctggagggttgtgtatcagttctctaacacttgttcctgagaactaaatgtcttttttattcttatttcctctctcataaacatttggtgaccttttaccaagtggtgagttaggttttttaaaataaaatgttcattgtatttgaaaaaaaaaaaaaaaaaaaaaaagacttggggcagggctggggggttctcaagggaggaaatgttttggttatttacacactgaactacaagatgggatcctagcaggaaactcagcctccttgaatcaaagagcatagataaggc

SEQ ID NO: 5731 - DNA, 1444 bp, Homo sapiens
cccacccatggtgccagggccgaagctgacctttagctccctcctgccccttgctagggtctgagccaagcccctcgactccctcactgtgttgacacttggcactttgctggccccgagaaaggtcgatgacacagccgcaaatctaatccacgtagttcccatttactccttaatctgattgatgttccctcttgcactgaataatacatgcctctctcaggtaagccattttataaaacaagaagataaaaagcactgttgaggcagtgtttgcttttgccgagctggtgtccgacagctccctgggtgtccggggtgggagagctgttgacagaagctctccgggccctcaggggcttagatcccacttgagtcgtaagccttcttgcttttgataacacagtattatttctcttactgtagaagaaaaagtttattaccaaacaagagtatttttatgaaagaaaaggacaaacctataaattaactcaacctatatctcccttgaaaatactttcaggctccaccaaaacgtagaactgaaagcatgtatttgggaagaaagagatacattttgtatgctttcttttccttttgtagattcccagtttattttctaagactgcaaagatcactttgtcaccagccctgggacctgagaccaagggggtgtcttgtgggcagtgagggggtgaggagaggctggcatgaggttcagtcattccagtgagctccaaagaggggccacctgttctcaaaagcatgttggggaccaggaggtaaaactggccatttatggtgaacctgtgtcttggagctgacttactaagtggaatgagccgaggatttgaatatcagttctaaccttgatagaagaaccttgggttacatgtggttcacattaagaggatagaatcctttggaatcttatggcaaccaaatgtggcttgacgaagtcgtggtttcatctcttaaacacagtgtgtaaatttattcaactaacgatgggaaatgtattacttctgtacacagtggactgaagtgcaatttgttgaaagggaacaagtcattgaagagaaaaaaaaaagcccaatacttagagtcccaattttgtctcatttgccaaaaaaaaaaaaaaaaaaaaaaagcaaaccccctatggttgatattgttataatgtatatactgtataatatgaaagagaatcgatgtatctcactttttcattatttgctaaccaaagctgtacatttttcatatgatctgcagccttttgggtatcaaatgggtcaaaaccatgggacctgccacctcccatcagcaattctggaaatgcactatttctactggtattcttgcttttttttttttttcattttcttgctgaaatgacatgaattgttgagtttatttttacacagtaaagagtggagaaagaaaa

SEQ ID NO: 5732 - DNA, 2498 bp, Homo sapiens
agcgagcgcatctttgatgagggcagagctcacgttgcattgaagacgaaacctcggggaggtcaggcgctgtctttccttccctccctgctcggcggctccaccacagttgcaacctgcagaggcccggagaacacaaccctcccgagaagcccaggtccagagccaaacccgtcactgaccccccagcccaggcgcccagccactccccaccgctaccatggccgaagacgcagacatgcgcaatgagctggaggagatgcagcgaagggctgaccagttggctgatgagtcgctggaaagcacccgtcgtatgctgcaactggttgaagagagtaaagatgctggtatcaggactttggttatgttggatgaacaaggagaacaactggaacgcattgaggaagggatggaccaaatcaataaggacatgaaagaagcagaaaagaatttgacggacctaggaaaattctgcgggctttgtgtgtgtccctgtaacaagcttaaatcaagtgatgcttacaaaaaagcctggggcaataatcaggacggagtggtggccagccagcctgctcgtgtagtggacgaacgggagcagatggccatcagtggcggcttcatccgcagggtaacaaatgatgcccgagaaaatgaaatggatgaaaacctagagcaggtgagcggcatcatcgggaacctccgtcacatggccctggatatgggcaatgagatcgatacacagaatcgccagatcgacaggatcatggagaaggctgattccaacaaaaccagaattgatgaggccaaccaacgtgcaacaaagatgctgggaagtggttaagtgtgcccacccgtgttctcctccaaatgctgtcgggcaagatagctccttcatgcttttctcatggtattatctagtaggtctgcacacataacacacatcagtccacccccattgtgaatgttgtcctgtgtcatctgtcagcttcccaacaatactttgtgtcttttgttctctcttggtctctttctttccaaaggttgtacatagtggtcatttggtggctctaactccttgatgtcttgagtttcatttttcattttctctcctcggtggcatttgctgaataacaacaatttaggaatgctcaatgtgctgttgattctttcaatccacagtattgttcttgtaaaactgtgacattccacagagttactgccacggtcctttgagtgtcaggctctgaatctctcaaaatgtgccgtctttggttcctcatggctgttatctgtctttatgatttcatgattagacaatgtggaattacataacaggcattgcactaaaagtgatgtgatttatgcatttatgcatgagaactaaatagatttttagattcctacttaaacaaaaactttccatgacagtagcatactgatgagacaacacacacacacacaaaacaacagcaacaacaacagaacaacaacaaagcatgctcagtattgagacactgtcaagattaagttataccagcaaaagtgcagtagtgtcacttttttcctgtcaatatatagagacttctaaatcataatcatccttttttaaaaaaaagaattttaaaaaagatggatttgacacactcaccatttaatcatttccagcaaaatatatgtttggctgaaattatgtcaaatggatgtaatatagggtttgtttgctgcttttgatggctacgttttggagagagcaatcttgctgtgaaacagtgtggatgtaaattttataaggctgactcttactaaccaccatttcccctgtggtttgttatcagtacaattctttgttgcttaatctagagctatgcacaccaaattgctgagatgtttagtagctgataaagaaaccttttaaaaaaataatataaatgaatgaaatataaactgtgagataaatatcattatagcatgtaatattaaattcctcctgtctcctctgtcagtttgtgaagtgattgacattttgtagctagtttaaaattattaaaaattatagactccaaaaaaaaaaaaaaaaaactcgatgactacatcaggggcggggcgcgccggtcatagaaaatctccctgagggagcgcagcaatattgtaggacacgcacccggcgttgtttgtttaacaaagggtgcgccccattggtcagagccgttgatattaatataagctaagaagcacggccggccgcttgtttataaacacacgtatcggtaggctagaaaaaaacagtgtatccttgagagcacctgctggtaaaagcacaccataactacgcgggggggacaaaacaactattggggacccaaactccccataaagaatttttaccgcccaggggagacatcattaacaacttcaccgtgtgtttatctgtcaaacaaggcagattattgctcgcgtgtaaagaaattaccttcacagggaagtttttggacactttc

SEQ ID NO: 5733 - DNA, 624 bp, Homo sapiens
  misc_feature (508)..(508): n is a, c, g, or t
  misc_feature (542)..(542): n is a, c, g, or t
  misc_feature (560)..(560): n is a, c, g, or t
  misc_feature (575)..(575): n is a, c, g, or t
  misc_feature (584)..(584): n is a, c, g, or t
  misc_feature (613)..(613): n is a, c, g, or t
ttttcctcttttcctttttttttttttcttttttgtaagcagggcaatcaatcaacctgcttctttcaagtagctggtaagtcaaatagcgggtaaggcctcaggaaatcttgttatttggtttatttctaaacatttgcaaggtgacacttagggcttttttttttttccaccaaggtttaaggtcatcttgcatcgcagcgaatgagtggctcctatctatatctttccttcctctctcttgcatgcgggcccccaaaactgatgttcaacatctcaggacttctcttggtacctgatatgtttacagctagcttcctcattgaaagagcaaaacctcatcagggtgaatcttttaagccctgatctccctaacctgccccactgagagagctatccaacccttccggccagaatgcgttcccccttctctactccagagcagttccagaaaaccctcctccaatccatgaggcaattctgtgggaaagccttaattattccaatnccaaaaatcacttttcctcatagagttccaatgnttacacagaaggagtccngacaaccccgatgangccaagagngttacaatgacagcatcctcccaaagggnccaggaaggat

SEQ ID NO: 5734 - DNA, 3408 bp, Homo sapiens
gagacataaaggcctgaagaagacccacttcatcaagaacatgaggcagtacgacaccaggaacagcaggatcgtgctcatctgtgccaagcggtccctgtgcgcggccttctcggtcctgccctatggggaaggcctgcggatcagtgacctgagggtggacagccagaagcagaggcacccgtccggcggcgtctctgtgtcttccgagatggtctttgagctagaaggtgtggagctaggagcagacgggaaggtcgtgtcttatgcgaagttcctgtatcccaccaacgccctggtcacacacaagagtgacagccatggcctgctgcccacacctcggcccagtgtcccccggactctgccagggccaagacataaacctgcccccaccaagtcggcaccagccagcacagaactagggagtgacgtgggggacaccctggagtacaaccccaacctcctggatgacccgcagtggccctgcggcaagcacaaacgtgtcctcatctttgcgtcgtacatgaccacagtgatagaatacgtgaagccctcagacctcaaaaaggacatgaacgagaccttcagggagaagttcccccatgtcaaactgacgctgagcaaaatcaggagcttaaagcgggagatgcggagcctgtcggaggagtgcagcctggagcccgtgacggtggccatggcctacgtgtactttgagaagctggtcctgcagggcaagctcagcaaacagaaccgcaagctgtgcgctggcgcctgcgtgctgctggctgccaagatcagcagtgacctgcgcaagagcggcgtgaagcagctcatcgataagttagaagaaaggtttcgattcaacaggcgcgacctgatagggtttgagttcacagtgctcgtggccttggagctggccctgtatcttcccgagaaccaagtgttacctcattacaggcgcctcacccagcagttctagcagaggccccacagaaggctcagggcaccgaggtgcacttgccggcctgggaggtgtcccactgaagccccgcgcctcctcctgccagcacccccagcacctgctagcaggaggcacctggcctccgctggtgcagctttcctttttgcctctttgccatttccttggaaagagacgtcgctttcatccccaagtgcaccgtccctccgaggggatttctgagaattctcctgcatttttacataaactaaatgtgaggtttgttactggtatttttttcacgtgcctgagaccagcctggtaccaggaccttttgttcacagcgtgcagcagcgagccggctgcagtgtgtctcccctggcctcgccttctgcaaaccaccgcagccaccacagcgtcagggtggagatctgggtttctagacctcactgaacacactggaatggctgagtttaacttatttaggcattcatcttggagatgtggtttttcgggttccccagcagcatctcccgacaccaactgtgccgctggctccctgccacctgaagccgagctcctccagagctttctccgcccacctcactgcatcccaagtggagcttttggtgtccagttaggccagcgggagcagtctcctgatttattttgatctcattcttggactcttggacctctctgttcttcaagcatcgtgtcactgtgaaatcctaacgcccctgtgtcctacagaccgacggcacaacagacagctgcccatcccatgccatgctctaccctctgcctctcaccaggagacactctgggcctccaggacaattgctgcttgccggctcttatttttctaagcaatattgtgatggagaaaaataacatatttattgggatttggttttttgggtcttttttttttaagggaacaaaaaatggttaaatgaggtctgctgaagttgacttgaaaacacacttgaccctcaggcaggagggcactgaccacaccccacacaacctcaaagggtcagtgcgtcagtgccttttcttctgaggcaggaaacaggtgccatcttggccacctcggccagggcagcccaccatgctaaaaggaccccaaatggtggtcgttgtcccttctgtgcaggccagcagggccccatctctagtttttccacgtctgtctgaagttcttgcaacaaattctgcatggtccagcgctccagctagctgcctcatcaaaaacactgaataaccaaggactgctgagtttttcttcatggggggtcagctggtctcaaaactggccactgcctcagccaccaagctttttcctaccactaccttataaacctgcctggccctggaggggctctgggacgactttgtctctagcccattaatacaatacatcctatgctttctgtgcagactggtgcttccgcagaaaggagatgccaattctgctatcacagaactccaccagcaactccacccgaccccagcagtggtgcaggacagctgccagcacccacctggccctcctccttttccacagccactcactggggccaccaaaacccagagatggcaggtgtgtgggacagactggaggatgaggacaaaccaaagcctttgttctttcttattgtggagcgtccccttccatcaagcagcctgccctcaagccaaggatcatcccctggaacccagtatgcacccagaggggactcagcttcaaagctgctccaccatgctgggtcccaggcagctttcctctgaaaagcaacctctcctgccacccagatcccatctcaagagctcgcccatgttacgagcatgtaaaggactgacttcctagtaactgttgcagtttacaacctgccctccagggacacgtctccatggtttttcctacacatgaatgcgagaaatggctgataagcacagtaatttaagattgcgtattcatgtagtgagatttagtcattaaccaacccggtctttgtgatgtgtgaagccttcccttcagttatgtcccatttttatgatgccaaaagctgccactgtgtggtattcgaggattattgcaacaaagccagtagttaaaccaaactacagtctcagcctgtcattctctagaacacatccaggtgtcggagctaaggtgttcagctcggctgtgactatacagaaccaggcctggcgttgcttccgcaccggtagcagttgtggatgtcagtgtgcataagcaagtatctgacctcagaatgtttgagttattttgtcttagatatctgtttttaaatggataatgtatttgtcctttaaacctcagttttgcaataaaaaaaaaaaaaaaaaaaaaaaaaaaaaaaaaaaaaaaaaaaaaaaaaaaaaaaaaaaaaaaaaaaaaaaaaaaaaaaaaaaaccccggg

SEQ ID NO: 5735 - DNA, 2287 bp, Homo sapiens
agattagtctgtgagggaaggagatgcctcttccttcccttcaatagtgggttaaacccagctggcaccctctggaactacgggaacaatattcttcaagagaaggtcactctaccaaagccaggagcacagtattctcaggatctcaacaaggaagagcagaccaaggttgcttctgattccttacaaccttccgtaattccaggcttgtggccccaaattcagggccccacccttccaggaacaaatcattatagtaataatttgccttcatcttccatataccaactaagcatgtttaactacgaacgtccaaaacacttcatccagtcccaaaacccatgtggctccagattgcagcctcctggaccagaaacctccagcttctctagccagaccaaacagtcttccattatcatccagccccgccagtgtacagagcaaagattttctgcctcctcaacactgagctctcacatcaccatgtcctcctctgctttccctgcttctccccagcagcatgctggctccaacccaggccaaagggttacaaccacctataaccagtccccagccagcttcctcagctccatattaccatcacagcctgattacaatagcagtaaaatcccttccgctatggattccaactatcaacagtcctcagctggccaacctataaatgcaaagccatcccaaactgcaaatgctaagcccataccaagaactcctgatcatgaaatacaaggatcaaaagaagctttgattcaagatttggaaagaaagctgaaatgcaaggacacccttcttcataatggaaatcaacgtctaacatatgaagagaagatggctcgcagattgctaggaccacagaatgcagctgctgtgtttcaagctcaggatgacagtggtgcacaagactcgcagcaacacaactcagaacatgcgcgactgcaagttcctacatcacaagtaagaagtagatcaacctcaaggggagatgtgaatgatcaggatgcaatccaggagaaattttacccaccacgtttcattcaagtgccagagaacatgtcgattgatgaaggaagattctgcagaatggacttcaaagtgagtggactgccagctcctgatgtgtcatggtatctaaatggaagaacagttcaatcagatgatttgcacaaaatgatagtgtctgagaagggtcttcattcactcatctttgaagtagtcagagcttcagatgcaggggcttatgcatgtgttgccaagaatagagcaggagaagccaccttcactgtgcagctggatgtccttgcaaaagaacataaaagagcaccaatgtttatctacaaaccacagagcaaaaaagttttagagggagattcagtgaaactagaatgccagatctcggctatacctccaccaaagcttttctggaaaagaaataatgaaatggtacaattcaacactgaccgaataagcttatatcaagataacactggaagagttactttactgataaaagatgtaaacaagaaagatgctgggtggtatactgtgtcagcagttaatgaagctggagtgactacatgtaacacaagattagacgttacggcacgtccaaaccaaactcttccagctcctaagcagttacgggttcgaccaacattcagcaaatatttagcacttaatgggaaaggtttgaatgtaaaacaagcttttaacccagaaggagaatttcagcgtttggcagctcaatctggactctatgaaagtgaagaactttaataactttaccaacattggaaaacagccaactacaccattagtaatatatttgattacatttttttgaaattaatccatagctgtattaacagattatggttttaattaggtaatatagttaatatatatttataatattatttatcctttgactcttgcacattctatgtacccctccgatttgtgaagcctacaggaaatctgggtatatggatttgtaactgcagaagactatcttaaaatacaggattttaacatttaagtcatgcacatttaacaattacaggttataaattagtatcaactttttaaacacatctaatgcttgtaataacgtttactggtactgctttctaaatactgttttacccgttttctcttgtaggaatactaacatggtatagattatctgagtgttccacagttgtatgtcaaaagaaaataaaattcaaatatttaaaacggaaaaaaaaaaaaaaaaaaaaaaaaaaaaaaa

SEQ ID NO: 5736 - DNA, 6621 bp, Homo sapiens; identical to SEQ ID NO: 5507
  misc_feature (1323)..(1338): n is a, c, g, or t
  misc_feature (1920)..(1937): n is a, c, g, or t
  misc_feature (2906)..(2932): n is a, c, g, or t
  misc_feature (4584)..(4599): n is a, c, g, or t

SEQ ID NO: 5737 - DNA, 3842 bp, Homo sapiens
  misc_feature (289)..(304): n is a, c, g, or t
gcggccgccctgcgcgcgaagctcgtggcccgagaggggtgcggtcgggccgacggaggcggggccctggctgcctctctccctgctcataggctggccgctcaggcctggccggcctcggggcctcgggattcgcggcggcgctgccaatcaggcgatcgggccccgcccccccggagttgggtgaaatagaggcgggcgtcaagtgtcagtagtcgcggggcgaggtacgtgcgctcgcggttctctcgcggaggtcggcggtggcgggagcgggctccggagagcnnnnnnnnnnnnnnnngcggggcgggagaaagtggccgcccggaggacgttggcgtttacgtgtggaagagcggaagagttttgcttttcgtgcgcgccttcgaaaactgcctgccgctgtctgaggagtccacccgaaacctcccctcctccgccggcagccccgcgctgagctcgccgacccaagccagcgtgggcgaggtgggaagtgcgcccgacccgcgcctggagctgcgcccccgagtgcccatggctacaagggtgctgagcatgagcgcccgcctgggacccgtgccccagccgccggcgccgcaggacgagccggtgttcgcgcagctcaagccggtgctgggcgccgcgaatccggcccgcgacgcggcgctcttccccggcgaggagctgaagcacgcgcaccaccgcccgcaggcgcagcccgcgcccgcgcaggccccgcagccggcccagccgcccgccaccggcccgcggctgcctccagaggacctggtccagacaagatgtgaaatggagaagtatctgacacctcagcttcctccagttcctataattccagagcataaaaagtatagacgagacagtgcctcagtcgtagaccagttcttcactgacactgaagggttaccttacagtatcaacatgaacgtcttcctccctgacatcactcacctgagaactggcctctacaaatcccagagaccgtgcgtaacacacatcaagacagaacctgttgccattttcagccaccagagtgaaacgactgcccctcctccggccccgacccaggccctccctgagttcaccagtatattcagctcacaccagaccgcagctccagaggtgaacaatattttcatcaaacaagaacttcctacaccagatcttcatctttctgtccctacccagcagggccacctgtaccagctactgaatacacgaggattctagatatgcccagttctacaaatcagacagcagcaatggacactcttaatgtttctatgtcagctgccatggcaggccttaacacacacacctctgctgttccgcagactgcagtgaaacaattccagggcatgcccccttgcacatacacaatgccaagtcagtttcttccacaacaggccacttactttcccccgtcaccaccaagctcagagcctggaagtccagatagacaagcagagatgctccagaatttaaccccacctccatcctatgctgctacaattgcttctaaactggcaattcacaatccaaatttacccaccaccctgccagttaactcacaaaacatccaacctgtcagatacaatagaaggagtaaccccgatttggagaaacgacgcatccactactgcgattaccctggttgcacaaaagtttataccaagtcttctcatttaaaagctcacctgaggactcacactggtgaaaagccatacaagtgtacctgggaaggctgcgactggaggttcgcgcgatcggatgagctgacccgccactaccggaagcacacaggcgccaagcccttccagtgcggggtgtgcaaccgcagcttctcgcgctctgaccacctggccctgcatatgaagaggcaccagaactgagcactgcccgtgtgacccgttccaggtcccctgggctccctcaaatgacagacctaactattcctgtgtaaaaacaacaaaaacaaaaaaaaaacaagaaaaccacaactaaaactggaaatgtatattttgtatatttgagaaaacagggaatacattgtattaataccaaagtgtttggtcattttaagaatctggaatgcttgctgtaatgtatatggctttactcaagcagatctcatctcatctcatgacaggcagccagtctcaacatgggtaaggggtgggggtgaaggggagtgtgtgcagcgtttttacctaggcaccatcatttaatgtgacagtgttcagtaaacaaatcagttggcaggcaccagaagaagaatggattgtatgtcaagattttacttggcattgagtagtttttttcaatagtaggtaattccttagagatacagtatacctggcaattcacaaatagccattgaacaaatgtgtgggtttttaaaaattatatacatatatgagttgcctatatttgctattcaaaattttgtaaatatgcaaatcagctttataggtttattacaagttttttaggattcttttggggaagagtcataattcttttgaaaataaccatgaatacacttacagttaggatttgtggtaaggtacctctcaacattaccaaaatcatttctttagagggaaggaataatcattcaaatgaactttaaaaaagcaaatttcatgcactgattaaaataggattattttaaatacaaaaggcattttatatgaattataaactgaagagcttaaagatagttacaaaatacaaaagttcaacctcttacaataagctaaacgcaatgtcatttttaaaaagaaggacttaggggtcgttttcacatatgacaatgttgcatttatgatgcagttttcaagtaccaaaacgttgaattgatgatgcagttttcatatatcgagatgttcgctcgtgcagtactgttggttaaatgacaatttatgtggattttgcatgtaatacacagtgagacacagtaattttatctaaattacagtgcagtttagttaatctattaatactgactcagtgtctgcctttaaatataaatgatatgttgaaaacttaaggaagcaaatgctacatatatgcaatataaaatagtaatgtgatgctgatgctgttaaccaaagggcagaataaataagcaaaatgccaaaaggggtcttaattgaaatgaaaatttaattttgtttttaaaatattgtttatctttatttattttgtggtaatatagtaagtttttttagaagacaattttcataacttgataaattatagttttgtttgttagaaaagttgctcttaaaagatgtaaatagatgacaaacgatgtaaataattttgtaagaggcttcaaaatgtttatacgtggaaacacacctacatgaaaagcagaaatcggttgctgttttgcttctttttccctcttatttttgtattgtggtcatttcctatgcaaataatggagcaaacagctgtatagttgtagaattttttgagagaatgagatgtttatatattaacgacaattttttttttggaaaataaaaagtgcctaaaagaaaaaaaaaaaaaaaaaaaaaaaaaaagggaggaaggaaaaaggaaaaaagagaaaaaaaataaaaaaaaaaaaagagaagaggaaaggagggaccaaagaagacaacgaaaacagtggcaaaaaggtgggggcccagaggagaacacggggacgacgcagaaaaggaggagagagaattgagcccacactacaaaacgccccggggggcaaagagaagacgtgcacgaaaacaccccagaggagggcgagagggagcacaaagggggccaaa

SEQ ID NO: 5738 - DNA, 2031 bp, Homo sapiens
gggccaggacatgcggagactggtgcacgacctcctgccccccgaggtctgcagtctcctgaacccagcagccatctacgccaacaacgagatcagcctgcgtgacgttgaggtctacggctttgactacgactacaccctggcccagtatgcagacgcactgcaccccgagatcttcagtaccgcccgtgacatcctgatcgagcactacaagagccttctgatgaagattgacgccttccactacgtgcagctggggacagcctacaggggcctccagcctgtgccagacgaggaggtgattgagctgtatgggggtacccagcacatcccactataccagatgagtggcttctatggcaagggtccctccattaagcagttcatggacatcttctcgctaccggagatggctctgctgtcctgtgtggtggactactttctgggccacagcctggagtttgaccaagcacatctctacaaggacgtgacggacgccatccgagacgtgcatgtgaagggcctcatgtaccagtggatcgagcaggacatggagaagtacatcctgagaggggatgagacgtttgctgtcctgagccgcctggtggcccatgggaagcagctgttcctcatcaccaacagtcctttcagcttcgtagacaaggggatgcggcacatggtgggtcccgattggcgccagctcttcgatgtggtcattgtccaggcagacaagcccagcttcttcactgaccggcgcaagcctttcagaaaactcgatgagaagggctcacttcagtgggaccggatcacccgcttggaaaagggcaagatctatcggcagggaaacctgtttgacttcttgcgcttgacggaatggcgtggcccccgcgtgctctacttcggggaccacctctatagtgatctggcggatctcatgctgcggcacggctggcgcacaggcgccatcatccccgagctggagcgtgagatccgcatcatcaacacggagcagtacatgcactcgctgacgtggcagcaggcgctcacggggctgctggagcgcatgcagacctatcaggacgcggagtcgaggcaggtgctggctgcctggatgaaagagcggcaggagctgaggtgcatcaccaaggccctgttcaatgcgcagttcggcagcatcttccgcaccttccacaaccccacctacttctcaaggcgcctcgtgcgcttctctgacctctacatggcctccctcagctgcctgctcaactaccgcgtggacttcaccttctacccacgccgtacgccgctgcagcacgaggcacccctctggatggaccagctctgcaccggctgcatgaagacccccttccttggtgacatggcccacatccgctgagggcacctttattgtctgggacaggccctcagcccctcctgccccatccacccagacaagcaataaaagtggtctcctccctgtaaaaaaaaaaaaaaaaaaaaaaaaaaaaaaaaaacaaaaaaaaaaaaaaaaaaaaaaaaaaaaaaaacaaaaaaaaaaaaaagagagggggggcggcgggcaagaaaaaaattttctccggggggggagcacacaatacagaccgcacaccgaacttccttagaaacaacgggggacgcacacaacatagagcgagggctcaataacaacaggacgcaccaacacagacgcacagagaatacaaacaacaaccgcgcggcgaagagaggaatacaacacgcgacacgagagcgagaagacacaaccagaaggagcaggaacgaacacccacaaccatcccccacgacgcgaggcgaaccacacacagagccggagaacacaccaccccaccccgcaaggagaagaacaaccacgcagggagggagacacacaacaccgccaccgcagagcaaacacacgcggcagaacacccaacgacacacaatagccgacgagcaaaaagaaaaccacacgaacacagagcgagaatgcagaaaaaaaaaaaaacgcgc

SEQ ID NO: 5739 - DNA, 8038 bp, Homo sapiens
  misc_feature (2231)..(2245): n is a, c, g, or t
  misc_feature (3357)..(3411): n is a, c, g, or t
  misc_feature (4633)..(4652): n is a, c, g, or t
  misc_feature (5648)..(5681): n is a, c, g, or t
  misc_feature (6352)..(6398): n is a, c, g, or t
gcggcctgtgctgtgcctgcctcctagagctcattccctacgccccgactctgtcctggacagcgtgcccaccagccatggcggggccccggggcctcctcccactctgcctcctggccttctgcctggcaggcttcagcttcgtcagggggcaggtgctgttcaaaggctgtgatgtgaaaaccacgtttgtcactcatgtaccctgcacctcgtgcgcggccatcaagaagcagacgtgtccctcaggctggctgcgggagctcccggatcagataacccaggactgccgctacgaagtacagctggggggctctatggtgtccatgagcggctgcagacggaagtgccggaagcaagtggtgcagaaggcctgctgccctggctactggggttcccggtgccatgaatgccctgggggcgctgagaccccatgcaatggccacgggacctgcttggatggcatggacaggaatgggacctgtgtgtgccaggaaaacttccgcggctcagcctgccaggagtgccaagaccccaaccggttcgggcctgactgccaatcggtgtgcagctgtgtgcacggagtgtgcaaccatgggccacgtggggatggaagctgcctgtgctttgctggatacactggcccccactgtgatcaagagctgcccgtctgccaggagctgcgctgtccccagaacacccagtgctccgcagaggctcccagctgcaggtgcctgcccggctacacacagcagggcagtgaatgccgagcccccaacccctgctggccatcaccctgctcactgctggcccagtgctcggtgagccccaaggggcaggctcagtgtcactgccctgagaactaccatggcgatgggatggtgtgtctgcccaaggacccatgcactgacaaccttggtggctgccccagcaactctactttgtgtgtgtaccagaagccgggccaggccttctgcacctgccggccaggcctggtcagcatcaacagcaacgcttctgcgggctgcttcgccttctgctcccccttctcctgcgaccggtctgccacttgccaggtgaccgctgatgggaagaccagctgtgtgtgcagggaaagcgaggtgggggatgggcgtgcctgctacggacacctgctccacgaggtgcagaaggccacacagacaggccgggtgttcctgcagctgagggtcgccgtggccatgatggaccagggctgccgggaaatccttaccacagcgggccctttcaccgtgctggtgccatccgtctcctccttctcctccaggaccatgaatgcatcccttgcccagcagctctgtagacagcacatcatcgcagggcagcacatcctggaggacacaaggacccaacaaacacgaaggtggtggacgctggccgggcaggagatcaccgtcacctttaaccaattcacgaaatactcctacaagtacaaagaccagccccagcagacgttcaacatctacaaggccaacaacatagcagctaatggcgtcttccacgtggtcactggcctgcggtggcaggccccctctgggacccctggggatcccaagagaactatcggacagatcctcgcctctaccgaggccttcagccgctttgaaaccatcctggagaactgtgggctgccctccatcctggacggacctgggcccttcacagtctttgccccaagcaatgaggctgtggacagcttgcgtgacggccgcctgatctacctcttcacagcgggtctctctaaactgcaggagttggtgcggtaccacatctacaaccacggccagctgaccgttgagaagctcatctccaagggtcggatcctcaccatggcgaaccaggtcctggctgtgaacatttctgaggaggggcgcatcctgctgggacccgagggggtcccgctgcagagggtagacgtgatggccgccaatggtgtgatccacatgctggacggcatcctgctgcccccgaccatcctgcccatcctgcccaagcactgcagcgaggagcagcacaagattgtggcgggctcctgtgtggactgccaagccctgaacaccagcacgtgtccccccaacagtgtgaagctggacatcttccccaaggagtgtgtctacatccatgacccaacggggctcaatgtgctaaagaagggctgtgccagctactgcaaccaaaccatcatggaacannnnnnnnnnnnnnnttttttcgggcctgactgcacgcagtgtcctgggggcttctccaacccctgctatggcaaaggcaattgcagtgatgggatccagggcaatggggcctgcctctgcttcccagactacaagggcatcgcctgccacatctgctcgaacccaaacaagcatggagagcaatgccaggaagactgcggctgtgtccatggtctctgcgacaaccgcccaggcagtgggggggtgtgccagcagggcacgtgtgcccctggcttcagtggccggttctgcaacgagtccatgggggactgtgggcccacagggctggcccagcactgccacctgcatgcccgctgtgttagccaggagggtgttgccagatgtcgctgtcttgatggctttgagggtgatggcttctcctgcacacctagcaacccctgctcccacccggaccgtggaggctgctcagagaatgctgagtgtgtccctgggtccctgggcacccaccactgcacatgccacaaaggctggagtggggatggccgcgtctgtgtggctattgacgagtgtgagctggacgtgggaggtggctgccacaccgatgccctctgcagctatgtgggccccgggcagagccgatgcacctgcaagctgggctttgccggggatggctaccagtgcagccccatcgacccctgccgggcaggcaatggcggctgccacggcctggccacctgccgggcagtggggggaggtcagcgggtctgcacgtgcccccctggctttgggggtgatggcttcagctgttatggagacatcttccgggagctggaggcaaatgcccacttctccatcttctaccaatggcttaagagtgccggcatcacgcttcctgccgaccgccgagtcacagccctggtgccctccgaggctgcagtccgtcagctgagccccgaggaccgagctttctggctgcagccaaggacgctgccgaacctggtcagggcccattttctccagggtgccctcttcgaggaggagctggcccggctgggtgggcaggaagtggccaccctgaaccccaccacacgctgggagattcgcaacattagtgggagggtctggnnnnnnnnnnnnnnnnnnnnnnnnnnnnnnnnnnnnnnnnnnnnnnnnnnnnnnnacatcctcagccaggtcttactgcccccccgaggggatgtgcccggtgggcaggggttgctgcagcagctggacttggtgcctgccttcagcctcttccgggaattgctgcagcaccatgggttggtgccccagattgaggctgccactgcctacaccatctttgtgcccaccaaccgctccctggaggcccagggcaacagcagtcacctggacgcagacacagtgcggcaccatgtggtcctgggggaggccctctccatggaaaccctgcggaagggtggacaccgcaactccctcctgggccctgcccactggatcgtcttctacaaccacagtggccagcctgaggtgaaccatgtgccactggaaggccccatgctggaggcccctggccgctcgctgattggtctgtcgggggtcctgacggtgggctcaagtcgctgcctgcatagccacgctgaggccctgcgggagaaatgtgtaaactgcaccaggagattccgctgcactcagggcttccagctgcaggacacacccaggaagagctgtgtctaccgatctggcttctccttctcccggggctgctcttacacatgtgccaagaagatccaggtgccggactgctgccctggtttctttggcacgctgtgtgagccatgcccagggggtctagggggggtgtgctcaggccatgggcagtgccaggacaggttcctgggcagcggggagtgccactgccacgagggcttccatggaacggcctgtgaggtgtgtgagctgggccgctacgggcccaactgcaccggagtgtgtgactgtgcccatgggctgtgccaggaggggctgcaaggggacggaagctgtgtctgtaacgtgggctggcagggcctccgctgtgaccagaaaatcaccagccctcagtgccctaggaagtgcgaccccaatgccaactgcgtgcaggactcggccggagcctccacctgcgcctgtgctgcgggatactccggcaatggcatcttctgttcagaggtggacccctgcgcccacggccatgggggctgctcccctcatgccaactgtaccaaggtggcacctgggcagcggacatgcacctgccaggatggctacatgggcgacggggagctgtgccaggaaattaacagctgtctcatccaccacgggggctgccacattcacgccgagtgcatccccactggccnnnnnnnnnnnnnnnnnnnntgccgtgagggttacagcggggatggcatccggacctgcgagctcctggacccctgctctaagaacaatggaggatgcagcccatatgccacctgcaaaagcacaggggatggccagaggacatgtacctgcgacacagcccacaccgtgggggacggcctcacctgccgtgcccgagtcggcctggagctcctgagggataagcatgcctcattcttcagcctccgcctcctggaatataaggagctcaagggcgatgggcctttcaccatcttcgtgccgcacgcagatctaatgagcaacctgtcgcaggatgagctggcccggattcgtgcgcatcgccagctggtgtttcgctaccacgtggttggctgtcggcggctgcggagcgaggacctgctggagcaggggtacgccacggccctctcagggcacccactgcgcttcagcgagagggagggcagcatatacctcaatgacttcgcgcgcgtggtgagcagcgaccatgaggccgtgaacggcatcctgcacttcattgaccgtgtcctgctgccccccgaggcgctgcactgggagcctgatgatgctcccatcccgaggagaaatgtcaccgccgccgcccagggcttcggttacaagatcttcagcggcctcctgaaggtggccggcctcctgcccctgcttcgagaggcatcccataggcccttcacaatgctgtggcccacagacgccgcctttcgagctctgcctccggatcgccaggcctggctgtaccatgaggaccaccgtgacaagctagcagccattctgcggggccacatgattcgcaatgtcgaggccttggcatctgacctgcccaacctgggcccacttcgaaccatgcatgggacccccatctctttctcctgcagccgaacgcggcccggtgagctcatggtgggtgaggatgatgctcgcattgtgcagcggcacttgccctttgagggtggcctggcnnnnnnnnnnnnnnnnnnnnnnnnnnnnnnnnnnccttggtgctcgctgtgaccactttgagacccggcccctgcgactgaacacctgcagcatctgtgggctggagccaccctgtcctgaggggtcacaggagcagggcagccctgaggcctgctggcgcttctacccgaagttctggacgtcccctccgctgcactctttgggattacgcagcgtctgggtccaccccagcctttggggtaggccccaaggcctgggcaggggctgccaccgcaattgtgtcaccaccacctggaagcccagctgctgccctggtcactatggcagtgagtgccaagcttgccctggcggccccagcagcccttgtagtgaccgtggcgtgtgcatggacggcatgagtggcagtgggcagtgtctgtgccgttcaggttttgctgggacagcctgtgaactctgtgctcctggtgcctttgggccccattgtcaagcctgccgctgcactgtgcatggccgctgtgatgagggccttgggggctctggctcctgcttctgtgatgaaggctggactgggccacgctgtgaggtgcaactggagctgcagcctgtgtgtaccccaccctgtgcacccgaggctgtgtgccgtgcaggcaacagctgtgagtgcagcctgggctatgaaggggatggccgcgtgtgtacagtgnnnnnnnnnnnnnnnnnnnnnnnnnnnnnnnnnnnnnnnnnnnnnnnctgtagccaggtaggaacaatggtcacttgtacctgcctgcccgactacgagggtgatggctggagctgccgggcccgcaacccctgcacagatggccaccgcgggggctgcagcgagcacgccaactgcttgagcaccggcctgaacacacggcgctgtgagtgccacgcaggctacgtaggcgatggactgcagtgtctggaggagtcggaaccacctgtggaccgctgcttgggccagccaccgccctgccactcagatgccatgtgcactgaccagcacttccaggagaaacgggctggcgttttccacctccaggccaccagcggcccttatggtctgaacttttcggaggctgaggcggcatgcgaagcacagggagccgtccttgcttcattccctcagctctctgctgcccagcagctgggcttccacctgtgcctcatgggctggctggccaatggctccactgcccaccctgtggttttccctgtggcggactgtggcaatggtcgggtgggcgtagtcagcctgggtgcccgcaagaacctctcagaacgctgggatgcctactgcttccgtgtgcaagatgtggcctgccgatgccgaaatggcttcgtgggtgacgggatcagcacgtgcaatgggaagctgctggatgtgctggctgccactgccaacttctccaccttctatgggatgctattgggctatgccaatgccacccagcggggtctcgacttcctggacttcctggatgatgagctcacgtataagacactcttcgtccctgtcaatgaaggctttgtggacaacatgacgctgagtggcccagacttggagctgcatgcctccaacgccaccctcctaagtgccaacgccagccaggggaagttgcttccggcccactcaggcctcagcctcatcatcagtgacgcaggccctgacaacagttcctgggcccctgtggccccagggacagttgtggttagccgtatcattgtgtgggacatcatggccttcaatggcatcatccatgctctggccagccccctcctggcacccccacagccccaggcagtgctggcgcctgaagccccacctgtggcggcaggcgtgggggctgtgcttgccgctggagcactgcttggcttggtggccggagctctctacctccgtgcccgaggcaagcccacgggctttggcttctctgccttccaggcggaagatgatgctgacgacgacttctcaccgtggcaagaagggaccaaccccaccctggtctctgtccccaaccctgtctttggcagcgacaccttttgtgaacccttcgatgactcactgctggaggaggacttccctgacacccagaggatcctcacagtcaagtgacgaggctggggctgaaagcagaagcatgcacagggaggagaccacttttattgcttgtctgggtggatggggcaggaggggctgagggcctgtcccagacaataaagtgccctcagcggatgtgggccatgtcaccaaaaaaaaaaaaaaaaaaaaaaaaaaaaaaaaaaaaaaaaaaaaaaaaaaaaaaaaaaaaaaaaaaaaaaaaaaaaaaaaaaaaaaaaaaaaaaaaaaaaaaaaaaaaaaa

SEQ ID NO: 5740 - DNA, 1823 bp, Homo sapiens
gccccaaccatcctgaagctacaggtgctccctcctggaatctccaatggatttcagtcgcagaagcttccacagaagcctgagctcctccttgcaggcccctgtagtcagtacagtgtgcatgcatgtgcctcgggacgacaccagcgtttatggtgggtgctggaggccggtgcatctgcatctccaactccagacacacggtgaactatgggagcgatctcacaggcggcggggacctgtttgttggcaatgagaaaatggccatgcagaacctaaatgaccgtctagcgagctacctagaaaaggtgcggaccctggagcagtccaactccaaacttgaagtgcaaatcaagcagtggtacgaaaccaacgccccgagggctggtcgcgactacagtgcatattacagacaaattgaagagctgcgaagtcaggattaaggatgctcaactgcaaaatgctcggtgtgtcctgcaaattgataatgctaaactggctgctgaggacttcagactgaagtatgagactgagagaggaatacgtctaacagtggaagctgatctccaaggcctgaataaggtctttgatgacctaaccctacataaaacagatttggagattcaaattgaagaactgaataaagacctagctctcctcaaaaaggagcatcaggaggaagtcgatggcctacacaagcatctgggcaacactgtcaatgtggaggttgatgctgctccaggcctgaaccttggcgtcatcatgaatgaaatgaggcagaagtatgaagtcatggcccagaagaaccttcaagaggccaaagaacagtttgagagacagactgcagttctgcagcaacaggtcacagtgaatactgaagaattaaaaggaactgaggttcaactaacggagctgagacgcacctcccagagccttgagatagaactccagtcccatctcagcatgaaagagtctttggagcacactctagaggagaccaaggcccgttacagcagccagttagccaacctccagtcgctgttgagctctctggaggcccaactgatgcagattcggagtaacatggaacgccagaacaacgaataccatatccttcttgacataaagactcgacttgaacaggaaattgctacttaccgccgccttctggaaggagaagacgtaaaaactacagaatatcagttaagcaccctggaagagagagatataaagaaaaccaggaagattaagacagtcgtgcaagaagtagtggatggcaaggtcgtgtcatctgaagtcaaagaggtggaagaaaatatctaaatagctaccagaaggagatgctgctgaggttttgaaagaaatttggctataatcttatctttgctccctgcaagaaatcagccataagaaagcactattaatactctgcagtgattagaaggggtggggtggcgggaatcctatttatcagactctgtaattgaatataaatgttttactcagaggagctgcaaattgcctgcaaaaatgaaatccagtgagcactagaatatttaaaacatcattactgccatctttatcatgaagcacatcaattacaagctgtagaccacctaatatcaatttgtaggtaatgttcctgaaaattgcaatacatttcaattatactaaacctcacaaagtagaggaatccatgtaaattgcaaataaaccactttctaattttttcctgtttctgaaaaaaaaaaaaaaaaaaaaaaaaaaaaaaaaaaaaaaaaaaaaaaaaaaaaaaaaaaaaaaaaaaaaaaaaaaaaaaaaaa

SEQ ID NO: 5741 - DNA, 2076 bp, Homo sapiens
agcgggatgcgctctgggggcggcctcctggcactcgcagggctgacaggtcgccgggaccaggccgtggggccggggccacccaggcacctgcgtggggaggaaggcatggctactggttccttcgcagccattttctgtccaaccaaacagccgattggagacgggagccaaccagggctgcattggaggttgaaatcacaaagattagacacctttttagataggtgttcttcagcaccactgacaacacggttctgacagtatttcatgacaatggatggtgacagttctacaacagatgcttctcaactaggaatctctgcagactatattggaggaagtcattatgttatacagcctcatgatgatactgaggacagcatgaatgatcatgaagacacaaatggttcaaaagaaagtttcagagaacaagatatatatcttccaatagcaaacgtggctaggataatgaaaaatgccatacctcaaacgggaaagattgcaaaagatgccaaagaatgtgttcaagaatgtgtaagtgagttcatcagttttataacatctgaagcaagtgaaaggtgccatcaagagaaacggaaaacaatcaatggagaagatattctctttgctatgtctactttaggctttgacagttatgtggaacctctgaaattataccttcagaaattcagagaggctatgaaaggagaaaagggaattggtggagcagtcacagctacagatggactaagtgaagagcttacagaggaggcatttactaaccagttaccagctggcttaataaccacagacggtcaacaacaaaatgttatggtttacacaacatcatatcaacagatttctggtgttcagcaaattcagttttcatgatctgaagaaatgatggaatggggagtgtagagaaatgagagtctgtatgattctggaacagagacatcagaaggaaagactggtgaaaagatgtatctttgtatattaatagctgtaatgtagcttcctgatgcttgactaattgaggtgttaattctgacttgagaatctttttcatgaatgattttaaagaaaaatttggattttaaaggtattaaaatatttttgttttgtacgagagtttgttgctctgtatgactcctgtatgcattgtatattgcaatttattactgtcagagatttgtagacagtttcttattttcatattgaatcatgttacttttgtaattcaagtaagcggctgggttaattcatgatgtttgcccttttaataaaatataagggtagagttcattttgaatgcaagttgcctttattataaatttgagtttgtcttggttataccttgcatgataacctagctagatttctagcatttgctgtatttattaaaattattatttttttgataaaaaaaaaaaaaaaaaaaaaaaaaaaaaaaaaaaaaattaaaaaaatgtaatttgaataaaaggggggaaattgccaaaaaacaaaaatatttgggcctggcccccggttaaaaactttggggggggcccccattaaaccccgggggtttaaaaccacggggttcccatccgcgggccccctgggtaaaaggggggagcgttttttataaacatttattgtgggggggacccttttttttttattttcgcaccccccacacacttttttgggggttttttatggggaaataacaaattttttttttaaaaaaaaataggggggggggaaaaaataatatatttttttgaaggcttctttataggtggggggcccctcctcaaggggggctcttttcttaaaaaagagggggggcgcccccccctcttttcttatttatgtttggacgacaaccaaagaatatatttttttttttttttaacaaaaaaaacatattttttttcttccggcgggagagaaaatataagaataaatttttcctctctcacaaaaaaaagaaaaaaggaggggggttttttttaattcacccccctcgggggggggaggagaaacagagcgcccccccctctctatatatcaaccccctcttct

SEQ ID NO: 5742 - DNA, 3389 bp, Homo sapiens
  misc_feature (214)..(228): n is a, c, g, or t
  misc_feature (1798)..(1825): n is a, c, g, or t
  misc_feature (3191)..(3386): n is a, c, g, or t
caggacgaagtttttggctgtgggctctctgggacagagtggagcgcctgtggatttagccggggacacaccatcctgctcgcaggtgcctggacaggacaggggacgagggaggaacactctctgaggaagcccaactcctatgagctcctctctggcagcactcaaaccagtgaagcttgggaaagtcattgacctccagtcgttctgctgnnnnnnnnnnnnnnntatttccatggagaccagggaatctgaagatttggaaaagacccggaggaaatcagcaagtgatcaatggaacactgataatgaaccagccaaggtgaaacctgagttactcccagaaaaagaggagacttctcaagctgaccaggatatccaagacaaagagcctcattgccacatcccaattaagagaaattccatcttcaatcgctccataagacgcaaaagcaaagccaaggccagagacaaccccgaacggaacgccagctgcctggcagattcacaggacaatggaaaatctgtaaatgagcccctgaccttgaatatcccctggagcagaacgcctccttgcagaacagcaatgcagacagacccaggagcccaggaaatgagtgagtcgtcctccaccccgggaaatggggccacgcccgaggagtggccggccctggccgacagccccaccacgctcaccgaggccctgcggatgatccaccccattcccgccgactcctggagaaacctcattgaacaaatagggctcctgtatcaggaataccgagataaatcgactctccaagaaatcgaaaccaggaggcaacaggatgcagaaatagaagacaataccaatgggtccccggccagtgaggacaccccggaggaggaagaagaagaggaggaggaggaggagccggccagcccaccagagaggaagactctgccccagatctgcctgctcagtaacccccactcaaggttcaacctctggcaggatcttcccgagatccggagcagcggggtgcttgagatcctacagcctgaggagattaagctgcaggaggccatgttcgagctggtcacttccgaggcgtcctactacaagagtctgaacctgctcgtgtcccacttcatggagaacgagcggataaggaagatcctgcacccgtccgaggcgcacatcctcttctccaacgtcctggacgtgctggctgtcagtgagcggttcctcctggagctggagcaccggatggaggagaacatcgtcatctctgacgtgtgtgacatcgtgtaccgttatgcggctgaccacttctctgtctacatcacctacgtcagcaatcagacctaccaggagcggacctataagcagctgctccaggagaaggcagctttccgggagctgatcgcgcagctagagctcgaccccaagtgcagggggctgcccttctcctccttcctcatcctgcctttccagaggatcacacgcctcaagctgttggtccagaacatcctgaagagggtagaagagaggtctgagcgggagtgcactgctttggatgctcacaaggagctggaaatggtggtgaaggcatgcaacgagggcgtcaggaaaatgagccgcacggaacagatgatcagcattcagaagaagatggagttcaagatcaagtcggtgcccatcatctcccactcccgctggctgctgaagcagggtgagctgcagcagatgtcaggccccaagacctcccggaccctgaggaccaagaagctcttccacgaaatttacctcttcctnnnnnnnnnnnnnnnnnnnnnnnnnnnncagattccaggagacaagtaccaggtatttgactcagctccgcggggactgctgcgtgtggaggagctggaggaccagggccagacgctggccaacgtgttcatcctgcggctgctggagaacgcagatgaccgggaggccacctacatgctaaaggcgtcctctcagagtgagatgaagcgttggatgacctcactggcccccaacaggaggaccaagtttgtttcgttcacatcccggctgctggactgcccccaggtccagtgcgtgcacccatacgtggctcagcagccagacgagctgacgctggagctcgccgacatcctcaacatcctggacaagactgacgacgggtggatctttggcgagcgtctgcacgaccaggagagaggctggttccccagctccatgactgaggagatcttgaatcccaagatccggtcccagaacctcaaggaatgtttccgtgtccacaagatggatgaccctcagcgcagccagaacaaggaccgcaggaagctgggcagccggaatcggcaatgacccccacccagggggccagcgggagcagggcctgcatgagaccccgacagaaggtggggggggggcctctgggaagcacaggccagcacctccccaggtggcaggatctggcttggggtgcccggccctcatccctgcccacgcagtgagtgctcatgtgtcttggccccttgcttgcaaactggataaagggtgcccaagcctctcctgatgcatttgtaaacaagaaggtttcagcagtattacaccacctccctcatgcctccgagggggtggaagggggtgggcacactccagggccccccatgcccctggcccccagggactggaagaggctcccaacccagagtgtccctgtgggaggcaggcagaaggtgacaatgacacggattttccttgcacgcgtcctcctctaccttggaagcagttagaatctaccaggcacagatgaggccgcccttgcctgacggagcttgatgagcagcccttggtctccggttccaggactgagagcccagctgcctctgcccacccttccccaggcctctgccagcctctggctgcacggtcaggccctgccccatggcaggcctgccagagcttggctggggacccctcccgcctctggctccctgatgggctggatgtaacttgtgtcttctagccccttaaggagcccaggtgttttaaggaatgaattggtcactgcatcttgtatcgattatggttctgagaaaagcaaatatcacttttggctgcattaaaagaagcatcatatataaaataaaaaaaaaaaaaaaaaaaaaaaaaaaaaaaaaaacannnnnnnnnnnnnnnnnnnnnnnnnnnnnnnnnnnnnnnnnnnnnnnnnnnnnnnnnnnnnnnnnnnnnnnnnnnnnnnnnnnnnnnnnnnnnnnnnnnnnnnnnnnnnnnnnnnnnnnnnnnnnnnnnnnnnnnnnnnnnnnnnnnnnnnnnnnnnnnnnnnnnnnnnnnnnnnnnnnnnnnnnnnnnnnnnnnnttt

SEQ ID NO: 5743 - DNA, 7792 bp, Homo sapiens
  misc_feature (511)..(536): n is a, c, g, or t
caagagtgcctgaggctggatcagaaatagccacgatcgtccagtttgattgattgattgattgatttagttgtgatggagtctcgctgtatttcccaggctggagtgcagaggcacgatctccgttcactgcagcctccacctccccggttcaagtgattctcctgcctcagccttccgagtagctgggattacaggcacctgccaccacgcccggctgatttttgtgtttttagtagagacagggtttcgccatgttggccaggctggtcttgaactcctgacctcaggtgagccacccgcctcggcctcccaaagtgttgggattacaggcgtgagccactgcccccagccccagcttgatcttgaacctcctgtgtgtgggcagagagacatggccctgctactgcttgaacggcttccggagacagtgacttgtttcctttttccctctgaactatgccgtagggccaggtgagctgctgtgaaggactcattcttggtagccggnnnnnnnnnnnnnnnnnnnnnnnnnntgggctcctactaacgcacctgggacaccaggctgctgggctcccctctaggcagcctcccctccaggcagcctcaccagcagctcccctgagccatggagaccccagaggtccccgtgggctcgctaatcgactttgggcctgaggcacccacctcttctcccctggaggcaccaccccctgtgctgcaggacggcgatggctccctgggggacggtgcatcagagagtgagaccactgagtctgcggacagtgagaatgacatgggcgagtcgccctcgcacccgtcctgggaccaagaccgccgttcctcctccaacgagtccttctcctccaaccagagcaccgagtctacccaggatgaagagaccctggcactcagggacttcatgcgtggctacgtggagaagatcttctctggaggggaggacttggatcaggaggagaaagccaagtttggagagtactgcagcagtgaaaatggaaaaggccgggagtggtttgctcgatacgtgagtgcccagcgctgcaactccaagtgtgtctcagaggcaaccttctaccgcctggtgcagtcttttgcagtggtgctgttcgagtgtcatcagatggatgactttgggcctgccaagaacctcatgaccatgtgcttcacctactaccacatcggaaaaccacagctgctgcccccggagtcccgggagaagcccgcgggcagcatcgactcctacctgaaatccgcaaacagctggctggccgaaaagaaggacatcgccgagcggctgctgaagaacacctcggccaggactgagaatgtcaagggcttcttcggggggctggagaccaagctgaaggggcccctggccaggaggaacgaggaagacgagaacaaaccccaggagaagcggcccagggctgtgaccgcgtacagccccgaggacgaaaagaagggggagaagatctacctgtacacgcacctgaagcaacagcccatctggcacactctgaggttctggaatgcagccttttttgacgctgtccattgtgagaggacaaagcgatctcccactaccagaggggatgctggagaggaggaggagaagagggagaagtggtgccacatgacccaggaggagcgcgacgacagcctccggttcaacgagaacatcaccttcgggcagctgggcacattcacgcacaacatgctggcctttggactgaacaagaagctgtgcaatgacttcctgaagaagcaggctgtgattggcaacctggatgaagagcaatacaagctgcttagtgaccacattgagcaaatggccactgagtaggccccagaggtcgcactccgcaggaggactgaggccatgtgccattctcccgggcccagcgcccggccgtcaccccacccgatgacctgcatgaagccagcagcacccagagccactcctgctgccctagaactagcggttagaagaatccgctgttcctccctcatctcctctgcctgtgtctgcgacccccatccatgtgccaaagtgtcccttgggtcacacagctaaagccgaggtgaccagttgtaccccgagtgccaggcttgtgagatgagaccaagagggaggaggggaaggactccatgggccatcgtgggccaagggctggcgagggtgggggtgggcaagggatgcaggcaggacagccatgaggtggggctgcagccggcacacccagtggtggagggccggcgctgccactcacggtgggtggccgtgggccaccttccctgcaatgggtgcacacgcggctcccatccagccctctcagcgtggggctgtggctggtcctcactattccccagtctcccgctgtggggcaggaacaggaagtgacgggaaccttgaggaggaaacgcctgtgttagggagagagtgggtgcggtgtagaggatgctcttggccggctggagcaagacctggctcccaccagagggacgtgtgtgtgcctgcagacggcccgggagctgtgtgtctccgccagagtcacagcagtgccgaggtgtccgcggcagaccacacagaccgtctgaaatgcgcccgcctggcggacagctcccttctgaagcagagaagcctccatggtcacgaagcagcgttgtgctgtgtgtccctcgcaagaagcacaggaaagagaagtttctttagtagccactagacaaccaccctttctgaaagcaaacagtgctgctctttattccagacaaggcaggaaagtctgagttgggagtgacagtggctggagagaagcagatctgtgcaacgtgcagggcaagccagtggcgtggcctctgcctctaagcgctgagcattgggccccttccccaccagacctttgtagctcctccagcctctgcagagactcccttcacctcgcacttactgcctgggaaccacggcccttctcttctgtgggtctgcaccaggtactccaggccagcccatgggcccggggcctgaccccaacacctgcatgctgggtccagagccttctgtttcactgtgcgtggacactgctaggccgcctggggtcccctgcctcctgcctgtcgctgccgtggtccctgactgcgaaataggcccgcggggctctccctcctcctgccatcctcccctcccgcccttcctggctacctcctctgacatgcggtcagataagtcccgtcttgtttgtgagtaccacagaaacgcctgagagtcacttacccggccactgcttggaaggtttccctccggggaatgcctccctggaatgttccagagacggaacattctctagagacaacagtctgtgctgcagattggttggatcacagaatgtgtgtctggggcattatctgaaacgtggtgtcatctgatgcatttggaccatatgctgccagactgcagaacgggggagccggggctcagggcccctgactgcatggtgcatgagtgatctcagcctagcgatgccgctggccagaccgtgaccatgctgccagtgtgctcgccatgagctgggtcagggctggggagttgtgcaggctggggtgacccttcccccatcattgggccccaacgggcatgtctccaccgaatccatttagagaaatgtcagagcgaggggtgtgtggacacccctcgctctgatgccaactgcagataatacacacctcctgcagcgtccagccacggctccagggcactgctctcctccttgcaccggtgaaactcaggccacactcaagggctgactgtccaggcgctcccttcagccgcctcgtcgtcagcgttcttagtcatgcattattcgtgttagctgaaatgcattcagactttgttctgcggtgcccacaggacttacccctgtatgtacaggatttttgtatgaaagttttgtttgattctgagactctcttgggaacgctggagagcttgtgcacagcctctggaaggaaaggcagcgctgacttcgttgggcttttttccaagcactttaacttcagaaatggtcttgacacttttttctccacatagactcttgaaatagccatttcaggggaggaaagggttggggttttctttgtttgtttgtttgtttccccctttactacctgttcttgtagatctagctcctcagagttggaggaaggctgacagagaaggtctcctctgtgctccatccacacaggatgccggagagacagccccttgtgctgtgagcagagcaggcagtggctctggaggctgcctgtggtctccttccagctgtggctgacagtggctctggccagggttgcttggagaaggctcagtgtgcctgggacagggcttaccacctgccaccaaggtttcctctcttcccccaggacctgggcagagcaggcatgagctgggctgtggtgcagagcaagcagacccagccacactgctcaaaggtccctgcgtggggaggtgtcacaccaggggcacacccagggccacctgggtgtaggagagctctggtggcccctccgtaaactcaggaagtgtcaggtgatttcctagggagaggttcccagtcccagcaggcagaatgcccaaaaccaggagcacgaaggcctgtcatccatggggccattgcaggcaccctgccgcccgaccttgagggctgtgccaatcctagtgaaccaaaatgcaaacaactcacacaagtgaaaagctccctgctttgaaaacaggacatgttgacaggcagcatggtatgtttttagcctttgttacagttttagcaacattgatgtctaagaggggccgtggtaatagattgcatctgccctgtgcatgcgcatgtttaaccacaggccagagaactcaattctgatgtcgtaagttctctgtaagtgaaatggggtagactgtatgattttcctattgccaaaagaaagaaagggggccaaacagctctgaaatttccaaaaaatggctagagggagagtccagtttctgagctctgtacccaaattaaaatcctgatgttcaggttaatccaagcaacacgcattgggtttaaaaccagcaccgaggcccagtgggggaatcacagacatcaccaagtctcgtcttctttccttcctgtgagttgaaaccaaacaggcctctcgctcactcctcccagcccagtaatgctgaggagttcagttgtgaggaaagaaggctggagctgtgagattcgcttttccctaggctgttccgcgtgggttaccttatcaccctggagcacttggtattccagacccctgacatgaggaatgcaggttcacactgtaaagagtttgtgaaaggtttcagtctaactggggttccttagctggaagccagggctggaagctacaggcctgaccttcctgggtcccactatctgttggcattttttttttttttttttagacggagttttgctcttgttgcccaggctggagtgcagtgacacaatctctactcactgcaacctccacctcccgggttcaagcaattctcctgcctcagcctcctgagtagctgggatgacaggtgcacgccaccacgcccggctaatttttatatttttggtagagatggggtttcaccatgctggccaggctggtctcgaactcctgacctcaggtgatcccccccacctcagcctcccaaagtgctgggattacaggcgtgaggcatcacacctgcctctgttggctttttagttaggaaggatccagctaggcccgtgtggttagatcagctttgttactgaattacctaaaaccagaccacagcacagccagggagcccagtagtgtttccaagaacagtgtggagcttgagaaagagaactttaaaaattagagggtccctttctgcagaggaagggatgctcgcagggtggcagtggcccagccccagcctcagggacggggagggagagccccctctgggcccagcaggcaggtgttctgaggctggtccctcctcagtttccgcagccacaaggcgaaacggccagattctcactcaaggtcgttctcactccttttcctgtcccgtttccagtcccactgagccattcacttctgctgaaccatttttcttaggatgcagccgtctcactcccttgtcctgtaaatcgtgtattcatgttgatgattcttggagataggtttcactttttcccagctgcgtccacaggaaaggggagtcggatgccagctgcaccccgcctggctcgcacaggctaagaccacagacagagcagggcttcccggagccacacaggccacgcaccccaggaacccttgctgccgcgggccaggaacaggaatgtgttggtgcctgagacaccaaatggaagaagcacatcaagactgttctcctgcggccaacactggcccggaagccgccctccatacaggccctcagggggcctgccttctgcgcctcagtcccccgtgcatccctgggcctgggtatcacatgctctccaggaaagggacggaatcaatcgtgtgaccgatgggctcgcaaggatgggtgccgccgtgggagccctgcctctggtgctggcaagggattgggtttgtgtgggtgtctctagcctgcagagtgcagtgagtgagagtccttgggagcgcggcgctgcctgtagctgtgcctggggatgcacgtggccacgggatttcagtgggacagcgctcccacaggggctgggggtgggggtggggtttcttagttactgttggaaagggaaaaattcaccatatccaaggggagagacgatgggctgggtttgtttactccaacttcccttctacacccctcctgcaggacagtacgatttggggagaacccagctccccactttatctgcagactctgggacctgacaaaacagtcagagcctgagtgcactgcagcctgaactcccttgagcagcgctataagggactttgcactttaaaaaggggatgcctgtcagtaaatcccctgtgcattgactagaactggggggctgcgcccgctccctccttaatcctagatgatttgctcatgaaatagaggtgggggacgaccgcatgcactctgggaggtgcagccctaaggggtggactccagatctccctgcaagagacagcttggcttggctttggctgttggggaggagtccctgccatcccggtgagcctggggctgttgcttagggtcttctgggtggacacgtggagaaagagaaggcaaacgttggaacactaggaaaagctagaaattcagacaacacacatggatccccttaaaacatgtaaatgtgtcagaacacggttgacctgccgccttcttgaacctggtggcccccgttggaactatcagtggcgtctcccatgcacacgccctctgctttctctttcctagactcgcggtgctcacatccagacattaccttgttggtagcccccaagtggcgtgcagtgacaccagtatcttctctgttgcatttttgcaatcttgtgtcccgctcggtgatgttctacaaactctgttttaaggttgagaaagtttcaagggtgaagatctcaaaacagtgctaaaatcaaaggtgtttgctgtgaagaaaaacatgtgtatatattgcaccttgagttgtcagaaggtagaaactgaaataaactaactttaaaaaaaaaaaaaaaaaaaaaagaaaaaaaaaaa

SEQ ID NO: 5744 - DNA, 1404 bp, Homo sapiens
  misc_feature (22)..(22): n is a, c, g, or t
  misc_feature (1277)..(1277): n is a, c, g, or t
  misc_feature (1301)..(1301): n is a, c, g, or t
  misc_feature (1336)..(1336): n is a, c, g, or t
  misc_feature (1374)..(1374): n is a, c, g, or t
agcctctcctacagttctgganggatacgtggttaagtaccacttcctggatgaatcagaaaaacagccacttgagcaatttcgtgttctgtggttcagatgagaatcccagttgagaaagtaagaaaatatgtgtttattcttcagctttaaattgttatatcacaaacttccttcctccttggcaagctttcttttttgacgagaagaaaattgtaataaacaacagtatgactaatagatagtcacatggttacttccagtttgcaaaatgctatttatactttgagttactcttcaaaagtggtatacctctagtttggagctgtgctgtaaaaacaagagtaacatttttatattaaagttaaataaagttacaactttgaagagagtttctgcaagacatgacacaaagctgctagcagaaaatcaaaacgctgattaaaagaagcacggtatgatgaccaaacataaaaagtgttttataattgttggtgttttaataacaactaatattattactctgatagttaaactaactcgagattctcagagtttatgcccctatgattggattggtttccaaaacaaatgctattatttctctaaagaagaaggagattggaattcaagtaaatacaactgttccactcaacatgccgacctaactataattgacaacatagaagaaatgaattttcttaggcggtataaatgcagttctgatcactggattggactgaagatggcaaaaaatcgaacaggacaatgggtagatggagctacatttaccaaatcgtttggcatgagagggagtgaaggatgtgcctacctcagcgatgatggtgcagcaacagctagatgttacaccgaaagaaaatggatttgcaggaaaagaatacactaagttaatgtctaagataatggggaaaatagaaaataacattattaagtgtaaaaccagcaaagtacttttttaattaaacaaagttcgagttttgtacctgtctggttaattctgcttacgtgtcaggctacacataaaagccacttcaaagattggcaaaaaaaaaaaaaaaaaaaactgctgagttttttcttttctttctttctctctctctctttcctttctttcctctttcttttctttcttttctttcctttctttttataacctgtaaacccaagaaaacaattggttggggatcaagggacagaaccatagcaccttagcaccgggaccttttcatggaccccccttaatggaaaccacaatnttgaagtacccccgaaattaaggnacggatttaatgggcccctaatttggacaacaaanattggttggaaaaactgtggggaaagttctccccccanaggacacttaataagtgtgggaaaaagaaa

SEQ ID NO: 5745 - DNA, 679 bp, Homo sapiens
attctttccccaagtctctatggtagcgtcagcgtcggaggcggtagtgacggtggcgtttccttgaggaagagtgagggttccaacttttctgcttatctgggaggtgttgggcgcggacagtcgagatgtcagagaaaaagcagccggtagacttaggtctgttagaggaagacgacgagtttgaagagttccctgccgaagactgggctggcttagatgaagatgaagatgcacatgtctgggaggataattgggatgatgacaatgtagaggatgacttctctaatcagttacgagctgaactagagaaacatggttataagatggagacttcatagcatccagaagaagtgttgaagtaacctaaacttgacctgcttaatacattctagggcagagaacccaggatgggacactaaaaaaatgtgtttatttcattatctgcttggatttatttgtgtttttgtaacacaaaaaataaatgttttgatataaaaaaaaaaaaaaaaaaaaaaaaaaaaaaaaaacaaatcgcaaggcagcctgaggggcccaggaaaagatcagaagacacacgcagtgaggacacggtgggccacaaggagaagagagaaacggtgccacgagagggacctcaggagaacgcgggaaaaacagcaagaagtaagagtcacaa

SEQ ID NO: 5746 - DNA, 2134 bp, Homo sapiens
gaaatcaggctccgggccggccgaagggcgcaactttcccccctcggcgccccaccggctcccgcgcgcctcccctcgcgcccgagcttcgagccaagcagcgtcctggggagcgcgtcatggccttaccagcgaccgccttgctcctgccgctggccttgctgctccacgccgccaggccgagccagttccgggtgtcgccgctggatcggacctggaacctgggcgagacagtggagctgaagtgccaggtgctgctgtccaacccgacgtcgggctgctcgtggctcttccagccgcgcggcgccgccgccagtcccaccttcctcctatacctctcccaaaacaagcccaaggcggccgaggggctggacaccctgagcgacttccgccgagagaacgagggctactatttctgctcggccctgagcaactccatcatgtacttcagccacttcgtgccggtcttcctgccagcgaagcccaccacgacgccagcgccgcgaccaccaacaccggcgcccaccatcgcgtcgcagcccctgtccctgcgcccagaggcgtgccggccagcggcggggggcgcagtgcacacgagggggctggacttcgcctgtgatatctacatctgggcgcccttggccgggacttgtggggtccttctcctgtcactggttatcaccctttactgcaaccacaggaaccgaagacgtgtttgcaaatgtccccggcctgtggtcaaatcgggagacaagcccagcctttcggcgagatacgtctaaccctgtgcaacagccactacattacttcaaactgagatccttccttttgagggagcaagtccttccctttcattttttccagtcttcctccctgtgtattcattctcatgattattattttagtgggggcggggtgggaaagattactttttctttatgtgtttgacgggaaacaaaactaggtaaaatctacagtacaccacaagggtcacaatactgttgtgcgcacatcgcggtagggcgtggaaaggggcaggccagagctacccgcagagttctcagaatcatgctgagagaactggaggcacccatgccatctcaacctcttccccgcccgttttacaaagggggaggctaaagcccagagacagcttgatcaaaggcacacagcaagtcagggttggagcagtagctggagggaccttgtctcccagctcagggctctttcctccacaccattcaagtctttctttccgaggcccctgtctcagggtgaggtgcttgagtctccaacggcaagggaacaagtacttcttgatacctgggatactgtgcccagagcctcgaggaggtaatgaattaaagaagagaactgcctttggcagagttctataatgtaaacaatatcagacttttttttttataatcaagcctaaaattgtatagacctaaaataaaatgaagtggtgagcttaaccctggaaaatgaatccctctatctctaaagagaatctctgtgaaacccctatgtggaggcggaattgctctcccagcccttgcattgcagaggggcccatgaaagaggacaggctacccctttacaaatagaatttgagcatcagtgaggttaaactaaggccctcttgaatctctgaatttgagatacaaacatgttcctgggatcactgatgactttttatactttgtaaagacaattgttggagagcccctcacacagccctggcctctgctcaactagcagatacagggatgaggcagacctgactctcttaaggaggctgagagcccaaactgctgtcccaaacatgcacttccttgcttaaggtatggtacaagcaatgcctgcccattggagagaaaaaacttaagtagataaggaaataagaaccactcataattcttcaccttaggaataatctcctgttaatatggtgtacattcttcctgattattttctacacatacatgtaaaatatgtctttcttttttaaatagggttgtactatgctgttatgagtggctttaatgaataaacatttgtagcatcctctttaatgggtaaacagcaaaaaaaaaaaaaaaaaaaaaaaaaaaaaaaaaaaaaaaaaaaa

SEQ ID NO: 5747 - DNA, 1235 bp, Homo sapiens
cccaacctggggcgacttcaggtgtgccacattcgctaagtgctcggagttaatagcacctcctccgagcactcgctcacggcgtccccttgcctggaaagataccgcggtccctccagaggatttgagggacagggtcggagggggctcttccgccagcaccggaggaagaaagaggaggggctggctggtcaccagagggtggggcggaccgcgtgcgctcggcggctgcggagagggggagagcaggcagcgggcggcggggagcagcatggagccggcggcggggagcagcatggagccttcggctgactggctggccacggccgcggcccggggtcgggtagaggaggtgcgggcgctgctggaggcgggggcgctgcccaacgcaccgaatagttacggtcggaggccgatccaggtcatgatgatgggcagcgcccgagtggcggagctgctgctgctccacggcgcggagcccaactgcgccgaccccgccactctcacccgacccgtgcacgacgctgcccgggagggcttcctggacacgctggtggtgctgcaccgggccggggcgcggctggacgtgcgcgatgcctggggccgtctgcccgtggacctggctgaggagctgggccatcgcgatgtcgcacggtacctgcgcgcggctgcggggggcaccagaggcagtaaccatgcccgcatagatgccgcggaaggtccctcagacatccccgattgaaagaaccagagaggctctgagaaacctcgggaaacttagatcatcagtcaccgaaggtcctacagggccacaactgcccccgccacaacccaccccgctttcgtagttttcatttagaaaatagagcttttaaaaatgtcctgccttttaacgtagatatatgccttcccccactaccgtaaatgtccatttatatcattttttatatattcttataaaaatgtaaaaaagaaaaacaccgcttctgccttttcactgtgttggagttttctggagtgagcactcacgccctaagcgcacattcatgtgggcatttcttgcgagcctcgcagcctccggaagctgtcgacttcatgacaagcattttgtgaactagggaagctcaggggggttactggcttctcttgagtcacactgctagcaaatggcagaaccaaagctcaaataaaaataaaataattttcattcattcactcaaaaaaaaaaaaaaaaa

SEQ ID NO: 5748 - DNA, 1985 bp, Homo sapiens
ctaatgcagctatactgtatgtatacatctttttttttaaaacaaaaaaagacaaaaccagatttatggataacatgaactgctttctggatacgcaaacaaacaccaatgaaaacattttttttttttttttttttttttttttttttttttacactgtctaaagcatttaatggtctttctttaacacagccaactcccccgggtttgaaacagtgttaaattctctcttgcttgtggcaaaagaagctgtcaagtccaacactgaaaaattggtaccatttcctggccagtaagcacagaacagaggggctaaatattttatggttttatttatttactgtgttctcatgctgtgtttttcttttctctgtctctccctcctgctcgtgtctgcccaggcttgattgttgtgacattggccgtatgctggatgcccaaccagattcggaggatcatggctgcggccaaacccaagcacgactggacgaggtcctacttccgggcgtacatgatcctcctccccttctcggagacgtttttctacctcagctcggtcatcaacccgctcctgtacacggtgtcctcgcagcagtttcggcgggtgttcgtgcaggtgctgtgctgccgcctgtcgctgcagcacgccaaccacgagaagcgcctgcgcgtacatgcgcactccaccaccgacagcgcccgctttgtgcagcgcccgttgctcttcgcgtcccggcgccagtcctctgcaaggagaactgagaagattttcttaagcacttttcagagcgaggccgagccccagtctaagtcccagtcattgagtctcgagtcactagagcccaactcaggcgcgaaaccagccaattctgctgcagagaatggttttcaggagcatgaagtttgaatgtcaagcgagggagccttgagtgggaactggccctccagccctaagaaaacgtcactctcactctgcagtctcaaactatgcccccatcagggatggaatggacactggaggctttacaaaaggcagatgcccacctcagtgacttctaaggactgactctgccagcctggccttgactccggttacacagacatgggggtgaactttcactccacctccttccttcaagtacatactgaaaattcagtcaagctgaatttattcagaatgctttaccgagctctttcattatttgcacaggaacaaaagagaacacggactcccgctccctacccagaataaaaggacacccagaagaaactcactcagggaggtggggggttgggggcgagggctggaagaacaatgcaggagggggtggcatctccttcagcttcagcagtgtgccgagaagagggctaatttgaggaacaggatggtggtgcggagccctggcctgagggccgaggcagaacttccccttttcttgggccttggcccgttacaaagaggggtgttgcagcagctgatgcaaactgagttcagtttccctggggagcagaaggactggtacccggcagaggcgatgagacaggccgctgatgatgcacaggacttgcggtacatgatcccggcactttgctccatcacttctttctgacacatgtcttgaacgttcaccgtgcaattcacaatgaactcgggggaggagcagtcgttgttcagctggaattcttcacactggtagcactggatttgcagcgcaaagcctggaagcaagaacaatccgcaaaaagttgccgcgatgcctaggacccacattctcccggagtcccggggccgggagagggcaagcgcatcagaggaggcgacagcagcggagacgacggtcgtagcttagaggagccgcaggtgccgctcgcggagcctgcatcgcccgcgctcgggctcccggctgcgggtctctgctcctcccgctcgcgctcccgggccgagcaccgcgcctccggagttggcggctgagactgaaggaact

SEQ ID NO: 5749 - DNA, 3850 bp, Homo sapiens
gcggtgccgggggcggggcgcggcggctgtcagctgactgtggcggcggcggcctcgaggtgacaactgtctccgtcgcaggctccggcgggggcgcaggaggtcgcccggcgcgtcactgtcgggtcggcgagccacgggggccgccgcagcaccatggcgaccaccgtcagctggacgcccaggcggcccagcagctgcagtacggaggcgcagtgggcaccgtgggccgactgaacatcacggtggtacaggcaaagttggccaagaattacggcatgacccgcatggacccctactgccgactgcgcctgggctacgcggtgtacgagacgcccacggcacacaatggcgccaagaatccccgctggaataaggtcatccactgcacggtgcccccaggcgtggactctttctatctcgagatcttcgatgagagagccttctccatggacgaccgcattgcctggacccacatcaccatcccggagtccctgaggcagggcaaggtggaggacgagtggtacagcctgagcgggaggcagggggacgacaaggagggcatgatcaacctcgtcatgtcctacgcgctgcttccagctgccatggtgatgccaccccagcccgtggtcctgatgccaacagtgtaccagcagggcgttggctatgtgcccatcacagggatgcccgctgtctgtagccccggcatggtgcccgtggccctgcccccggccgccgtgaacgcccagccccgctgtagcgaggaggacctgaaagccatccaggacatgttccccaacatggaccaggaggtgatccgctccgtgctggaagcccagcgagggaacaaggatgccgccatcaactccctgctgcagatgggggaggagccatagagcctctgcctcgatgccgttttgcccccgctctttggacacgccgacccggcgctccccaaggaatgctgtcccaacaagattcccgtgaaagagcacccgtgtcgccccctcccgtggacttctgtgccgccccgtccacacctgttcttgggtgcatgtgggttttcggttcctggcggtccaggacggggcgggggctcccctcccatctcgtgctgggaggtctcagcgcgctctcctgtccctgggacgtgcgtctctccttctcatgccgttctggaaaatgctcttgctgtagagagcagctgcttctgccagggtgttggaggtggtggagcgccttccgattccattcatggcattttgtgatgtgatgtaattggaatagagctgttgatttaaggcacacacaatccctcacactgtgggttttttttagaacttcccagacgaaaactcacgcccttgccctaacgcgctttgctgtgagcctggcccctgcccagggcttgggtctggtgagctgagcagcttcctgtggatggtgtggggccggcctctggcctggttcacctggccactgtccagccagccttgtgacagactccggcctgaaggcagaatgaacccacacctggagtgaggaagggggcctggcacggttggccaggctctgcctgattgccagccagcgggcatctgaagccgggtccttcgcccgccggaggctgccgtccgtctctcttgctgcgctcgtgccagctccgtgggtgtcctcccagggagcttctcttctcaacaggccttgcgaggctggggtgagaggtgatagaggcagcactgtgcatgattccgagagggtgtggtggcactgccagccgactgctgacagcttgggagctgctgtgcccaggacgtgggttcagcgtgggcgaggaaagcctggcgagcgtggccctgtaaaagctttctgaggcgggaggcgctcacttacctctgactgcctgggcgctgcgtgtagcatcttggcctacaggacagattttaggtgacacctggttatgacagtcagaaatttgagaagcttctcacaagtgatgcactttaaataatctgcatgccattgagacacctgcatgtctggtgtttgtggttcaagtgtcttgccgccggccttcggatgtaaacccactgataacggacagaaagagaatgcccacaagtgggtcttctgtggaagatgcagaaggaggaagttagtgcttacattttagtctttttctccctcaaaaaaataggttaagtttcagtgccagctagaaaatactgctttctgccatcgattgggggtggtttttgtcaaatatactgttgataaatatttatttttgtaaacttgaagtgtgtggtggccgtgggggagggacatgctggcagcaggcgccttcttcagctgtgggtcctaaaggcctttgatcctttgaagaagaaagacatggtatttgttcagcagacgccgaccactcagacggaggggcccctgggattccctgtctcagatggcctggtcttacgcctgtgtagatttcttctccattgggaatgaaggtgtcaggcgggactggaacgttctagatggtatgttccgtgatattaacaactctaacccaggacagaccacaagccacactcagaggcctcactgtgctgggggcttcggtgtccaggcgcccaggtgtggccaccagcaccggtttctgccttcgcgttgctggggtgcagtgagactgccacacgcgtgcacatgtggctctgtgggtgtctcctagagaggacgtggcccctgctgccagcccttgagcagcccgtgtgggggcccgagggacccacacagtgggggccagcctcgctggagggagagcaaccctttgccgatgaccacgcttgccgccatctcttagttttctttttcacaagcgctttatttttttaatagacaaatcacattttgcaaggcctttaattaaataagattcttctttccttcattttatgctttatttccctgtttgaagggttactggtagaagtggcttactgtagaagcagcttgctgagcccctccgagcggtccccagaattagctggttcacaacccccaccctcccccgcccccgcctgtgtcaggtgtggatgaggtcgtcacactcagaaggacaggcttgtctgccagctcacaaggggaggctgcagtgggtttgggagctgggtttaggcccctggtgtctgagggcccaggccttgccagcctctgctgctcctgctcctgggtttgaagatgcaggccgatcgccagctccgtggcagcggtcactaaggacagcctgactgtgccatcttggagcctcaggcggggctccggagatagaagacaggtcgccggaggctccccctcctctcctctcccctctgcagatgcttccctgggcgctaccctgcagggtgccaggcaggagtggtctcagaacgtgcgcttctgattattttactggggtccattgtccagatttttctttgattgtaaaatatatttttactttttagtcttctaatttaataaatgatccatataaaaatagagaaataaagtcctttaagggaaggttaacgaaacaaaagggggcgttaaaatatcctgaggggccaagtaaaggtaccagggttctgtcaaagtggtcctataggtgagtcgattataagtaggatgccgtgttaacaacgtcgggagggaaactgcaattggtctgggaagacttatctggggtgctatggccctaccaggattaagcaggaataattaggtaggtacacgctgttgaaatgttcgtagataaattaaggatgtaggaaagagagggaggaagcaagagagatagcattaggacctgata

SEQ ID NO: 5750 - DNA, 1019 bp, Homo sapiens
  misc_feature (46)..(47): n is a, c, g, or t
gaccctggcctcaacatccccctcctcttctaccaccttctggagnnacttccaccgtcctgcagatggctctgaggtcatgtatgatgcggtctccatcatgaatgctgacattctcaactactgccagaaggagtcctggtgcaaacttgccttctacctgctctccttcttctattacctgtacaggtgaggccttgcccacagcagtcagaactcagggaagggatgtcccagcatcacgcttccaatcccaagttcctgccttttgcccttgaggactgagggcagcccagggtgtgaccaggtgggcatctgggtggctgtgtgtgtgcagggctaggctcactggctcatcttccgtacagtatggtttatacgttggtgagtttctaagggggaagccggccagggagcgagcccagaacggaccggacgcctgtgcacccccagccctgccccttggccgcagaggcctcagccctggggagggagggggcactggtgcccccagcctctccaacccccaaactgctgctgcggggaaccccccccaccccgccttcagagccctcccccttggactagagcggctgggcagagctctaaacaggggcaggggctcctctgccagcctgtgggcatggcagtcattcctggaaggggcaggacctccggccttgtccatttcgggggaaacttgggccctgccaaggggcagagcttgaccctggaaattctgggccatccccctccacccccaccctgaggctccccctgcaggtgggggggtacccgcaccgggaatgagcaggctcagcaggggggcagccccacccctagtctgccctcccctctcccccaggctctttctccagccctgtctccatctgccccaacctcagcccaccttgtctcttggacctattttctatgtcgcctggaggagtccggcaccccctccccggccatttgtgacaaaatatgaataaactactgcaaataaaaaaaaaaaaaaa

SEQ ID NO: 5751 - DNA, 1258 bp, Homo sapiens
ttgcgcgagtgcaggcatgaccgactggttccgttgcttctaacgtagtgttgtgtcgagtcgactgactgacatcttaatggggtattctcctctcgcgtacgtgtgcagactgcataactggggaagattgtacaggtttaggctaaatatacgtagggatttagatggcctataaggccctgatagtttcctgcttcgtctgccagggcacttagatcccatttccagaggtcataaacttggatctgtagctagagttggactgtcttcataaatgtaacagttctgctttctgggcgtaatcttctggtacatcaatagtattaatgtgtaaaagcttaatggtatagtatttaaccgcctgaagttcctatgttttatgttgtgctttatgtgaaccgccttggtgaaggtcccttttccattggatgtgtagttatatgatctttttaaatgtacagatattttgctataaaatcggtgcagttttttatggtttttacacttctctttaattcccacctaagcctctgggtaatattgtaaatattgttttaaaatgcatcagcctatgctatacaatctgaatgttattttaacttatagttttttttaatatatatatttaactataaggacagtttagggaacaagttacctaccacatttcactttagtgtacctatttacagaaagattaaactgccacctgcgggcacattcccataaatgtgtactttactttaaaaagaacatgccacgattttgtctttctgtggactcaacattcacttcgattaaaaatagcaatttgaccaagttggacttccactacaaagcagctgttttccaaagttcaatgctgacatatatgtatattaaaataattgcctatttattaatctacaaatagacaacgttggcatgttcttttctgtttgtctattaatgggcctgcttcttagcaatattagaatgttttataaaagcaattcatgttacttttctggtcttttcatggcatatgagcaaataataaactatttacactactaaaaaaaaaagcagaagagacgaccaaccaaaacaaaaaaccccggccccgccaatataaggtcacctatttccccccccgccaggatcctcgggaacgtcgtcctccctccgttactatgaggcctcaaacgaggcgaaccccaccgcggccactcctccgaccggggagaggcacctgggcttctgagaaggacagcgg

SEQ ID NO: 5752 - DNA, 2664 bp, Homo sapiens
  misc_feature (13)..(14): n is a, c, g, or t
cggaagttcaggnnagggcgaggccgtgccccacatccaggcagggcaggccgcgggccgctcccctagccaggaagaggcggcgagaggcgggctgaggcggcccagcggcggcaggtgaggcggaaccaaccctcctggccatgggaggggccgtggtggacgagggccccacaggcgtcaaggcccctgacggcggctggggctgggccgtgctcttcggctgtttcgtcatcactggcttctcctacgccttccccaaggccgtcagtgtcttcttcaaggagctcatacaggagtttgggatcggctacagcgacacagcctggatctcctccatcctgctggccatgctctacgggacaggtccgctctgcagtgtgtgcgtgaaccgctttggctgccggcccgtcatgcttgtggggggtctctttgcgtcgctgggcatggtggctgcgtccttttgccggagcatcatccaggtctacctcaccactggggtcatcacggggttgggtttggcactcaacttccagccctcgctcatcatgctgaaccgctacttcagcaagcggcgccccatggccaacgggctggcggcagcaggtagccctgtcttcctgtgtgccctgagcccgctggggcagctgctgcaggaccgctacggctggcggggcggcttcctcatcctgggcggcctgctgctcaactgctgcgtgtgtgccgcactcatgaggcccctggtggtcacggcccagccgggctcggggccgccgcgaccctcccggcgcctgctagacctgagcgtcttccgggaccgcggctttgtgctttacgccgtggccgcctcggtcatggtgctggggctcttcgtcccgcccgtgttcgtggtgagctacgccaaggacctgggcgtgcccgacaccaaggccgccttcctgctcaccatcctgggcttcattgacatcttcgcgcggccggccgcgggcttcgtggcggggcttgggaaggtgcggccctactccgtctacctcttcagcttctccatgttcttcaacggcctcgcggacctggcgggctctacggcgggcgactacggcggcctcgtggtcttctgcatcttctttggcatctcctacggcatggtgggggccctgcagttcgaggtgctcatggccatcgtgggcacccacaagttctccagtgccattggcctggtgctgctgatggaggcggtggccgtgctcgtcgggcccccttcgggaggcaaactcctggatgcgacccacgtctacatgtacgtgttcatcctggcgggggccgaggtgctcacctcctccctgattttgctgctgggcaacttcttctgcattaggaagaagcccaaagagccacagcctgaggtggcggccgcggaggaggagaagctccacaagcctcctgcagactcgggggtggacttgcgggaggtggagcatttcctgaaggctgagcctgagaaaaacggggaggtggttcacaccccggaaacaagtgtctgagtggctgggcggggccggcaggcacagggaggaggtacagaagccggcaacgcttgctatttattttacaaactggactggctcaggcagggccacggctgggctccagctgccggcccagcggatcgtcgcccgatcagtgttttgagggggaaggtggcggggtgggaaccgtgtcattccagagtggatctgcggtgaagccaagccgcaaggttacaaggcatcctcaccaggggccccgcctgctgctcccaggtggcctgcggccactgctatgctcaaggacctggaaacccatgcttcgagacaacgtgactttaatgggagggtgggtgggccgcagacaggctggcagggcaggtgctgcgtggggccctctccagcccgtcctaccctgggctcacatggggcctgtgcccacccctcttgagtgtcttggggacagctctttccagcccctgggagacgggaataaacctgcgtgtgggtggagtgttctcgtgccgaattcaaaaagcttaaaaaaaaaaaaaaaaacaaaaaaaaaaaaaaaaaaacaaaaaagaaaaaaaaaaaaaaaaaaaaaaaaaaagggggggggggcgaaaaagacctctccggaggggccaccaactgggccccacgtgatcgaagaacaagagggggcaccactataagggaggggacagtaattataaaacacaggaggagcgtgacgggtattataaacacgcctgagcagaggagggaaaaaaaagttcgatgagatggtaatattgtaggggagagagaacgacatcaatagacggggggggggggcgacacattagggaggaggaaataatctgattgagagagagagaataggaagacgcctcgacgaggggaggagaatgtattaatagagtactgaaagggagaggaggagaagagggtgtgtaaaaaaaaaaaaaggagggtgtatgatgatgatggtagagaggtaggagagagaagaaaatgtgtcgagcatcaacgggtagaagctagaagtgagtgatatgaatagaagaaacattatttaaaaagagaggggggcgttagtgtttattgatatacaaaataagacggttaaaatagg

SEQ ID NO: 5753 - DNA, 1283 bp, Homo sapiens
  misc_feature (98)..(127): n is a, c, g, or t
cactcaggcagcagccccttctttcttgccccagtctccagttctccagtgttcacaggtgagcctaccaacagccactgctcatgatggaggccatnnnnnnnnnnnnnnnnnnnnnnnnnnnnnngacaaggagaatgctctggatcgggcagagcaagctgaagctgagcagaagcaggcagaagaaagaagtaaacagctggaggatgagctggcagccatgcagaagaagctgaaagggacagaggatgagctggaccgtgctcaggagcgcctggccactgccctgcaaaagctggaagaagctgaaaaagctgctgatgagagtgagagaggtatgaaggttattgaaaaccgggccttaaaagatgaagaaaagatggaactccaggaaatccaactcaaagaagctaagcacattgcagaagaggcagataggaagtatgaagaggtggctcgtaagttggtgatcattgaaggagacttggaacgcacagaggaacgagctgagctggcagagtctaagtgttctgagctggaggaggagctgaagaatgtcaccaacaacctcaagtctcttgaggctcaggcggagaagtactctcaaaaagaagataaatatgaggaagaaatcaagattcttactgataaactcaaggaggcagagacccgtgctgagtttgctgagagatcggtagccaagctggaaaagacaattgatgacctggaagatgagctctatgcccagaaactgaagtacaaggccattagcgaggagctggaccacgccctcaatgacatgacctctatataattatcaccgtttctgctctgttctggatctgccccctttactcctcggggaacccaaggccccactctcgctctggattccatttgggtcagcctggctggtccccaaggcattaggatgggggagcaaaaagcaacttatgtattttcttccacccccaccccaaattaaaatgttaagctgctggaagcctcatgccaccctgcatttgtgtcattgacaaagctgttgctgtccctaagaaggagccttgggggtgtgatgtggggaagagctattgtaggctccccctcctctgacttatgtaatcaaagccacttttgtgtgtgtctattttttcttgacatttaaactcagctgatctgattctaccagagtgatggatttagtacaggttactcaggatagtaattttagttatactcctcaagctgaacaagattaaattccttatttccaggttctt

SEQ ID NO: 5754 - DNA, 3609 bp, Homo sapiens
  misc_feature (2164)..(2180): n is a, c, g, or t
cgggaggaggtcccccgacatgcctgaggcaaaaccagcggccaaaaaggcccccaaaggcaaagatgcccccaaaggagcccccaaggaggctccccctaaggaggctcctgcagaggcccccaaagaagccccacccgaggaccagtccccgactgcagaggagcccaccggcgttttcctgaagaagccggactccgtctcagtggagactgggaaggacgcagtggtcgtggccaaggtgaacgggaaggagctcccagacaaaccgaccatcaagtggttcaaggggaagtggctggagctgggcagcaagagtggcgcccgcttctccttcaaggagtcccacaactccgccagcaatgtgtacaccgtggagctgcacattgggaaggtggtactgggggaccgtgggtattaccgcctcgaggtcaaagccaaggacacctgtgacagctgtggcttcaacatcgatgtggaggcaccccgtcaggatgcctctgggcagagtctagaaagcttcaagcgtacgagtgaaaagaagtcggatactgcaggtgagctggatttcagtggcctgttgaagaagagggaggtggtggaggaggagaagaagaagaaaaagaaagatgacgatgacctaggcatccccccggagatttgggagctcctgaaaggggcaaagaagagcgagtacgagaaaatcgccttccagtatggcatcaccgacctccggggcatgctgaagcggctgaaaaaggctaaggtcgaggtcaagaagagtgcagcattcacaaagaagctggatccagcctaccaagtggacagaggcaacaagatcaagttgatggtagagatcagcgacccagacctgaccctcaagtggttcaagaacggccaggagatcaaaccaagcagcaagtacgtgtttgagaacgttggtaagaagcgaattcttaccatcaacaagtgcacgctggcggatgacgctgcctatgaagtagctgtcaaggatgagaagtgtttcaccgagctcttcgtcaaagaacctccagtcctaattgtcacacctcttgaggaccagcaggtgtttgtgggtgaccgggtggaaatggcagtggaggtgtcagaagagggtgcccaggtgatgtggatgaaagatggtgtggaactgactcgggaggattccttcaaggcccggtaccgcttcaagaaggacgggaagcgccacatcctcatcttctcagacgtggtccaggaggacaggggtcgctatcaggtcataaccaatggcggccagtgtgaggccgagctgattgtggaagagaaacagctggaggtcctgcaggacatcgcggatctgacggtgaaggcctcagaacaagctgtgttcaagtgcgaggtgtctgatgagaaagtgacgggcaagtggtataagaatggggtcgaggtgcggcccagcaagaggatcaccatttcccatgtaggcaggttccacaagctggtgatcgatgacgtccgccccgaggatgagggagactacacgtttgtgcctgacggctacgcccttggttcgctctcggccaagctcaacttcctggaaatcaaggtggagtacgttcccaagcaagagccaccaaagatccacttggattgctcggggaagacctcagagaatgcgattgtggttgtggctggaaacaagctgaggcttgacgtgtccatcacaggggagccccctcccgtcgctacctggctgaagggagatgaggtattcacgaccaccgagggcaggacccgcatcgagaagcgggtggactgcagcagctttgtgattgagagtgcgcagcgggaagacgagggccgctacaccatcaaggtcaccaaccccgtcggcgaggacgtggcttccatcttcctgcaagttgtagatgtcccagaccccccggaggctgtgcgcatcacctcggttggagaggattgggccatccttgtctgggagccaccaatgtacgatggggggaagccagtcaccgggtacctcgtagagcggaagaagaagggctctcagcgctggatgaagctgaactttgaggtcttcacagagaccacctatgagtccaccaagatgatcgagggcatcctctatgagatgcgtgtcttnnnnnnnnnnnnnnnnngggtctcccagcccagcatgaacaccaagccttttatgcctatttgacccacgagtgaacccctgcacctgatagtggaggatgtgacagacaccaccaccacactcaagtggaggcctccgaacaggatcggggcaggtggcatcgatgggtacctggtggagtactgcctggaaggctccgaggaatgggtccctgccaacaccgagcccgtggagcgctgtggcttcaccgtcaagaatctcccgaccggagccagaatcctcttccgagtagttggggtcaacatcgcggggcgcacggagccggccaccctggcccagccggtcaccatcagggagattgcggagccacccaagatccggcttccccgccatctccgccagacctacatccgcaaagtgggcgagcagctcaaccttgtcgtccccttccagggaaagccccggccccaggtggtgtggaccaagggcggggccccgctggacacctcccgcgtgcacgtgcggaccagcgacttcgacaccgtgttcttcgtgcgccaggcggcccgctccgactccggggagtacgagctgagcgtgcagatcgagaacatgaaggacaccgccaccatccgcatccgcgttgtggaaaaggctgggccccccataaacgtgatggtgaaggaggtgtggggcacgaacgcgctggtggagtggcaggcccccaaagatgatgggaacagtgagatcatggggtatttcgtccagaaagcagacaaaaaaaccatggagtggttcaacgtctatgaacgtaacaggcacactagctgtactgtgtccgaccttatcgtgggcaatgaatactatttccgagtttacaccgagaacatctgtgggctcagtgactcacctggtgtctccaagaacacggcccgcatcctcaagacaggaatcaccttcaaaccgttcgagtataaaggagcatgacttccggatggctcccaagttcctgacacctctcatagaccgcgtggtcgtggctgggtactcggcagccctcaactgtgctgtcagaggccacccgaagccgaaggtggtctggatgaagaacaagatggaaatccgtgaagatcccaagttcctgataaccaattaccaaggagtcctgacgctgaacatccgtcgcccctcgcccttcgacgctgggacttacacctgccgggccgtcaacgagctgggcgaggcgctggctgagtgcaagctggaggtccgagtgccgcagtgagacctgtcccctacctgccaagacaattggtggtggagtcctgaccccaatccccaacctcccaggactgtgttctttctggagttttcgctgagaacaaaacagtgttgtctggaaaaaaaaaaaaaaaaaaaaataaaaaaaaaaaaaaaaaaaaaaa

SEQ ID NO: 5755 - DNA, 2288 bp, Homo sapiens
  misc_feature (839)..(841): n is a, c, g, or t
  misc_feature (843)..(846): n is a, c, g, or t
  misc_feature (849)..(849): n is a, c, g, or t
  misc_feature (852)..(859): n is a, c, g, or t
  misc_feature (862)..(863): n is a, c, g, or t
  misc_feature (865)..(866): n is a, c, g, or t
gggccggagtgcaggttcgggggtggaatccttgggccgctgggcaagcggcgagactggccaggccagcgagccgaggacagagggcgcgcggagggccgggccgcagccccgggcgcttgcagaccccgccatggacccgttcctggtgctgctgcactcggtgtcgtccagcctgtcgagcagcgagctgaccgagctcaagttcctatgcctcgggcgcgtgggcaagcgcaagctggagcgcgtgcagagcggctagacctcttctccatgctgctggagcagaacgacctggagcccgggcacgacctgctgcggcgcgtcgacgacttcgaggcgggggcggggccggggccgcgcctggggaagaagacctgtgtgcagcatttaacgtcatatgtgataatgtggggaaagattggagaaggctggctcgtcagctcaaagtctcagacaccaagatcgacagcatcgaggacagatacccccggaacctgacagagcgtgtgcgggagtcactgagaatctggaagaacacagagaaggagaacgcaacagtggcccacctggtgggggctctcaggtcctgccagatgaacctggtggctgacctggtacaagaggttcagcaggcccgtgacctccagaacaggagtggggccatgtccccgatgtcatggaactcagacgcatctacctccgaagcgtcctgatgggccgctgctttgcgctggtggaccacaggcatctacacagcctggactttggttctctccaggaaggtagcccagcactgtgaagacccagcaggaagccaggctgagtgagccacagannnannnntgnttnnnnnnnntgnnanntcaagctgcgtttattaatgcctctcccgcaccaggccgggcttgggccctgcacagatatttccatttcttcctcactatgacactgagcaagatcttgtctccactaaatgagctctgcgggagtagttggaaagttggaaccgtgtccagcacagaaggaatctgtgcagatgagcagtcacactgttactccacagcggaggagaccagctcagaggcccaggaatcggagcgaagcagagaggtggagaactgggatttgaacccccgccatccttcaccagagcccatgctcaaccactgtggcgttctgctgcccctgcagttggcagaaaggatgttttgtcccatttccttggaggccaccgggacagacctggacactagggtcaggcggggtgctgtggtggggagaggcatggctggggtgggggtggggagacctggttggccgtggtccagctcttggcccctgtgtgagttgagtctcctctctgagactgctaagtaggggcagtgatggttgccaggacgaattgagataatatctgtgaggtgctgatgagtgattgacacacagcactctctaaatcttccttgtgaggattatgggtcctgcaattctacagtttcttactgttttgtatcaaaatcactatctttctgataacagaattgccaaggcagcgggatctcgtatctttaaaaagcagtcctcttattcctaaggtaatcctattaaaacacagctttacaacttccatattacaaaaaaaaaaaaaaaaaaaaaagaaaaagaaaacaaaaaaaaaaaaaaaaaaaagaaaaaccagaacaagaacaaaaacaagacaaagaaacaagcaaaacaacaaaaagagcggggcgcacacagagacaaaataccgccgacgaagggaggccaagactaacagagaacaaacagagtcaagtactaacaaaaagaagggacccacaaaaacaagggaagccgacgaaaaaccacaaagagcgagagcgcgaaagggcggccgcggagagataaaaacaacagacagcggacgacgggaggaaaacagaacagacgcacaacgaaagatacacgcgggggagaagacgagaacaaccaaaacggggggagggggacaaacaaaaataaaacaatggtggtgagaaacagaaaagactccacagccccgaaagaacgattaattagtaaacaccaaattatgtgaggaagaaaaacatcaaacatcaccgccataacgagatatgaaccaaaggtagataggcataaacacgacagagctgagatggcaaattcgaatactgggtgaacggtcaagataagactaaatctctctgtgatctatctactgattaattgactatcatatggcagcgccaaacattgtatcg

SEQ ID NO: 5756 - DNA, 4335 bp, Homo sapiens
tcagacatggcggcggatctaaacctggagtggatctccctgccccggtcctggacttacgggatcaccaggggcggccgagtcttcttcatcaacgaggaggccaagagcaccacctggctgcaccccgtcaccggcgaggcggtggtcaccggacaccggcggcagagcacagatttgcctactggctgggaagaagcatatacttttgaaggtgcaagatactatataaaccataatgaaaggaaagtgacctgcaaacatccagtcacaggacaaccatcacaggacaattgtatttttgtagtgaatgaacagactgttgcaaccatgacatctgaagaaaagaaggaacggccaataagtatgataaatgaagcttctaactataacgtgacttcagattatgcagtgcatccaatgagccctgtaggcagaacttcacgagcttcaaaaaaagttcataattttggaaagaggtcaaattcaattaaaaggaatcctaatgcaccggttgtcagacgaggttggctttataaacaggacagtactggcatgaaattgtggaagaaacgctggtttgtgctttctgacctttgcctcttttattatagagatgagaaagaagagggtatcctgggaagcatactgttacctagttttcagatagctttgcttacctctgaagatcacattaatcgcaaatatgcttttaaggcagcccatccaaacatgcggacctattatttctgcactgatacaggaaaggaaatggagttgtggatgaaagccatgttagatgctgccctagtacagacagaacctgtgaaaagagtggacaagattacatctgaaaatgcaccaactaaagaaaccaataacattcccaaccatagagtgctaattaaaccagagatccaaaacaatcaaaaaaacaaggaaatgagcaaaattgaagaaaaaaaggcattagaagctgaaaaatatggatttcagaaggatggtcaagatagacccttaacaaaaattaatagtgtaaagctgaattctctgccatctgaatatgagagtgggtcagcatgccctgctcagactgtgcactacagaccaatcaacttgagcagttcagagaacaaaatagtcaatgttagcctggcagatcttagaggtggaaatcgccccaatacagggcccttatacacagaggccgatcgagtcatacagagaacaaattcaatgcagcagttggaacagtggattaaaatccagaaggggaggggtcatgaagaagaaaccaggggagtaatttcttaccaaacattaccaagaaatatgccaagtcacagagcccagattatggcccgctaccctgaaggttatagaacactcccaagaaacagcaagacaaggcctgaaagtatctgcagtgtaaccccttccactcatgacaagacattaggacccggagcggaggagaaacggaggtccatgagagatgacacaatgtggcagctctacgaatggcagcagcgtcagttttataacaaacagagcaccctccctcgacacagtactttgagtagtcccaaaaccatggtaaatatttctgaccagacaatgcactctattcccacatcaccttcccacgggtcaatagctgcttatcagggatactcccctcaacgaacttacagatcggaagtgtcttcaccaattcagagaggagatgtgacaatagaccgcagacacagggcccatcaccctaagcatgtctatgtgcctgacagaaggtcagtgccagctggcctgactttacagtctgttagtccccagagcctccaagggaaaacgctgtcacaagatgaaggtagaggcacattatacaaatacagacctgaagaagtagatattgatgccaagttaagccgattatgtgaacaagataaagtggtgcatgctctggaagagaaacttcagcaactccacaaggagaaatacacgcttgagcaagctttgctatcagccagccaagagatagaaatgcatgcagataacccagcagccattcagacagtggtgttacaaagggatgatttacaaaatggactgcttagtacgtgtcgagaactttctcgagccactgccgaattggaacgagcatggagagaatatgataagttagaatacgatgtaactgttaccaggaaccagatgcaagagcagctggatcaccttggtgaagttcagacggaatcagcaggaattcagcgtgcacagattcagaaagaactttggcgaattcaggatgtcatggaagggctgagtaaacataagcagcaaagaggtactacagaaataggtatgataggatcaaagcctttctcaacagttaagtacaaaaatgagggtccagattatagactctacaagagtgaaccagagttaacaacagtggcagaagttgatgaatctaatggagaagaaaaatcagaacctgtttcagagatagaaacttcagttgttaaaggttcccactttcctgttggagtagtccctccaagagcaaaatcaccaacacccgaatcttcgacaatagcttcctatgtaaccttgaggaaaactaagaagatgatggatctaagaacggaaagaccaagaagtgcagtggaacagctctgtttggctgaaagtactcgaccaaggatgactgtggaagagcaaatggaaagaataagaagacatcaacaagcgtgcctgagggagaagaaaaaagggttaaatgttatcggtgcttcagaccagtcacccttacaaagcccttcaaatttaagggataatccatttaggactactcagactcgaaggagggatgataaggaactggacactgccattagagaaaatgatgtaaagccagaccatgaaactcctgcaacagaaattgttcaactaaaagaaaccgaaccccaaaatgtggacttcagcaaagagttaaaaaaaactgaaaacatttcatatgaaatgctttttgaacctgagccaaatggagtaaattctgtggaaatgatggataaagaaagaaacaaagacaaaatgcctgaggatgttacattcagccctcaagatgaaacacagaccgcaaatcataaaccagaagagcatcctgaagaaaatacaaagaacagtgttgacgaacaggaagaaactgttatttcttacgaatcaactcctgaggtttctagaggaaatcaaacaatggcagtgaaaagtctgtccccatctcctgagtcctcggcatcgccagttccatccactcagccgcagctcacagaaggatcacatttcatgtgtgtgtagtcttagaagaactatactgacttctgttgaaaccattcaaagctaaagacatggaccttcagcagtgtaagaagatattgtacagtatattttaaatctatgaaattcatagttctgatgcttttggtcacagagcatcattttatcacttctggaaaatgtttattccaaaacagctttaatggcccatatgtacacttcgtaatctcaaggttattattctgacaccagcttgctgctatgatttcagagcacataagtaaaggtgctttttaatgtgcagtctatttccagagcttacttagttgctgatttccagatttcgatgtttcttaagtctaggtgaatttatatatatatttttttgcttttcattttctaaagttagttattatttccattgaagcttgttttctttttttcttcccattttagctactgcagtgcttttgtttcacacttgatttgtaaaaattttatatatatgtatttaaaatgtgccattttattgctaagtgaagtatgtcctgttttctgctataattctttctcggtcagattgcaatgtcagcagttactgccacactcctgtcagcttaaacacaaatgttactgcttatcttttcttaaaaaaaaaaaaaacaaagtgtaggtattttgaagtactgggcttatatttcattggaatacatgtgtacagcaataagcaggtttccaaatccggtacttagtttgtgtacaaatgtaattatgttcattgtgtatatattatacaatgagcacatgtaatgtattaaaggctacttactattgtttaaatgcaaatgttcatatctcatttctttttttatcatgttaaataaatgttgatgttcttaaaaaaaaaaaaaaaaaaaccaaacacaaaacatttgttgggggcgccggcacaaaaaaatttttaaccctcgtgtggggggggcccaaggtatgtgcaca

SEQ ID NO: 5757 - DNA, 1283 bp, Homo sapiens
gggattacaggcgtgagccactgcgcccagccttgaggtagcatactttctgaaataaaaaaagtagattatgtccgaagcagttgacctaaaaactgccttggactgacatttgttaggtggtctaagatgttctcttcacgcttgcaaaaaaatgagctttttggagtttaaattaagcatccctctggtgtgttggttttttagccaccaaaaatttaacaaatttgataacctgtcacgtgtaagttcagaaagcacttggtcttaatggtgacttgggggttatttggtataaatataggttctttttctaaaaattattgccagtatcctccaaataattgccccttcaaatgtttcatctaaaggtgacagcttgtgggcagaaccatgcacaggaagtgcctgccagtgggtgttaggagatgtaggtggagtctgtgatagccaaccaaaagctatccccttctcgcccagaaaagccacgtgctttgctggacgctacttgaaatctgaactctgcacctacatatgtagtaaaattagagacttttgtcactttaatttttagattatctcaagttttcactagatttcaatgtgccacttgtgctatgagtctttaagaagctttaaaaaataaatgcacacctgtagccttttaccattcagacaggtagattatatttacctgtcatgagggaccatgtatggttgacagttgcaggtttgattaaatccactatattgcacaaattttgctggaaataatttcctgccctgccaagagctctatggtagtttgataataaactactaccccagtattcttaggaactgtgttactaagtcttttctgcctgatttgtactttatttccatagacccctcagatatgtgaggaatcaagccataaatgtgcatttgctggacattatgtaccatgtcatctctatgactacagatttcaaggataatttttacatctaacaatttcactgtaacagtgaccgataatgtgagaaatgtgctttttacagtgctgctggtgggtagacaagtgcttgctgcagttgtttctgaatctagccagatgctggagtcgtgaagctgtaagctccgcgggagcagggaccatctctctttcttgcactacaggcactcaataaatacttgtggctgtgaaaaaaaaaaaaaaaaaaatttttaataaatcaggataaaaaaactcgaggggagccccgttaccaattcgcccttattaagtcggtttaaattct

SEQ ID NO: 5758 - DNA, 1575 bp, Homo sapiens
  misc_feature (93)..(93): n is a, c, g, or t
aatatcccggatatagtaaatcggcttcggtggctaggagcagctgtgctgcggctgtgctcggccttagtggtgtcggggtctagtgagcangagaagatcttggccaggcagatggcttctcggtggcagaacatggggacctccgtgcgccggagatctctccagcaccaggagcagctggaggacagcaaggagctgcagcctgtggtcagccatcaggagacctctgtaggggccctggggtccctgtgcagacagttccaaaggaggctgcccctgagagccgtcaacctcaacctccgcgcagggccctcctggaaacgcctggaaaccccagagccaggtcagcagggcctccaggctgcagctcgctcagctaagagtgctttgggtgccgtgtcccagagaatccaggagtcctgccaaagtggcaccaagtggctggtggagacccaggtgaaggccaggaggcggaagagaggagcacagaagggcagtggatccccaactcacagcctgagccagaagagcacccggctgtctggagccgcccctgcccactcagccgcagacccctgggagaaggagcatcaccgcctctctgtccggatgggctcacatgcccacccattacggcgatcaaggcgggaggctgccttccggagcccctactcctcaacagagcccctctgctctcccagcgagtctgacagtgacctagagcctgtgggggcgggaattcagcatctccagaactgttccaagagctagatgaagccattatggcggaagagagtggtgacatcgtctctctcattcatgactgaggaagtgcctgcaggaaacaagccctgtctgaccgccaaggcttcatactcaaggatgtctatgcttccccgtgagcttcctggaaaaaacccccgggagtcgtcagtacccctgggccactgctaacaagcacctaacaaggggcccagagccccctgctccagccacatctggacccatcagtgactgcctgccatagcctgagagtgtcttggggagaccttgcagagggggagaattgttccttctgctttcctaggggactcttgagcttagaaactcatcgtacacttgaccttgagccttctatttgcctcatctataacatgaagtgctagcatcagatatttgagagctcttagctctgtacccgggtgcctggtttttggggagtcatccgcagagtcactcacccactgtgtttctggtgccaaggctcttgagggccccactctcatccctcctttccctaccagggactcggaggaaggcataggagatatttccaggcttacgaccctgggctcacgggtacctatttatatgctcagtgcagagcactgtggatgtgccaggaggggtagccctgttcaagagcaatttctgccctttgtaaattatttaagaaacctgctttgtcattttattagaaagaaaccagcatgtgactttcctagataacactgctttctcataataaagactatttgcatttgaaaaaaaaaaaaaaaaaaaaaaaaaaaa

SEQ ID NO: 5759 - DNA, 4667 bp, Homo sapiens
  misc_feature (20)..(21): n is a, c, g, or t
  misc_feature (72)..(73): n is a, c, g, or t
  misc_feature (213)..(213): n is a, c, g, or t
  misc_feature (216)..(218): n is a, c, g, or t
  misc_feature (275)..(276): n is a, c, g, or t
  misc_feature (287)..(287): n is a, c, g, or t
  misc_feature (397)..(397): n is a, c, g, or t
  misc_feature (455)..(456): n is a, c, g, or t
  misc_feature (582)..(582): n is a, c, g, or t
  misc_feature (597)..(599): n is a, c, g, or t
  misc_feature (607)..(608): n is a, c, g, or t
  misc_feature (616)..(619): n is a, c, g, or t
  misc_feature (621)..(630): n is a, c, g, or t
  misc_feature (643)..(643): n is a, c, g, or t
cgccgggtcggcggccgggnnccgcccccccgccgggcgccgggcccgcgccggcgcggccccccccgcccnnccccgcgggggcccccggggggggcgcgcgcgcgccccccgccgccgcggcgcccgcgcggcccggcccgcgccgcccgggcgcccgggggcggcgcgcccgggggccgcccccgcggcggcgggcgcccgcggggccgnggnnnccccggggcggggcgggggcgcgccccgcccgccccccccccccccgccggcccggnnggggggccgcncgggcccccgcgcccgccgccccggccccgccggccccccccgcgccccgggccggggcggcccgcccccggcggcggggggccgccccccccccccccggggcccggcnccggcccggccgcgggccgggggggggcccccccgggggccccccgccccgccccccnngcgggccccggcgggggcgccgcgcgggggggcccccccgggggggcggggggcggcgggggcggggcgggcccccgggcgggggggcgggggggccccggggcccgcgggggcggccccccgggnccccccgcccccgcnnnccccccgnnccgcccgnnnntnnnnnnnnnngactccccattcnccttcccttggattcttctccttactcaattttcccttttttttttttttttttggcagaagacatgtttaataacattttcatatttaaaaaatacagcaacaattctctatctgtccaccatcttgccttgcccttcctggggctgaggcagacaaaggaaaggtaatgaggttagggcccccaggcgggctaagtgctattggcctgctcctgctcaaagagagccatagccagctgggcacggccccctagcccctccaggttgctgaggcggcagcggtggtagagttcttcactgagccgtgggctgcagtctcgcagggagaacttctgcaccagccctggctctacggcccgaaagaggtggagccctgagaaccggaggaaaacatccatcacctccagcccctccagggcttcctcctcttcctggcctgccagttcacctgccagccgggctcgggccgccaggtagtcagcgttgtagaagcagccctccgcagaagcctgccggtcaaatctcccccctataggagccccccgggaggggtcagcaccaggaggggagggggggtcagggccagcccccgggggccctgggggtgatctctgtggtgacagggcaggattgaactcctggaaatggactggaaagaaggcctgccagccagagatggcattcatgcgacagcggttgaggacttcgggcccaggccttgtccacacggtggtaaggaagaagagagtgtccacagggtgcttcttcgagaccacgtccatgagtcgcacctgggaaggggcctctgctcgcacagcgagccaggccagcctcgtcccagggtaccgtcgctctaactccgctgctgcagccttcaccccaagaaatgggtctggagctccacggccaccttctcgtggcccgtagaccagcaacagggtgagcaatgcatgttctcgtggcagggacattggctggcaaaggccttgaggaaaagccggggctgcagcagcttcagccaccaggagtggcagcaccagctgcactcgggtggcctcagtgacatagggcataggtaggatttccacccggctcagtggccgcagcaggctgaccctgcgagccagggcccgccggtgcccacgctgtgtcacacattccaacagcaggtccagggtgtactccatgccccgtgctgggtcgaagcgccgatagccgttgagcagtcgctgcttctggaagcgcaggcggggctgatagcgccgattgagctgctccagggcagtctccaacgcatcacccacgtccgccctgctagccccctgtagtgggcacttgggagccccatctgcacaggagaaggtgtgctgctctgtgaagtagtcccagcccagcacctcaaagcgagagtgtggtgtgaaaggagcagggagcccaacgggccagctcagccctgcctccccttcgggggtcagcacggtcaggttccggatctgagcctgcagttgttctatttcactgtaagcccgctccaactccagagcgctgaagcgtttgtggagccggtacatgagggtaccttcggagacagggtgcacggcgaaggcactcaggaaagccgagctcccttccttctcagggtccctatttttggccagttcaaatgagcgatactgctgcccctggtgctgtgagacacagccgacgcccagagagtcaatgaggcagcgtccaagccactcgtcaggacgggcactgagaatgtctcctcggcagccatccagatgtggccgcagacgaagcaggagactccgtgacaacaggtagccaaagcccccatgacagtaccgggcctgctcgcctgcgccaatgaactcctctgcccggcctaagtacaggtcttggttgatgctgaggtggccagcaagggctgccaggcggggggcctgcacatatgtgtcatcctgcatgatgaagaaccagtcgtagtcggccccaaagtgtgtgtgaaggtggcgcagggtctctgacatgagccaggcgggccgctcatccccatgagacaccacctgcatccctgctggagcccgggccccccgctgcccagtgaagtagagtaaccgagggaagtgatgggccaccgtacggttcacagccacggccaaagtggacagtgtagctcgggaggtcaggacagccaccagcaaccgctcacgggagcccagctctgtctggatgtaccgagtcctgagcaccttcttgtagggcttgttggggtccctgtagtaggggacaatccggggtttgaagtcttcatcactttggtctagccgagctctggaatctggattctgtggccctcctcgctcccctacagcctcgacacagggatcttctccctccccctggatccaggaaacccgcaggaggctcaggctgcaccccagagacagccctaagatgaggggaagcgctggccgcagcagagccaacagggagctcagtcgcatggtggtaggccctgccaggtgggtgccccaggggcacagcctcaaggatcaatggattgatgggcaccaggccagtagtaggctttcagttttaaccagagaacctggggtcaatgaggccaaagacagagcgaggcccgctggcttccaggaccagcatccccaagaagattgtcctgtcttcacaactccttctgcctgctcttcaactgtgaaggtgtcggaactaacccccagccaaaacggtaataaatgaaacaatcaatttcactcacactgggattatggtctgtcttccactaaaaagaggaggaagtaaaactcaatactgccaaagctaacccaaaaaggaacactacacacatctgcagactgggcctaagtcaacagatgacagcaagtgataagaggtaagggaaaagcacacgatccatcaaaacaacagccccaaccagaggagccggagcctgcctcagtgggcctttccggaagaatgcctgcctctggcatcggtcctcaggcgggctactgaaggggctgctgagccactgcggcaggcccggtgggcacaagggaaggggccagagcctctttctactctgctccccgtgtttgagaagacgcaacggctacaggaacccctcctcccactcaggagcggtctggagccactcgcatggcacacataagttctgcccacccgaatgaggtagatcggtgactcagcactgacagcctctcaggagcgccatggccgatggagccatcttgcagggcattctcctcggaaccccagctgctgaggagacagcaggcggggactggaactctgtgtgcgagcgattcggtgcctggttttaccagggccccaggggccaaatgaagcaaaccaaaagcaaagagagagcacaagcagcaactagagacaatgccagggtcctgggaacgcaaacagaagcgcggccagcttccgacaggacccctgccgggggcccacagcccctgcgctacctctcggcgatcagagaccaagtctagccctagaacgaagacccgacgcgagtcttcgccgttcgtctcaaaacagaaataaactggccacgtcaccgggctgctgagaagggggctcgggagaccagctcgggtcgttctgcgaggcggggtcggaggtcgcggctgggagactggggcacagacctcgttctcaggccagtcggcgggagcggaggccgcgccagagacagcatcgaggccgcgagcgcaggaccaggagggacgcccaaggccctcggggaggaggcccgggtttcagggccgggggccggcggacaccggataaaggacggccggggtctcccggcgtcccgggagggggcggggcggaggcgtggggaccaagagcggcgtcccgcacgcgcctggcagggagcagggacggggaagggggaacagaccccagtgcccgctgaggcgccggctccgccgctgcagccgctgccacctcacagcccct

SEQ ID NO: 5760 - DNA, 3119 bp, Homo sapiens
  misc_feature (2091)..(2123): n is a, c, g, or t
ggcacgatgccggctcggagtgtgatctaagcaggtcgcgtaccttcctcaggtgactccggccacagcccattgtccgcggccaccggcggagtttagccgcagacctcgaagcgccccggggtccttcccgaacggcagcggctgcggcgggtccatggagaagggccctgtgcgggcaccggcggagaagccgcggggcgccaggtgcagcaatgggttccccgagcgggatccgccgcggcccgggcccagcaggccggcggagaagcccccgcggcccgaggccaagagcgcgcagcccgcggacggctggaagggcgagcggccccgcagcgaggaggataacgagctgaacctccctaacctggcagccgcctactcgtccatcctgagctcgctgggcgagaacccccagcggcaagggctgctcaagacgccctggagggcggcctcggccatgcagttcttcaccaagggctaccaggagaccatctcagatgtcctaaacgatgctatatttgatgaagatcatgatgagatggtgattgtgaaggacatagacatgttttccatgtgtgagcatcacttggttccatttgttggaaaggtccatattggttatcttcctaacaagcaagtccttggcctcagcaaacttgcgaggattgtagaaatctatagtagaagactacaagttcaggagcgccttacaaaacaaattgctgtagcaatcacggaagccttgcggcctgctggagtcggggtagtggttgaagcaacacacatgtgtatggtaatgcgaggtgtacagaaaatggaccacccaaatccggggccagcacaatgttgggtgtgttccgggaggatccaaagactcgggaagagttcctgactctcattaggagctgagcttcattcagtgtgtgtgcgttggttgccgatcgtactgccagtagcattgtctgtctgtccggtcttgtttgtacattccattttcaattgttacagatgtgaactttattccttgtcactaattatatttaaaattatttctaggaagtcaaataaatataataaagggttgagccctctactttcttcttgccacctttttgtggcaatattaaagtgaactgctaatagtgtaagtacgtgcacaaaaccactgccagataaccagaggggcctgggaagggagaagaattagtgtatttttttcaaatagtacagtaatttgcctcataagcataggagcattgggaatgagagggaactgtgcccagtatactgttttttttcttcctccaataaaagtggtgtagtgccgaaagtgctaaaatatttagtgcggtattgctctgtgaattcaagttcaacagacttcactttggtcatgtttattaaaccaccagtgacatttaaaaatatatttttagcagtcgtaatgttagtcaccaagggaaggtggtggaatgtctatgtttttgattttactgtgagttaaaaaggcacatttctaccttctattgtttttaaattcaagaatagggaattagttcctggtgttgtttacgagtgtattctcgtgtcaacatacagggatttagacatttaactctctgtgccttgataagaatatcatttagagtgtagatacttttgcctttttaaaaaagccattattttatgagacttagtactcacactgcaaataactagtcagctcagttttaactttataggtttattgagtttcctttatatgatccatatagatacctcaaaatatttcttcttcttcttttttttaatcttataagatatttttctaagtatttccagaaacatttgagagtgcccatcattttcaggtctgcagaaccatagcttccacgcacctgaacgagcacagaatgaactgacggtggaagacattatgagctgtgtccaacgttttaaccaaagcgtatcgtaccaacgatctgtgaaaatgcactggaagcttctggtcccggtttcctttgtggtctatgtgggtcttgtcctcattgtaactccgtatagatggtataggtattttaatccccnnnnnnnnnnnnnnnnnnnnnnnnnnnnnnnnnaaatttcctccattggggcagcgtgggccaaattaaaacaaacaaaaccgcaactcctccacagaaacacaaacacagttattccatgaagtttagtatttggttgacatagtgctcttcaaattcatcccattaccctaaaagtaataactttgatgcttgctttaactttagtcccatctctgccactttgatgctatttgggttatgatggggcaagatggcagaggtattgggtttttttgtttttttccattcctctctacttctgtttcctagctttttctttctggagtttaagtacagtgatggttggcttgagtacctttttaaatctagcccagtataaacattagcctgcttaatatttagacatttataggtagaattctgagcactcaactcatgtttggcattttaaagtaaaaacaagtgtgacttcgaggaccaaagaaattgtcagctatacatttatctttatgaactcatttatattcctttttaatgactcgttgttctaacatttcctagaagtgttcttataaaggtctaatgtatccacaggctgttgtcttattagtaaatgcaaagtaatgactttgtctgttttactctagtctttagtacttcaaaattaccttttcatatccatgatcttgagtccatttgggggatttttaagaatttgatgtatttcaatacactgttcaaaattaaattgtttaattttatgtatgagtatgtatgttcctgaagttggtcctatttaaattattaaactattgtaactttaaaaaaaaaaaaaaaaaaaaaaaaaaacaagcagtcagtgctgcaagcccaacgttctgggggtgaccaagacacgactgcccgtctgtgctggccctattaaggactgggttcggagattctttactgacctggacctgaaaaactcaggggttcacaaacttaaatgcctagcaaccttaccgttttcagaggggaggagca

SEQ ID NO: 5761 - DNA, 466 bp, Homo sapiens
  misc_feature (17)..(17): n is a, c, g, or t
  misc_feature (26)..(26): n is a, c, g, or t
ctagaagttttatggcntgggatttnatgtttaggtctgtgatccatctccaaattaatttttgtgaacagaatgaggtttggtttttttccagcatggatatacagttgttccagcaacatttacttaaaaagacttttctttacccattagattgacttggtagcttggttaaaaattgatcacgtgtgtgtgtatttctacattttctgttctgttccattaatctatttgtgtatccttacatcagtaccacactttggattattgaaactttctagtaagtctttaaattagtaaatccttcctttttgttatttttcaagatcgctttggttattgtcgattctttggattgtcataaaagttttacaattagctcatcttgtttttcaaacgtagatgtgctgggttagctgtgttcatgccactgcattccagcttgggtgacagcaagaccctgtca

SEQ ID NO: 5762 - DNA, 4776 bp, Homo sapiens
  misc_feature (1395)..(1414): n is a, c, g, or t
aaataataaagaaattgaaaacaatacattaatataccataacactaaaaagagcaggagcgagagatgagaaagggaatccagcccgctctggagcagtacctggtgaccgccgggggtggggagggggcggctgtcgtcgccgccgccgctgcagcctccatggacaaaagggcactgctagccagccccggcttcgccgccgccgccgccgctgccgccgccccgggcgcgtacatccagatcctcaccacgaacacttccaccacctcctgttcctcctccctccaaagcggcgccgtagccgccggccccctcctccccagtgcccccggcgcggagcagaccgccggcagcctcctctacaccacgccgcacggaccctccagcagagccgggctgctgcagcagccaccagcgctgggacgcggcggcagcggcggcggcggcggccctccggcaaagcgaaggctggagctaggagaaagcggtcatcagtacctctcagatggtttaaaaacccccaagggcaaaggaagagctgcactacgaagtccagatagtccaaaaactccaaaatctccctcagaaaaaacgcggtatgatacgtctcttggtctgctcaccaagaagttcattcagctcctgagccagtcacccgatggggtattggatttgaacaaggcagcagaagtgctaaaagtgcaaaagagaaggatttatgatatcaccaacgttctggaaggcatccacctcattaagaagaagtctaaaaacaacgtccaatggatgggctgcagtctgtctgaggatgggggcatgctggcccagtgtcaaggcctgtcaaaagaagtgaccgagctcagtcaggaagagaagaaattagatgaactgatccaaagctgcaccctggacctcaaactgttaaccgaggattcagagaatcaaaggttagcttatgttacatatcaagatattcgaaaaattagtggccttaaagaccaaactgttatagttgtgaaagcccctccagaaacaagacttgaagtgcctgactcaatagagagcctacaaatacatttggcaagtacccaagggcccattgaggtttacttatgtccagaagagactgaaacacacagtccaatgaaaacaaacaaccaagaccacaatgggaatatccctaaacccgcttccaaagacttggcttcaaccaactcaggacatagcgattgctcagtttctatgggaaacctttctcctctggcctccccagccaacctcttacagcagactgaggaccaaattccttccaacctagaaggaccgtttgtgaacttactgcctcccctgctgcaagaggactatctcctgagcctcggggaggaggaaggnnnnnnnnnnnnnnnnnnnncttacgatttggaaaagctcccactggtggaagacttcatgtgtagttgattatgcttcgtgtgaactctccttaaaaaccgatatttttttatcatggaaccagaacatctgtcatgcagtgttgtcccttcctaccttcttcctccaagagagtatcatgaagtaaactacaaacttcagaagaaagctgacattttaatgaattttttaaaaaattaataaacaaattgtctaaacgcacagttgcaggctcccttgggaaagccctgctttgctccaggctccaagatctcctggctaagtcagcaagtgagaaaatgtgcaatcaggtgtctctcaccccgaattgtccttcctccttcctccccggattggcttgctgtgcctgacggatgggctgtagaatggggtctggccacctggcctgctgggaaacagcaatcttccttaatagcatttcaagccgtgccttctccgcagaatgcatgtctttgaggtctgctaatatggaatggaactgcagcaaatgcaaacttgaagtcatgcaaaagtatgaaatggatttcttcagctcttcttaggaatatttaaattactgtcataattcagtttaagctatgaactgtgtgtcccagtaggaggtcaagaaaacctccacagccttctggatgaagaacctgttttcaaatatacttgttgcagatacagaagactagtagagttctgccactctaagctgttgtggattttcctgtctccatgaaccactcccattcccccgtccccaatgtgtttgtgagtttccagttgatttgtagcaaatgcctacttagttctttgtggattgttctagacttttaatttttttagctgccatttaagcattcctgtggcacccatcaccatttcaatttaattgtttactttgaagcggtttttgcaaattcatattacttaagcagagggagagaacctctactgatcagagcatctaaacctgtgtgatctaaggtttatcagcctctgcaaggagctttgtcccatcgtgcttccattcccaggagggggagcttggagcgagtcagtcctggggcttgctgacatgggtggcccattggaaaggagaaccaggtcagatgatgtaacagccccaaggagcagcaggcatgggtccctccatccttgggcttcccgggcccctgtgacaggggaaagggctctcttacaccgcactcagggagaccacttctcaggatggggtcagatggagagacctctagggagaaagacatccccattgtgtgagtggcatttccttaagctggcaggaacagggagcagccctgtgtcgggggctggaatagttctggccagaccccgttccccttcctctatgaaggaataagttggaccaagggaagtcggggacgtaaaaaatgaagcaaaacaatgccagggtgtctcccgctttactcttcaggaatggtgtcccaagttggaggctttgtgtcagctgcaaatcctaccagttatgtccaagaatggctttccctcgggcaggtggcagcggccatctcccactgggaatatggcgtagtatctccggtccattccttggatgctaaggactgcgggaatgagggagtcagataaagaacaaacctcgaaacgaacagttaaattgaaatgctatgtgcctgacccaatggtaggcacatagtaggcactcaactcatatgtttaattgaattgaaaatatcccttaggaaaaaaaaaaaacacacaaaaaaccacaagagccccagccagtttactccaggtagatttccacaatatgcaaagtggtggtggggtcaagacagatgacaccagcactttaaactctttgtgtgggtatgcgtgggtgtatgtttgggaagaaaaacaaaggtgcagactatcttcctttttttcttcttcagcctccatccctggcctcctcccctcacacacactggacttggtacaaaatgtcggtgtggtcctagatgaagcattggggtgggggagggagagggagctttgtgttaagtgcctactggaaatgcactgtggggttttttcctgtatgggaaaccatttatgccaagcttttccccatttcccatatttatctcatctggttagctgcctctgcttccagctttgtgtaattctctttgccagctgcacaaagctgattttttccaaagtctaaagactgagctcacctggctagattgttgtgtgttttgttgaattttttcataatgtaatgccgtatttattgtttttaaaatgaaaggaatactaataagtcttaaaagttccttcatgcataagatttttttccagttactgggcttaactggtgtacattaattagatgtccatactgtattttgtttgcattaagtaattttctttttgacttagtatccggcacacaaagtgggttagtactacagtatttgcgttactttaagtactaagtatgcaggtttcctggtaccattgagttgctgctattaaagctcacacacgaaatggctaaaagttacaagtgtgcaaattatgactgcgtgagccttagaaaataaaatgtataaagggcaacacatgagctgtcaaacagtgttaggagtgtgtttatatgtacagagttgtgcatagcaatcgttttatttaagttgatatgtagtctactcacattttcattatttagcaattttgtacaaaaatagcaattaatttgtaaacactgccagaatactttctagctgctttgtaattttttaagagtgttattttgtttttgtttttctgttctttgttgtggctcttgttttcatttttgttgtacgtgtagatctgtaaataaaattgcagtatttaaagcttaagctttcaggaaaaagaaaataagaattcagtgtgtgcatgacaactcgtgtgtatgagaaggagggatatgaaggaagatggcttgcagagtaagtcgggtggcaattgtcagggtgtgggaatttcttttcctacggggtacgtgattttgtaaaaaggaagtatttctcccaaaattgggagtaggcaaactactaatcagtttagctttgtgttgtatgctagtttaaaaaagaaaatatgtaatataatgtaaaaaaaaacaaaaaaaagcttttatgatggattttgtaaatagatttgttacagggtgacctgttctctagctgtgatcttaccacttcaaatgggtgtaatttgaataaattttgtatggtaaaggatcaataaaatgattttttttaagagttaaaaaaaaaaaaaaaaaagggggcggcc

SEQ ID NO: 5763 - DNA, 7932 bp, Homo sapiens
gttaacaaaaggattaatgggttgcttaaattagtgagcttcatcagttttatttttaattccttgagataatgaattttaaaagcaataaatacaatgctgtagtttttgacttcttttctaaatatttacatggatttacatgaaagaactaaagagatagtatttgtggaaccaatttaaactcttacatgcctttcaggatttgggaatgtattaacacctgctgctttgtatccagtctaagggagcctatttgtttgttatcacattgacttcctttgatgtcttttagtgttaccctcactcagacccaaggattatgtcttttggggctcccatcatcctgagctagagacacgtgacaggggtacactctcctacaaaaccagccagttactcagtaaagtggacgatagaagaaaaagagctgtttgaacaagggctggctaaatttggccgaagatggaccaaaatttcaaagctaattggaagccgcactgttttacaagtgaagagttatgcaagacagtattttaaaaataaggtcaaatgcggtctggataaagaaacaccaaatcagaagaccggccataatcttcaagttaaaaatgaagataaagggacaaaggcatggacaccatcatgtttaaggggacgtgctgatcccaacttgaatgctgtaaaaattgaaaagttatctgatgatgaagaagtagacatcacagatgaggtggacgagttgtcttctcaaacaccccagaagaattctagcagtgatctcttgttagactttcctaatagtaaaatgcatgaaaccaatcaaggagaattcattgcttctgacagccaggaagctctcttttctaagtcttccaggggctgtcttcaaaatgaaaagcaagatgaaacactttcaagctcagaaattacactgtggactgagaaacagagcaatggtgacaaaaaatcaattgaattaaatgaccagaaatttaatgaattgattaaaaactgcaacaagcatgatggaaggggaataatagttgatgccaggcagttgccttctccagagccttgtgaaattcagaaaaatttgaatgataatgaaatgctttttcattcttgccaaatggtagaggaaagccatgaggaagaagagcttaagccaccagaacaggaaatagaaatagatagaaatatcattcaagaagaagaaaaacaagcaattcctgagttttttgaggggcgccaagctaaaacaccagaacgctatttgaaaattagaaattatattttggatcaatgggagatatgcaaaccgaaatacttaaataagacctcagtacgtcctggcctgaagaactgtggagatgttaattgtattggacggattcatacatacctcgaattgataggagcaatcaattttggatgtgaacaggctgtgtataataggccacaaacagttgacaaagtacgaatcagagacagaaaagatgcagtagaagcataccaacttgcccagcgtctgcagtctatgcgtacaaggagacgtagggtccgagacccatggggaaactggtgtgatgcaaaggacttagaaggacaaacgtttgagcatctctctgctgaggagttggcaaaaagaagagaagaggaaaaaggcagacctgttaaatctttaaaagtgccaagaccaacaaaaagctcgtttgatcccttccaactgataccttgtaatttttttagtgaagaaaagcaggagccatttcaggtgaaagtggcttcagaagcacttttaataatggatttgcatgctcatgtttctatggcagaagtgattggtctgttaggaggaagatactcagaagttgataaagtagttgaagtctgtgcagcagaaccatgtaacagtctgagtacaggactacagtgtgagatggatcctgtatcacaaacacaggcctcagaaaccttggctgttagaggcttcagtgttattggatggtatcattctcatcctgcttttgatcctaatccttccttacgagatattgacacacaagctaaataccagagttacttctccagaggaggtgcaaagttcattgggatgattgttagtccctataatcgaaataatcccttaccatattctcagattacctgcctggttataagtgaggaaattagcccagatggctcttatcgcttaccttacaaatttgaagtacagcagatgttagaagaacctcagtggggattagtatttgaaaagacaagatggataatagaaaaatacaggctctcccatagcagcgtccccatggataaaatctttcgccgggattctgacctgacttgtttgcagaaacttttggagtgtatgaggaagactctgagcaaagtgaccaattgctttatggctgaagaattcttgactgaaatagaaaatttgttcctttccaattataaaagcaaccaagagaatggagtaaccgaagagaactgtacaaaggaattgttaatgtgattattttaaagttaagacattttaatcttgacacagtagatcttactttcaaagttataaacttgaagtgattgtagttaacattggcacagctttggtattttttctctatttcacaaaatccaaactttgccacataaatcatgtgaaaagaaagagatacaaatttgttttcatatagtgattatcagagtgttctgcaaaccagggtccaccacggtgttctagtcctttactgagcaatgctgtaggctgtgaaactaagcaacctggtcggctttactgttgtgttcagcttgggatttggactatgtctctaagtcatttcttccctgaactagtcatttatattccattgtggtatctcctatttcatttaaaagcacttccattctttccatatattctgctgagatttgtttatggctataaatgagatatggatgggtggtcactgagataattaatatggtttagaactactgattaataaatctaacaggagaccaggagaggcatgacaagaaaatcttaaaaacaggaaaaacccaaaggagagaactaaattaccagtttctaatcatagatactatcttccatttcattgtatagcagtagtatcataagatatgccattttctcagctatctgaaaatttttaaccaattttacacacataaaataattagcttcaattgtgagtccacttacattagtaggtgtgataaaacctcatttaactggaacataggtaatcataactcaaactttttttctactgcctactactaggagaaagaggcaaatgataataaagctggaataaatcagagatttaatttttaaaacaagcctttcaggacatattacatattcgcccagtttcatatgctttctgaatctataatggaggtcagtgaacttttttaatgtaaagggccagtttgtaaataattttggcttttcaggccacatatgatgtctatgagacattcttctttgtgtgtgtgtgtgtgtgtgtgtgtgtgtgtgtgtgtgtgtgtgtgttttacagccctttaaaatgataaaaaccattgttaactcacaggcctcataaaacataggctgttggctattattctccaacccctgatctagagaattttaaacattagaattttgttttacatttgttaagctttacgtcatcttcaaatgacaccaaaactcagaattatgatctgcatttaagccaattttaaaataaaataagcagtcaatgctgcctcatttattgaaattcagtagattttagtttattcttagtagtcagagaattgatttatagctattcaccaaacattcttactaacgtttccttatatctaaatcagattgattctatattttgctttgtttgtaatcaatagccaatgaagaataaggagtattggaagaagcagtgagtcagttttaggtgacctggttcttgtctcaactttgtgatttggggagatacagtttactttccctgagccttaattcttgtgtaactgaagtctaacttaacttcttaatgtccttccagaactaaaattttattgttcattctaatcgttggactactcttgtgaagtttatattttgagttaatacagtttccaaattaacatacatttaaaaaaaaaagggtagtattcttccatttctctgtgtgcacttaggataaacagtgaagtatagcttataaaacaattagtttgagggctgagagtgtaagaggaactataccaaaagtcaggaaacctgagctcttaccctaactctgttaccaactttgctgtgtgaccttaatcaaaacacataacctggaccccatgctcctcaccagtaaatcaagggcctgaattttatggcttagtattcccttccaagctccgaagttgcgtgattctgtgaaaggcagtgattgattcctttgtactcatcttccttttgacctgtttcctcatgatatattggggaacaaatactaaaaagtgttttatactagctttcttgattgacatttccctataatactgatgaatttgggtgatggaaagtaatggaaattgttaaaagttctgctctcaaatctgagtctccttgccctgtgtgccaatgtttaaccatatttgctaatctaagccatattgcgaggatctcaaggatgatacttgtcaagagtttggggccttgagagcacagttttcaaaataatacttagtattttctgactatagagtacatttgtcttgtaaagtatattttaaaatacagagaagtgtgaagtacaaatatctcagtgctactatttaaaaaaacacaattagtatataaatccttccccatttttttgacagtataattttagtatgttaaacttggttacttctttctctcttcctccatcattttccctgcttcctttttcttttgtcatattcttaaaacaattttgcaaccacaggtacccacattgctggcactaccagccttgggctactaccgaggataatggagccagggccttgtagaagcacagaggaagtctagaactgagggggcctatgatacaggaagttcaggaggcagagtctcaaaggaacacctgcctttaataatgtttacagaagtggagaaaggactaaaggacttaaagacatgcaggtgtcttcatcctgattctgtctttgttattgcacaatgactataaaataatgacctaattttttttttttttctggcttggctaatggaaatcgacactagcgcttccccaatattagacttaatctaattccaaagtaacattcaagaaaagaaaaaccagtggaacaggatcagtaagctcagactctccatctccattattttagccttgaccattcttctctaatccttttaaattatcttcagtttccagttcaagttacattgcttcagttacagtttgtttgaccctgtattcagagctgcattatgattcttgtgggccctagatagttttgccatcttagaccccttcttccatacaaaattaaaagtgatattttacaattgtatctgtatgaaatgaatgtattaatattttagattaaaacattttgtttagaagttcagttttttcttatgaggctaaaaaaaattaaaacatttttgtgggcttctaaaaaactgtgggccttaggtactgtgcctaatggataagttggcattgcctgtattctgaagggcatcattggaaaaatagcagtcattattctgtccccttctcccaccaccacagtccttggagaagcctttgccactccatccaggagcactgcagtttccacggttatagatctatagacttgaacttacttccttcccaacctaacgaaaactcacaaggattacttgggaccattcatcctcaaaaaagataggaggcagtggtttgttttagtcttcagatatttttgttttggtcagtccctaatctgtagttttgaaactcgtgccacacttgaaagggaaacatcctactacctttctttcctctccatttcccacaaaccctttccttcatcatcactccctgcattcttacttctcagcatataaatacaagacccttctttctattatttgttgaaagctaggcctgtaaaatagagatggacagaccatgcatgtttccatgaagctatttaatgctgctcccagtcttctgtccataccattccttccctgcccctaggagtggggttgaggtctgtgacatgcagactgtaagcacagtcagaacctctgcagctctcaacccaacagaggagactgtggcttcaacatgccaacctgagcaggtctcctctgcattaccttcctcccatttctcttcctgggtcctgatgaggtgagctggaggaaccaatagtcaggatgccctggaattgatgttgctctgttttgtgctcacaaaacagccatgtaacacatgagcacctgagttgaagccatccagtcgcaagtcagcagacagcagttgatggaattctcagtagaaattcagtaagggtgcccaaattttattttttttttcacctatactctaccaatatatggtatttaggaaaacttcttttatccaagcacaaagaaaagcacacacatttttataatcatctgcttcatcagggtaaataaataatttaacaaatttgatcagcatctctagtttaccagtactttaatattagttttcttacaaattaatgtattttgcaatatttccagaaaatcactgtgggagaataatgtaatatactttaggatatatttcctgaccttttcttaaagggcttcatgtgctattcccccaaattctgctttctctattttcttttttatttaacctataattatactttctagtatattctgagtctatcttctaagccaccttacatttttcctggaacaagggagggaataaatagttgcctccactaaatcaggaaaaaataaaaatatcccaggggagctgtgattatgccaagagctctaaacagaagtttgagaaggtaaaaattaagttgtagtatctgagttgtttttattttcttcctttggggtttatgaaggtattcataagaactttaatttcaggggaaaaaatgcctgatttgctatttttgacatttcctcgtctcttaagaagtcagttaaatatgttttcatagtttatattcctgtttcatagattactgtgaaacatgtatttaaacctatgaattataaaatagtatttagattctagcgtgagttaaatagattagtcatatatcttttagatttgtggatttgacatgtaaattatgtgttgtgtataagtaagttagttactaaacatatggcatggttattgataaacttgttgctatttttttccaaatgctatcagtgtttgtggacttttaaaaattagtttgaattttggaatgttctgtgataaaatataatttcaactattttgtacatttaaatatgccatgttgtatatgtctgtatttaaaaatgttgtaaatatctgcattttaagaattatgaaagattttcctcaaaaatgacagaactctccatacttaattgtgacacattataagatatctgattttaagcttttggattttgttctaaaaattaagtttaaacatgctgaaaattccataaaaataaaattttgaaaataaagtgaaaaaaaaaacggagggcagttaggtccgtttgaaggccaaggagaaaaaagggggtaagggagaaggagggagggacctgggcaggaccacaggtaatgggctgtgtggtataaaaaaagggagtgaaaa

SEQ ID NO: 5764 - DNA, 4507 bp, Homo sapiens
  misc_feature (541)..(559): n is a, c, g, or t
  misc_feature (981)..(1146): n is a, c, g, or t
  misc_feature (1164)..(1183): n is a, c, g, or t
gtgaaaaaggcgagccaccaaaacccatctccagtctcctcccgggggcccccagcccgcctctgtgccactttgcatcccacgccggagggaggcattaacgagaccgggtaaggctttttaaacggtccaaggtgtagagccatacttcaggaggatccccagaagttttggacaagcctccccaaatgtggcaggtgctgtgctggccattggtgacccaaagatgatgaaaaatatgttcctgcccacaaggagttagcgacctactgggctttcctcttgctgatgacatgattcctgtttgaatctgttgacaaaggttatttgtgcttttacagcatgatttctggcactgatttacctgggtagtttgaaaggatgtcttccaagcgaccagcctctccgtatggggaagcagatggagaggtagccatggtgacaagcagacagaaagtggaagaagaggagagtgacgggctcccagcctttcaccttcccttgcatgtgagttttcccaacaagcctcactctgaggaannnnnnnnnnnnnnnnnnntgacgcaagagacttgtggccataggactcccacttctcagcacaatacaatggaagttgatggcaataaagttatgtcttcatttgccccacacaactcatctacctcacctcagaaggcagaagaaggtgggcgacagagtggcgagtccttgtctagtacagccctgggaactcctgaacggcgcaagggcagtttagctgatgttgttgacaccttgaagcagaggaaaatggaagagctcatcaaaaacgagccggaagaaacccccagtattgaaaaactactctcaaaggactggaaagacaagcttcttgcaatgggatcggggaactttggcgaaataaaagggactcccgagagcttagctgagaaagaaaggcaactcatgggtatgatcaaccagctgaccagcctccgnnnnnnnnnnnnnnnnnnnnnnnnnnnnnnnnnnnnnnnnnnnnnnnnnnnnnnnnnnnnnnnnnnnnnnnnnnnnnnnnnnnnnnnnnnnnnnnnnnnnnnnnnnnnnnnnnnnnnnnnnnnnnnnnnnnnnnnnnnnnnnnnnnnnnnnnnnnnnnnnnnnnnnatccaggttcaaggtcannnnnnnnnnnnnnnnnnnnccgtattccctcctgatcaacggacactggctgcagctgcccatcaaggattcctcctccctccaggcttcagctataaggctggatgtagtgacccttaccctgttcagctgatcccaactaccatggcagctgctgccgcagcaacaccaggcttaggcccactccaactgcagcagttatatgctgcccagctagctgcaatgcaggtatctccaggagggaagctgccaggcataccccaaggcaaccttggtgctgctgtatctcctaccagcattcacacagacaagagcacatttgtgccataggagctgtgcatgcatggatgaagtggcacagccactgaacctatcagctaaacccaagacctctgatggcaaatcacccacatcacccacctctccccatatgccagctctgagaataaacagtggggcaggcccaagagctctctgtcccacgcagcgttagctaggtccttcaggccagagttagcacaataggttacttaaatgaccatgatgctgtcaccaaggcaatccaagaagctcggcaaatgaaggagcaactccgacgggaacaacaggtgcttgatgggaaggtggctgttgtgaatagtctgggtctcaataactgccgaacagaaaaggaaaaaacaacactggagagtctgactcagcaactggcagttaaacagaatgaagaaggaaaatttagccatgcaatgatggatttcaatctgagtggagattctgatggaagtgctggagtctcagagtcaagaatttatagggaatcccgagggcgtggtagcaatgaaccccacataaagcgtccaatgaatgccttcatggtgtgggctaaagatgaacggagaaagatccttcaagcctttcctgacatgcacaactccaacatcagcaagatattgggatctcgctggaaagctatgacaaacctagagaaacagccatattatgaggagcaagcccgtctcagcaagcagcacctggagaagtaccctgactataagtacaagcccaggccaaagcgcacctgcctggtggatggcaaaaagctgcgcattggtgaatacaaggcaatcatgcgcaacaggcggcaggaaatgcggcagtacttcaatgttgggcaacaagcacagatccccattgccactgctggtgttgtgtaccctggagccatcgccatggctgggatgccctcccctcacctgccctcggagcactcaagcgtgtctagcagcccagagcctgggatgcctgttatccagagcacttacggtgtgaaaggagaggagccacatatcaaagaagagatacaggccgaggacatcaatggagaaatttatgatgagtacgacgaggaagaggatgatccagatgtagattatgggagtgacagtgaaaaccatattgcaggacaagccaactgataagggtcaaaagattgttgtgaccttaggacttaaagaagccctaactggttcatccttaccagtggccaagcacattaactttctcatacactgactgttactttaactgttagtcttaaatagttgggacatcagctgactaatagacctcagcctcaaaaggcttggaaagaaaaaacaaatacaacaagcaaacaacaatatcaacaacaagagattgaaataagctatgggtaaaataatgccagtaattcagctgctacatccaagcactgaagtcttacccgtcaactttttttttttttttaaataaactttatggctgtttgttctacaaaaaaaaaaaaaaaaaaaaaaaagtacacagtgccaacaagtggcttgtgaatgtgttttgttgttttgtgctacaatttttaaaaagaaaaaagttttgttttgttttttggggtttctgggttttttccttttctttttctttcctttcattttttttctttgtaatgcacctgacagaaaaaaaagaaaaatgaatttctctttacttctctccaccttctccatctctctactttaaagatggaagtctgtgcatgaggggaaagagggaaaaagagcctgtttttaacttccttgctatccaccacaaaataagcaattattttctttagaggactttatctattgcacaccacactacatctttgagcaagtgccaaatttgtactgaagtgttgaccaagttcattttttctctttactttttccttttccttcttaagttaggacagtgttaaatcttagacaatcccttgaaaaacctgaaataccagcagctggtgagatttgacttttttttttaatggaaactgtaggtgctgttctcaggtgaaaagagagagagagagagagacataagaaatttagagaaaaatattttctgatcttggatttttgtgtgtatgtatgtatgtgattatggtactaataataggaataacgttggaccattgtgagttaaacccacatctggggatgaaatcccacatcctcccaagtgactggtctagaaataatcttgaccttgactttgcacttcaaatgacaacttaaccaagtatagggctcagaaattatatttttaaatgtctgattattattggatggatcaggtggccctgtgtaatagaggtgtgcatgtataacatggaagctactagcaaactgctcccagatgtcctttctccctggtcagttggttccattaacgtttgctacttagtgatttttgtttttcctgttgatattttgagcaaaacaatcattgttttcattgaatatatttggccattttttcagacaaatagaattagcttatttcttcaacattccatcctttcccgatcaggaaatgaaactgatgattttataaggtatttttcacccctccatgaagtgaggtggaggcctttagcatttcagaagtgtgggccatatgtagttcatgccataaaaagtaggatttaattaaaagtcattgcagcccaataaaatggagcctggctgcacccagggatccttgccactgctcttcccttgctgtcagattaatccactgaagtccaactttggttcaagcagagtatttgcaaagagcaacaactgaatgtgatgggactgcttatgtagattttgccagccaaatgccaaggcagttgtagggcctgtacaaataaatgcaaaatcatttcaagtcaattgccattatttgtattgaagtatcagatagatagtaaatactgcaactagtagcttgatgtgctatagttttcactccagtcatcattttcctatctcaccccccg

SEQ ID NO: 5765 - DNA, 805 bp, Homo sapiens
agcagggggcgctgtgtgtaccgagaatacgagaatcctcgtgggccctgaccttctctctgagagccgggcagaggctccggagccatgcaggccgaaggccggggcacagggggttcgacgggcgatgctgatggcccaggaggccctggcattcctgatggcccagggggcaatgctggcggcccaggagaggcgggtgccacgggcggcagaggtccccggggcgcaggggcagcaagggcctcggggccgggaggaggcgccccgcggggtccgcatggcggcgcggcttcagggctgaatggatgctgcagatgcggggccagggggccggagagccgcctgcttgagttctacctcgccatgcctttcgcgacacccatggaagcagagctggcccgcaggagcctggcccaggatgccccaccgcttcccgtgccaggggtgcttctgaaggagttcactgtgtccggcaacatactgactatccgactgactgctgcagaccaccgccaactgcagctctccatcagctcctgtctccagcagctttccctgttgatgtggatcacgcagtgctttctgcccgtgtttttggctcagcctccctcagggcagaggcgctaagcccagcctggcgccccttcctaggtcatgcctcctcccctagggaatggtcccagcacgagtggccagttcattgtgggggcctgattgtttgtcgctggaggaggacggcttacatgtttgtttctgtagaaaataaaactgagctacgaaaaaaaaaaaaaaaaaaaaaaaa

SEQ ID NO: 5766 - DNA, 1235 bp, Homo sapiens
tgttttttctctagagaaactcactgcagagctgggtaagttctgggtgcggggccacagtgctgcctgtcagccggaccctgtgcctgtgcagtgggaggaggggctccctttggacagcggctggcaactatctaattctaaaccatgccgtgtgagcctccacctcttcccttgctaaggggctgaaaggatggctgcctgccaccgtgcagctgcccgagaccctctgcacagaccctgccagctcctcccctgcaaattagacaattcagttaaaattcatcataaaacgtttactgtctccggttcatcttcttaaaatatccttttctttttaatgcaaatggcactaggaagggtggcacctttaatttgcaccaaaatggaaataatttctcagatccacttttctccccagagggactcagagacgtgaaaccatgggatgtgtctctgtagagaggaagagagagtgaacccaagggagggggaatggaggaaaaggccatcatggtgttggggttgggggggcaattcagatgaaactgtaaggttgggaaagcttgtctggcagtctacctcgcccttcaaggggaatgagaaaaacatagccctaataagtcattaaggctatagtctgaattgtaagtcataacactatagcatgaatgcctctcccaggagcatttacttttgaaagagcttgacattgggtggacagatcaaaggaatgcatttttagtagcaaaatgttggagtccttggtaattatttggggaaataattgggtgtgatgtccttccagtccttcagataacgcacccggtgagtgaccgtgaggctcacgtaggcggccctcagtgcctgcacttaggcgggagctccgccccaggaagcttgtgatttcaggcagaaggaacaaccccaaccctgggaagaggcctgtcagtactaagatctggtatcccttctaggctgtgtgcagatttccacctttgagctaagataggatgaggcataagagtcctgcagatgggcctctttttgagggcaatgaaggggcaaagaggaagctgtaaaaaaaaaaaaaaaaaagctgtgattaccagtggctttagactaaggaagctcttcccatggcctgttcttgggaaaaatggttccaaccacttgcaagcttgaaatttttctttggggggttctggcttgcaaaaaagctttcaaacagaact

SEQ ID NO: 5767 - DNA, 1986 bp, Homo sapiens
atttgtatctcagctccatgatgccttgggctttctgtctcctcaacaagagcgcagcttgctgaatgtcagctgcctgagagagctggggcctgacttactagggcattaaatcctaagaggtcctactgaggtgtggcaggatcacaggccagtggaaaaagggcaggtcagatgggcaaggcccaggactttcagattaactgagaggatatcgaggccaagcatggcagggggaaggtcagtgggtgtcaagagacccaggtctgaccccggatgtttgctccatgtgacaaaagcaggcctgtctcaggaccttttcttttcttttttccttctttttttttttgacacggagttttgctcttgctgtccaggctagagtgcaatggcatgatcccagcttaccgcaacgtctacctcccaggttcaaatcattctcttgcctcagactcccgagtagctgggattacaggcacatgccaccatgcctggctaattttgtatatttagtagaaacagggtttcaccatgttggccatgctggtctcgaactcctgacctcaggtgttccacctacctcagcctcccaaagtgctggggttacaggtgtgagccatcgcgcctggccaggacctttgtttcttatctacatattggaagatttggtcctgatgtcctttgaggcttctttagctctagttctctgacacttcagcctatatcacagctaacttcctcagtctcatctattccttatgctccagcccctggcaatttgcctcaagatgggggtttgaaaataactttacctgactcaaggagtgtctggagcacctcctagtctaagtctgcaagctccagttcttgcctaaaaccatgccagtggccacccttgggctcagacagctctgggccttttgaccacaagccagcccctcgccctctctgtggcatagtcttctctgccccaggactgcagggcggcttcctccaaggcttccaaggctcaaaagaaatttggctccatccaagaaggctccagctcccctactggcccctggctcaggcccacacccctggccaggcccagagagtgtgtctcaggagaattcaatggctctagagagacacacagaaagtttggcatttggaaatttcaaggatgtatgtatgctcacgtatggagcaggttgtcctggtccctgggtgcagggaagtgggctgcagggaagtggattggaggggagcttgaggaatataaggagcgggggtggagactcaggctatggacaaggacagccccaaggttgggaagacctggccttagtcgtcctcagcctaggggcagggcagtgaagaaagctctccccgctcctgctgtaatgacccagagtagcctccccaggccggcatcttatgtgtgtcttccaccatcctcatggtggcacttttctaggcctgtctcccagcattgtgcaaggctcggaagagaaccaggaagtgaaactgggtgaaaacagaaagctcaatggatgggctaggttcccagatcattagggcagagtttgcacgtcctctggtcactggaatccacccagcccacgaatcatctccctcttgaaggattttatttctactgggttttggaacaaactcctgctgagaccccacagccagaaactgaaagcagcagctccccaaagcctggaaaatccctaagagaaggcctggggcaggaagtggagtgacaggggacaggtagagagaagggggcccaatggccagggagtgaaggaggtggcgttgctgagagcagtctgcacatgcttctgtctgagtgcaggaaggtgttccagggtcgaaattacacttctcgtacctggagacgctgtttgtgggagcactgggctcatgcctggcacacaataggtctgcaataaaccatggttaaatcctgaaaaaaaaaaaaaaaaaaaaaaaaaa

SEQ ID NO: 5768 - DNA, 2530 bp, Homo sapiens
tatttattcagtgcggattgcagagggcgcagctccaccgtggtaacttgcaatgtggccgcccctgcgctggcttctttctcctcggccctcggtgaacccagcttttcctttaaagcatagacaaatccttgcttagggtcagccagaccgtgggcttgctttgggctcccgcgtggacgctgaaggctcttcatgatttctcagaaaccttggtgggccacccaaaaagtgtgttggaaatccacggtgatccttagtatggtgatgggattgtccgaaaaggatttcagatgcatgccaggtttccactgattgccagaactcgagatcactacacatggatccccaaaatcaacatggcagtggcagttcgttagttgtgatccagcagccttctttggatagccgtcagagattagactatgagagagagattcagcctactgctattttgtccttagaccagatcaaggccataagaggcagcaatgaatacacagaagggccttcggtggtgaaaagacctgctcctcggacagcaccaagacaagaaaagcatgaaaggactcatgaaatcataccaattaatgtgaataataactacgagcacagacacacaagccacctgggacatgcagtactcccaagtaatgccaggggccccattttgagcagatcaaccagcactggaagtgcagccagctctgggagcaacagcagtgcctcttctgaacagggactgttaggaaggtcaccaccaaccagaccagtccctggtcataggtctgaaagggcaatccggacccagcccaagcaactgattgtggatgacttgaagggttccttgaaagaggacctgacacagcacaagttcatttgtgaacagtgtgggaagtgcaagtgtggagaatgcactgctcccaggaccctaccatcctgtttggcctgtaaccggcagtgcctttgctctgctgagagcatggtggaatatggaacctgcatgtgcttagtcaagggcatcttctaccactgctccaatgacgacgaaggggattcctattcagataatccttgctcctgttcacaatcacactgctgctctagatacctgtgtatgggagccatgtctttatttttaccttgcttactctgttatcctcctgctaaaggatgcctgaagctgtgcaggaggtgttatgactggatccatcgcccagggtgcagatgtaagaactccaacactgtctattgtaagctggagagctgcccctcccggggtcagggtaaaccatcatgatttttggaggtgggttgtacctcctgaacttctagctttcaagttgtggctgttttttgttttgttttgttttgttttctttagaatttttccctgtttcccaccttctcttcccctgttgccaaggtctaactcatggatttttctctttcctcatggatgatcttcagcaagagtggactgggaagctgcacctggctcccactttcaacaagagcctctgccatccacttgagggtattgagagccagtgggcttttgtgtagcctttttgttctgcaagcaactttctaaagttgtgtacatgaacatacacccacatccagactacagtgatttagagttgttttgattgggtaccgtgggagcagggaaattggttttttaaaaagcaactgtttaattgcttaaataagctatgtattaaatctgtctccagttagggctatcttcctagcataggccccttaagtagcatgggggatatattttttgctataacgtaaaaattttcctttaaccactgccctctccttttctccttcaaggttctttccccctcagttttgttgttgtcttactctggagatgccaagtgtattttttctttctatgtaattttagattcgccttacaatgtaaatcttcacattggagataatattggttggaccttgcccatcttcactctagccttcgtatttgtgaaggactcagccaccttccttcttcaccccatgcttctcaccaaatttttgttgtcattgagggcacttggataactcaagttgatatttatagctgatcaatctatatgtgtcacagaactatgctgcctaaagtgatcttggctccttaatggtccttttggccccttggatagttaacagctgagtaattctaatctcttctgtgttttccttgccttaaccacaaattgtggtgctttttgtatattttatgtataaatcacaaagttgaattctgactatttttaagacaaaagtctgttaaacttttttattgtaaagaatatttattatgcgaatctctattattttatggtatttattgcaaaagactgttgaaatgtactcatgtttgaatataacaaaatatcaatacttaacggaaaataaggtgacacgaagaaagtacatatgttaactataatgcagaaaatatattaattaatgaaaaaaaaaaaaaaaaaaaaaaaaaaaaaaaaaa

SEQ ID NO: 5769 - DNA, 789 bp, Homo sapiens
ttttttttaacttataagataggcctttcctgatgccaaataagggcaatgatcagcttccccattcctggagccaggacctgccacatcatttgcagtgcaaaatgcaaatgagagccccttgttcaaagagcaagataaaagtgccatcctaggcgctcaaaatacaaaggttcctcctttcttctatggtctgtcaattggtcaaggcattttaatttgctacttaatgtcatgcttgctgggcactggaatactcatgcggtgagtgtaggatcccacgggtatctggaggctcgccctgcaatttagcatgtgcaaggagctccccacctctgccagcccaggatgggcgtgtgatgccctggctggggtgagtgaggttgagccaggtatctctgtgtctcatgggcccaaccgacacgggagagaagacaatccccatggggactgcaacctttgaactgggacacatgaggcctctgggttagggtcggggagaggctcgtccccctgcccagccacccactgcatgtgcccttgtgctgtcagcttggggcaaaacgcgggtgccatgtctgggcctgtgagccctgtcctgacctggcatgcacccatgccctcctggggtgctgggtagcagcagttactgtgtagggtggaacaggcaaggccaggtggggccagggcagcaggctggagctggcagctgagagggacccatgggagccaagctctgagcccaggcagatgctccatcatcccattggacttcacctcgtgccgaat

SEQ ID NO: 5770 - DNA, 1196 bp, Homo sapiens
agcggtcggcgagtggagtcggacagtgggtgggtgccctgactgcctgacggccgcgcagggccttgcaggaccgctggggaggatgttgttaacgtaaagagccaggctgatgaggaaggttcatgagtcctttgggtataagcgggagttggggcggccggagggcagatgactctgagaagggcaagcactttaaccttttaagcccaaccagatgagttgcctgcagttttggaggccttcagagcatttcactagacctctgtctgtgtcggtccagtgtctttagccaagctttgattaaagatgacttccttgtttgctcaagaaattcgcctttctaaaagacatgaagaaatagtatcacaaagattaatgttacttcaacaaatggagaataaattgggtgatcaacacacagaaaaggcatctcaactccaaactgttgagactgcttttaaaaggaaccttagtcttttaaaggatatagaagcagcagaaaagtcactacagaccaggattcacccacttccacggcctgaggtggtttctcttgagactcgttactgggcatcagtagaagaatatattcccaaatgggaacagtttcttttaggaagagcaccatatccttttgctgttgaaaatcaaaatgaagcagaaaataccattcaaaatgaggcacagcgataacttcttcacatgctatttcaaaaagcctgtttaataaagctgaatgttaaggtgtatgtaggttattgcaggaactttaggaattaaatatgttcatattcttcgattatctcctaagtgacagtgaagatatgagaatttactggcaagtcacatgttatcacctactactatttcaaggtcatgaatttgctttctaccaaacccatagatgtgttaaacacgaatattaaaaggtggactctttattaattaaaaaaaaatcagtgttgtgagtgtgtcgctttaaaaaaaaaaaaatttacaatcattctcctctaagcaggtatctgaggtcctggtttcaagttacagtttttgtagaaatccttacttttaaggggacagggtatagggatcaacagtggttctttatagtgtttttaaacccattatgggtgcctttaacaatttaaagacttggaatctaaagggtttagcaaaattacttttggaaattg

SEQ ID NO: 5771 - DNA, 608 bp, Homo sapiens
  misc_feature (77)..(77): n is a, c, g, or t
ctcttctgtggcacttatacaaaatatctcttcacctacttagttctacagggttaactttggagcaacatgaatanaatcatcgagaaggccaatattgtttagcaacatgaatacaatacagtttaaagttgtacacatcctgctcaactttattcatgtacatttcctttctgtggttttcttttgcttcttagaaattctgttagtggttagtaaagaatttgaaagtactttctccttgctgttttttttttttttttaagacattcctcccagaatactccagggggcagtgttttataacacattttccccactgggtgattgaaggatggaggatttttgaaaatttgacagctacatgaaacatgagaaaacattttcctcacttctgaagtcggtttgcagctggtaacttgttcatccagaaaacattctaaagcaatgagactttgtgagctgtgcttacagtttgggagaatcatgaagattctttctatattttgcatttacttcccagtgcttcatagctgcattttgtttgtaactaagacagaagaatttcgtaatccttgaaattgaaaaaaaaaaagtagaagtggacg

SEQ ID NO: 5772 - DNA, 2808 bp, Homo sapiens
ggggggggggggcagcctctcgggaagagccaatcaggggcgagcgtcttctcgtcgcacgaggcccggcgcggattggcggcgcgcgtctcccacttcccctcggaggaaaggctcagctcccagcgcgcccctcccgtctccgcagcaaaaaagtttgagtcgccgctgccgggttgccagcggagtcgcgcgtcgggagctacgtagggcagagaagtcatggcttctccgtccaaaggcaatgacttgttttcgcccgacgaggagggcccagcagtggtggccggaccaggcccggggctggggggcgccgcgggggccgcggaggagcgccgcgtcaaggtctccagcctgcccttcagcgtggaggcgctcatgtccgacaagaagccgcccaaggagtcgcccgctgtgcctcccgaaggcgcctcggccggggcccacctgcggccactgctgctgtcggggcaccgcgctcgggaagcgcacagccccgggccgctggtgaagcccttcgagaccgcctcggtcaagtcgggaaattcagaagatggagcggcgtggatgcaggaacccggccgatattcgccgccgccaagacatatgagccctaccacctgcaccctgaggaaacacaagaccaatcggaagccgcgcacgccctttaccacatcccagctcctcgccctggagcgcaagttccgtcagaaacagtacctctccattgcagagcgtgcagagttctccagctctctgaacctcacagagacccaggtcaaaatctggttccagaaccgaagcgccaaggcgaaaagactgcaggaggcggaactggaaaagctgaaaatggctgcaaaacctatgctaccctccagcttcagtctccccttccccatcagctcgcccctgcaggcagcgtccatatatggagcatcctacccgttccatagacctgtgcttcccatcccgcccgtgggactctatgccacgccagtgggatatggcatgtaccacctgtcctaaggaagaccagatcaatagactccatgatggatgcttgtttcaaagggtttcctctccctctccacaaaggcatagccagccagtactcctgcgctgctaagccctcgacgttgcaccccaccccctctaacggctagctgacagggccacaccacatagctgaaatttcgttctgtaggcggaggcaccaagccctgcttttcttggtgtaacttccagagtccccccttttttcccttgcacaaaagcttggctctgatggtttttttggcatgatgtatatatatatatacgaaaaatactacagaccctttttatcagcagacgtaaaaattcaaattattttaaaaggcaaaatttatatacatatgtgctttttttctatatctcaccttcccaaaaagacacatgtgtaagtccatttgttgtattttcttaaagagggagacaaattcggaggagcgccgcgtcaaggtctccagcctgcccttcagcgtggaggcgctcatgtccgatttgcaaaaatgtgctaaagtcaatgatttttaccgggattattgacttctgcttatacaagaagccgcccaaggagtcgcccgctgtgcctcccgaaggcgcctcggccggcctgcggaaaaacaaaagaaaacagacacaatgcagcagccagaaaatattagatatggagagattatggccactgctgctgaccggccacggcgtccgggaagcgcacagccccgggccgctggtgatcaaagtgaacccacatcatatttctgcattttacttgcattaaaagaaacctctttataagcccttcgagaccgcctcggtcaagtcgggaaattcagaagatggagcggcgtggatgctacatacgttgttcctatctcccgcccacgcccacacatatttttaaagtttttaggaacccggccgatattcgccgccgccaagacatatgagccctaccacctgcaccctgacctttttaagaatatttttgtaagaccaatacctgggatgagaagaatccgtagactgccggaaacacaagaccaatcggaagccgcgcacgccctttaccacatcccagctcctcgccctggaggtgaggtagaaaaattagaaatacttcctaattcttctcaaggctgttggtaactttggagcgcaagttccgtcagaaacagtacctctccattgcagagcgtgcagagttctctatttcagataattggagagtaaaatgttaaaacctgtgagaggattgtacagctctctgaacctcacagacccaggtcaaaaggttctgagaaatactaggtacattcatcctcacagattgcaaaggtgctttgggtgggggtttagtaattttctgcttaaaaaatgagtatcttgtaaccattacctatatctaaatattcttgaacaattagtagatccagaaagaaaaaaaaaatatgcttctctgtgtgtgtacctgttgtatgtcctaacttattagaaaaattttatatctttttacatgtggggggcagaaggtaaagcatgtttgacttgtgaaaatgggatgtcaaacagccataagttccctggtattcaccttcctgtccatctgtcccctccatcggtatacctttatccctttgaaagggtgcttgtacaatttgatatattttattgaagagttatctcttattctgaattaaattaagcatttgttttattctgaattaaattaagcatttgttttattgcagtaaagtttgtcca

SEQ ID NO: 5773 - DNA, 1826 bp, Homo sapiens
ggctgtacgtcccacgcgtttgtcggctgcggcagcaggtagcaaagtgacgccgagggcctgagtgctccagtagccaccgcatctggagaaccagcggttaccatggaggggatcagtatatacacttcagataactacaccgaggaaatgggctcaggggactatgactccatgaaggaaccctgtttccgtgaagaaaatgctaatttcaataaaatcttcctgcccaccatctactccatcatcttcttaactggcattgtgggcaatggattggtcatcctggtcatgggttaccagaagaaactgagaagcatgacggacaagtacaggctgcacctgtcagtggccgacctcctctttgtcatcacgcttcccttctgggcagttgatgccgtggcaaactggtactttgggaacttcctatgcaaggcagtccatgtcatctacacagtcaacctctacagcagtgtcctcatcctggccttcatcagtctggaccgctacctggccatcgtccacgccaccaacagtcagaggccaaggaagctgttggctgaaaaggtggtctatgttggcgtctggatccctgccctcctgctgactattcccgacttcatctttgccaacgtcagtgaggcagatgacagatatatctgtgaccgcttctaccccaatgacttgtgggtggttgtgttccagtttcagcacatcatggttggccttatcctgcctggtattgtcatcctgtcctgctattgcattatcatctccaagctgtcacactccaagggccaccagaagcgcaaggccctcaagaccacagtcatcctcatcctggctttcttcgcctgttggctgccttactacattgggatcagcatcgactccttcatcctcctggaaatcatcaagcaagggtgtgagtttgagaacactgtgcacaagtggatttccatcaccgaggccctagctttcttccactgttgtctgaaccccatcctctatgctttccttggagccaaatttaaaacctctgcccagcacgcactcacctctgtgagcagagggtccagcctcaagatcctctccaaaggaaagcgaggtggacattcatctgtttccactgagtctgagtcttcaagttttcactccagctaacacagatgtaaaagacttttttttatacgataaataacttttttttaagttacacatttttcagatataaaagactgaccaatattgtacagtttttattgcttgttggatttttgtcttgtgtttctttagtttttgtgaagtttaattgacttatttatataaattttttttgtttcatattgatgtgtgtctaggcaggacctgtggccaagttcttagttgctgtatgtctcgtggtaggactgtagaaaagggaactgaacattccagagcgtgtagtgaatcacgtaaagctagaaatgatccccagctgtttatgcatagataatctctccattcccgtggaacgtttttcctgttcttaagacgtgattttgctgtagaagatggcacttataaccaaagcccaaagtggtatagaaatgctggtttttcagttttcaggagtgggttgatttcagcacctacagtgtacagtcttgtattaagttgttaataaaagtacatgttaaacttaaaaaaaaaaaaaaaaaaaaaaaaaaaaaaattcttttggctagtagaagacaaaagtaatacatttatggtatgcaaagcactatcctaggtatttcattgtaatattttacttaccccttatcacaactctgatagattct

SEQ ID NO: 5774 - DNA, 1770 bp, Homo sapiens
ctgagccctcgagcagggcggatcggccgctgcctgcttaaagctggggccgccaggagtgcgatcgcctgcggatctgcagctgggcaccggccgcaacgcccgccccgccacggcagggaataaaggctcagggaccggcagttctactctagagcccaccagcctctcagagcctccggtgactggcctgtgtctccccctggatggacatgtggacggcgctgctcatcctgcaagccttgttgctaccctccctggctgatggtgccacccctgccctgcgctttgtagccgtgggtgactggggaggggtccccaatgccccattccacacggcccgggaaatggccaatgccaaggagatcgctcggactgtgcagatcctgggtgcagacttcatcctgtctctaggggacaatttttacttcactggtgtgcaagacatcaatgacaagaggttccaggagacctttgaggacgtattctctgaccgctcccttcgcaaagtgccctggtacgtgctagccggaaaccatgaccaccttggcaatgtctctgcccagattgcatactctaagatctccaagcgctggaacttccccagccctttctaccgcctgcacttcaagatcccacagaccaatgtgtctgtggccatttttatgctggacacagtgacactatgtggcaactcagatgacttcctcagccagcagcctgagaggccccgagacgtgaagctggcccgcacacagctgtcctggctcaagaaacagctggcggcggccagggaggactacgtgctggtggctggccactaccccgtgtggtccatagccgagcacgggcctacccactgcctggtcaagcagctacggccactgctggccacatacggggtcactgcctacctgtgcggccacgatcacaatctgcagtacctgcaagatgagaatggcgtgggctacgtgctgagtggggctgggaatttcatggacccctcaaagcggcaccagcgcaaggtccccaacggctatctgcgcttccactatgggactgaagactcactgggtggctttgcctatgtggagatcagctccaaagagatgactgtcacttacatcgaggcctcgggcaagtccctctttaagaccaggctgccgaggcgagccaggccctgaactcccatgactgcccagctctgaggcccgatctccactgttgggtgggtgggccctgccgggaccctgctcacaggcaggcttttcctccaacctgtggcgctgcagcagggcaggaaggggaaacacagctgatgaactgtggtgccacatgacccttgtggcacagatgcccacgtatgtgaaacacacatggacatgtgtcccagccacagtgttatgctctgtggctggctcacctttgctgagttccggggtgcaatgggggagggagggagggaaagcttcctcctaaatcaagcatctttctgttactgatgttcaataaaagaatagttgccaaggctgaaaaaaaaaaaaaaaaaaaaaaaaaaaaaaaaaagggaccgccacaaaaggacacccacaagagggacacaggactaacagcaaacccgcgaagacggacacaaagagggccccaaaggagacgcagcccgagaaaacgacccagcgcaagtgcgccggattacacaaccgccaacagagggcgacaaacagggacaacacgaggcacacaggggacaagacaccacacaacccggag

SEQ ID NO: 5775 - DNA, 1630 bp, Homo sapiens
gagtctcacttcagttccttttgcatgaagagctcagaatcaaaagaggaaaccaacccctaagatgagctttccatgtaaatttgtagccagcttccttctgattttcaatgtttcttccaaaggtgcagtctccaaagagattacgaatgccttggaaacctggggtgccttgggtcaggacatcaacttggacattcctagttttcaaatgagtgatgatattgacgatataaaatgggaaaaaacttcagacaagaaaaagattgcacaattcagaaaagagaaagagactttcaaggaaaaagatacatataagctatttaaaaatggaactctgaaaattaagcatctgaagaccgatgatcaggatatctacaaggtatcaatatatgatacaaaaggaaaaaatgtgttggaaaaaatatttgatttgaagattcaagagagggtctcaaaaccaaagatctcctggacttgtatcaacacaaccctgacctgtgaggtaatgaatggaactgaccccgaattaaacctgtatcaagatgggaaacatctaaaactttctcagagggtcatcacacacaagtggaccaccagcctgagtgcaaaattcaagtgcacagcagggaacaaagtcagcaaggaatccagtgtcgagcctgtcagctgtccagagaaaggtctggacatctatctcatcattggcatatgtggaggaggcagcctcttgatggtctttgtggcactgctcgttttctatatcaccaaaaggaaaaaacagaggagtcggagaaatgatgaggagctggagacaagagcccacagagtagctactgaagaaaggggccggaagccccaacaaattccagcttcaacccctcagaatccagcaacttcccaacatcctcctccaccacctggtcatcgttcccaggcacctagtcatcgtcccccgcctcctggacaccgtgttcagcaccagcctcagaagaggcctcctgctccgtcgggcacacaagttcaccagcagaaaggcccgcccctccccagacctcgagttcagccaaaacctccccatggggcagcagaaaactcattgtccccttcctctaattaaaaaagatagaaactgtctttttcaataaaaagcactgtggatttctgccctcctgatgtgcatatccgtacttccatgaggtgttttctgtgtgcagaacattgtcacctcctgaggctgtgggccacagccacctctgcatcttcgaactcagccatgtggtcaacatctggagtttttggtctcctcagagagctccatcacaccagtaaggagaagcaatataagtgtgattgcaagaatggtagaggaccgagcacagaaatcttagagatttcttgtcccctctcaggtcatgtgtagatgcgataaatcaagtgattggtgtgcctgggtctcactacaagcagcctatctgcttaagagactctggagtttcttatgtgccctggtggacacttgcccaccatcctgtgagtaaaagtgaaataaaagctttgactagaaaaaaaaaaaaaaaaaaaaaaaaaaaaaaaaaaaaaaaaaaaaaaaaaaaaaaaaaaaaaaaaa

SEQ ID NO: 5776 - DNA, 585 bp, Homo sapiens
tttttttttccagaaaagcctccatttgaggctgtgtgataaatgatctctgggttcagctctggcctcggaatcccagctacaaatgccagcggggaaccacctggagcaggagggtttccaagtggcctttatcgactctgccaatcatcgggccagcccccatgggagcctcttgctttcagccctagagagaggagggggttggggagtgggcagtgtgggcaggagtgcagtggggagggggaggcgggtgcatgaaggagtgaacaggctgtggaagcacaggcctcctggatgccctgtgtcctgggggctcttggttctactgagctcacctctacctgcccctcccgacaagtcccccaccacagagcagaaatgactgggatcaaacccctggccagtcacagctggcgagtctctgagcaagcacctcactttcctctgtgttgccacagactctggaagcccagagagggtgggccacttgctcaaggtcacacaggaaagtaaagtgaatgctgagagccagatctcctgctttggtggggaagctcccttgctgctgggggtagagtcaga

SEQ ID NO: 5777 - DNA, 3336 bp, Homo sapiens
  misc_feature (365)..(381): n is a, c, g, or t
  misc_feature (434)..(504): n is a, c, g, or t
atcttgggcctgtcacttggggagcactgtagaaggttctggagaaggcattgagactataattctactttaatgagctgggctacctagattctatggtacagcaagagaagctgtttgtatgcacctgtatgtacgtgccttacttaaaattcagaaagaaaatcttcaggtgccagaattacttgtgaggctggtgaagagtgaaaagccacttcccaggccagacaggaaagagtgccctggttgggaccagacgggcctggctgcagacgtacactttgggcttcagcagccctggtgctgccttgagcttgacccgaattgcttcttcccagaggctgggtctccctcgcagcccctgnnnnnnnnnnnnnnnnngagaaggtcgatgacaaggcacctctgctttacatccaagcgttgacttttgnnnnnnnnnnnnnnnnnnnnnnnnnnnnnnnnnnnnnnnnnnnnnnnnnnnnnnnnnnnnnnnnnnnnnnnttgtttttcacaatggtattgggctgtggatccagaactcaagttccagaggaaagcgatgccaaagtcaacagggatgcttcacggaggcagggaaaatgcaggagtcaagttcagcagctgtgtggggaccaaggggacacaatatgagacctcgtccccgcactctggacacaagccgcagaaaggaaagaaggtcgtggctctggacccctctccgcctccgaaggacaccctgctgccgtggccccagcaccagaacgccaacgggctgaggcggcgcaaacgggactgggtcatcccgcccatcaacgtgcccgagaactcgcgcgggcccttcccgcagcagctcgtgaggatccggtccgacaaagacaatgacatccccatccggtacagcatcacgggagtgggcgccgaccagccccccatggaggtcttcagcattgactccatgtccggccggatgtacgtcacaaggcccatggaccgggaggagcacgcctcttaccacctccgagcccacgctgtggacatgaatggcaacaaggtggagaaccccatcgacctgtacatctacgtcatcgacatgaatgacaaccgccctgagttcatcaaccaggtctacaacggctccgtggacgagggctccaagccaggcacctacgtgatgaccgtcacggccaacgatgctgacgacagcaccacggccaacgggatggtgcggtaccggatcgtgacccagaccccacagagcccgtcccagaatatgttcaccatcaacagcgagactggagatatcgtcacagtggcggctggcctggaccgagagaaagttcagcagtacacagtcatcgttcaggccacagatatggaaggaaatctcaactatggcctctcaaacacagccacagccatcatcacggtgacagatgtgaatgacaacccgccagaatttaccgccagcacgtttgcaggggaggtccccgaaaaccgcgtggagaccgtggtcgcaaacctcacggtgatggaccgagatcagccccactctccaaactggaatgccgtttaccgcatcatcagtggggatccatccgggcacttcagcgtccgcacagatcccgtaaccaacgagggcatggtcaccgtggtgaaggcagtcgactacgagctcaacagagctttcatgctgacagtgatggtgtccaaccaggcgcccctggccagcggaatccagatgtccttccagtccacggcaggggtgaccatctccatcatggacatcaacgaggctccctacttcccctcaaaccacaagctgatccgcctggaggagggcgtgccccccggcaccgtgctgaccacgttttcagctgtggaccctgaccggttcatgcagcaggctgtgagatactcaaagctgtcagacccagcgagctggctgcacatcaatgccaccaacggccagatcaccacggcggcagtgctggaccgtgagtccctctacaccaaaaacaacgtctacgaggccaccttcctggcagctgacaatgggatacccccggccagcggcaccgggaccctccagatttatctcattgacatcaacgacaacgcccctgagctgctgcccaaggaggcgcagatctgcgagaggcccaacctgaacgccatcaacatcacggcggccgacgctgacgtcgaccccaacatcggcccctacgtcttcgagctgccctttgtcccggcggccgtgcggaagaactggaccatcacccgcctgaacggtgactatgcccaactcagcttgcgcatcctgtacctggaggccgggatgtatgacgtccccatcatcgtcacagactctggaaaccctcccctgtccaacacgtccatcatcaaagtcaaggtgtgcccatgtgatgacaacggggactgcaccaccattggcgcagtggcagcggctggtctgggcaccggtgccatcgtggccatcctcatctgcatcctcatcctgctgaccatggtcctgctgtttgtcatgtggatgaagcggcgagagaaggagcgccacacgaagcagctgctcattgaccccgaggacgacgtccgcgacaacatcctcaagtatgacgaggaaggcggtggcgaggaggaccaggactacgacctcagccagctgcagcagccggaagccatggggcacgtgccaagcaaagcccctggcgtgcgtcgcgtggatgagcggccggtgggcgctgagccccagtacccgatcaggcccatggtgccgcacccaggcgacatcggtgacttcatcaatgagggactccgcgctgctgacaacgaccccacggcacccccctatgactccctgctggtcttcgactacgaggggagcggctccaccgcaggctccgtcagctccctgaactcatccagttccggggaccaagactacgattacctcaacgactgggggcccagattcaagaagctggcggacatgtatggaggtggtgaagaggattgactgacctcgcatcttcggaccgaagtgagagccgtgctcggacgccggaggagcaggactgagcagaggcggccggtcttcccgactccctgcggctgtgtccttagtgctgttaggaggccccccaatccccacgttgagctgtctagcatgagcacccacccccacagcgccctgcacccggccgctgcccagcaccgcgctggctggcactgaaggacagcaagaggcactctgtcttcacttgaatttcctagaacagaagcactgtttttaaaaaaaaaaaaaaaaaaaagaag

SEQ ID NO: 5778 - DNA, 4550 bp, Homo sapiens
  misc_feature (1634)..(1660): n is a, c, g, or t
agcgggttttctgccgcatcctgcgcagccctgcctactttggtgcagaggcgtggggggcgggacgcgtctttcccgttcggatcgcggggaaagcagtggctccaagtgagccagaggagagctgaggagaggagggggaggccgacgacctgggccctgggcctctgaaggtctggcgtattctgacaggacacagtgagcgtctgtagaggagaggcttgaaataaaggagcacgaatattgcctggatttctggaggcctactttaaggctggccaattctgcaagaaaggcaaggaggaggagactggctcacagctctggaggacccccttctgtcagctgtggggcttgacaccacttgaacaagaaaaggagggggaaactgcaccacatcagtgaagatccacctccagtggctgctctgctggtggtggagttgctgctgacaaccaccctcaacgggtctgcacccatccaggaaatatctgtcttcctttagcttggttgtacctgttctcactctatctgtattattgaattattgactgagactgtgtttgggaaggaggctgagtgactactggactggatattgactctaactcttattcccaagcttatatccttaatcacctaaagatcagagtgtgaagaaacaaacctgtgacagatctgtggttgaggtttagactacgggaggagtatattacctgactttctttgtaacttgtaccatgactggggcagagattgagcctagtgcccaggccaagcctgaaaagaaggctggggaagaggttatcgctgggcctgagagagagaatgatgtccctctggtggtcagacccaaggttaggacccaggcaactactggggcaaggcccaaaactgagaccaagtctgtgcctgcggcaaggcccaaaactgaggcccaagcaatgtctggggcaaggcccaaaactgaggtccaagtaatgggtggtgcaagacccaaaacggaggctcaaggaatcacaggggccaggcccaaaaccgatgccagggcagtaggtggcgctcgttctaaaactgatgccaaggcaatccctggagcaaggcccaaggatgaggcccaggcatgggcccagagtgaatttgggactgaagcagtgtcacaggcagaaggagtgtcccagactaatgccgttgcttggccactggccactgctgagtctggatcagttactaaatctaagggcctgtctatggatagagaactagtcaatgtggatgctgaaacctttcctggcacccagggtcagaaaggaatccagccctggtttggaccaggggaggagactaatatggggtcttggtgctattccaggcccagggccagagaggaggcctctaatgagtctgggttctggtcagcagatgagacctctacagcgtcttctttctggactggagaagagacaagtgtcagatcatggcccagggaagagtccaataccaggtccaggcacagggctaaacatcagactaatcccaggtccaggcccagatccaagcaagaagcctatgttgattcctggtctggatctgaggatgaggccagcaacccattctccttctgggttggagannnnnnnnnnnnnnnnnnnnnnnnnnnagtcagggaggaggcaaatatcaggtccaagctcaggacaaatagagaagattgttttgaatctgagtctgaagatgagttctataagcagtcctgggttttgcctggagaagaggccaatagtagattcaggcacagagacaaagaagatcctaatactgccttgaaactcagggcccagaaagatgttgacagtgatagggtcaaacaagaacccaggtttgaggaggaagtcattattgggtcctggttctgggcagaaaaagaggccagtttggagggtggagcttcagcaatctgtgaatctgagccaggaactgaggagggggccattggcggatccgcgtactgggctgaggaaaagtccagtttgggggctgtggccagagaagaggccaagccggagtctgaagaagaggccatatttgggtcctggttctgggacagagatgaggcctgctttgacctaaatccctgtcctgtgtacaaggtcagtgataggttcagagatgcagctgaggagcttaatgcatcctccaggccccaaacctgggacgaggtcactgttgaattcaaacctggtctttttcatggggttggcttccgatccacaagcccctttggaattcccgaagaggcttctgaaatgcttgaggcaaagcccaagaacctggaacttagcccagaaggagaagagcaggaatctttgcttcagcctgatcagcctagtcctgagttcacatttcagtatgatccttcctaccggtcagtccgggaaattcgagagcatcttagggccagggagagtgcagagtctgagagttggtcctgcagctgcatacaatgtgagctgaaaattggttctgaagagtttgaagaattccttttattaatggacaaaattcgggatccttttattcatgaaatatctaaaattgcaatgggtatgagaagtgcttctcaatttacccgagatttcattcgagattcaggtgttgtctcacttattgaaaccttgcttaattatccatcctctagagttaggacaagttttttggaaaatatgattcacatggctccaccttatccaaatctaaacatgattgagacattcatatgtcaagtgtgtgaggaaacccttgcacatagtgtggattcccttgagcagctgactggaataaggatgcttagacacctcactatgactattgactatcacacactgattgccaactatatgtccgggtttctctccttattaaccacagccaatgcgagaacgaagtttcacgttctgaaaatgctattgaatttgtctgaaaatcctgctgtggcaaaaaaactattcagtgccaaagctctttcaatatttgtgggtctctttaacatagaagagacaaatgataatattcaaattgttattaaaatgtttcagaatatcagtaacattataaaaagtggaaagatgtccttaattgatgatgatttcagtcttgagccgcttatttctgcatttcgtgaatttgaggagttagctaagcaactacaagcccaaatagacaaccaaaatgatcctgaggtgggacaacaaagttaatatgattaaccacctgccgctgatcagccttatgttcccaaagagccctgagtagtgctttggtgttcacagtctgtttttttgttgtaacttatattttttaatgctgatgttaactttgtcaaactcttgttttgagctggatcattttgtggatgccaaatgaatatcaaaactgaaaacacatttgttgatatttgtcttgctgtccagattgcggtatttttcagtattaagttttcaatgaactgtgtcacctaagtaagctaccctgctattcgttgtttaaatatatggttctctatttgagtctgtgttttcaataaagttctatgttaaaattggaaaaaaaaaaaaaaaaaaaaaaaaaaaaaaaaaaaaaaaaaaaaaatgtgcacttacaaacataggtaattattagtatgacaaacatgcgcttattagaaaattctgttcttgagttaagaagggagagattattgtgggccctgatacttgaggaatgtttccgagaagagggacccacttaaattggtcaggatagaacaaattggtcaggataggagagcaagacaacttgcccgcctgcttgcccaattatgagccttcccaacaagcaacctaaaattaatacttcttataggacccatttaaattaccatcttagccctgggatttgcctaagggtaggataagacaaatcattaggttgctcttggaagtgggcagtggtggtttgaagaaaagtgtgtaattgaataatctgttctagtagcatggatgaacccagtctgcttgaaacaagtaaaaggagtttgatgagaaatgcagttagaaagttgggaagaggccaatttggggaacagaataagccaaatctgcatatttaacaattcaaagtacaggtgttacttcaatgccacctaaaggctgaaagagtaggatagcacaattaaatggagtggggaatatgatttcctttatattcctagacaaaggaaagtgttaaggaaataccatgcagccgttggaatgattatgtatggataggtttattgacacaaaaggacattaattattttatatttggtgaaacagagaatgtgacatcatgtatggaaaattagattccatttttaaaacatctgtaaatgtacacaattcctatgcaatttcaatatgaatttctaaacacagtctggaataaaatatataccttgttaaaaaatgcttagagacaggcgttggggagatacaaacattaataagacaaattaaaaaattaatatgctt

SEQ ID NO: 5779 - DNA, 2910 bp, Homo sapiens
gataataggttttttacatcacattaacactattttttccaagtcacaaataagaaaaacacttattcaatgaaacaaggtgcaagttttaaatttgggtacacaaatagcctagaagcttcctacagacgctaagacacagccaataatcagatcctttcacttcatcgagaaacttggacaagtcgatattgatgtattagatgaaagttgtctacacacaacttctgagggatacaaacgataataaaaccaaatgttgtctgtttctcctttagaaacacctcctaaaattaatatcatttagtctctagtgtctgtaggattctacagatgagcacaaatagattgggtttgtataacaaatgctaatagtcataactgtttctacaaatatggggtgtccattaagagaatgtgatgttttcctactgctgttgaatcccatggggtgattataggacttgaaataggcagagtcacctctgatgacatcagcttgcctctgtgatttcacagtctgatcctggcaacaagacaaagcacccttggacacacagccaatctctggttgtgatatttccccattgattccttccttgttaacaaggtcattttaatggttcaggtgaggacagcagccagattcaaagtccagaatttgtgctgttacatagagttcacactgtcaaataacattgaatttaataatgatcaaatttttctagtagtctttggcagagtgtataatctcattggcatgattggtgaatattactaatctctttataatgaaagatgctttacaaataccttatatttgctaacatttcaaaactactaaataaatgaaatagccatgtgtacagaaatggtcatttaaagctttaatagaaccaaattcaagacaatgtatcatttagacacacagaaaaggaacttgtatgttttccctattatttttctcatttgccaacaatctatagttttaggttatcaaacagatagatcaacttaactggctagtacattgaaaaatcttcctaagaatcctttgttagcataatctatagagataatttctcaaattatatcatcatgatgcatataaactctataatgtataattgtgtttcatttatttaatgtatgagaacatattgaaatacaaaaccatgcattagccaaaaaattggaatacaggtagtgttcagatcagcaaaacattcagtctggtaaatgcctgcctggggctatgatatcattctcaatgcaggttttatggaaaaactaaaagaatatgttgttagatgatgttggttttgaaaaaaaaaaaagacattaacatacacattagttagcccagttaattgcattctactaatatagttgcacattagcaataattttgctgtctctggtctttattttgtggcttcaactaactggaccatgtggactgtaaaggtcaaatggaaaaaacgagcagtggcccctcatcctgtaaggtactgctacatcagagtgacctaaaagtctaacactgtgaggaaaactgtgatttgtaggaaaaaaaaaaaaaacaaataaaaaacagggcatgctttttaatttttttccactttcctttggcacacccaatgaacaattctaatttttattgaggtgctaacatctttcgtgaccgactgtcaaatgtggtatttttgagttactatttttctacatgattttacagtttgcaagaaagacctctaagctttgtgtcacggtagggcacaacttgatactcaaaatttgaaaaataagcacatccaatgattgttttgaccaacagtggtcagtgacgtaaactgcatgtgcatctgaggacatttaaggggtcattaaaatttgaggagcatcaggccggagtagcagacttttagatgagtcatatttcagcattcactaagtcctcagcattccattcaaactgtcatgtatatttggcctgattttttttcaagctttgcaataatttatgttattggtaaacacttggtgactatatctcagccttttctttaacaactcacaatatattagaaacacgtctacctatactgagagtatatttacaatagaagaacatactgtatgtgactttgtaaagctagacttttgattaagaaatatataatctccggatggtatttttgcattatacactcaggcacaacgtaaaccttgatggctcatcttgctacaattacgagttgaaaaacactacttacgtatttgtatgacctattagtcagaggaaatcatacatatgctttgtaaatagactttgcagataactaaatagactgaagaaatatgttgcatttgatagaagcaattgcataaatatttggtttctatattagagtctgtgagtaaagtcaagtaataaacctaagtaggtataacagatttttaaaccttgaaacttgctttgatggtagagaaaatcattgaagatttacatactgtatataagatgtaaaatgtacgctgcttattaccctcaattttccagaagcaatggtatataatgcagttgaaaaaccaaaaatcttggaaaactaagacgggtcttgtttaaaatgtctctcagctttggcaaccttcaaatcttaatcaactatttaaagcattactgtgtcttgtagcctgcattccacaacagctctgttattcaggtaaaagacttgaactgagccgtttgggacctatactgtaatattttcattgaggaacaatatcctattttgtaaagcatttccctatgtgtgactttaaactgtaaaattaaacactgcttttgtgggttcagtgggcataataaatataaattgtaaactaaaaaaaaaaaaaaaaaaggac

SEQ ID NO: 5780 - DNA, 1883 bp, Homo sapiens
  misc_feature (4)..(11): n is a, c, g, or t
  misc_feature (58)..(75): n is a, c, g, or t
  misc_feature (1344)..(1344): n is a, c, g, or t
  misc_feature (1368)..(1369): n is a, c, g, or t
  misc_feature (1373)..(1373): n is a, c, g, or t
  misc_feature (1819)..(1823): n is a, c, g, or t
gctnnnnnnnnctaaaatgaagcttttttggttccgtccggacttttggcggggttcnnnnnnnnnnnnnnnnnntaccgcattccatccactcccgattccttcatggatccggcgtctgcactttacagaggtccaatcacgcggacccagaaccccatggtgaccgggacctcagtcctcggcgttaagttcgagggcggagtggtgattgccgcagacatgctgggatcctacggctccttggctcgtttccgcaacatctctcgcattatgcgagtcaacaacagtaccatgctgggtgcctctggcgactacgctgatttccagtatttgaagcaagttctcggccagatggtgattgatgaggagcttctgggagatggacacagctatagtcctagagctattcattcatggctgaccagggccatgtacagccggcgctcgaagatgaaccctttgtggaacaccatggtcatcggaggctatgctgatggagagagcttcctcggttatgtggacatgcttggtgtagcctatgaagccccttcgctggccactggttatggtgcatacttggctcagcctctgctgcgagaagttctggagaagcagccagtgctaagccagaccgaggcccgcgacttagtagaacgctgcatgcgagtgctgtactaccgagatgcccgttcttacaaccggtttcaaatcgccactgtcaccgaaaaaggtgttgaaatagagggaccattgtctacagagaccaactgggatattgcccacatgatcagtggctttgaatgaaatacagatgcattatccagaactgaagttgccctacttttaactttgaacttggctagttcaaagatagactcttcttttgtaaagtaaataaattcttcaaaatgaaaaaaaaaaaaaaaaaaaagcgaagtaaaaaagaaagccccgcgcacgagccacccccacaaaacaatcagcgcagcccgccatcaaatatagacacggcaataaaaaaaaggggggcgcgcgccctcagacaaaactcccccccaagggggggcccccgaccctttacacggtacaaccccagcgcttttatttttaaaacaaaagggggccccccctcagagtggggggcgcgcctataataaaataatatttaaggagcgtgggcgggcgcactatatttttataacaacacacgttcacacgtgaatgtgggggaaaaaaaaaggcttctcgcataatgatttgtgggaagccaacacattaatgtgagaagggagagggccaccctcctcgatttctcctttatctctggggaggggggcgggnggggccgccaccacacaaaaatanngtcnggcgcgggacaaacaaagagcatttcgatttccccttgaaccgaggaggacaccttttattttgagaggatgctttctcggagagggggggggggggataaaaatatttaggacaagaaaatactgcttttttttaccaggggaggtgatcattcaaataggcgggcggggcgcgaaaacaaaaaacacgcaactcagcctggagcacctggagtgcggatacttccatcaccacccccccgcccgaaaagacgaacaactatactttataggtctccttttaataagggcgcggggggcctcaccaaaattcttttcttttaccccggcaaaccaatcgttcctttttattttttcccacccgaggggaggcgaacaaaagaggggggcgggaactactccaccaacactatcgttccccttacgtcgtagggacgatccttaannnnnctgagtcagcgatatgacccacagaccccttccccgccccaaaagaagatgtcttttcat

SEQ ID NO: 5781 - DNA, 3893 bp, Homo sapiens
  misc_feature (74)..(88): n is a, c, g, or t
  misc_feature (2077)..(2088): n is a, c, g, or t
  misc_feature (2099)..(2123): n is a, c, g, or t
gagctgttcttggctgacttcacatcaaaactcctatactgacctgagacagaggcagcagtgatacccacctnnnnnnnnnnnnnnntgaacaactgcttcccaaaacggaaagtatttcaagcctaaacctttgggtgaaaagaactcttgaagtcatgattgcttcacagtttctctcagctctcactttggtgcttctcattaaagagagtggagcctggtcttacaacacctccacggaagctatgacttatgatgaggccagtgcttattgtcagcaaaggtacacacacctggttgcaattcaaaacaaagaagagattgagtacctaaactccatattgagctattcaccaagttattactggattggaatcagaaaagtcaacaatgtgtgggtctgggtaggaacccagaaacctctgacagaagaagccaagaactgggctccaggtgaacccaacaataggcaaaaagatgaggactgcgtggagatctacatcaagagagaaaaagatgtgggcatgtggaatgatgagaggtgcagcaagaagaagcttgccctatgctacacagctgcctgtaccaatacatcctgcagtggccacggtgaatgtgtagagaccatcaataattacacttgcaagtgtgaccctggcttcagtggactcaagtgtgagcaaattgtgaactgtacagccctggaatcccctgagcatggaagcctggtttgcagtcacccactgggaaacttcagctacaattcttcctgctctatcagctgtgataggggttacctgccaagcagcatggagaccatgcagtgtatgtcctctggagaatggagtgctcctattccagcctgcaatgtggttgagtgtgatgctgtgacaaatccagccaatgggttcgtggaatgtttccaaaaccctggaagcttcccatggaacacaacctgtacatttgactgtgaagaaggatttgaactaatgggagcccagagccttcagtgtacctcatctgggaattgggacaacgagaagccaacgtgtaaagctgtgacatgcagggccgtccgccagcctcagaatggctctgtgaggtgcagccattcccctgctggagagttcaccttcaaatcatcctgcaacttcacctgtgaggaaggcttcatgttgcagggaccagcccaggttgaatgcaccactcaagggcagtggacacagcaaatcccagtttgtgaagctttccagtgcacagccttgtccaaccccgagcgaggctacatgaattgtcttcctagtgcttctggcagtttccgttatgggtccagctgtgagttctcctgtgagcagggttttgtgttgaagggatccaaaaggctccaatgtggccccacaggggagtgggacaacgagaagcccacatgtgaagctgtgagatgcgatgctgtccaccagcccccgaagggtttggtgaggtgtgctcattcccctattggagaattcacctacaagtcctcttgtgccttcagctgtgaggagggatttgaattatatggatcaactcaacttgagtgcacatctcagggacaatggacagaagaggttccttcctgccaagtggtaaaatgttcaagcctggcagttccgggaaagatcaacatgagctgcagtggggagcccgtgtttggcactgtgtgcaagttcgcctgtcctgaaggatggacgctcaatggctctgcagctcggacatgtggagccacaggacactggtctggcctgctacctacctgtgaagctcccactgagtccaacattcccttggtagctggactttctgctgctggactctccctcctgacattagcaccatttctcctctggcttcggaaatgcttacggaaagcaaagaaatttgttcctgccagcagctgccaaagccttgaatcagacggaagctaccaaaagccttcttacatcctttaagttcaaaagaatcagaaacaggtgcatctggggaactagagggatacactgaagttaacagagacagataactctcctcgggtctnnnnnnnnnnnngcctactatgnnnnnnnnnnnnnnnnnnnnnnnnncaacacccatcaccacttcaatagatcaaagtccagcaggcaaggacggccttcaactgaaaagactcagtgttccctttcctactctcaggatcaagaaagtgttggctaatgaagggaaaggatattttcttccaagcaaaggtgaagagaccaagactctgaaatctcagaattccttttctaactctcccttgctcgctgtaaaatcttggcacagaaacacaatattttgtggctttctttcttttgcccttcacagtgtttcgacagctgattacacagttgctgtcataagaatgaataataattatccagagtttagaggaaaaaaatgactaaaaatattataacttaaaaaaatgacaggtgttggatgcccacaggcaaatgcatggagggttgttaatggtgcaaatcctactgaatgctctgtgcgagggttactatgcacaatttaatcactttcatccctatgggattcagtgcttcttaaagagttcttaaggattgtgatatttttacttgcattgaatatattataatcttccatacttcttcattcaatacaagtgtggtagggacttaaaaaacttgtaaatgctgtcaactatgatatggtaaaagttacttattctagattaccccctcattgtttattaacaaattatgttacatctgttttaaatttatttcaaaaagggaaactattgtcccctagcaaggcatgatgttaaccagaataaagttctgagtgtttttactacagttgttttttgaaaacatggtagaattggagagtaaaaactgaatggaaggtttgtatattgtcagatattttttcagaaatatgtggtttccacgatgaaaaacttccatgaggccaaacgttttgaactaataaaagcataaatgcaaacacacaaaggtataattttatgaatgtctttgttggaaaagaatacagaaagatggatgtgctttgcattcctacaaagatgtttgtcagatgtgatatgtaaacataattcttgtatattatggaagattttaaattcacaatagaaactcaccatgtaaaagagtcatctggtagatttttaacgaatgaagatgtctaatagttattccctatttgttttcttctgtatgttagggtgctctggaagagaggaatgcctgtgtgagcaagcatttatgtttatttataagcagatttaacaattccaaaggaatctccagttttcagttgatcactggcaatgaaaaattctcagtcagtaattgccaaagctgctctagccttgaggagtgtgagaatcaaaactctcctacacttccattaacttagcatgtgttgaaaaaaaaagtttcagagaagttctggctgaacactggcaacgacaaagccaacagtcaaaacagagatgtgataaggatcagaacagcagaggttcttttaaaggggcagaaaaactctgggaaataagagagaacaactactgtgatcaggctatgtatggaatacagtgttattttctttgaaattgtttaagtgttgtaaatatttatgtaaactgcattagaaattagctgtgtgaaataccagtgtggtttgtgtttgagttttattgagaattttaaattataacttaaaatattttataatttttaaagtatatatttatttaagcttatgtcagacctatttgacataacactataaaggttgacaataaatgtgcttatgtttaaaaaaaaaaaaaaaaa

SEQ ID NO: 5782 - DNA, 2298 bp, Homo sapiens
agcggaagtggcttcagagatgcagccctcagtgcttaacgtcctagttatgtcctggaaacccgagccatctcaccgctcgcccccaaccctgggctctggctgtttaaaagctggagaggaagtgaaagcgtcaagtacatcccgttaggtgcaaagcaagtctcgttgatcgccattgctagttttgcacacgtttgcgaatcagagctgcccggggtacaccgaccgcgcagggaaacatcgagagtgtaaataaatacatcgcctcttgttcggattttgctactaccgaaaatatgtaaattgtgaactctgttggctctctttggatccaggttgatagaagtccagatcctgaggaaatctccagctaaatgctcaaaatataaaaactgagctgagatttgcgaagagcagcagcatggatggattttatgaccagcaagtgccttacatggtcaccaatagtcagcgtgggagaaattgtaacgagaaaccaacaaatgtcaggaaaagaaaattcattaacagagatctggctcatgattcagaagaactctttcaagatctaagtcaattacaggaaacatggcttgcagaagctcaggtacctgacaatgatgagcagtttgtaccagactatcaggctgaaagtttggcttttcatggcctgccactgaaaatcaagaaagaaccccacagtccatgttcagaaatcagctctgcctgcagtcaagaacagccctttaaattcagctatggagaaaagtccctgtacaatgtcagtgcctatgatcagaacccacaagtgggaatgaggccctccaacccccccacaccatccagcacgccagtgtccccactgcatcatgcatctccaaactcaactcatacaccgaaacctgaccgggccttcccagctcacctccctccatcgcagtccataccagatagcagctaccccatggaccacagatttcgccgccagctttctgaaccctgtaactcctttcctcctttgccgacgatgccaagggaaggacgtcctatgtaccaacgccagatgtctgagccaaacatccccttcccaccacaaggctttaagcaggagtaccacgacccagtgtatgaacacaacaccatggttggcagtgcggccagccaaagcttcccccctcctctgatgattaaacaggaacccagagattttgcatatgactcagaagtgcctagctgccactccatttatatgaggcaagaaggcttcctggctcatcccagcagaacagaaggctgtatgtttgaaaagggccccaggcagttttatgatgacacctgtgttgtcccagaaaaattcgatggagacatcaaacaagagccaggaatgtatcgggaaggacccacataccaacggcgaggatcacttcagctctggcagtttttggtagctcttctggatgacccttcaaattctcattttattgcctggactggtcgaggcatggaatttaaactgattgagcctgaagaggtggcccgacgttggggcattcagaaaaacaggccagctatgaactatgataaacttagccgttcactccgctattactatgagaaaggaattatgcaaaaggtggctggagagagatatgtctacaagtttgtgtgtgatccagaagcccttttctccatggcctttccagataatcagcgtccactgctgaagacagacatggaacgtcacatcaacgaggaggacacagtgcctctttctcactttgatgagagcatggcctacatgccggaagggggctgctgcaacccccacccctacaacgaaggctacgtgtattaacacaagtgacagtcaagcagggcgttttttgcgcttttccttttttctgcaagatacagagaattgctgaatctttgttttatttctgttgttgatatttatttttaaataataatacacaaaaaggggcttttcctgttgcattattctatggtctgccatggactgtgcactttatttgagggtgggtgggagtaatctaaacatttattctgtgtaacaggaagctaatgggtgaatgggcagagggattctggggattactttttacttaggctgtggatgggggtccctacatttttgaagtatgatgaaactatatcatgtctgttgatttcataacaacatagataatgttattatcggggtatctatggtacagtaatttcacgtgggtaatatcattgggactatttgctgggatttccctgtattttggt

SEQ ID NO: 5783 - DNA, 716 bp, Homo sapiens
  misc_feature (708)..(709): n is a, c, g, or t
tttttttttttctgtttcaataaaactttattcacaaaaacaggtggcagggtagatttggtctctgtactgtagttcactgacccctgatctaaaagattacatactttgaaaacagcaatgccaaaccttgaatccaggtccgatattttccagcaatcgtgatgcttctctgatcaactgaatgaaacagttataaatgtactggctaaatttagctttatgcacttgttttgtcccctattacagtataaacttttggtgaatagggattttcaaattaattaaagcacttatttttatacccaatacacacaaatacagaactttactatagcagatttttgaccccaatttagtgtgctatctgaataaaaggcttagtaactaaaaaaagtgctgtcttagatttctgaactattttttttttttttttttttttttttttttttggagacagagtcttgctctgtcacccacaccagaatgcagtggcaccatcatggctccccgcagctttgacctcctgggttcaaacgattctctcatctcagcctccccagtagctgggactacagatgcgcaccaccacacctggctaatgttaattttctgtggagacagggtcttgtcatgttgcccagactggtcttgaactccggagctcaagcgatcctcttgcctcggccttccaacatgctgggattnncaggcgt

SEQ ID NO: 5784 - DNA, 2486 bp, Homo sapiens
  misc_feature (817)..(879): n is a, c, g, or t
acttagcagagaagaatcaaatttccgggggcaaagcaaaataataaaatgaatgtcaggatattttatagtgtcagtcagtcaccccacagtctcctctctcttcttttctactgtgctatcctagaatcaaggatttcagcaacaatgcctctgttcaaactcccagctgaagagaaacaaattgatgatgcaatgcgcaactttgctgaaaaagtgtttgcctctgaagtcaaagatgaaggaggtcgtcaggagatttccccctttgatgtggatgagatctgtccgatttctcatcatgagatgcaagcacacatattccatctggagactctgtccacctccacagaagccaggagaaaaaagcgtttccaaggacggaagactgttaatttgtccattccactaagtgaaacatcttccaccaaactgtcccacattgatgaatacatttcctcatctccaacctaccagaccgtgcctgattttcagagagtgcagattactggtgactatgcctctggggttacagttgaagattttgaaattgtttgcaaaggtctgtatcgggcactatgcatacgtgagaaatacatgcagaagtcgtttcagaggttccctaaaaccccttccaaatacttgcggaacattgatggtgaggcttgggtagcaaatgagagcttctatccagtctttactcctcctgtgaagaagggagaggaccccttccgaacagacaaccttcctgaaaacctgggctatcacctcaaaatgaaggacggtgtagtttacgtctatcctaatgaagcagcannnnnnnnnnnnnnnnnnnnnnnnnnnnnnnnnnnnnnnnnnnnnnnnnnnnnnnnnnnnnnngaattttttacttgctttaattgctcaaggacctgttaagacctatacccaccggcgcctgaagttcctctcctccaagttccaggtccatcagatgcttaacgagatggacgagttaaaggagctgaaaaacaacccccaccgagatttttataactgcaggaaggtggacacccatatccatgcagccgcttgcatgaaccagaaacatctgctgcgttttattaagaaatcttaccaaattgatgctgacagagtggtctatagcaccaaagagaagaatctgaccctaaaggaactttttgctaaattaaaaatgcatccttatgacctgactgttgattctctggatgttcatgctggacgccagaccttccagcgtgttgataagttcaatgacaaatataatcctgtaggagcaagtgagctacgggacctctacttgaagacagacaattacattaatggggaatattttgccactatcatcaaggaggtaggtgcggacctggtggaggccaagtaccagcatgctgagccccgcctgtccatctatggccgcagtcctgatgagtggagcaaactctcctcctggttcgtctgcaatcgcatccactgccccaacatgacatggatgatccaggttcccaggatctatgatgtgttccgttccaagaatttccttccacattttggaaaaatgctggagaatattttcatgccagtgtttgaggccaccatcaacccccaggctgacccagaactcagtgtcttcctcaagcatatcactggctttgacagtgtggatgatgagtccaaacacagtggccacatgttctcctccaagagtcccaagccccaggagtggaccatggaaaagaatccatcttacacttactatgcctactacatgtatgcaaacatcatggtgctcaacagcctgagaaaggaacgaggcatgaatacgtttctgttccgacctcactgtggagaagctggagccctcacccatctcatgacagcattcatgatagcagatgatatctctcatggcctaaatttaaaaaagagtcccgtgctacagtacttgtttttcttagcccaaattcccatcgccatgtcaccactaagtaacaatagcctatttctagagtatgccaaaaatccttttttggatttccttcagaaagggctaatgatctcactgtctacagatgacccaatgcaattccactttaccaaggagcccctaatggaagaatatgctattgctgcacaagttcttcaagctgagctactgtgatatgtgcgaagtggaaaggaacagtgtcttgcagtgtggaatttctcatgaggagaaagtaaagtttctgggcgacaattaccttgaggaaggccctgctggaaatgatatccggaggacaaatgtagcccaaatccgcatggcctatcgctatgaaacctggtgttatgaactcaatttaattgctgagggtcttaaatcaacagaataaaaaaaagtaaaccctaaaaaaaaaaaaaaaaacttccaggggggcccggttcccaattcgccctttagtgagtcgtttacaattaactggcgt

SEQ ID NO: 5785 - DNA, 3372 bp, Homo sapiens
  misc_feature (119)..(164): n is a, c, g, or t
agcgggaggccgagctcggctgggcttggcgaggctgcagcgcggccaccggcgggagtgcagcggccactgtacccagagattcaaaaccccaaacccgggacttgggggcgctgagnnnnnnnnnnnnnnnnnnnnnnnnnnnnnnnnnnnnnnnnnnnnnnctgtctgcccctttgcggacagcgtctccctcgactccgcttaggaagtggtgggggcggcgtggcccccgtcgggaggcgttcgaacgcccgctaggagagagaaaggattcccctgtgcttggagcccgcactcgggcgcggagggagcggcggcaggctctcgctttcggcaccatgggctgcacgctgagcgccgaggacaaggcggcggtggagcggagtaagatgatcgaccgcaacctccgtgaggacggcgagaaggcggcgcgcgaggtcaagctgctgctgctcggtgctggtgaatctggtaaaagtacaattgtgaagcagatgaaaattatccatgaagctggttattcagaagaggagtgtaaacaatacaaagcagtggtctacagtaacaccatccagtcaattattgctatcattagggctatggggaggttgaagatagactttggtgactcagcccgggcggatgatgcacgccaactctttgtgctagctggagctgctgaagaaggctttatgactgcagaacttgctggagttataaagagattgtggaaagatagtggtgtacaagcctgtttcaacagatcccgagagtaccagcttaatgattctgcagcatactatttgaatgacttggacagaatagctcaaccaaattacatcccgactcaacaagatgttctcagaactagagtgaaaactacaggaattgttgaaacccattttactttcaaagatcttcattttaaaatgtttgatgtgggaggtcagagatctgagcggaagaagtggattcattgcttcgaaggagtgacggcgatcatcttctgtgtagcactgagtgactacgacctggttctagctgaagatgaagaaatgaaccgaatgcatgaaagcatgaaattgtttgacagcatatgtaacaacaagtggtttacagatacatccattatactttttctaaacaagaaggatctctttgaagaaaaaatcaaaaagagccctctcactatatgctatccagaatatgcaggatcaaacacatatgaagaggcagctgcatatattcaatgtcagtttgaagacctcaataaaagaaaggacacaaaggaaatatacacccacttcacatgtgccacagatactaagaatgtgcagtttgtttttgatgctgtaacagatgtcatcataaaaaataatctaaaagattgtggtctcttttaagttttgcagttcatggtaaaatgcattttcaaaccaaatgagtacttatatatggatctctgtagactagagtcttgcagcaacacagaatgtaatataaggcaaatgcatctgggacttgaccaaagttgttctgttttgtttttttaactgaaagtaacagaaggacctttcttaaatgtgacagatggtcctgcagtgtgaaactgaaggacagtgttaaagctgggctctagtatattgatgatttctgcataagtgtaaatatgcaaatgtatgtatacatgtatttatgactttagttttcgacattatttttaggttttaagagtggcaacttaggattttagggtgatggctttggaaataacataaatataccttgtactgaatgacagactattactacgtttgccagttttaaacagctttatttatgttcatgtcctgtaaatttttaagtacagtaattaatattaggaaacattacagcccttatctagattatatgtatacttgtattaataaaaatgttatttgtacaaacattgcacagactattttaataacatgatttgttctttaaattttatgtgttttattgaaatgttcttaagatgaatacacctgcctttggatcaactatttaaacattgtatgcattttgatttttcctactttaagaaaataaaataatttaattttacattagattccacgttagatttggtttgaaaaactaaaatttcagatttctgaggatatactgtcttagacttattgtacacacttagtttttattcacttgttttcactctgaattttaatatttggctgatatgaatgcattgcctcaaaggtgatgtcatcttaatttttattcactttaaataactacatttttgtttataactaagtttggagggatcctaagagcatttttgtgggtaaaaaaaaaacctgtggacataatgaattttgagacattgattggtgaggcttttatttcccttgaggagtctcttgtacctagcatacatgatagctccttgttgggaagataacaagaaggatctttgaatactctattgctgatataatgcaagatttaaatttatacatataactaatttcaaatgtaattatcacactatgttaaaattacttttttcccttagataattcaaatttctccacttgcttgagattatatcatttctttttcaattatactattatttctgagaatgaaatggacgattacacttagaaaatgagtaatagtgtttaataagtcagtgattatatgtgtgctcaaataagtgttatgtatcagctagatactgagctttgatagaataattttcttttgattattcatgatgtgtcatctctgaccttgtttcagcaaagtaaacagcactccccaccccaccctcatttttttactcatcttggaaaaggttagtctttcagtacacgttactggtaagtagtttccaagttacgtgttgtcactgggttgaagtatatttgtgtgtgtgtgtgtgtgtgtgtgtgtgtgtgtgtgtgtgtaaccataaactatattcatatctgtttcatttggaggattttcttctttgtaatgtaaagaaattcaaagttatcaaagttccttaaatgtgttagtttagattctttatgtgcctttcatgaaagatatgttttcattaattttactggtggacctgtaatatccacattgtgaagctgtgtatgaaattcaactataatatgaataaatttgaatcatgagaattatgggttaaaaagccacaaagaagcacatattggtgaccatcattaatgaaatcctgaactttattctgtgtaattgtgttaataaatcctaataaatttaaatttttaaaattttacaaacaaaaaaaaaaaaaaaaaaaaaaaagaaaaaaaaaaaaaaaaa

SEQ ID NO: 5786 - DNA, 2449 bp, Homo sapiens
aagcgaccccaacagccacctgctggaggcctcaggggatgcggcgctgtatgcggggctcgtggtggccatcttcgtggtcgtggcaatcctcatggcggtgggggtggtggtgtaccgccgcaactgccgtgacttcgacacagacatcactgactcatctgctgccctgactggtggtttccaccccgtcaactttaagacggcaaggcccagcaacccgcagctcctacacccctctgtgcctcctgacctgacagccagcgccggcatctaccgcggacccgtgtatgccctgcaggactccaccgacaaaatccccatgaccaactctcctctgctggaccccttacccagccttaaggtcgaggtctacagctccagcaccacgggctctgggccaggcctggcagatggggctgacctgctgggggtcttgccgcctggcacataccctagcgatttcgcccgggacacccacttcctgcacctgcgcagcgccagcctcggttcccagcagctcttgggcctgccccgagacccagggagcagcgtcagcggcacctttggctgcctgggtgggaggctcagcatccccggcacaggggtcagcttgctggtgcccaatggagccattccccagggcaagttctacgagatgtatctactcatcaacaaggcagaaagtaccctcccgctttcagaagggacccagacagtattgagcccctcggtgacctgtggacccacaggcctcctgctgtgccgccccgtcatcctcaccatgccccactgtgccgaagtcagtgcccgtgactggatctttcagctcaagacccaggcccaccagggccactgggaggaggtggtgaccctggatgaggagaccctgaacacaccctgctactgccagctggagcccagggcctgtcacatcctgctggaccagctgggcacctacgtgttcacgggcgagtcctattcccgctcagcagtcaagcggctccagctggccgtcttcgcccccgccctctgcacctccctggagtacagcctccgggtctactgcctggaggacacgcctgtagcactgaaggaggtgctggagctggagcggactctgggcggatacttggtggaggagccgaaaccgctaatgttcaaggacagttaccacaacctgcgcctctccctccatgacctcccccatgcccattggaggagcaagctgctggccaaataccaggagatccccttctatcacatttggagtggcagccagaaggccctccactgcactttcaccctggagaggcacagcttggcctccacagagctcacctgcaagatctgcgtgcggcaagtggaaggggagggccagatattccagctgcataccactctggcagagacacctgctggctccctggacactctctgctctgcccctggcagcactgtcaccacccagctgggaccttatgccttcaagatcccactgtccatccgccagaagatatgcaacagcctagatgcccccaactcacggggcaatgactggcggatgttagcacagaagctatctatggaccggtacctgaatttactttgccacaaagagagcccacgggtgtgatcctggacctctgggaagctctgcagcaggacgatggggacctcaacagcctggcgagtgccttggaggagatgggcaagagtgagatgctggtggctgtggccaccgacggggactgctgagcctcctgggacagcgggctggcagggactggcaggaggcaggtgcagggaggcctggggcagcctcctgatggggatgtttggcctctgcttcctcccagttcacagccagagttgcctctcctcctcctcttccccaacccccagaccatgaccagccttagaaaatccatgtactctgttgttagagggcccagagttccttctccacccccgctctctctctcttggcctgagatctctgtgcaggaaccaagatggggctgaagcctctggaggcagttggttgggggcgggcaggcaggaggccctccctccacccccccaccctcagcccggcaacttctgggttccatgggttttagttccgttctcgttttcttcctccgttattgatttctcctttctccctaagcccccttctgcttccacgcccttttcctctttgaagagtcaagtacaattcagacaaactgctttctcctgtccaaaagcaaaaaggcaaaggaaagaaagaaagcttcagaccgctagtaaggctcaaagaagaagaaaaacaccaaaaccacaagggaaaagaaaaacccagtttcttaggaaacgcaaacgatttattatccagattatttggataagtcctttttaagaaaaaaaaaaaaaaatgaaaaacaacacaaaaaaaaaaaaaaaa

SEQ ID NO: 5787 - DNA, 2843 bp, Homo sapiens
gggcgcagagctgggccgagccgtcgccggcgccacgcgagtcccgcagccgccgcgcccgggcaatgggccgggggcactgagggccgccggggccgagcgcggaggggggaccgagccagtgccgtgccctcgggccgcgccaacatgccccgcggcttcctggtgaagcgcagcaagaagtccacgcccgtttcctaccgggtccgcggcggcgaggacggcgaccgcgcactgctgctctcgcccagctgcgggggcgcccgcgccgagcccccggcgccgagcccggtccccgggccgctgccgccgccgccgcccgcggagcgcgcccatgcagcgctcgccgccgcgcttgcctgcgcgcctgggccgcagccacccccgcagggcccgcgggccgcgcacttcggcaaccccgaggctgcgcaccccgcgccgctctacagtcccacgcggcccgtgagccgcgagcacgagaagcacaagtacttcgaacgcagcttcaacctgggctcgccggtctcggccgagtccttccccacgcccgccgcgctgctcggagggggcggcggcggcggcgcgagcggagctggcggaggcggcacctgcggcggcgacccgctgctcttcgcgcccgccgagctcaagatgggcacggcgttctcggctggcgccgaggcggcccgcggcccgggccccggccccccactgccccctgccgccgccctgcggcccccgggaaagcggcccccgccccctaccgccgcggagccgcccgccaaggcagtcaaggccccgggcgccaagaagcccaaggccatccgcaagctgcacttcgaggacgaggtgaccacgtcgcccgtgctggggctcaagatcaaggagggcccggtggaggcgccgcggggccgcgcggggggcgcggcgcggccgctgggcgagttcatctgccagctgtgcaaggaggagtacgccgacccgttcgcgctggcgcagcacaaatgctcgcgcatcgtgcgtgtggagtaccgctgtcccgagtgcgccaaggtcttcagctgcccggccaacctggcctcgcaccgccgctggcacaaaccgcggcccgcgcccgccgccgcccgcgcgccggagccagaagcagcagccagggctgaggcgcgggaggcacccggcggcggcagcgaccgggacacgccgagccccggcggcgtgtccgagtcgggctccgaggacgggctctacgagtgccatcactgcgccaagaagttccgccgccaggcctacctacgcaagcacctgctggcgcaccaccaggcgctgcaggccaagggcgcgccgctagcgcccccggccgaggacctactggccttgtaccccgggcccgacgagaaggcgccccaggaggcggccggcgacggcgagggggccggcgtgctgggcctgagtgcgtccgccgagtgccacctgtgcccagtgtgcggagagtcgttcgccagcaagggcgctcaggagcgccacctgcgcctgctgcacgccgcccaggtgttcccctgcaagtactgcccggccaccttctacagctcgcccggccttacgcggcacatcaacaagtgccacccatccgaaaacagacaggtgatcctcctgcaggtgcccgtgcgcccggcctgctagagcgcgccctccaccccggcccccgaactgtgccttcgcttggagacccacaaagagagtgcgccctgcacgccccgaacccgagtccgcgctgggggagcctcgcccccgcccccaccgggtgagagtgtcgtctccgcttctctcggtgtggcgtgacggtaaccccatactctccttttgactccttttggaacccccacttttacgttgtgtccctccgcctcccccatggcgcaacaggagtcagtctctttctgtacaagggagaaaagctgtacgcgtttgtctcgtggttggaagcctccccttggcggggagaagctttttttcttgctagtattcgctgtgttcatggtctagaaatgcggtctggtctcgcctcgcctaccaatctctgctctctatgtatgtagcgtacgggttgttttgggtgaatcttgaggaataaatgcctttatatttcacaggctgtaaattgaacttcccacacgattagctttattatggcttgtgaactgctggagtctggctttacctttttgtatgtgaacaaatcaaattgcttaaaaaagagttttctttagtatagccacaaatgccttgaactgttgtctgggattgttttgtggggggagggaagggagtgttccgaagatgctgtagtaactgcctcagtgtttcacgtaagactttttggtttgatcatctttgttgaggtaggactatcagttccctctaaatgtatatgttgatttatgagtaattgttatttattctttatttatttatattaattatgaagattatgatattatttgattgcagatttttttggcgcgctgccccctccccaccctgccactcttgacattccactgtgcgttttagaagagagcctttttctaaagggatctgcttaaagttttaacttttatacctatctgagtgaattacagacaacctatcatttattctgcttcgagggtccccagggcccttgtacaaccgacagctcttacttttaaatgcaatctcttttctacatacattattttcttaattgttagctatttatagaaagcttcaatagaactgtttcaactgtataactatttactattcaaataaaatattttcaaagtcaaaaaaaaaaaaaaaaa

SEQ ID NO: 5788 - DNA, 530 bp, Homo sapiens
  misc_feature (195)..(216): n is a, c, g, or t
ttttttttttttttttttggttttttaaataatttgtctgttgtttttaattgttgaggcagtaatacttggttcatgaaactgcaatatacagagaggtgaaataaatagcttatatatatataatatatataatatagctggttttaaaatattcccttatcattggtgtactaggtcacgtgagtcacggannnnnnnnnnnnnnnnnnnnnngaactgcgagcaaggcagggtcaccatgattggacgaggcgtctgtcgtcgggaggtcgaggcgcggagaattcccaggggcacgccttccctgcgcggtgtctcggggcagcttgcagcggacaataaataaatgactgcaaaccagagagcgatttttgttggagtttggggcaggaacagaggattgggaaagttagggggagtttgttggtgggcggagtactactttctctttgtttttctttttttttgttttttttttttttcctttcagaacctttgggaaaaaggactttggtttctcctcgtgc

SEQ ID NO: 5789 - DNA, 6355 bp, Homo sapiens
gggtcggcgaggagggtccggccggagttgaaggattgaactttccggctcagtcgcggcggctgcctggtcctcagcagtgcagccccggcgcggagcagggagcctcggcccgcgcccggcgccctcgccctcgccctcgacccgcagccatggtgcccggggtgcccggcgcggtcctgaccctctgcctctggctggcggcctccagcggctgcctggcggccggccccggcgcggctgctgcgcggcggctggacgagtcgctgtctgccgggagcgtccagcgcgctccgtgcgcctccaggtgcctgagcctgcagatcactcgcatctccgccttcttccagcacttccagaacaatggttccctggtttggtgccagaatcacaagcaatgttctaagtgcctggagccctgcaaggaatcaggggacctgaggaaacaccagtgccaaagcttttgtgagcctctcttccccaagaagagctacgaatgcttgaccagctgtgagttcctcaaatacatcctgttggtgaagcagggggactgtccggctcctgagaaagccagtggatttgcggccgcctgtgttgaaagctgcgaagttgacaatgagtgctctggggtgaagaaatgttgttcgaatgggtgtggacacacctgtcaagtacccaagactctgtacaaaggtgtccccctgaagcccagaaaagagttacgatttacagaactgcagtctggacagctggaggttaagtggtcctcgaaattcaatatttctattgagcctgtgatctatgtggtacaaagaagatggaattatggaatccatcctagcgaagatgacgccactcactggcagacagtggcccagaccacagacgagcgagttcaactgactgacataagacccagccgatggtaccagtttcgagtggctgctgtgaatgtgcatggaactcgaggcttcactgcccccagcaaacacttccgttcttccaaagatccatctgccccaccagcaccggctaacctccggctggccaactccaccgtcaacagtgatgggagtgtgaccgtcactatagtttgggatctccccgaggagccggacatccctgtgcatcattacaaggtcttttggagctggatggtcagcagtaagtctcttgtcccaacaaagaagaagcggagaaagactacggatgggtttcaaaattctgtgatcctggagaaactccagccagactgtgactatgttgtggaattgcaagccataacgtactggggacagacacggctgaagagtgcaaaggtgtcccttcacttcacatcgacacatgcaaccaacaacaaagaacagcttgtgaaaactagaaaaggtggaattcaaacacaactcccttttcaaagacgacgacccactcgcccgctggaagtcggagctcccttctatcaggatggccaactgcaagttaaagtctactggaagaagacagaagatcccactgtcaaccgatatcatgtgcggtggtttcctgaagcgtgtgcccacaacagaacaaccggatcagaggcatcatctggcatgacccacgaaaattacataattcttcaagatctgtcattttcctgcaagtataaggtgactgtccaaccaatacggccaaaaagtcactccaaggcagaagctgttttcttcactactccaccatgctctgctcttaaggggaagagccacaagcctattggctgcctgggcgaagcaggtcatgttctttctaaggtgctagctaagcctgagaacctttctgcttcattcatcgtccaggatgtgaacatcaccggtcacttttcttggaagatggccaaggccaatctctatcagcccatgactgggtttcaagtgacttgggctgaggtcactacggaaagcagacagaacagcctacccaacagcattatttcacagtcccagattctgccttccgatcattatgtcctaacagtgcccaatctgagaccatctactctttaccgactggaagtgcaagtgctgaccccaggaggggaggggccggccaccatcaagacgttccggacgccggagctcccaccctcttcagcacacagatctcatcttaagcatcgtcatccacatcattacaagccttctccagaaagatactaaactgttcaaaaagattttgtgaaattgcacagatgtgtaagcttgttgaacttcggccacgagacatgcacacttccagaggcagtgggaactgctcagaggcccggactctcctatgtgactttagtgcaggaagaacttctgtcaatcatggacgcatctggagacaagtgagaaacagtagattggtgaagacagacaccagttccctacaagcatggagaaaatgaagaataggcctgtttaatgctaaattttgttttcatgtatggtgtcgctcatttctattgaattacaacagaactcagttttccctgaatttggagcaccaaactccgccccaaaaaggagagtaacaaatacacaattcacacataacactaagcgtaaatctaatcaataaaatatatttttgactaaattattgattcgatatgaaaaatcaactaagattacacagctttgtttttttgaatctttcctaagatcatttttatcctaggtgatttttaaatgaaaatgtgtaatctaaaatataccagcgaatttaaatctaaaaatgctcctactttaagtaccttgtgctgctctttatgcaaaggtaaatcaaagttccctctataaattatgatttacaaaagacacccaagccagaggaactcaatgaaataagctgctaatcagattttaccttggagaaatgaaaattatttcttggggatgccttttaatatttgatcctattatgtgagagattttcctgatatgttatcttatttatattttcccttattttcctcaatgcagataatagcttttggtgcacttttgtttcaccatctgaaaattcacaaaacttcttgcttcaaatgaaaaaatcccaactattgagcatgtttaaatctttgcagagatttgccttttcttaatcaaagaaaggtctttgtgtgctagaatattattggtaatgttttaaaaattcctttgattgatagagaaggacagttatttgcatttaattcacccatatgctttcaaatctagtatatcttactttttggaaatgttttatgctacaaattagtgccttgtagcatgaacttaagtcaaaacgtgttatcaatatagagtgttgcagtgtatattgtaacaacctaaaacgcagagaagtttaatttaatactgttttttttcttgaaggaatactcacatacatggtttgaaatgtgcatagatatgcatgtctatataattataaatgcatgtgtatatatatgcaaatatatgtacatatacatgtatatacacacagacacatgcatatacatgaatataccttgagcatgaatccctggagaaatcgttttcgtaggctcaccaatggtgagtaaagatacagctcttttaaaggtcataaggataatatattttccccatcaatgctgattctgagaaaagagcaatttatcaaaattaaacactgtaaaagaaaggtgtccatatgtctttacctacctaagtaaaacaggaagaaaatcagtaacattatccttaggttttgacaatggtacttgcttcttgttgttttattgtttcctgaattcatgcagatgcctggccattcctgggaagagtggataactcagaagtcactgtactccacagagcctcactgcagtgtctaaaggtagatgcaaattaaaatgcagggaaaataacttttctgatgttgatgcatgtctttgggaaacacatttataaacatggatacctgataatagatattgaaacccatttcctgtgtgttaaaatatttaaaaagtggatattccaggaatgttttgcagctttgtacaagtaacataaattggacacctcagaatgaaagttcatgttggttctgaatggttcactgcagctcctgtcacaagctgggatggatttatcacattgagttatgaaattacctggttctaagaatttttgagtggcaaaaatagaaaacaatcttcatttgaaaacatccctaagcttgaataaatggataccatagatagcttctcttttttattctggtgtcattaccagcatctgaatttcaagttcttaaaatttcaaaaattaaaatttttcattattagctatccatttatcttttacatgaacttgtcatgaacaaattcaaatgtttatgccagcaaatttttgtactgttgcatagttaaaaatgctgggagtctctgcatagatacaaaatattattaaattattacataaatttaattttataaaatttaatcatgcttcttttgtctggtaatagacattggacagatatttttagttcagatggtgattctgaagcttacatctcccttaaaaaaatctaaagcagctcttatgggcttctaattttaatataaataaataatttaaattttattggtgttattggaagaaaaatgctattaatgggctaataaaaaacatgtgtttctcttatggattttaataagctccagtattattcaaatgatcaaaaatatagttataattttttgaattttaaaaatgtgattgctctaataaagaataaaatctatgctttttaacaaacatagttttggtgcctaattctgtaatatgttttattgaaattagattcatttctctaatgtgagaaaaatatatccagtaatagtattgactgtttaaaaaattgagctcatcaaaaatattgtcatcaaatacaggtggttaatctgacatacattgcagttacatgcattatttttatttacaacatttgctccttaatgatgaatttatctgtgttaccctgtttttctacctggaactccatagaatgatgtttgcaaaccaacatgtgctcttttcagtcattcactgttttaatatgacatggtagagaagataaggtttatggcaggtaattttttgtaatgtgtattaaacgaagttcaaagattagaaatacatctgtgtcctgaaaaccttagatacatagccgactgtatacagaggttcatctcaacctcaacactattgacttttggggctggatagttctctgttgtgggggtttgtcttgtgcactgtaggtttttagtagcatccacactttctcctcaccagatgccagttgcaccctcccccaagttgagacaaccaaaaatgtctccagatattgccagctaccccttgagggatggtacctctggttgagaaccattgctagagaatgatctttactgaatttgccctttataagaaacccagtgaatttctagagcaagtcccaaaaactaagggacagctaagaagttattatggttgacttcaaaggcctaaactgtgttttttatgtccactaaacaacttgattaaaagacggaattttgactcgtgtctgtatcatacaagtacaaatactaattttgccctatgtatccgtaaatgtcatttgtgattttgacttatttatttaatgccctttcttatgccgtgggttttcaagtttactcatttctatggttgcaaataactctaaaacttattatataaactttcatattataggcagaacacaatggttaaatatctgttgcatgtactttaaagtttattataaaatataaacagatatataaagatgttgactcttacctgtgattttgcatggtcagactcggtgtcaggtacggagaggattctcatgactgtcttacctctactgaatattctagtgagttatatgatttacggagtgattaacagaggtctatataaagttacttttcccctttacttaattatattgtagtgtgcagataacaaaactgctaccttctcatccaagtggtctgtagaattcatgtcccttacagtggtcatttaaagtcaatatttatttatgtatgtaataaaaaaagttggatttttgtgtatgtctgtcacattatttagagagaagtaatcttgtaaaaatgttttgtaaaaaacaaaaaagtattgtaaatagtcttgatattctgtgactcattattttcatgttagagtttgtacatactggttcaataataaagtatccttaaaccagaaaaaaaaaaaaaaaaaaaaaaaaaaaaaaaaaaaaaaaa

SEQ ID NO: 5790 - DNA, 3286 bp, Homo sapiens
  misc_feature (248)..(271): n is a, c, g, or t
ggctcagcctcaggtcctgcggggctgaccagtgtgcagagtgccctgaaagcgccaggcctggctgggtgcttcccatcttcacagcacctgagaggcagctaccaccacccttcttatagaagaggaagcagaggctttgtgaagtgtcccaccgaggaggccctgatcttgagcccggagccctgagccctgagacgatgcttgaggatcttatgaccatgacctggctaccttgagtctgtggnnnnnnnnnnnnnnnnnnnnnnnnctccagggctctgactctatccagctcctggaccagctcccaagtctactcctgaccccaccctggagagacatgcgattggtgaccgagccgagcggaccgaaggcgcgcccgagatgcaggtgagcaagaggatgctggcggggggcgtgaggagcatgcccagccccctcctggcctgctggcagcccatcctcctgctggtgctgggctcagtgctgtcaggctcggccacgggctgcccgccccgctgcgagtgctccgcccaggaccgcgctgtgctgtgccaccgcaagcgctttgtggcagtccccgagggcatccccaccgagacgcgcctgctggacctaggcaagaaccgcatcaaaacgctcaaccaggacgagttcgccagcttcccgcacctggaggagctggagctcaacgagaacatcgtgagcgccgtggagcccggcgccttcaacaacctcttcaacctccggacgctgggtctccgcagcaaccgcctgaagctcatcccgctaggcgtcttcactggcctcagcaacctgaccaagctggacatcagcgagaacaagatcgttatcctactggactacatgtttcaggacctgtacaacctcaagtcactggaggttggcgacaatgacctcgtctacatctctcaccgcgccttcagcggcctcaacagcctggagcagctgacgctggagaaatgcaacctgacctccatccccaccgaggcgctgtcccacctgcacggcctcatcgtcctgaggctccggcacctcaacatcaatgccatccgggactactccttcaagaggctgtaccgactcaaggtcttggagatctcccactggccctacttggacaccatgacacccaactgcctctacggcctcaacctgacgtccctgtccatcacacactgcaatctgaccgctgtgccctacctggccgtccgccacctagtctatctccgcttcctcaacctctcctacaaccccatcagcaccattgagggctccatgttgcatgagctgctccggctgcaggagatccagctggtgggcgggcagctggccgtggtggagccctatgccttccgcggcctcaactacctgcgcgtgctcaatgtctctggcaaccagctgaccacactggaggaatcagtcttccactcggtgggcaacctggagacactcatcctggactccaacccgctggcctgcgactgtcggctcctgtgggtgttccggcgccgctggcggctcaacttcaaccggcagcagcccacgtgcgccacgcccgagtttgtccagggcaaggagttcaaggacttccctgatgtgctactgcccaactacttcacctgccgccgcgcccgcatccgggaccgcaaggcccagcaggtgtttgtggacgagggccacacggtgcagtttgtgtgccgggccgatggcgacccgccgcccgccatcctctggctctcaccccgaaagcacctggtctcagccaagagcaatgggcggctcacagtcttccctgatggcacgctggaggtgcgctacgcccaggtacaggacaacggcacgtacctgtgcatcgcggccaacgcgggcggcaacgactccatgcccgcccacctgcatgtgcgcagctactcgcccgactggccccatcagcccaacaagaccttcgctttcatctccaaccagccgggcgagggagaggccaacagcacccgcgccactgtgcctttccccttcgacatcaagaccctcatcatcgccaccaccatgggcttcatctctttcctgggcgtcgtcctcttctgcctggtgctgctgtttctctggagccggggcaagggcaacacaaagcacaacatcgagatcgagtatgtgccccgaaagtcggacgcaggcatcagctccgccgacgcgccccgcaagttcaacatgaagatgatatgaggccggggcggggggcagggacccccgggcggccgggcaggggaaggggcctggccgccacctgctcactctccagtccttcccacctcctccctacccttctacacacgttctctttctccctcccgcctccgtcccctgctgccccccgccagccctcaccacctgccctccttctaccaggacctcagaagcccagacctggggaccccacctacacaggggcattgacagactggagttgaaagccgacgaaccgacacgcggcagagtcaataattcaataaaaaagttacgaactttctctgtaacttgggtttcaataattatggatttttatgaaaacttgaaataataaaaagagaaaaaaactatttcctatagctagtcggaatgcaaacttttgacgtcctgattgctccagggccctcttccaactcagtttcttgtttttctcttcctcctcctcctcttcttcctcctttctcttctcttccccagtggggagggatcactcaggaaaacaggaaaggaggttccagccccacccacctgcccaccccgccccaggcaccatcaggagcaggctagggggcaggcctgggcccagctccgggctggctttttgcagggcgcaggtggaggggacaggtctgccgatgggggtgggagcctgtctgctgggctgccaggcggcaccactgcaaggggtgggagcctggcttgggtgtggctgagactctggacagaggctggggtcctcctgggggacagcacagtcagtggagagagccaggggctggaggtggggcccaccccagcctctggtcccagctctgctgctcacttgctgtgtggcctcaagcaggtcactggcctctctgggcctcagtctccacatctgtacaaatgggaacattaccccctgccctgcctacctcacagggctgttgtgaggaattgatgagatgatgtatgtgaaacactttgtaacctgtaaagcgctgtgcacacgtgaaaaaaaaaaaaaaaaaaa

SEQ ID NO: 5791 - DNA, 3203 bp, Homo sapiens
atgtttcctcttcctctttcaaattaccccaattccccattttatattgttcccgtttccactcttgataccctttcccctaatttaataacaattgtcctatgccctgtatttaccgtgcaaccctcttattcccggaaactttccaaaaatttcttgaaccacttataatcagtttctcacctcgcaccacttcgtaggatttctaaacgctctataatcagtttcacctcaacaacttacttcagtaagaatgtctaagagacccaatatttaaaaaaaaaacactgcatttcaaggatgaaaatgtgtgatttgtgtaaacaatttttaccaactttacattttcctacagataaatgtgaaattttgataagaagtctacgcaatgacaagtatggtacataaattttattaagaatattgagtataaagtactttaattctaaattataagaaaatatacatttgcacatattaatatagaaattcattttgtgtatatttaacatagcttttaaactattttacattagctacttcattatggtttcttgaacttctgaaaaaaattagaaatgtattaaacttatcagtaacataaaaacttattttgtttcacctaacgaatactgcgtttgtaaaaataaatttaatatagaatatatttttaaattaaatatttgaatataaaatagctctaagaaagaagcaaattatcactgaacatatttcttattatttctggctttgaattatacgtaacttaaattgtcttaaatgatacagaatattggagaatatgatactttcacataatatactatgaacctgttcatataactctgattgactactaacttctgttttatgtatttattaaagagctgacactgtagtttgtggtgagatgtttatttttctaacagagcttataacagttaggacaaggcatttaattaatgcatcattctgtttagtagtaggtgttaatcaatatgaaattctctgttttaaaataaaaatgtaaaaatctaagaataaaaaaaaaactagaacacgctcttgctaaccatttgccaggggaaaacattctgcttttaggtagtttcaaaattcaggggagggagcctgaaatttttgccatgattggtttgttagaaagagcaggcatcagactacttctgataaaattgtttggaaggtcacgacctcgcaaaaacttttcaagagcaacaaggaagaattctgctgtgaagaacacagtgtacggatcctccgcatattatctcaacagaggacagtagctcaggaggcagcttcaaacggtgacctgtggcctgggccatctcttcgtcatgtgcttcacttttccctgtttccctgtgaactggcttccatggttctgtagggtagtgagtcggggttgtggctgcagcagagcaggagatgcttgcccgagtgggagcaacccacccccgtgtccccaatgcctcactcctggcttctagtgcagccctttgtagactcacctcgcaagaaggaagatctgcctggagacctgatcccagtccagctttttgaccataggtcatctttgtccccttgctcctttgcatcatgtcataaaatttgaggatatcagctgattattttttcttccaagaatgaaaatcaagcagaattgattcctacacgaaaaaaaagcacacgaatgccaaacctttcctttggtggactggacactaaccagatgagagtaaatttcttatccgtggacgtatgtaagctactgctgctgtgtgctctccacagccatatttattgtattaaacaatcagcactaaaccttcaaaaattgcccagtgttcctagttaaatgttcagaggggagaaatagatatattttaaataatgttttgctaatgaaaagagtaaatatttttgtttaaatcagcaaaaactttccattattttatatttccgtctactatacctaaaacaaaagattgccgttatacctgggttccgctgatgcagtcagccagcacctcctcacatgcacacatgattagacataggtgcactcggtaccaagagtccattttatggtccagcatatactccattgattcatcatcactgcatgtgttcagccagtgtatctcacactatccatacaaatctaaaattgatactggaaatgttattataggaggcagtgatcgcatttaaaatcaggccacctacaagtttaattttcaacatctcatgtttttatttgtcccattacagcctcaaatgttggtcataaaaaaaatttaggctaccaaagtttaaagaataaaatgaaaattttataagaacttacattaaaaactcagtagtttgcatgagtaagaactccttgagatacacagatccccccacatttgtatttaaaataattggtgaggcattgaaatccagaattataagaaagcattactgaatatgtgtgttataaaatcaatattattataaacaaaataggaagctagaaatatttgggatcacagtaatagcttttctcaaatatacttttagaattgaatgtacattatcctatatgtaaaaaagcaaattattaattttaatggagctctcgattgacctttttagcatacttttatagcatgtatattaaaatagaatatattttagcaaaagattgccataaaaccctgacttggctcattttgatatttgcactgtgaagagggcttaaattccaatgtagcaatgtggtggcagacaaatgaaaaactaggaagttctttcacagtaatgcctagttgttccaaatttgctatatttggaggtgctctactggtacttcctgcttgactctctgacctgtgggatgcacattcttcctcagcgctttttccttgttgtggtgacgtacattcactatctgagagtgaaagaccacacacacccctctttttaaaattattgtatctcttccttttcactttggtttgaacaaagatagtgtcaccttgttccgtgaaaaggaaaagcataaacagtgtatatttagggtatatgggtgatagcttatgatgtgtgtcaatcagttctctgaatcttttactgaaactgagacaggaaaataaaactgaaacaaatcataaaaaaaaaaaaaaaaaaaaaaaaaa

SEQ ID NO: 5792 - DNA, 1369 bp, Homo sapiens
  misc_feature (854)..(868): n is a, c, g, or t
  misc_feature (924)..(1013): n is a, c, g, or t
gagacatggatttataatggcattttatatttggcaggccatcatagattatttacaaacctaaaagctttgtgtatcaaaaaaatcacattttattaatgtaaatttctaatcgtatacttgctcactgttctgatttcctgtttctgaaccaagtaaaatcagtcctagaggctatggttcttaatctatggagcttgctttaagaagccagttgtcaattgtggtaacacaagtttggccctgctgtcctactgtttaatagaaaactgttttacatggttaatggtatttagagtaatttttctctctgcctcctttgtgtctgttttaaaggagactaactccaggagtaggaaatgattcatcatcctccaaagcaagaggcttaagagagaaacaccgaaattcagatagctcagggactgctaacagagaactacatttttcttattgccttgaaagttaaaaggaaagcagatttcttcagtgactttgtggtcctactaactacaaccagtttgggtgacagggctggtaaagtcccagtgttagatgagtgacctaaatatacttagatttctaagtatggtgctctcaggtccaagttcaactattcttaagcagtgcaattcttcccagttatttgagatgaaagatctctgcttattgaagatgtaccttctaaaactttcctaaaagtgtctgatgtttttactcaagaggggagtggtaaaattaaatactctattgttcaattctctaaaatcccagaacacaatcagaaatagctcaggcagacactaataattaagaacgctcttcctcttcataactgctttgcaagtttcctnnnnnnnnnnnnnnntcctgtaccaaagtcaaaatgaacgttacatcactctaacctgaacagctcacaannnnnnnnnnnnnnnnnnnnnnnnnnnnnnnnnnnnnnnnnnnnnnnnnnnnnnnnnnnnnnnnnnnnnnnnnnnnnnnnnnnnnnnnnntacagccctatctgcactttttatttattagcttgaagtgtgaggcagggcattttccactcagttttctttggcttttcttgagaagtttattaaaacttctcccttgggttacctggttatcttttgcgcttcttaacatgtggccattaatctttttgattgccctccaggattaaggtcggccttaatttcatttgaaagacctaaactattacggtgatatccgggaaagcctatgagttgttaggaacaccagagaggagtgtagcacagaggcccaatcaggaatccttagacttgaaaaaaggcgtcggccgccgtagatagggcagcgttaagtatttaccctctac

SEQ ID NO: 5793 - DNA, 1715 bp, Homo sapiens
  misc_feature (27)..(28): n is a, c, g, or t
gcgctggcctgggtatttccaaaacanncttttgcacacatgcaggtgcaccgagagtctggagctgtgctgagcacctctgtggatgtgagccaggaggtagggcaaaggccggatgctgatgccagcgctggaggtggtgatactgggggcggggaaggcctagaaatactttgagccatggccttgccagtgtcccgtgccctccagtgtcaaagatttggggcactgcccgtcgaaatggaaaggttggtgctcagcctctggagcctcacctgcagggcgtccccagctaacacccatccacgcaccacctccaggacgagaacccttgatgtcaaaaccaagtgcccagtggaggcggtgaagctctcggaaatgctgccacctgtgtgaggccgggtctgaactcgagggagtcggagctcagctgtcggtttaaagagacactgaggggaccgggctgccgccctcagcctgcattcctgtgcgcaatcgattccgcaatgacagcaccttactccttcctgcggcaggctcacccctgcctgtgggatgttgtgagaggaacatgagccagacaaagacttggctcagggctccgtggaacaagccaggatgcacggggagctgggggagcccccagcctggggcagcccagcaggccgctgaacaaacaccccagaagccagcactgtggcagggtgctggggagatgcccctctgagccttcctcccccctcagacctgaatgcaccccacagttgggggctgcccctgccactcccctggtaatgcataaaaggggaggggaaggttccctggggcttgagctccctctgtggaggtgaggaggggagattccgttcacatccaggaggggcaaaatgactgatgtatttttatgtatctacacagagagtgcattttctctccagagatgctgtctggttaacaaaggaataacttaagaaattgattgattatcttaataaactgtgcaaacccaaaaaaaaaaaaaaaaaaaaaaaaaaaaaaaaaaaaaaaaaaaaaaaaaaacataatcaaaatcaacaatcaaaacataagacaacaacacaaaaaacacctacacacacacaccacacaacaacacacaagaccacaacaccacacacctccgcgtaagaacctcacgctacatcacctgatctgactccagacacacatcccgcgtggagcggagcgtgggtgtggtgcagggtcggggtggagggcggcgggcgcgtttggcttcttgtcgcgccggtggtggcgctggctacgctggtgtgccgcggcgctgcgccggccggtgacgctgtcgatgtcggggcgcgcggcgggcgccggccgggggtggcgcgtgccgtctgtctgccgtggcggccgggcgggcgggcccgccgcgcggccgcgccgtcgcgggcgggacgcctgccgccggcctgctccgtcgctgctcgccgggcggcggggctcccttccgcttgggtggcggccggcccgccccgcgggcgccgcggcggcgcccgccacgcgcgccctcgccgcgcccgggcgcgcgtacgtttgcgttgttggggcggtgcggtgtggcgcggcgctccgtccttcctcggtcgggctcgggcgctgcgtcgccgtggcccctctgcttcgcgtggcggccctgggcggcgcgacgtgaccagccc

SEQ ID NO: 5794 - DNA, 5718 bp, Homo sapiens
  misc_feature (3489)..(3521): n is a, c, g, or t
  misc_feature (3836)..(3882): n is a, c, g, or t
ggtgttggcagaggcaaaaagtgtaatgaaaaattggtaattcttttctagttaagttgtagtcttaaaaattatctttttatgtttcaaattttagaaatatggaaaactgacaacttgtactggttgccgaacacagtgcaggttttttgatatgactcagtgtataggtcctaatggatatatggagccatattgttcaactgcttgtatgaacagtcacaagacaaaatatgcaaaatcacaaagtttgggaattatttgccatttttgtaagcgaaactctttacctcaataccaagccacaatgcctgatggaaaactgtacaacttttgcaattccagttgtgtggctaaatttcagggtattacccaaaggttcaaacccgtgcataaagccatgcttcatgagttaattcatccaacaattctgctttattccaggctctaagtatgcagtcatctccaaatggccagtttgtagcgccaagtgatattcagttgaaatgcaactactgcaaaaattccttttgttcaaaaccagaaatcctggaatgggagaacaaagtgcatcagttctgcagcaaaacttgttcagatgactataagaagttgcattgcatagttacatattgcgaatactgtcaagaggagaagactcttcatgaaacagtaaatttctctggcgttaagagacctttctgtagtgaaggctgcaaattattatacaaacaggattttgccagacgtttaggattgagatgtgttacttgcaactattgttctcagctatgtaagaagggagcaactaaagaactcgatggtgttgtgagagatttctgcagtgaagattgctgtaaaaaatttcaggattggtactacaaggctgcaaggtgtgactgttgtaaatctcaaggaactcttaaagagcgagttcagtggcgtggggaaatgaaacatttctgtgatcaacattgcttactgcgtttctactgtcaacaaaatgagcccaacatgacaactcagaaaggacctgaaaacttacattatgatcagggttgtcagacatctcgaaccaaaatgacaggttcagcaccacccccttctccaacacctaacaaagagatgaagaacaaagcagttctttgcaaacctttaacaatgacaaaagctacttactgtaaacctcacatgcagaccaaatcttgtcagacagatgatacttggaggacagaatatgttccagtgcctatccctgtgcctgtgtatatcccagttcctatgcacatgtacagtcagaatattcctgttcctactacagttcctgttcctgtgccagttcctgtttttctgcctgctccattggacagcagtgagaagattcctgcagcaattgaggagctaaaaagcaaggtttcttcagatgctcttgatacagagttgcttacaatgacggatatgatgagtgaagacgaggggaaaacagagacaaccaacatcaacagtgtaattattgaaacagatataattggttcagaccttttgaagaactctgacccagagacacagtccagcatgcctgatgtaccatatgaaccagatttggatatcgaaatagattttcccagagctgctgaggagcttgatatggaaaatgaatttttattaccacctgtttttggcgaagaatatgaggaacagcccagacctcgatctaaaaaaaagggagccaagagaaaggctgtatcaggataccagtctcatgatgatagttctgacaattcagatgcgctttcctttcacatatacgacgtatggcgtaaatgcatggaaacactgggtcaaaactaggcaacttgatgaagatcttctggtattagatgagttaaaatcttctaaatcagtaaagttaaaagaggatctactctctcacaccacagctgagcttaactatgggttagctcattttgtcaatgagatccgacggccaaatggagagaattatgcacctgacagcatctattacctttgccttggaatacaggagtatttgtgtggaagtaatcgaaaagacaacatatttattgatcctggataccaaacatttgagcaagaattgaataaaatactgcgaagctggcaaccaagcatacttccagatgggtcaatattctctcgagttgaagaagactatctctggaggataaaacaactaggatcacactctccagtagctcttctgaatacactgttctactttaacactaagtattttggcctgaaaacagtggaacaacacttaagactttcctttggcactgtgtttaggcattggaaaaaaaatcctttaacgatggaaaacaaagcgtgtcttcgataccaagtgtcttccttgtgtggaacagataatgaagataaaattactactggaaaaagaaaacatgaagatgatgagccagtatttgaacaaattgaaaacacagccaatccttccagatgtcctgtgaaaatgtttgaatgctacttgtctaaaagtccacagaatcttaatcagaggatggatgttttttatttgcaaccagaatgctctagttctacagatagccctgtctggtatacgtctacttcactggaccgaaacaccttggaaaatatgcttgtacgggttcttctagtaaaagatatttatgataaagacaattatgaactggatgaagacacagactaaaaaggaacgttgcagaagcaatcgggataaaacagcattagatagtcatgctgctagatctttattatggaaaacatttcaagtttactccttctgttttgagttttgtagcagtgtacccacgctgggtattaccatgtaaataatctgtgagtgaaagttgccattattctatgtagtggttttaggatacttaacaaatacattcaaattctttttttattattatttatttgattaggtatgtttgtaactttttacattacagaatatgaatgagaatgtgccatgtataatttttttcttgtagtaagaaacatccatattgcacaactctactgttgcaaagcttccttggaagggggctcttttactgggttcttaaccagatggttgtgtatgggtagcactactaaaagtttagaacttgcagtgtctttcggaatttttaaaataaactgtaaactaataggctggggtttttgttttgttttggggttttgttttgtttggttttacattttagttactgaagccttacaaggttatgtagagagataccatcttctgtaccaaaaatagacaagagaatgctgtcaatattggtgtactgtaatgtgaatctatgctggtgaaaacaattttttgttccccttattaaaaccttagtgtccttttctcatttgtggctttctgcatcacccaatcaataaaaaacaaatatatatatgtaaaaaaaagtatgtatgtgtgtgtgtatnnnnnnnnnnnnnnnnnnnnnnnnnnnnnnnnntgtaagttgaaaacaagatcatcaagacatttcctttgtaaaaatgtctggtgaaagtataaaattctgttttcttctatgccagccataagtatctgaaatcctcttcatttatagaggtttgatttttatttctttttttccctcttaaggatacagatcatgctgcaatgttagctgtgtagtactctaaaacttagcaattttatcagaattcttgtgcctgtttacattggataaaattgtttttagaaattccactcctgaaatagttacagaaagtcaagctatgttaaataagataggatcacattnnnnnnnnnnnnnnnnnnnnnnnnnnnnnnnnnnnnnnnnnnnnnnngaggaacaaacaaagaaactaatagagaaagtcagtctcagaggaaatcccatttaatgttagattgtttggcttttgaaattacttcttatagaagattgcattaaaaaaaaaaacaactttgtgcttctgcatagcaatttatccattcagaccttttcttttagaataaggaaacttaaaatctactttctaaagactgaacaaagtgctagctgcaaattatcttgaaatcatttggctcttttctagcatgtgtgtaatcatgttttcttctgattcctgaatgaccatggtagcattagtgtttagaaattgttcaggggaaaattgagctattttccatagtggctagcaattgctacacatccttagatactcctctctcccataggataaatgttacagcacacaaaagaaattttctcaattctgatttggaaaatttcacaggtgtcattattgtatatctaagcaataattatctgaatgttttggcataaaaaattataatgttctaacttgttttataagttgaatgacttttcagtcccttgattttatattgttgagtgataatcagactgatagtagcaaatctgatcatacattactaaaatagattgctgattgtctatttaacgaagacaagtgggtaacatttaaaatatataatacaaaaattttctctaacttacctttttccagaactacttctttaagcacttttcctattaatgcctattgttgattaaaaggtggttaattctaaccatcttttagtcttcaaagtggtgctatattccatcaagagcaataaagtttttcccaggtgtcacttattgtatatgttaccaaataccatgaatttctgccatagtactactatcaagcaccttgtcttgctatttacagtttcttcatttgtatatttttagcttttctaagtggaaatgtctacataattttgatcttgacatgattgaggatttagagctcttgtctttgtcttgattgcaatccaacgatagattaacttgattctcagggggaaaagaaaaacttattttatgagaattgtttgttctgtgaaactcacttcacctagaacacatttcattgattcttggatcttagtttatgtggtcatagttgactgctgagaaaaggacaatgaaatgatagcaatttccttttgcttctaggtgatctctgattatagatagcatcctgtaaatataactttattgtcttgaaatgtttattgaagatgctatatttttctgttctgttttctgaagattttgccatttaaaatgatccagtggaaaatatttatccacattgaagaaagtggatttcccatgcaaattgaatcttcattaacacatttttaaaagggctttactggtattaggtaacataggatattaaaggattttttctaggcaagaagctccaactttttttttccataaaaataaatttttgtctaaatagtaaactcatggggttttcttttattaaatggggttgttcgtcattatgttaaaacattggaagttagggggagggtgcatatgttactattgctttcaatttatccactgtgtttctgacagacttccttggtccttttagtatgaactgggatgggtacttcttatgctagatagggtgtcgctttgagcaacctaaatgccggtggggggtacaccaggggccaaccgggataaaattgcgggaaacaaaactgggttttgcccttcacaggttgttctctctttaaaggggggcgtcccccaaagggaggaattttaaaaaaaacggggtttg

SEQ ID NO: 5795 - DNA, 6687 bp, Homo sapiens
  misc_feature (1960)..(2018): n is a, c, g, or t
  misc_feature (2044)..(2059): n is a, c, g, or t
  misc_feature (3481)..(3495): n is a, c, g, or t
agcggacatgttacttcctgtatggaggcatggccagtttccagcgccgcgctcttcgttccttcccagcctgcgccggagccacaactttcaggagcatggactgaaggcgccctcgccccagcgcccctctgagatcctttgtgttttcctccgtttcctccggccgtttctattttggggggctctccgctccccctgcctctcccctccccttcccctctcgcaaacatgcctccttccttcccggggccctggaaggagctgcctgcctgaagcccggagacgccgcgccgcgctcagccccgccgccgcccgccggctctcgggctgtgctgcgctgccgactcaagttggggatcctcggctgctcgccgccgccgcccgcggtccctgtctgccccaggcccggggcatcgccgccggccgccgactccgcgccctgcccgatcggctctctcctttttaaacggaaagcagcctttctccgccgagaggatcgtccccagcgtggctctgcgttcccggtcactttttgagattttccggggggcgctcggcggcttcccggattccaaggggactcgggccgccgagcgcggggggcccgtggagcgggcgagccggggaagcgccccggcttagcggaggctcgcacggaggcaagaacttattcaacaagtttacctccctgctttcctcttttcgatgtgcgttttcggacatgcggaggttactggaaccgtgttggtggattttgttcctgaaaatcaccagttccgtgctccattatgtcgtgtgcttccccgcgttgacagaaggctacgttggggccctgcacgagaatagacacggcagcgcagtgcagatccgcaggcgcaaggcttcaggcgacccgtactgggcctactctggtgcctatggtcctgagcactgggtcacgtctagtgtcagctgtgggagccgtcaccagtctcctattgacattttagaccagtatgcgcgtgttggggaagaataccaggaactgcaactcgatggcttcgacaatgagtcttctaacaaaacctggatgaaaaacacagggaaaacagtcgccatccttctgaaagacgactattttgtcagtggagctggtctacctggcagattcaaagctgagaaggtggaatttcactggggccacagcaatggctcagcgggctctgaacacagcatcaatggcaggaggtttcctgttgagatgcagattttcttttacaatccagatgactttgacagctttcaaaccgcaatttctgagaacagaataatcggagccatggccatattttttcaagtcagtccgagggacaattctgcactggatcctattatccacgggttgaagggtgtcgtacatcatgagaaggagacctttctggatcctttcgtcctccgggacctcctgcctgcatccctgggcagctattatcggtacacaggttccttgaccacaccaccgtgtagcgaaatagtggagtggatagtcttccggagacccgtccccatctcttaccatcagcttgaggctttttattccatcttcaccacggagcagcaagaccatgtcaagtcggtggagtatctgagaaataactttcgaccacagcagcgtctgcatgacagggtggtgtccaagtccgccgtccgtgactcctggaaccacgacatgacagacttcttagaaaacccactggggacagaagcctctaaagtttgcagctctccacccatccacatgaaggtgcagcctctgaaccagacggcactgcaggtgtcctggagccagccggagactatctaccacccacccatcatgaactacatgatctcctacagctggaccaagaatgaggacgagaaggagaagacgtttacaaaggacagcgacaaagacttgaaagccaccattagccannnnnnnnnnnnnnnnnnnnnnnnnnnnnnnnnnnnnnnnnnnnnnnnnnnnnnnnnnnatgcgcagcgactttagccagacgannnnnnnnnnnnnnnnataccactcgaatattccaagggaccagaatagtgaaaacaggagtgcccacagcgtctcctgcctcttcagccgacatggcccccatcagctcggggtcttctacctggacgtcctctggcatcccattctcatttgtttccatggcaactgggatgggcccctcctccagtggcagccaggccacagtggcctcggtggtcaccagcacgctgctcgccggcctggggttcggcggtggtggcatctcctctttccccagcactgtgtggcccacgcgcctcccgacggccgcctcagccagcaagcaggcggctaggccagtcctagccaccacagaggccttggcttctccagggcccgatggtgattcgtcaccaaccaaggacggcgagggcaccgaggaaggagagaaggatgagaaaagcgagagtgaggatggggagcgggagcacgaggaggatggagagaaggactccgaaaagaaggagaagagtggggtgacccacgctgccgaggagcggaatcagacggagcccagccccacaccctcgtctcctaacaggactgccgagggagggcatcagactatacctgggcatgagcaggatcacactgccgtccccacagaccagacgggcggaaggagggatgccggcccaggcctggaccccgacatggtcacctccacccaagtgccccccaccgccacagaggagcagtatgcagggagtgatcccaagaggcccgaaatgccatctaaaaagcctatgtcccgcggggaccgattttctgaagacagcagatttatcactgttaatccagcggaaaaaaacacctctggaatgataagccgccctgctccagggaggatggagtggatcatccctctgattgtggtatcagccttgaccttcgtgtgcctcatccttctcattgctgtgctcgtttactggagagggtgtaacaaaataaagtccaagggctttcccagacgtttccgtgaagtgccttcttctggggagagaggagagaaggggagcagaaaatgttttcagactgctcatttctatgtggaagacagcagttcacctcgagtggtccctaatgaaagtattcctattattcctattccggatgacatggaagccattcctgtcaaacagtttgtcaaacacatcggtgagctctattctaataaccagcatgggttctctgaggattttgaggaagtccagcgctgtactgctgatatgaacatcactgcagagcattccaatcatccagaaaacaagcacaaaaacagatacatcaacattttagcatatgatcacagtagggtgaagttaagacctttaccaggaaaagactctaagcacagcgactacattaatgcaaactatgttgatggttacaacaaannnnnnnnnnnnnnngccacccaaggacctttgaagtctacatttgaagatttctggaggatgatttgggaacaaaacactggaatcattgtgatgattacgaaccttgtggaaaaaggaagacgaaaatgtgatcagtattggccaacagagaacagtgaggaatatggaaacattattgtcacgctgaagagcacaaaaatacatgcctgctacactgttcgtcgtttttcaatcagaaatacaaaagtgaaaaagggtcagaagggaaatcccaagggtcgtcagaatgaaagggtagtgatccagtatcactatacacagtggcctgacatgggagttcccgagtatgcccttccagtactgactttcgtgaggagatcctcagcagctcggatgccagaaacgggccctgtgttggtgcactgcagtgctggtgtgggcagaacaggcacctatattgtaatagacagcatgctgcaacagataaaagacaaaagcacagttaacgtcctgggattcctgaagcatatcaggacacagcgtaactacctcgtccagactgaggagcagtacattttcatccatgatgccttgttggaagccattcttggaaaggagactgaagtatcttcaaatcagctgcacagctatgttaacagcatccttataccaggagtaggaggaaagacacgactggaaaagcaattcaagctggtcacacagtgtaatgcaaaatatgtggaatgtttcagtgctcagaaagagtgtaacaaagaaaagaacagaaactcttcagttgtgccatctgagcgtgctcgagtgggtcttgcaccattgcctggaatgaaaggaacagattacattaatgcttcttatatcatgggctattataggagcaatgaatttattataactcagcatcctctgccacatactacgaaagatttctggcgaatgatttgggatcataacgcacagatcattgtcatgctgccagacaaccagagcttggcagaagatgagtttgtgtactggccaagtcgagaagaatccatgaactgtgaggcctttaccgtcacccttatcagcaaagacagactgtgcctctctaatgaagaacaaattatcatccatgactttatccttgaagctacacaggatgactatgtcttagaagttcggcactttcagtgtcccaaatggcctaacccagatgcccccataagtagtacctttgaacttatcaacgtcatcaaggaagaggccttaacaagggatggtcccaccattgttcatgatgagtatggagcagtttcagcaggaatgttatgtgcccttaccaccctgtcccagcaactggagaatgaaaatgctgtggatgttttccaggttgcaaaaatgatcaatcttatgaggcctggagtattcacagacattgaacaataccagttcatctataaagcaaggcttagcttggtcagcactaaagaaaatggaaatggtcccatgacagtagacaaaaatggtgctgttcttattgcagatgaatcagaccctgctgagagcatggagtccctagtgtgactggaatcctgaaagggcacttaatttgtaaacttctgaagactgagaacttttttgaggccttttttgccagactctaggttatacaataacccagttacttttttacactgataaaagttttgatatttattttttgccattttatgtcttaatggtatcctactgagcatttgcacctctgttcatttcacacagtgaaacgcaattttacctagtttgcactatatgatcagtgttactgcctataatcttatacaacagcaaaccctgatgtgacattccatgacgacatacatgctacttttttttagttcaatacagtgaaggtctttgttatgacagtgaatattgcttttattattattattgctgaagtggttgcattctactagcaggcaatgctgtacttttcttcagtcctcctctcctttttattttaggcactgttcaatactgtatgccttctgtattttaatggagtggatagcattgttttcttttacagactagcaggctactgggacctaaaaaggtctgttaatgtcatggcttgaaaacagttccatttatgctggttaagagatcccttaagaagttagaaggcttaagaactgcttcatgtgaacatcccttattagttacaaagttatattcacagttttttaaaaatgtgtcaaaataaaggataactctgtattacagctttcacagtagctatgtggacaatgtgttatttccattttgactctctaaaatagctacatcctaaaatcagggctatctttaacaatagcaagatagcaatattatatacaactcagttatgagaccctttagttattctccattaatgcttcttagtttgtaataccatacctcacagtaggtagaagaatgaaaacttctgcaggtgtgtaattttgaaactagtcctctaaaaattccctattactcctatagcaatctaataaaaactacctacatagttactgttttctttccttctttgccaaatgttttataataaatctcttaattacatacatttttctacttaagattaaattggaaatactgtattagcaaaagtcttgggactatctaaactcccacacatagataaatctgatttggagagagaaatttaaaatatttaattaacaggtgatacccacattttcacgttttaaaaagagggagatggcttgtaatgcttaggagtaggtttaagaaacagatacacattagtaaaaagatagcaataatacattagaagctcaggaagtaatagggtgaggctctggagcatactcaggctgcagggcataatgggaaaataggagcataaataagaaatatccaggaagaggtacggcaagggaacacacacgcctacttaacggacgacctcgggacatccaatggcatagtcgggacacggagggacaaccttcggacaacagcgggaaatccaaccacaacaaggggcctggtagaggacagaatacggcgttgaaagagacatacaatggcaacacactccagcaaaaaagggacacgcaggcgggagcaccgcccacgaggatcacaacgccaacgacgaacgcaaacaaaaaa

SEQ ID NO: 5796 - DNA, 15453 bp, Homo sapiens
  misc_feature (1084)..(1099): n is a, c, g, or t
  misc_feature (1344)..(1405): n is a, c, g, or t
  misc_feature (2083)..(2111): n is a, c, g, or t
  misc_feature (3972)..(4001): n is a, c, g, or t
  misc_feature (9839)..(9839): n is a, c, g, or t
  misc_feature (10532)..(10554): n is a, c, g, or t
  misc_feature (10783)..(10797): n is a, c, g, or t
  misc_feature (11526)..(11540): n is a, c, g, or t
  misc_feature (12777)..(12796): n is a, c, g, or t
  misc_feature (15428)..(15435): n is a, c, g, or t
tctacctcgcgggtgcctctggtgtctccagaggtctccgaccccagcccgcgcccagccctcccgcccagcccgcagccccctccctctgttccccgacctcagaccctgggcttccgacctcgacatcatgggtgacgcagaaggcgaagacgaggtccagttcctgcggacggacgatgaggtggtcctgcagtgcagcgctaccgtgctcaaggagcagctcaagctctgcctggccgccgagggcttcggcaaccgcctgtgcttcctggagcccactagcaacgcgcagaatgtgccccccgatctggccatctgttgcttcgtcctggagcagtccctgtctgtgcgagccctgcaggagatgctggctaacacggtggaggctggcgtggagtcatcccagggcgggggacacaggacgctcctgtatggccatgccatcctgctccggcatgcacacagccgcatgtatctgagctgcctcaccacctcccgctccatgactgacaagctggccttcgatgtgggactgcaggaggacgcaacaggagaggcttgctggtggaccatgcacccagcctccaagcagaggtctgaaggagaaaaggtccgcgttggggatgacatcatccttgtcagtgtctcctccgagcgctacctgcacctgtcgaccgccagtggggagctccaggttgacgcttccttcatgcagacactgtggaacatgaaccccatctgctcccgctgcgaagagggcttcgtgacgggaggtcacgtcctccgcctctttcatggacatatggatgagtgtctgaccatttcccctgctgacagtgatgaccagcgcagacttgtctactatgaggggggagctgtgtgcactcatgcccgctccctctggaggctggagccactgagaatcagctggagtgggagccacctgcgctggggccagccactccgagtccggcatgtcactaccgggcagtacctagcgctcaccgaggaccagggcctggtggtggttgacgccagcaaggctcacaccaaggctacctccttctgcttccgcatctcnnnnnnnnnnnnnnnngtggcccccaagcgggatgtggagggcatgggcccccctgagatcaagtacggggagtcactgtgcttcgtgcagcatgtggcctcaggactgtggctcacctatgccgctccagaccccaaggccctgcggctcggcgtgctcaagaagaaggccatgctgcaccaggagggccacatggacgacgcactgtcgctgacccgctgccagcaggaggagtcccaggccgcccgcatgatccacannnnnnnnnnnnnnnnnnnnnnnnnnnnnnnnnnnnnnnnnnnnnnnnnnnnnnnnnnnnnnggctcggggccacccgctggcacggcgctgcccatcgagggcgttatcctgagcctgcaggacctcatcatctacttcgagcctccctccgaggacttgcagcacgaggagaagcagagcaagctgcgaagcctgcgcaaccgccagagcctcttccaggaggaggggatgctctccatggtcctgaattgcatagaccgcctaaatgtctacaccactgctgcccactttgctgagtttgcaggggaggaggcagccgagtcctggaaagagattgtgaatcttctctatgaactcctagcttctctaatccgtggcaatcgtagcaactgtgccctcttctccacaaacttggactggctggtcagcaagctggatcggctggaggcctcatctggcatcctggaggtcctgtactgtgtcctcattgagagtccagaggttctgaacatcatccaggagaatcacatcaagtccatcatctccctcctggacaagcatgggaggaaccacaaggtcctggacgtgctatgctccctgtgtgtgtgtaatggtgtggctgtacgctccaaccaagatcttattactgagaacttgctgcctggccgtgagcttctgctgcagacaaacctcatcaactatgtcaccagcatccgccccaacatctttgtgggccgnnnnnnnnnnnnnnnnnnnnnnnnnnnnnggtactttgaggtgatggtggacgaggtgactccatttctgacagctcaggccacccacttgcgggtgggctgggccctcaccgagggctacaccccctaccctggggccggcgagggctggggcggcaacggggtcggcgatgacctctattcctacggctttgatggactgcatctctggacaggacacgtggcacgcccagtgacttccccagggcagcacctcctggcccctgaagacgtgatcagctgctgcctggacctcagcgtgccgtccatctccttccgcatcaacggctgccctgtgcagggtgtctttgagtccttcaacctggacgggctcttcttccctgttgtcagcttctcggctggtgtcaaggtgcggttcctccttggtggccgccatggtgaattcaagttcctgcccccacctggctatgctccatgccatgaggctgtgctccctcgagagcgactccatcttgaacccatcaaggagtatcgacgggaggggccccgggggcctcacctggtgggccccagtcgctgcctctcacacaccgacttcgtgccctgccctgtggacactgtccagattgtcctgccgccccatctggagcgcattcgggagaagctggcggagaacatccacgagctctgggcgctaacccgcatcgagcagggctggacctacggcccggttcgggatgacaacaagaggctgcacccgtgtcttgtggacttccacagccttccagagcctgagaggaactacaacctgcagatgtctggggagacgctcaagactctgctggctctgggctgccacgtgggcatggcggatgagaaggcggaggacaacctgaagaagacaaaactccccaagacgtatatgatgagcaatgggtacaagccggctccgctggacctgagccacgtgcggctgacgccggcgcagacaacactggtggaccgtctggcagaaaatgggcacaacgtgtgggcccgagaccgcgtgggccagggctggagctacagcgcagtgcaggacatcccagcgcgccgaaaccctcggctggtgccctaccgcctgctggatgaagccaccaagcgcagcaaccgggacagcctctgccaggccgtgcgcaccctcctgggctacggctacaacatcgagcctcctgaccaggagcccagtcaggtggagaaccagtctcgttgtgaccgggtgcgcatcttccgggcagagaaatcctatacagtgcagagcggccgctggtacttcgagtttgaagcagtcaccacaggcgagatgcgcgtgggctgggcgaggcccgagctgaggcctgatgtagagctgggagctgacgagctggcctatgtcttcaatgggcaccgcggccagcgctggcacttgggcagtgaaccatttgggcgcccctggcagccgggcgatgtcgttggctgtatgatcgacctcacagagaacaccattatcttcaccctcaatggcgaggtcctcatgtctgactcaggctccgaaacagccttccgggagattgagattggggacggcttcctgcccgtctgcagcttgggacctggccaggtgggtcatctgaacctgggccaggacgtgagctctctgaggttctttgccatctgtggcctccaggaaggcttcgagccatttgccatcaacatgcagcgcccagtcaccacctggttcagcaaaggcctgccccagtttgagccagtgccccttgaacaccctcactatgaggtatcccgagtggacggcactgtggacacgcccccctgcctgcgcctgacccaccgcacctggggctcccagaacannnnnnnnnnnnnnnnnnnnnnnnnnnnnngcctcccagtccagttccaccagcacttccgctgcactgcaggggccaccccgctggcacctcctggcctgcagccccccgccgaggacgaggcccgggcggcggaacccgaccctgactacgaaaacctgcgccgctcagctgggggctggagcgaggcagagaacggcaaagaagggactgcgaaggagggcgcccccgggggcaccccgcaggcggggggagaggcgcagccggccagggcggagaatgagaaggatgccaccaccgagaagaacaagaagagaggcttcttattcaaggccaagaaggtcgccatgatgacccagccaccggccacccccacgctgccccgactccctcacgacgtggtgcctgcagacaaccgcgatgaccccgagatcatcctcaacaccaccacgtactattactccgtgagggtctttgctggacaggagcccagctgcgtgtgggcgggctgggtcacccctgactaccatcagcacgacatgagcttcgacctcagcaaggtccgggtcgtgacggtgaccatgggggatgaacaaggcaacgtccacagcagcctcaagtgtagcaactgctacatggtgtggggcggagactttgtgagtcccgggcagcagggccggatcagccacacggaccttgtcattgggtgcctggtggacttggccactggcttaatgacctttacagccaatggcaaagagagcaacacctttttccaggtggaacccaacactaagctatttcctgccgtcttcgtcctgcccacccaccagaacgtcatccagtttgagctggggaagcagaagaacatcatgccgttgtcagccgccatgttccaaagcgagcgcaagaacccggccccgcagtgcccaccgcggctggagatgcagatgctgatgccagtgtcctggagccgcatgcccaaccacttcctgcaggtggagacgaggcgtgccggcgagcggctgggctgggccgtgcagtgccaggagccgctgaccatgatggcgctgcacatccccgaggagaaccggtgcatggacatcctggagctgtcggagcgcctggacctgcagcgcttccactcgcacaccctgcgcctctaccgcgctgtgtgcgccctgggcaacaatcgcgtggcgcacgctctgtgcagccacgtagaccaagctcagctgctgcacgccctggaggacgcgcacctgccaggcccactgcgcgcaggctactatgacctcctcatcagcatccacctcgaaagtgcctgccgcagccgccgctccatgctctctgaatacatcgtgcccctcacgcctgagacccgcgccatcacgctcttccctcctggaaggagcacagaaaatggtcacccccggcatggcctgccgggagttggagtcaccacttcgctgaggcccccgcatcatttctcgcccccctgtttcgtggccgctctgccagctgctggggcagcagaggccccggcccgcctcagccctgccatcccgctggaggccctgcgggacaaggcactgaggatgctgggggaggcggtgcgcgacggtgggcagcacgctcgcgaccccgtcggggcctccgtggagttccagtttgtgcctgtgctcaagctcgtgtccaccctgctggtgatgggcatctttggcgatgaggatgtgaaacagatcttgaagatgattgagcctgaggtcttcactgaggaagaggaggaggaggacgaggaggaagagggtgaagaggaagatgaggaggagaaggaggaggatgaggaggaaacagcacaggaaaaggaagatgaggaaaaagaggaagaggaggcagcagaaggggagaaagaagaaggcttggaggaagggctgctccagatgaagttgccagagtctgtgaagttacagatgtgccacctgctggagtatttctgtgaccaagagctgcagcaccgtgtggagtccctggcagcctttgcggagcgctatgtggacaagctccaggccaaccagcggagccgctatggcctcctcataaaagccttcagcatgaccgcagcagagactgcaagacgtacccgtgagttccgctccccaccccaggaacagatcaatatgctattgcaattcaaagatggtacagatgaggaagactgtcctctccctgaagagattcgacaggatttgcttgactttcatcaagacctgctggcacactgtggaattcagctagatggagaggaggaggaaccagaggaagagaccaccctgggcagccgcctcatgagcctgttggagaaagtgcggctggtgaagaagaaggaagagaaacctgaggaggagcggtcagcagaggagagcaaaccccggtccctgcaggagctggtgtcccacatggtggtgcgctgggcccaagaggacttcgtgcagagccccgagctggtgcgggccatgttcagcctcctgcaccggcagtacgacgggctgggtgagctgctgcgtgccctgccgcgggcgtacaccatctcaccgtcctccgtggaagacaccatgagcctgctcgagtgcctcggccagatccgctcgctgctcatcgtgcagatgggcccccaggaggagaacctcatgatccagagcatcgggaacatcatgaacaacaaagtcttctaccaacacccgaacctgatgagggcgctgggcatgcacgagacggtcatggaggtcatggtcaacgtcctcgggggcggcgagtccaaggagatccgcttccccaagatggtgacaagctgctgccgcttcctctgctatttctgccgaatcagccggcagaaccagcgctccatgtttgaccacctgagctacctgctggagaacagtggcatcggcctgggcatgcagggctccacgcccctggacgtggctgctgcctccgtcattgacaacaatgagctggccttggcattgcaggagcaggacctggaaaaggttgtgtcctacctggcaggctgtggcctccagagctgccccatgcttgtggccaaagggtacccagacattggctggaacccctgtggtggagagcgctacctggacttcctgcgctttgctgtcttcgtcaacggcgagagcgtggaggagaacgccaatgtggtggtgcggctgctcatccggaagcctgagtgcttcggacccgccctgcggggtgagggtggctcagggctgctggctgccatcgaagaggccatccgcatctccgaggaccctgcgagggatggcccaggcatccgcagggaccggcggcgcgagcactttggtgaggaaccgcctgaagaaaaccgggtgcacctgggacacgccatcatgtccttctatgccgccttgatcgacctgctcggacgctgtgcaccagagatgcatctaatccaagccggcaagggtgaggccctgcggatccgcgccatcctccgctcccttgtgcccttggaggaccttgtgggcatcatcagcctcccactgcagattcccaccctgggcaaagatggggctctggtgcagccaaagatgtcagcatccttcgtgccggaccacaaggcgtccatggtgctcttcctggaccgtgtgtatggcatcgagaaccaggacttcttgctgcacgtgctggacgtggggttcctgcccgacatgagggcagccgcctcgctggacacggccactttcagcaccaccgagatggcgctggccgtgaaccgctacctgtgcctggccgtgctgccgctcatcaccaagtgtgcgccgctctttgcgggcacagaacaccgcgccatcatggtggactctatgctgcataccgtgtaccgcctgtctcggggtcgttcgctcaccaaggcgcagcgtgacgtcatcgaggactgcctcatgtcgctctgcaggtacatccgcccgtcgatgctgcagcacctgttgcgccgcctggtgttcgacgtgcccatcctcaacgagttcgccaagatgccactcaagctcctcaccaaccactatgagcgctgttggaagtactactgcctacccacgggctgggccaacttcggggtcacctcagaggaggagctgcacctcacacggaaactcttctggggcatctttgactctctggcccataagaaatacgacccggagctgtaccgcatggccatgccttgtctgtgcgccattgccggggctctgccccccgactatgtggatgcctcatactcatctaaggcagagaaaaaggccacagtggatgctgaaggcaactttgatccccggcctgtggagaccctcaatgtgatcatcccggagaagctggactccttcattaacaagtttgcggagtacacacacgagaagtgggccttcgacaagatccagaacaactggtcctatggagagaacatagacgaggagctgaagacccaccccatgctgaggccctacaagaccttttcagagaaggacaaagagatttaccgctggcccatcaaggagtccctgaaggccatgattgcctgggaatggacgatagagaaggccagggagggtgaggaggagaagacggaaaagaaaaaaacgcggaagatatcacaaagtgcccagacctatgatcctcgagaaggctacaaccctcagccccccgaccttagtgctgttaccctgtcccgggagctgcaggccatggcagaacaactggcagaaaattaccacaacacgtggggacggaagaagaagcaggagctggaagccaaaggcggtgggacccaccccctgctggtcccctacgacacgctcacggccaaggagaaggcacgagatcgagagaaggcccaggagctactgaaattcctgcagatgaatggctacgcggttacaagaggccttaaggacatggaactggactcgtcttccattgaaaagcggtttgccttttgcttcctgcagcagctgctgcgtctggatggacatttctcaggagttcattgcccacctggaggctgtggtcagcagtgggcgagtggaaaagtccccacatgaacaggagattaaattctttgccaagatcctgctccctttgatcaaccagtacttcaccaaccactgcctctatttcttgtccactccggctaaagtgctgggcagcggtggccacgcctctaacaaggagaaggaaatgatcaccagcctcttctgcaaacttgctgctctcgtccgccaccgagtctctctctttgggacagacgccccagctgtggtcaactgtcttcacatcctggcccgctccctggatgccaggacagtgatgaagtcaggccctgagatcgtgaaggctggcctccgctccttcttcgagagtgcctcggaggacatcgagaagatggtggagaacctgcggctgggcaaggtgtcgcaggcgcgcacccaggtgaaaggcgtgggccagaacctcacctacaccactgtggcactgctgccggtcctcaccaccctcttccagcacatcgcccagcaccagttcggagatgacgtcatcctggacgacgtccaggtctcttgctaccgaacgctgtgcagtatctactccctgggaaccaccaagaacacttatgtggaaaagcttcggccagccctcggggagtgcctggcccgtctggcagcagccatgccggtggcgttcctggagccgcagctgaacgagtacaacgcctgctccgtgtacaccaccaagtctccgcgggagcgggccatcctggggctccccaacagtgtngaggagatgtgtcccgacatcccggtgctggagcggctcatggcagacattggggggctggccgagtcaggtgcccgctacacagagatgccgcatgtcatcgagatcacgctgcccatgctatgcagctacctgccccgatggtgggagcgcgggcccgaggcacccccttccgccctgcccgccggcgcccccccaccctgcacagctgtcacctctgaccacctcaactccctgctggggaatatcctgagaatcatcgtcaaacaacctggggaatttgacggaggctttctgggattgaagcgggctgggctgtgttcgcacagcccattgtgagccgtgcacggccggagctcctgcagtcccacttcatcccaactatcgggcggctgcgcaagagggcagggaaggtggtgtccgaggaggagcagctgcgcctggaggccaaggcggaggcccaggagggcgagctgctggtgcgggacgagttctctgtgctctgccgggacctctacgccctgtatccgctgctcatccgctacgtggacaacaacagggcgcagtggctgacggagccgaatcccagcgcggaggagctgttcaggatggtgggcgagatcttcatctactggtccaagtcccacaacttcaagcgcgaggagcagaactttgtggtccagaatgagatcnnnnnnnnnnnnnnnnnnnnnnntgacaacaaaagcaaaatggctaaggcgggagatatacagtccggtggctcggaccaggaacgcaccaagaagaagcgccggggggaccggtactctgtgcagacgtcactgatcgtggccacactgaagaagatgctgcccatcggcctgaatatgtgtgcgcccaccgaccaagacctcatcacgctggccaagacccgttacgccctgaaagacacagatgaggannnnnnnnnnnnnnngcacaacaaccttcaccttcagggaaaggtcgaaggctccccgtctctgcgctggcagatggctctgtaccggggcgtcccgggtcgcgaggaggacgccgatgaccccgagaaaatcgtgcgcagagtccaggaagtgtcagccgtgctctactacctggaccagaccgagcacccttacaagtctaagaaggccgtgtggcacaagcttttgtccaaacagcgccggcgggcagtcgtggcctgtttccgtatgacgcccctgtacaacctgcccacgcaccgggcatgtaacatgttcctggagagctacaaggctgcatggatcctgactgaagaccacagttttgaggaccgcatgatagatgacctttcaaaagctggggagcaggaggaggaggaggaagaggtggaagagaagaagccagaccccctgcaccagttggtcctgcacttcagccgcactgccctgacggaaaagagcaaactggatgaggattacctgtacatggcctatgctgatatcatggcaaagagctgccacctggaggagggaggggagaacggtgaagctgaagaggaggttgaggtctcctttgaggagaaacagatggagaagcagaggctcttgtaccagcaagcacggctgcacacccggggggcggccgagatggtgctgcagatgatcagtgcctgcaaaggagagacaggtgccatggtgtcctccannnnnnnnnnnnnnntctccatcctcaatggaggcaatgctgaggtccagcagaaaatgctggattatcttaaggacaagaaggaagttggcttcttccagagtatccaggcactgatgcaaacatgcagcgtcctggatctcaatgcctttgagagacagaacaaggccgaggggctgggcatggtgaatgaggatggcactgtcatcaatcgccagaacggagagaaggtcatggcggatgatgaattcacacaagacctgttccgattcctacaattgctctgtgaggggcacaataatgatttccagaactacctacggacacagacagggaacacgaccactattaacatcatcatttgcactgtggactacctcctgcggctgcaggaatccatcagcgacttctactggtactactcgggcaaggatgtcattgaagagcagggcaagaggaacttctccaaagccatgtcggtggctaagcaggtgttcaacagcctcactgagtacatccagggtccctgcaccgggaaccagcagagcctggcgcacagtcgcctatgggacgcagtggtgggattcctgcacgtgttcgcccacatgatgatgaagctcgctcaggactcaagccagatcgagctgctgaaggagctgctggatctgcagaaggacatggtggtgatgttgctgtcgctactagaagggaacgtggtgaacggcatgatcgcccggcagatggtggacatgctcgtggaatcctcatccaatgtggagatgatcctcaagttcttcgacatgttcctgaaactcaaggacattgtgggctctgaagccttccaggactacgtaacggatccccgtggcctcatctccaagaaggacttccagaaggccatggacagccagaagcagttcagcggtccagaaatccagttcctgctttcgtgctccgaagcggatgagaacgaaatgatcaactgcgaagagttcgccaaccgcttccaggagccagcacgcgacatcggcttcaacgtggcggtgctgctgaccaacctgtcggagcatgtgccgcatgaccctcgcctgcacaacttcctggagctggccgagagcatccttgagtacttccgcccctacctgggccgcatcgagatcatgggcgcgtcacgccgcatcgagcgcatctacttcgagatctcagagaccaaccgcgcccagtgggagatgccccaggtgaaggagtccannnnnnnnnnnnnnnnnnnngtggtgaacgagggcggcgaggctgagaagatggagctcttcgtgagtttctgcgaggacaccatcttcgagatgcagatcgccgcgcagatctcggagcccgagggcgagccggagaccgacgaggacgagggcgcgggcgcggcggaggcgggcgcggaaggcgcggaggagggcgcggcggggctcgagggcacggcggccacggcggcggcgggggcgacggcgcgggttgtggcggccgcaggccgggccctgcgaggcctcagctaccgcagcctgcggcggcgcgtgcggcggctgcggcggcttacggcccgcgaggcggccaccgcagtggcggcgctgctctgggcagcagtgacgcgcgctggggccgctggcgcgggggcggcggcgggcgcgctgggcctgctctggggctcgctgttcggcggcggcctggtggagggcgccaagaaggtgacggtgaccgagctcctggcaggcatgcccgaccccaccagcgacgaggtgcacggcgagcagccggccgggccgggcggagacgcagacggcgagggtgccagcgagggcgctggagacgccgcggagggcgctggagacgaggaggaggcggtgcacgaggccgggccgggcggtgccgacggggcggtggccgtgaccgatgggggccccttccggcccgaaggggctggcggtctcggggacatgggggacacgacgcctgcggaaccgcccacacccgagggctctcccatcctcaagaggaaattgggggtggatggagtggaggaggagctcccgccagagccagagcccgagccggaaccagagctggagccggagaaagccgatgccgagaatggggagaaggaagaagttcccgagcccacaccagagccccccaagaagcaagcacctccctcaccccctccaaagaaggaggaagctggaggcgaattctggggagaactggaggtgcagagggtgaagttcctgaactacctgtcccggaacttttacaccctgcggttccttgccctcttcttggcatttgccatcaacttcatcttgctgttttataaggtctcagactctccaccaggggaggacgacatggaaggctcagctgctggggatgtgtcaggtgcaggctctggtggcagctctggctggggcttgggggccggagaggaggcagagggcgatgaggatgagaacatggtgtactacttcctggaggaaagcacaggctacatggaacccgccctgcggtgtctgagcctcctgcatacactggtggcctttctctgcatcattggctataattgtctcaaggtgcccctggtaatctttaagcgggagaaggagctggcccggaagctggagtttgatggcctgtacatcacggagcagcctgaggacgatgacgtgaaggggcagtgggaccgactggtgctcaacacgccgtctttccctagcaactactgggacaagtttgtcaagcgcaaggtcctggacaaacatggggacatctacgggcgggagcggattgctgagctactgggcatggacctggccacactagagatcacagcccacaatgagcgcaagcccaacccgccgccagggctgctgacctggctcatgtccatcgatgtcaagtaccagatctggaagttcggggtcatcttcacagacaactccttcctgtacctgggctggtatatggtgatgtccctcttgggacactacaacaacttcttctttgctgcccatctcctggacatcgccatgggggtcaagacgctgcgcaccatcctgtcctctgtcacccacaatgggaaacagctggtgatgaccgtgggccttctggcggtggtcgtctacctgtacaccgtggtggccttcaacttcttccgcaagttctacaacaagagcgaggatgaggatgaacctgacatgaagtgtgatgacatgatgacgtgttacctgtttcacatgtacgtgggtgtccgggctggcggaggcattggggacgagatcgaggaccccgcgggtgacgaatacgagctctacagggtggtccttcgacatcaccttctttcttcttcgtcatcgtcatcctgttggccatcatccagggtctgatcatcgacgcttttggtgagctccgagaccaacaagagcaagtgaaggaggatatggagaccaagtgcttcatctgtggaatcggcagtgactactttgatacgacaccgcatggcttcgagactcacacgctggaggagcacaacctggccaattacatgtttttcctgatgtatttgataaacaaggatgagacagaacacacgggtcaggagtcttatgtctggaagatgtaccaagagagatgttgggatttcttcccagctggtgattgtttccgtaagcagtatgaggaccagcttagctgacacacccccagctggccctccacccccacctcaagtgccttattctcacagcaagccccttagtccccaagcccctccccctaaggcagctgggggagaggtgacctagtactggaaaataaatctgtcgtacgccccccagaaaaaaaaaaaaaaaaaaaaaaaaaaannnnnnnnaacctccggagggcattt

SEQ ID NO: 5797 - DNA, 852 bp, Homo sapiens
agaggatcaagcatccctgtgtttcaaaaagaaagtttctctgaatatatttaaagaaccatcaagaaatggggacctggattttgtttgcctgccttgtgggagcagcttttgccatgcctctaccacctcatcctgggcaccctggttatatcaacttcagctatgaggtgctcacccctttgaagtggtaccagagcatgataagaccaccatactcttcctatggttacgagcccatgggtggatggctgcaccaccaaatcatccccgtggtgtcccaacagcaccccctgactcacaccctgcagtctcatcaccacatcccagtggtgccagctcagcagcccagggtccgccagcaagcactgatgcctgttcctggccagcaatccatgactccaacccaacaccatcagccaaacctccctctgcctgcccagcagcccttccagccccagcctgttcagccacagcctcaccagcccatgcagccccagccacctgtgcaacccatgcagcccctgctgccacagccacctctgcctccaatgttccccctgcggcccctgccccccatacttcctgatctgcatctggaagcttggccagcaacagacaagaccaagcaggaggaagtggattaaaagaccagaatatgagacaggaactgaagtaaacactttagttgctttcagggatgacacaagcacacaatgatttttgcttacaatcacttaacttagcaaattctgtaactaaaaatgtaccattagtagacaataaaatgctttaaaaatcatctttagtgagggtaaattagaccccggtcatgactcgtgcgctaggcgt

SEQ ID NO: 5798 - DNA, 658 bp, Homo sapiens
acctatttttttttttttttttttttttccatgttacgacactttaatcaagttcacaagctcctccacaaccttggccagtcttccagagcctcatgaaggaggcagagccagggctggcatccccacttgcaggtggggaaatcaaggcctagagggcaagaactgtgccccaggtcacaggagaacccaggtgtcctggtactggtttgggggctcttcacagctctttctaccacccttggtgctgcagcagttaatggcccagccagtttctctgggtactggaggggccagaagaggaattttgcaccacggtgcctgacaccagtctgaccggaggactggcctaggccatgtgaagacccaagaaggtcaacccccccgacccctgccctccacccacagcgcttgggggtccctgtagagagcagccagattgccatgcttcagctgggggccaggcttggagttgcctccaggcaactcccaaacaccaccacagggatcccgtgttaagggggaagccttaaaggagttgtcaagtggcaaggccggccaggaactccaccgtgccccaggctccagggccacaccaaagagtcacaaagtcattagagctcattttacagatgaggaaactgaggctaaaagctca

SEQ ID NO: 5799 - DNA, 751 bp, Homo sapiens
aagaagttgattccagccctcatggatgactttgtgggctcatgtttgatgtcagtggaggaagtccctgcagatgtggtagaaatcacaagacaactagaattagaattagggccttaaggtgagatgaaattgctgtaaactcatgatgaaacttgaacaaatagggagttgcttcttatggatgagcaaagaaaatattttcttgagatggaatataatccaggtggagatgctatcaacattgttgaaatgacaacaaaggatttagaatattccataaacctagttgataaagcagcagcagggtttgagagggtttactccaattttgaaagaagttctactgttgataaaatgctgtcaaacagcatcacatgctacagggaaatcttttgtgaaaggaacaaacttcattgttttaaaaaattgacacaggcttccaaccttcagcagcccccacactgattagccagcagtcatcaatatagaggcaagactctcaccagcaaaaagattatgacttggtaaggctcagatattcattagcattttttagcacctgacgtattttaacttaaggtatgtacaaaagttttttagacatgctattaattaactaactttaataattattaaataactcattagactacaatatagtttaagcataacttttataagcactgggaaataaaatgtttatgcaactaaaaaaaaaaaaaaaaaaaaaaaaaaaaaaaaaaaaaaa

SEQ ID NO: 5800 - DNA, 844 bp, Homo sapiens
actgcctacttagtttattcatttagtattctttaagagataaccctgaggatcatattacacttcagagttatgtctaaggtgtttcatatttccattctcccaggtttttagagggtagggatcaaattttggagtcttgatggtgtttatgacagttcttttccattgcattcaacaatgtagagtccaagtggaatctgagttatgtgagaatcatgtatttaaacagaaaagtgaatagttggaaagctgttcgcggtaaatgaaattatccataggacagaggccttatgccaagatggtagctctattactttagttcccatctagttaggggggaatgaactgttaccagatgggggaaagattagttatcatcagtcattctagcatatgacagcaaagatattagaaactaaattttattgttgaaaggactttttctttatcgtttcaacaaagaagacacaattaaatgtgtgccattcttccttcagtgaattctcctcaccatcactacagctttttttaaaaacaattttgtcagaaatatcttgagctttcagggcttcttgtgttcacaggatggcctaggaatttttagttgagccaaaaagatgaatgagctgtgcacattacaaaccctgttggttatctgactgctccacagctcaacattagttccttgatggctgaaatcaagaactttggaagaacttgggctccagagttctctttggcatatgtaagattcagacttgtgtgagaaacttgcatatgaaatcttttgggaagtaaatgctaaagcttagccacatgttgcttttgttcatcagtgact

SEQ ID NO: 5801 - DNA, 7017 bp, Homo sapiens
  misc_feature (545)..(585): n is a, c, g, or t
  misc_feature (1998)..(2019): n is a, c, g, or t
  misc_feature (3558)..(3586): n is a, c, g, or t
ggagatattttcttgttcaatttaaggagaggtaaatttggtatcaatagaaaaaatgtttctgaaaaatttaaaccctggaaatgtatttatggcatggagtcagatgtttcagggagagaagaacaaatcaagaagcattgcaagtatgctcatatggaatgcttaaggcttgtggttaaaaaatatatatatatggctgtcaatgtcttaggctcatggtagcagcagaaatcgtaataattcttttgtcacatgggttatatccatattggagagaattaactcaggtgaaattaacttgtacactgtttggttttataatatttagagggatcacaactgactgatgtccctttgaagtaccattcttcataaatcttttttttttcagaatgggccagccaactgtgacatcccttggatcggagatttagaactagaaagtattctttctacattattagggaagaaaaggagttacttggcggttagcaatattctattttgttttgttttgtttttagagacagggtctcattatnnnnnnnnnnnnnnnnnnnnnnnnnnnnnnnnnnnnnnnnntcccacctcagcctcccaagtagctgggactacgggcatgtgccactacacctggcagtgtttattctgataaatacatttatgagctcaaaaatgtaactctaaaaccttatctctgaacttccatattaccatcagaaatttagatagttgtttagttctctttttctttgtagaacatagatataaggcatggtttcattgaagtcagttgtatatacatgtaactatcctgatgttcccaaataaagctctgtatttatgcttagtttattggggaggctgctaaatgtagtgcatcccaacccattttaccctgttctactttaaaaagaggttggcttcttgtttggatacaaggaccaagtcactcccccaggttcctccacagtaagggaggcctatttaaagccgcccatggcactaacagaaactggactcctatgagctcagatacataactgggcctcacaggggtgggacagtatgtagtctaggaattggaaggatccattccatatcaaagaactgaagcatcgtgttgccctctcagcagcaagagtaaggtgatgcccctgtcagttatagttcctgagttcctctgtctttgattctttgcctattagccagctagctcaccctcttgtttatgccactgttttttatcctattcatgccttctcacagacaacttttcttacctacagctttggactcatccttgtctcctttctgtttctttttcactttcccttcccatcaccaactttctgggtttttttctgtttcttcttagagtccagtggcagggagaaacttgtcagtccagtctgttgccatttttcctgtttgagaaagactcaccagcttttggctggctcacagattggctttccttgggtcaggacccacccttttccctgccagctttggaagcttgacagaattcgagtgtgcagtggtggtaaataaatagtaaggaacacagagcagtcctggaggcgtgcctccatctgctgatgagaaaatccagtgctgtcatccagcccaggtcccagcggaatgggcctctctgttcagtaggatccccctcctgctgagtggttcatggcatgtttctgttcaacgcttttccatctgtaggattcttattctgtatttatttgtttttttgggtttttttattttttgagatggagtctcgctctgtcgcccaggctggagtgcagtggcacgaccccagctcgctgcagcctctgcctcccaggacgagggagatcctcccacctcagccttccacgtagctgggactacaggcatgcaccacaggcatgcaccaccacgccagctaatttttgtatttttggtagagacagggttgcatcatgttgcccaggctggtcttgaatgccnnnnnnnnnnnnnnnnnnnnnncttggcctcccaaagtgctgggattacaggcatgagccaccacggccagccttctcatttgttttttttataaggaagctatctcttcttccctccccaactagggtattctttttccctttcgtcactttgctcatgtactgtattccttcaacttcattaatgaatccatttggaagcagtgaaaaaggcaactcagaaagctaagaagaaatagatagaggaatactcagagctatctgagtattttctttagtttgttagctctttggagctttgaaactggaaagacccagggagtgatgtggagaaagagactgagcttgtaagacacaggagcagtgagctaagggagatggagtagtggggacaaattctggcacattctgtctacactctgggtagatagaggagggaggatggagcacccatggtgggggtatgttggtgacagcattttcccaccagccagtgtaacaagtggctgatttgggggaaagatggcataaacaaatgagagaatgtgtttactatttgatgtagatgggttatttgcttcatttttcaaatcagtgtatataatcaagaatattcagcatgtttgaatagactgtcagagctggaactctttcattaacatctctggcacctttagttttagccctgaacattttatcttaaaattaaacattaccaaatgccttagtttatttcatttattaaatttatattcttatttgttatttatatcagcttccaatcagaagactatacaacctcctaggaataactgaagtgaagtgatggactccgatttggagagtagtaagacgtgaaaggaatacacttgtgtttaagcaccatggccttgatgattcactgttggggagaagaaacaagaaaagtaactggttgtcacctatgagacccttacgtgattgttagttaagtttttattcaaagcagctgtaatttagttaataaaataattatgatctatgttgtttgcccaattgagatccagttttttgttgttatttttaatcaattaggggcaatagtagaatggacaatttccaagaatgatgcctttcaggtcctagggcctctggcctctaggtaaccagtttaaattggttcagggtgataactacttagcactgcccctggtgattaccccagagatatctatgaaaaccagtggcttccatcaaacctttgccaactcaggttcacagcagctttgggcagttatggcagtatggcattagctgagaggtgtctgccacttctgggtcaatggaataataaattaagtacaggcaggaatttggttgggagcatcttgtatgatctccgtatgatgtgatattgatggagatagtggtcctcattcttgggggttgccattcccacattcccccttcaacaaacagtgtaacaggtccttcccagatttagggtacttttattgatggatatgttttccttttattcacataaccccttgaaaccctgtcttgtcctcctgttacttgnnnnnnnnnnnnnnnnnnnnnnnnnnnnntctcctctttgaacatggtctagtgacacggtagcaccagttgcaggaaggagccagacttgttctcagagcactgtgttcacacttttcagcaaaaatagctatggttgtaacatatgtattcccttcctctgatttgaaggcaaaaatctacagtgtttcttcacttcttttctgatctggggcatgaaaaaagcaagattgaaatttgaactatgagtctcctgcatggcaacaaaatgtgtgtcaccatcaggccaacaggccagcccttgaatggggatttattactgttgtatctatgttgcagtgataaacattcatcaccttcctcctgtagtcctgcctcgtactccccttcccctatgattgaaaagtaaacaaaacccacatttcctatcctggttagaagaaaataaatgttctgacagttgtgatcgcctggagtacttttagacttttagcattcgttttttacctgtttgtggatgtgtgtttgtatgtgcatacgtatgagataggcacatgcatcttctgtatggacaaaggtggggtacctacaggagagcaaaggttaattttgtgcttttagtaaaaacatttaaatacaaagttctttattgggtggaattatatttgatgcaaatatttgatcacttaaaacttttaaaacttctaggtaatttgccacgctttttgactgctcaccaataccctgtaaaaatacgtaattcttcctgtttgtgtaataagatattcatatttgtagttgcattaataatagttatttcttagtccatcagatgttcccgtgtgcctcttttatgccaaattgattgtcatatttcatgttgggaccaagtagtttgcccatggcaaacctaaatttatgacctgctgaggcctctcagaaaactgagcatactagcaagacagctcttcttgaaaaaaaaaatatgtatacacaaatatatacgtatatctatatatacgtatgtatatacacacatgtatattcttccttgattgtgtagctgtccaaaataataacatatatagagggagctgtattcctttatacaaatctgatggctcctgcagcactttttccttctgaaaatatttacattttgctaacctagtttgttactttaaaaatcagttttgatgaaaggagggaaaagcagatggacttgaaaaagatccaagctcctattagaaaaggtatgaaaatctttatagtaaaattttttataaactaaagttgtaccttttaatatgtagtaaactctcatttatttggggttcgctcttggatctcatccatccattgtgttctctttaatgctgcctgccttttgaggcattcactgccctagacaatgccaccagagatagtgggggaaatgccagatgaaaccaactcttgctctcactagttgtcagcttctctggataagtgaccacagaagcaggagtcctcctgcttgggcatcattgggccagttccttctctttaaatcagatttgtaatggctcccaaattccatcacatcacatttaaattgcagacagtgttttgcacatcatgtatctgttttgtcccataatatgctttttactccctgatcccagtttctgctgttgactcttccattcagttttatttattgtgtgttctcacagtgacaccatttgtccttttctgcaacaacctttccagctacttttgccaaattctatttgtcttctccttcaaaacattctcctttgcagttcctcttcatctgtgtagctgctcttttgtctcttaacttaccattcctatagtactttatgcatctctgcttagttctattagttttttggccttgctcttctccttgattttaaaattccttctatagctagagcttttctttctttcattctctcttcctgcagtgttttgcatacatcagaagctaggtacataagttaaatgattgagagttggctgtatttagatttatcactttttaatagggtgagcttgagagttttctttctttctgttttttttttttttttttttttttttttttttgactaatttcacatgctctaaaaaccttcaaaggtgattatttttctcctggaaactccaggtccattctgtttaaatccctaagaatgtcagaattaaaataacagggctatcccgtaattggaaatatttcttttttcaggatgctatagtcaatttagtaagtgaccaccaaattgttatttgcactaacaaagctcaaaacacgataagtttactcctccatctcagtaataaaaattaagctgtaatcaaccttctaggtttctcttgtcttaaaatgggtattcaaaaatggggatctgtggtgtatgtatggaaacacatactccttaatttacctgttgttggaaactggagaaatgattgtcgggcaaccgtttattttttattgtattttatttggttgagggatttttttataaacagttttacttgtgtcatattttaaaattactaactgccatcacctgctggggtcctttgttaggtcattttcagtgactaatagggataatccaggtaactttgaagagatgagcagtgagtgaccaggcagtttttctgcctttagctttgacagttcttaattaagatcattgaagaccagctttctcataaatttctctttttgaaaaaaagaaagcatttgtactaagctcctctgtaagacaacatcttaaatcttaaaagtgttgttatcatgactggtgagagaagaaaacattttgtttttattaaatggagcattatttacaaaaagccattgttgagaattagatcccacatcgtataaatatctattaaccattctaaataaagagaactccagtgttgctatgtgcaagatcctctcttggagcttttttgcatagcaattaaaggtgtgctatttgtcagtagccatttttttgcagtgatttgaagaccaaagttgttttacagctgtgttaccgttaaaggtttttttttttatatgtattaaatcaatttatcactgtttaaagctttgaatatctgcaatctttgccaaggtacttttttatttaaaaaaaaacataactttgtaaatattaccctgtaatattatatatacttaataaaacattttaagctataaaaaaaggctatttctattgctgctacagcagaccacaagcacatttctgaaaaatttaatttattaatgtatttttaagttgcttatattctaggtaacaatgtaaagaatgatttaaaatattaattatgaattttttgagtataatacccaataagcttttaattagagcagagttttaattaaaagttttaaatcagtaaaaaaaaaaaaataaaaaaaaaa

SEQ ID NO: 5802 - DNA, 964 bp, Homo sapiens
tggctgtgaatgaggcgggctacggggagcccagcaacccctccacggctgtgtcagctcaagtggaagccccattctacgaggagtggtggttcctcctggtgatggctctgtccagcctgatcgtcatcctgctggctggtgttcgccctcgtcctgcacgggcagaataagaagtataagaactgcagcacaggaaaggggatctccaccatggaggagtctgtgaccctggacaacggaggatttgctgccctggagctcagcagccgccacctcaatgtcaagagcaccttctccaagaagaacgggaccaggtccccaccccggcctagccccggcggcctgcactactcagacgaggacatctgcaacaagtacaacggcgccgtgctgaccgagagcgtgagcctcaaggagaagtcggcagatgcatcagaatctgaggccacggactctgactacgaggacgcgctgcccaagcactccttcgtgaaccactacatgagcgaccccacctactacaactcatggaagcgcagggcccagggccgagcacctgcgccgcacaggtacgaggcggtggcgggctccgaggcgggcgcgcagctgcacccggtcatcaccacgcagagcgcgggcggcgtctacacccccgctggccccggcgccgcgaactccgctcaccggcttctccctccttcgtgtgagcaaagcgccgccgcctcccttcagggcgggaacggaaggcaacttttccggaagtcttatttttggtttaaaaaaaatccaactcccaataaacttgaacctgaaacgttttttgttttaaccaacaacacggaacctcccccccccaagggcaatccttattgtcccgggctgggccgggaaaaaaaagaagctaaaatgcaaaaatgggcgcaccacatggggcccaataagccgtgtgtttttcccccgg

SEQ ID NO: 5803 - DNA, 1555 bp, Homo sapiens
ccactgcatgggcgtatcagagtgacgcgtcgacacagtcacacctgtgatgtgctatttgttctacggctgggacagctatttacatatgggtctccacctaactctgtcttattgatcctccctcttgtaacaatactcagtgtgcgctccgccaaattctcgggtttcccatacgccgttttgtcttgcaaaaaaatacccggaaaagtaaccctttgggatgttatacgggcaattgcgaatgtccgactaaaccagaatgttcacaggtagagattgaccaaatggtgattgatgggtgtaagaaatacatgcgaaaaacgtgtggcgatgtcttagacaatcttataaggagactgctatcaggttctaatagaagactgtatcccggtactgaagaggtacgccaaagaagggagagaatttgattatgtgattaatgatttgacagctgttccaatctccacgtctccagaagaagattccacatgggagtttctcagactgattcttgacctctcaatgaaagtgttgaaacaggatgggaaatattttacacaggggaactgtgtcaatctgacagaagcactgtcgctctatgaagaacagctggggcgcctgtattgtcctgtggaattttcaaaggagatcgtctgtgtcccttcatacttggaattgtgggtattttacactgtttggaagaaagctaaaccctgaagatcagtagcccctaatcacatgtgctgcaaatagccttcctgacctccatatgctgtacatgacatcaaaatgagtcaggcaattgattgtgaattccttaaagttttcctttttttaataattatttttaatttaaaaaagcaaatggaaaatgtatattttgatgagcttagggtgttttttttttgaaagtcagctgaaggatggttagacagcacagcgaagactgctaaatgcactgaccccccccattagaatgtgatttttgttcctttttatttctctgtgggcttttgtttttgtttttgttttggtagatcttcaatttggatatttggaggagtgaacatcgttgttttgctggagggaagatcttgatggtgtttctttccccaaaaattgacttagatattaaaatttggtgcttataagagagagttaaaaaaaaataggattgcttcaattaaaattacaaaagagaaaaaaaaaaaaaaaaaaaaatatttcagcccagtcccctctttctgacttgtgatctcatagagcaacagtatctcctggtctgtttttagttctgtcactcgatgtcatttatctctttataataggatggccccggggctttttttgaacaggtagtaatgacttcatttgccaccgtgctaaatgggtacacaacctattacattcaccagtccttcattataccattgacctgaggctagcaagagattttgtctgactgtaaagttgaaagtcaaaagcttatttctggtcccactcttagcagtgtattagatgtggaaataaaagtcattttgggtagctgcta

SEQ ID NO: 5804 - DNA, 3987 bp, Homo sapiens
agcgggcttccgggaggaaggcggcgcggaggccgggggcggccgctgagcttggcgtccgcgcggctccggtgcgggctgcgccgcgccttccccagcgagctaccgagcttggggccgccgcggtccgctcccgccgcccggcctctccctcctcggttcaccgccgcagcccctgccccgccgagccccgccggacagcggcggccgcagcgcgcatttgggctccgaggaagttgaccgaggcggctgccgcaggatcccgggcccggatcgcacgaagcccgcgcggccgtctcctccgcgcgccacccctgcgcctcccgcgagctccacttcccatctgctattgtttccgattgttttccggtggcgagcccggctccgaaacttacaaagtgttggatgtcccccgttcgaactgagggactgcagaccgcctctgggtagctggatgaagcccaccccgtccccttctggtaccaaagtgcttactcctctccaaagtgccgtgtctgaactgccgctgggaagaagcggctcctgagacgcgcccacacctttcacctgccgcgcgcttccccctcctcggccaccttcccggcggaagcagcgaggagggagccccctttggccgtcctccgtggaaccggttttccgaggctggcaaaagccgaggctggatttgggggaggaatattagactcggaggagtctgcgcgcttttctcctccccgcgcctcccggtcgccgcgggttcaccgctcagtccccgcgctcgctccgcaccccacccacttcctgtgctcgcccggggggcgtgtgccgtgcggctgccggagttcggggaagttgtggctgtcgagaatgggggtctgtgggtacctgttcctgccctggaagtgcctcgtggtcgtgtctctcaggctgctgttccttgtacccacaggagtgcccgtgcgcagcggagatgccaccttccccaaagctatggacaacgtgacggtccggcagggggagagcgccaccctcaggtgcactattgacaaccgggtcacccgggtggcctggctaaaccgcagcaccatcctctatgctgggaatgacaagtggtgcctggatcctcgcgtggtccttctgagcaacacccaaacgcagtacagcatcgagatccagaacgtggatgtgtatgacgagggcccttacacctgctcggtgcagacagacaaccacccaaagacctctagggtccacctcattgtgcaagtatctcccaaaattgtagagatttcttcagatatctccattaatgaagggaacaatattagcctcacctgcatagcaactggtagaccagagcctacggttacttggagacacatctctcccaaagcggttggctttgtgagtgaagacgaatacttggaaattcagggcatcacccgggaacagtcaggggactacgagtgcagtgcctccaatgacgtggccgcgcccgtggtacggagagtaaaggtcaccgtgaactatccaccatacatttcagaagccaagggtacaggtgtccccgtgggacaaaaggggacactgcagtgtgaagcctcagcagtcccctcagcagaattccagtggtacaaggatgacaaaagactgattgaaggaaagaaaggggtgaaagtggaaaacagacctttcctctcaaaactcatcttcttcaatgtctctgaacatgactatgggaactacacttgcgtggcctccaacaagctgggccacaccaatgccagcatcatgctatttggtccaggcgccgtcagcgaggtgagcaacggcacgtcgaggagggcaggctgcgtctggctgctgcctcttctggtcttgcacctgcttctcaaattttgatgtgagtgccacttccccacccgggaaaggctgccgccaccaccaccaccaacacaacagcaatggcaacaccgacagcaaccaatcagatatatacaaatgaaattagaagaaacacagcctcatgggacagaaatttgagggaggggaacaaagaatactttggggggaaaagagttttaaaaaagaaattgaaaattgccttgcagatatttaggtacaatggagttttcttttcccaaacgggaagaacacagcacacccggcttggacccactgcaagctgcatcgtgcaacctctttggtgccagtgtgggcaagggctcagcctctctgcccacagagtgcccccacgtggaacattctggagctggccatcccaaattcaatcagtccatagagacgaacagaatgagaccttccggcccaagcgtggcgctcgccaagcgtggcgctgcgggcactttggtagactgtgccaccacggcgtgtgttgtgaaacgtgaaataaaaagagcaaaaaaaaaaaaaaaaaaaaaataagaccgtctgacagcaacaacggtcccacaaacaagtcacaaaagataccgttaaactttttttttttttttatcattttactacatgaacatcatggataacaagggattctgattcattattaatttcattaattatattttctgatatgagtctagaacttactgcaaaaacaagacaaaactaaaaaaatacaactgagaagggtgaagagaagtatgtttgttaaacagtaaaaatgaatagtatacttcttaactaggtttacaactggtggaccacacaccaggcactaatcacctggtgaggatttggcatatccaccaaaaaatgcatccgatttaaccaacatctccaccagcgctacggactcctcccaattctgacatctcttgcagacaatactatgctctctacacactgtttagaaatggaaaggtgatctgcactgtatcttgggtttgttggctatgcttcctttgatgacatatattatacagtatatatatacatatattttttttgttagagttctagccattttatttctccgcagggtcctttctcagacattactgcatgctgtatatggcgttagctgtgtgttgatcttctaaaagatgatagagtttactggtaattgtgtaatcagctcctgcctttttattttcttgggttatttacatgtcagagacatttataaaaagtgaaaggataaaaaaaaaaaaaaaacaactaataccgggcgcagcatctttccaggtgtggctctgcgctaggccaccccaggtggccccgctttctccattctgccctgtggcgttaacagacagcaagcagctgaacaagcagtaccgtcagtacccacttgctttagcccattatgggaatctctgatgcctttgtgaccactggagagtttaatcctcttggtttattttatttcccacctttgtgtgagtgtgtatgaaagagaagaaaatgcaatttttaggtaatcttttttttttttcccctcccctgaaagtctgggaacctgagagtcctcggggaggggtcctggatgtgatgagggaaagggggattgggggatccgggagggtggggttgtcttctgactggaccttaaaaaggggtccctggcccctctttaacaaaacacccacactaaccaacccccccccaaacctaccaacaaaacacaaaaccccctcgtgatacccacctataacccccaaatcccaaaaaaaaacagcgcgccccccccctccagagaaaacccccctaggggggcccaatctctttccccaatcaccccccttcttttttaacccacaatgggcgctcttcattccaccggtattgcaattttaatcacccatcccccaagagaacctcgctcttataaaaaaccacccccaataccgtgataaaaaaccccccgcccttaccgtaatatatctccgaagaaaaaaccaccaactctcttgaacttgggtacgctgcttccatcgtcaaccaaccactgcttccatctgaagt

SEQ ID NO: 5805 - DNA, 2356 bp, Homo sapiens
  misc_feature (164)..(164): n is a, c, g, or t
  misc_feature (2247)..(2261): n is a, c, g, or t
tctgcacattggttttgcacactagggaccaagaagccctcggggacactgctgagaaaagactgccgaaggaagaccagcggggatcatggaatctattccagaggaaactaaccaacagtgagcatcttcaactaaaactacccctggatgtaataagtgtngcatgcatcattcctttaattgagcagagttaactggatcaaattatttatgggagagagaggaaaagttataaagaattatagtaatttttaatttccaccaatatactctttgtaagtgaatcactctataattactttctgttgcactgaatgcagcaacaataacacaatagtattttaaggcactggtttttggcatactctaaccttgtaattatttaaataacagccaagtttactcatgtttttgattctgtcaagaaaaaaaaaaagttcctttactcgaaagtgatggccgaaacagaatcggaaatttgttttcttgaaattacataaatacacagaaaatggcacttattagcttttgttaaaacattaccttacctaatcactgcataaaagtccagatttgtagaaaattgtaattttctcagtatctaaaactattttgctttccattaagtttctatttgctattttctcagaattttacaattaaagataaatcacaaactgtttgtttttcttaaagttctttgagaaaatgtctaattatacaatccttggacaatactgtgtttttttggtgctgtgttttttaagaagtcctacttactggaattttgactatttggatatttttgtttttaaaaggggaggggaatttgcttaatacttctaaagatgtgaattgataattgatattaaaatagaattactctcaactcaccagaattaaattttatatctgcatatttaacactattagctcatataaattataagaaaaattttcaaaggatctggttttaattttttggatatgaaatgaatttgccttttctgccttttcttaagtactattttgtaactatattgcactaactatatccaaaacacattctgagcatcactgtgagtaacagccttccagtttgtacccttttgattcacggcatggccctatagttaattaagaggtggataacttaagctcacaactgcctttaatttgatttcacatccacagttataaactttgcatttaaaaggaaaatgagacatttaaataggttcctgttgtttcacatataattggtaaaaacatattcccttgtaggatcctattatcagagcatcaaataccaaagtcagcaacttgggttgccaaataaattaggctcattaattattttgaaaagggctgctgtttccatgtaaatgataattttctttttcatggacaaggttatggtacttatctactaaaagaaacatgcataaacatagttttttatctttaacttcagtattaaaatatgcagttttttgcaaagaggaaaaacatctggttcaattacgctgaactctgactacatgtgggccagtaataatatgaattggacttaagaataaaccttgtgtttaatctctttttttccttaaaattttaatgtgagttttctgttacgcaaattatccatgttagcacatttggaacaaatgtataaatgtactttctgaataaagtcaaaagtctaacttgtttatagttccataatgttttaatgtttaattatattgtgtatttttctccctttccccttactctccaaaatcaccaaatctggaaaacaggctgattgtatctgtctatgagcaaaggaaacctgaaggaaccaagggcctggctggacagagttgtcatgtgtctgcctgtctacacttgctgtgcagaacatccgctcacctgtacagcaggcacagacaggcagtcacatgacaacccagcctgaatgacaaccagccattgaaagaaagcagccctcacaccatagcatctacaccaagagctacaaccaaaatgaggggctcgggggcctggggttttaatctgttggtttaatacttaactcatgtattattttattttgattcaagtattaaaacccaccaaaagtaaagtgagtggtgcctatgaaatataataaaacccatttctgaaaatgttcctgtgcattctatagttctcttttcctaattgttgtcagcaaatcactacccttgacctttattgtannnnnnnnnnnnnnnccctatattgatataaaaactcaatataacaaaacaatataacttcagtctgatgcttaacaaagaataaattattctaagtatttttgtccata

SEQ ID NO: 5806 - DNA, 1769 bp, Homo sapiens
gcagccgatttctccttttcgaatgtattcctcctgccaccttctctgggcaacttcgtgcgactacagaaccactgtcctgaggagctagaggcctcctctctgaccatccagagcccaaatccacagcttccccaaatttcatcagctgccacttgacgacttctccccgtctctctgaggcccggaaaccacggctggaggtggggaggggatggcggctgaggtccattcctcattctcagacctcattgctcagttgcactatttggggcacagaataatcaccaaaagtgagaaaaacgagtttgggtggctggggaggactttgggactcttgatgcaaggcgcaacttgagaaaattctgggtgtgatatttgcacagacaccctcctttcaaaaacagccaccccccaagctattctcagctccacacctgcagccccagctaaggtaccaggtctcctgagcaaggcagagagaagccttgagccttctctgtgtcttctttcaagaaccccgctatgtcttctttcaagattttttttttgagacagtttcaagattttggttttgtttttgagatggagtctcactgtgtcacccaggctgaggtgggcagtgggttcaatctccgttcactgccacctccacctcccgggttcaagcgattctcctgcttcagcctctcgagtagctgggactacaggcacctgccaccatgtctggctaatttttgtatttttagtagagacagggtttcactacgttggccaggctggtctcaaactcctgacctcaagtgatccgcccgcctcggcctccccaattgctgggattacaggcgtgagccactgtgcccggccttcttctttcaagttatatagaatggagcatgggggtggcagtggctagggacatttcctggggacactctcccctaaccccccagaaggacttcacaaaaacctgtggataatggaagggatgttacggtacaaacgtatatttatgtgtgtgtgtgtgtatgtgtgtgcgcgcgcgcgtgtgcacataggcgtgatgtctgtgaccctcctctcctcgtcacatttcccccagaatgaatgctgtcctgtctgctcatgtttgtgttgaagctgccaaagtcggggagctctggtcctgcccagacccctttggaattgctggcccatcctcccactggagagctggggtgcagctcaccttggggaaggaaacctcatgcctcagagtaatttcttgtgaatgcaaagcctgggggagcgggtctttggggggcaaggagccagtcaggggcttgtttcccctcatagagctccccagacgtgcctccgcaatgcctgaaacccagacctaggctaataaacggttcaatttctgaaaaaaaaaaaaaaacaaaaaacaaacaaatcacacaacaagagaacaaacccaaagacagccaacacaaacacaagacaacgcgcacgaaaaacaccgaacacaaccagcagaacacaaaaacacagatcggcgcgggcagaaacgctcaccgaggacggcccacacctgttcaacgagccccgcctatgcagacagcaggagggcgcccactcagagagaggcggccacaaaacaaacgaagcggagaaggggcggcagcaaagacaccgcacgagcgcgggagaaaaaccacagcgggaggagaagtacggagagagacaaccccgcggggcgggagcaaacgaggaacgcagacacacga

SEQ ID NO: 5807 - DNA, 1764 bp, Homo sapiens
  misc_feature (1454)..(1455): n is a, c, g, or t
  misc_feature (1621)..(1621): n is a, c, g, or t
  misc_feature (1652)..(1652): n is a, c, g, or t
cgcccccggcccgccgcccggccttgcaccccacccccggcccagcggcccggccgctcctaaaagccatcttctcctctcccagccaagattggcacagcaacgaggggacagtgaggacggaagcccaagtggcacaaatgcagaaactccctctggtgatgatttcagaatgtgtgtctttcatttgtcaagcctctccttggcagatactaatctaccatccgaagtggagccagagctgcgcagtttcattgctaagcgtctttcaagaggtgcagtctttgaagggctgggtaatgttgcatctgtggagctaaaaattccaggttaccgagttggttgttattactgccttttccaaaatgaaaaactgcttcctgaaacagtaacgatagactctgaacgtaacccttcagaatatgtggtctgttttttaggagggtctgaaaaaggacttgagcttttcaggcttgaattggacaagtacattcaagggctgaaaaataacatgaattgtgaggcaaggggcctggagagtcacataaaatcctatctgagcagctggtttgaggatgttgtatgcccaatccaaagggttgttcttctctttcaggaaaagcttacctttctgctacatgctgctttgagttacactcctgttgaagttaaagaatcagatgaaaaaacaaagagagacattaacaggtttcctgagtgtggcccagtcttcaagggacttaattcatggaaggcacccaatgaccttctttggtgcatgggccatggacagaagggagcagccataaggtcctgtgggtcatccgatttgcagcaaggctccccaagccctcaggttctgcaatgcagaaatcctggatccaccaccgctgctgttcaccctctcccacccatcctgacccagacccagatgaaacaggccctaatgccagcccttcaggtcacttcctgaataaccaatggcttggaaaaagaaaaaaaatatttaatggaatctgtgctcaaataatatgttacaacaaaaatatacagaatgtacacaatacaaaaatacttagaaacaaacattgcagtctgtgttttgttttttccacttactcaagtcctcggaggggcagttcactgttgggcactgtttttaaggcagaggagaaccgtgctttccagccagcacggggagcaacatgaatgatgccaggaaaggctttcacggcacccagggaatctgcattacgtatttgcaaattaaattggacgctgggggaagatcctggtgtggtgagcaacagctcccctaatcctctgggcaagaatggttctcatggaaatcgagagtcctattagctggcaaaagagcctcattagggagcttttcctaattaaaaaacgaatgatgaatggtgtcattaaagcgaaatttctcctttgaaggnntgttttcccttccccagtttctgtgattcctctcccgtttaatgagagccagtgagtctatggctgctgtttgggattccccagcttcagtttctgtatcctgtggataaaagccaacctacctttcaccagcctgagatttacacaccaccccctgggctgcagncacctagacaaggaagaagacagagacacgncagcttgccatattgggatgtgtgtagaaagtgtgactgctgagagaagcaatgcacaagagaactgtgcgaatcttgctgagggcaatccctattaggaggatccatccat

SEQ ID NO: 5808 - DNA, 1576 bp, Homo sapiens
  misc_feature (1554)..(1572): n is a, c, g, or t
acacacacacacacacagaaccccctcagggatgcacagtcagagtgagtgggcaggcgggcaggtgggggaactgcatttctgtaatttttgtttgtttggaggctgaggcaagagaatcgcttgaacccaggaggcagagttgcagtgagctgagatcatgccattgcactccaacctgggtgacagagtgagactccatctcaaaaaaaaaaaaaaagagagaaactctcctgatgccctgttacagggtttgcactgactggagcagaaacagcaacctttctaaaaaagcaaacctttttcctgggaggaaaatgccagagcttgagccaaaattcttatgacaggtaacatttgggtgttaatgtccatgagagctgacagggccatctctgagcccatataactgtctggaacccccaaatgtgtccacaggttgaatgtccatgagtgtgggaagaacacggctcatctggagcacagctgaggctagtaagagctaaatgactttccttgctatgacttggcttacctgaattagctgtaagagttgccgaatgggatgggttctgctatttaataaacagcattcatattcatttttccccagatggagttacctacctttccacatggtcagcttagaaatcttcccctaaagatgctaatctcctttgggctgtctcagaacacagtatccttcaaataagaaaaactgagtgggaagtgcagtgtttccaaacaatacctatcataactacgtattcattgtctacctgctaagtcaagggttcactgcatttctccttcctcagaatacactctggacctgtgctgtctaatatggtagccactaacaaaatgtggccattttgatggaaatccattaaaatcaaagaaaatttaaaactcaattcctcaattgggctggccacatttcaaatgctcactacccacctgtggctagggtctacttctactgtattggcgagcatggatatagaacatttcatcacagttctgttggaccaatctagatagattcattatcccatctagagaagagactttagtcactgtcttcttgcttcagacccatctatatttaaaacaaatttccctaaatcctgagactgagacggagctacaaattctcagatggcgaccgtgtaaatggtattagcggctgaagaaaaaaaatttttcaagacctctgttttttaactgaactttatcattggcattgtgggtctttgaagttgctgggataaattaatataattaaataaaagactgaatttaattgcaaaaaaaaaaaaaaaaaaaaaaaaaaaaaaaaaaaaaaaaaaaaaaaaaaaaaaaaaaaaaaaaaaaaaaaaaaaaaaaaaaaaaaaaaaaaaaaaaaaaaaaaaaaaaaaaaaaaaaaaaaaaaaaaaaaaaaaaaaaaaaaaaaaaaaaaaaaaaaaaaaaaaaaaaagggggggccctttttaaaagacccccttttttcccccgggggggccccccaaaattttttttttaaggggcccnnnnnnnnnnnnnnnnnnncctt

SEQ ID NO: 5809 - DNA, 4670 bp, Homo sapiens
  misc_feature (148)..(194): n is a, c, g, or t
  misc_feature (314)..(335): n is a, c, g, or t
  misc_feature (4629)..(4629): n is a, c, g, or t
gcccggacgcagtgaggggggtcggcgcgcgtgtctacgcggacgcaccggctaagctgcttctgccgccgccggccgcctgggaccttgcggtgaggctgcgcggggccgaggccgcctccgagcgccaggtttattcagtcaccannnnnnnnnnnnnnnnnnnnnnnnnnnnnnnnnnnnnnnnnnnnnnnaccctgcttggcttatggagaaccacccctgaggctcacgcttcatccctgggtgcaccagctatcagcgctgcctccttcctgcaggatctaatacatcggtatggcgagggtgacagnnnnnnnnnnnnnnnnnnnnnngccctgctcaaccacctggatgtgggagtgggccggggtaatgtcacccagcacgtgcaaggacacaggaacctctccacgtgctttagttctggagacctcttcactgcccacaatttcagcgagcagtcgcggattgggagcagcgagctccaggagttctgccccaccatcctccagcagctggattcccgggcctgcacctcggagaaccaggaaaacgaggagaatgagcagacggaggaggggcggccaagcgctgttgaagtgtggggatacggtctcctctgtgtgaccgtcatctccctctgctccctcctgggggccagcgtggtgcccttcatgaagaagacccttttcaggagtgtgctgctcttacttcatagctctgtcgattggaacgctgttagtccaacgccctcttccagctcatcccggaggcatttggtttcaaccctctggaagattattatgtctccaagtctgcagtggtgtttgggggcttttatcttttctttttcacagagaagatcttgaagattcttcttaagcagaaaaatgagcatcatcatggacacagccattatgcctctgagtcgcttccctccaagaaggaccaggaggagggggtgatggagaagctgcagaacggggacctggaccacatgattcctcagcactgcagcagtgagctggacggcaaggcgcccatggtggacgagaaggtcattgtgggctcgctctctgtgcaggacctgcaggcttcccagagtgcttgctactggctgaaaggtgtccgctactctgatatcggcactctggcctggatgatcactctgagcgacggcctccacaatttcatcgatggcctggccatcggtgcttccttcactgtgtcagttttccaaggcatcagcacctcggtggccatcctctgtgaggagttcccacatgagctaggagactttgtcatcctgctcaacgctgggatgagcatccaacaagctctcttcttcaacttcctttctgcctgctgctgctacctgggtctggcctttggcatcctggccggcagccacttctctgccaactggatttttgcgctagctggaggaatgttcttgtatatttctctggctgatatgttccctgagatgaatgaggtctgtcaagaggatgaaaggaagggcagcatcttgattccatttatcatccagaacctgggcctcctgactggattcaccatcatggtggtcctcaccatgtattcaggacagatccagattgggtagggctctgccaagagcctgtgggactggaagtcgggccctgggctgcccgatcgccagcccgaggacttaccatccacaatgcaccacggaagaggccgttctatgaaaaactgacacagactgtattcctgcattcaaatgtcagccgtttgtaaaatgctgtatcctaggaataagctgccctggtaaccagtctctagctagtgcctcttgccctctcctcacctccttttctctcagtgactctggaacctgaatgcagcttacaagacaagcctgacttttttctctgattaccttggcctcctcttggaaccagtgctgaaaggttttgaatcctttacccaacaatgcaaaaatagagccaatggttataacttggctagaaatatcaagagttgaatccatagtgtggggcccatgactctagctgggcaccttggacctccagctggccaatagaagagacaggagacaggaagccttcccattttttcaaagtctgtttaattgcctattacttctctcaaagagaacctgaagtcagaacacatgagcagggtgagaggtgaggcaaggttcatcctgaatgggagaggaagtcgaaccactgctgtgtgtcttgtcaggatgctcacttgttcctactgagatgctggatattgattttgtaacagcacctggtgtttcacggctgtccgagtgagctaacgtggcggtgtggctgcctggacctcctctttcaggttaacgctgacagaatggaggctcaggctgtctgcaagaaaacagttggtttggctgtgattttgacctcctcttccccactgccatcttctaagagactttgtagctgcctcctagaagcacattctgagcacatttgagacctctgtgttagaggggagactgcacaaactatcctcccccaggttgagacgtctgcagagtggcaagctgacttgtagaaatggggtgccatttatgctctacttagacaagggtaatcagaaatggaatcagtgcaggcaaaatttaggatttgccgcttccataaatcaaagcatgactaatagggggtctctgaaatgtaagggcacaaacttcacttagggcatcgcagatgtttgcagaatggttggcctaatgattatgctacagatgggttttaaatgacccgtctaggttactgcttccttgcaaaaaaagtagaataatgcattgaattgaatatgaatttctctaactctctccagaaaatggatggagataacttgtctttaaaactgtaggccagccttagccactgtggagcccttgcctccgagctctggcttcaaggggagctcttctccaggttcactaggtgaattgatttattattatcatattgataatgtgagattctttagccactttggggagcctgtctctccagaagcctttcttagtggtgcccacagttggagcccaggggccatgtttgcaaactgattcatgtgcatggctgacaggagtactggttcactaccaatgcctgagcttttctcttacatagaaaaactgtccactctcagtaatcacaagcagcatccgttttgttttctcttcttgggagacatctgtcaaaccaggaatattcttgaaaagaacgtgagcaggaaaaactgctggtgatactttttttaagttttgtttttatcttgcctgttggcttcaatacatttgagaatacgctgaagagggaaaatttcagtgatggagattctagattaaatatcaggactgatttcctggtgggattatggtccagttttaccaaagaaccaattccttgaatgttggaatctaactttttatattgtcattattattgttgtttttaaacggttctttgtcttttctgttttatttttctcaagctgctttcaggagctagcagaaaataactcaaagttgaagactctggaagattttgctttaacctaactcgcattgatgtattaaatttataattttagcattcccaatagatcctatcattccttaaacataataccctttgtcttggagtagaatactaagttagagttagtggatttctagtttaggagaggagctcaaaactataatctttaacaaattgaaaaatgaaatagggtgttttccctttttgtgcacacctatattaccttaagaaatttccttccatagacagctgcctcaaagggaaatcctctttaaaccgtagttggcgcagaggtcagtcctagtcggagcttaggaggggcggagacgctcacatcgtctgacttgagtcgccactgattgtggcaacagctttgcctcatgagtcaaaaattggcaatttcttttgatttttagttgttgaatttgctgtttcaagcatttgtacatattagaagtctaaggagtagcaagtcagtgggaggactttttcacccctggcattagcagcttcgacctcattttccagatgcaccagctcctattaataagttagcaaggaaagtgtatgtcacgtgcaggaacagtgaggcagggacaggggttctgctccttctcacttcaccaccggcacacagcttgcccctgtctttgcccccaaaggtattttgtgtctagtgtcaaattggagctattcttcactggtccttaaccttgggttttaaaaagaaggcttctctgtttgggtagcgtaagagctgagtatagtaagtcctcttccaaagagatggcaatatgctgggcatctactttaaaacaaagttgtctgatttttgcaagagaggttaggattttattgttcttatttccctttacagttctgcagttccatcacagtatttttttaaataactcaggtgtatgagaagaaattagaaaagaaaattaacttatgtggactgtaaatgttttatttgtaagattctataaataaagctatattctgtaaaaaaaaaaaaaaaaaaaaaaaaaangacaataaatgtggatgtaatgaaggctgttgaaaaaaaaa

SEQ ID NO: 5810 - DNA, 4153 bp, Homo sapiens
  misc_feature (2451)..(2467): n is a, c, g, or t
agcggggcagagcaggtttaggcccggcctgggaaactggggagctgaggtgctcgcgccgccgctctgagcccgagtgcgcgcctctcaggggccgcggccggggctggagaacgctgctgctccgctcgcctgccccgctagattcggcgctgcccgccccctgcagcctgtgctgcagctgccggccaccggagggggcgaacaaacaaacgtcaacctgttgtttgtcccgtcaccatttatcagctcagcaccacaaggaagtgcggcacccacacgcgctcggaaagttcagcatgcaggaagtttggggagagctcggcgattagcacagcgacccgggccagcgcagggcgagcgcaggcggcgagagcgcagggcggcgcggcgtcggtcccgggagcagaacccggctttttcttggagcgacgctgtctctagtcgctgatcccaaatgcaccggctcatctttgtctacactctaatctgcgcaaacttttgcagctgtcgggacacttctgcaaccccgcagagcgcatccatcaaagctttgcgcaacgccaacctcaggcgagatgagagcaatcacctcacagacttgtaccgaagagatgagaccatccaggtgaaaggaaacggctacgtgcagagtcctagattcccgaacagctaccccaggaacctgctcctgacatggcggcttcactctcaggagaatacacggatacagctagtgtttgacaatcagtttggattagaggaagcagaaaatgatatctgtaggtatgattttgtggaagttgaagatatatccgaaaccagtaccattattagaggacgatggtgtggacacaaggaagttcctccaaggataaaatcaagaacgaaccaaattaaaatcacattcaagtccgatgactactttgtggctaaacctggattcaagatttattattctttgctggaagatttccaacccgcagcagcttcagagaccaactgggaatctgtcacaagctctatttcaggggtatcctataactctccatcagtaacggatcccactctgattgcggatgctctggacaaaaaaattgcagaatttgatacagtggaagatctgctcaagtacttcaatccagagtcatggcaagaagatcttgagaatatgtatctggacacccctcggtatcgaggcaggtcataccatgaccggaagtcaaaagttgacctggataggctcaatgatgatgccaagcgttacagttgcactcccaggaattactcggtcaatataagagaagagctgaagttggccaatgtggtcttctttccacgttgcctcctcgtgcagcgctgtggaggaaattgtggctgtggaactgtcaactggaggtcctgcacatgcaattcagggaaaaccgtgaaaaagtatcatgaggtattacagtttgagcctggccacatcaagaggaggggtagagctaagaccatggctctagttgacatccagttggatcaccatgaacgatgtgattgtatctgcagctcaagaccacctcgataagagaatgtgcacatccttacattaagcctgaaagaacctttagtttaaggagggtgagataagagacccttttcctaccagcaaccaaacttactactagcctgcaatgcaatgaacacaagtggttgctgagtctcagccttgctttgttaatgccatggcaagtagaaaggtatatcatcaacttctatacctaagaatataggattgcatttaataatagtgtttgaggttatatatgcacaaacacacacagaaatatattcatgtctatgtgtatatagatcaaatgttttttttggtatatataaccaggtacaccagagcttacatatgtttgagttagactcttaaaatcctttgccaaaataagggatggtcaaatatatgaaacatgtctttagaaaatttaggagataaatttatttttaaattttgaaacacaaaacaattttgaatcttgctctcttaaagaaagcatcttgtatattaaaaatcaaaagatgaggctttcttacatatacatcttagttgattattaaaaaaggaaaaatatggtttccagagaaaaggccaatacctaagcattttttccatgagaagcactgcatacttacctatgtggactataataacctgtctccaaaaccatgccataataatataagtgctttagaaattaaatcattgtgttttttatgcattttgctgaggcatgcttattcatttaacacctatctcaaaaacttacttagaaggttttttattatagtcctacaaaagacaatgtataagctgtaacagaattttgaattgtttttctttgcaaaacccctccacaaaagcaaatcctttcaagaatggcatgggcattctgtatnnnnnnnnnnnnnnnnngttcagtgaaagatgtgggtagttgagaacttaaaaagtgaacattgaaacatcgacgtaactggaaattaggtgggatatttgataggatccatatctaataatggattcgaactctccaaactacaccaattaatttaatgtatcttgcttttgtgttcccgtctttttgaaatatagacatggatttataatggcattttatatttggcaggccatcatagattatttacaacctaaaagcttttgtgtatcaaaaaaatcacattttattaatgtaaatttctaatcgtatacttgctcactgttctgatttcctgtttctgaaccaagtaaaatcagtcctagaggctatggttcttaatctatggagcttgctttaagaagccagttgtcaattgtggtaacacaagtttggccctgctgtcctactgtttaatagaaaactgttttacattggttaatggtatttagagtaattttttctctctgcctcctttgtgtctgttttaaaggagactaactccaggagtaggaaatgattcatcatcctccaaagcaagaggcttaagagagaaacaccgaaattcagatagctcagggactgctaacagagaactacatttttcttattgccttgaaagttaaaaggaaagcagatttcttcagtgactttgtggtcctactaactacaaccagtttgggtgacagggctggtaaagtcccagtgttagatgagtgacctaaatatacttagatttctaagtatggtgctctcaggtccaagttcaactattcttaagcagtgcaattcttcccagttatttgagatgaaagatctctgcttattgaagatgtaccttctaaaactttcctaaaagtgtctgatgtttttactcaagaggggagtggtaaaattaaatactctattgttcaattctctaaaatcccagaacacaatcagaaatagctcaggcagacactaataattaagaacgctcttcctcttcataactgctttgcaagtttcctgtgaaacaatcacgtgtcctgtaccaaagtcaaaatgaacgttacatcactctaacctgaacagctcacaatgtagctgtaaatataaaaaatgagagagtgctacccagttttcaataaaccttcaggctgcaaatcaataaccaggttttcagttaaagccctatctgcactttttatttattagctgaaatgtaagcaggcatattcactcacttttctttgcctttcctgagagttttattaaaacttctcccttggttacctgttatcttttgcacttctaacatgtagccaataaatctatttgatagccatcaaaggaataaaaagctggccgtacaaattacatttcaaaacaaaccctaataaatccacatttccgcatggctcattcacctggaataatgccttttattgaatatgttcttatagggcaaaacactttcataagtagagttttttatgttttttgtcatatcggtaacatgcagctttttcctctcatagcattttctatagcgaatgtaatatgcctcttatcttcatgaaaaataaatattgcttttgaacaaaaaaaaaaaaaaaaaaaaaaagcgggccatatttaaattttgggggccgggaaagggagccgagaagggaggggttccc

SEQ ID NO: 5811 - DNA, 1334 bp, Homo sapiens
tatctatgtaacaaatcgcagcacaggagtcccctgggctccctcaggctctggtatgacatatttgagccatataaattcagcttctcctctggcatctgttagccgactcacttgcaactccacctcagcagtggtctctcagtcctctcaaagcaaggaaagagtactgtgtgctgagagaccatggcaaagaatcctccagagaattgtgaagactgtcacattctaaatgcagaagcttttaaatccaagaaaatatgtaaatcacttaagatttgtggactggtgtttggtatcctggccctaactctaattgtcctgttttgggggagcaagcacttctggccggaggtacccaaaaaagcctatgacatggagcacactttctacagcaatggagagaagaagaagatttacatggaaattgatcctgtgaccagaactgaaatattcagaagcggaaatggcactgatgaaacattggaagtacacgactttaaaaacggatacactggcatctacttcgtgggtcttcaaaaatgttttatcaaaactcagattaaagtgattcctgaattttctgaaccagaagaggaaatagatgagaatgaagaaattaccacaactttctttgaacagtcagtgatttgggtcccagcagaaaagcctattgaaaaccgagattttcttaaaaattccaaaattctggagatttgtgataacgtgaccatgtattggatcaatcccactctaatatcagtttctgagttacaagactttgaggaggagggagaagatcttcactttcctgccaacgaaaaaaaagggattgaacaaaatgaacagtgggtggtccctcaagtgaaagtagagaagacccgtcacgccagacaagcaagtgaggaagaacttccaataaatgactatactgaaaatggaatagaatttgatcccatgctggatgagagaggttattgttgtatttactgccgtcgaggcaaccgctattgccgccgcgtctgtgaacctttactaggctactacccatatccatactgctaccaaggaggacgagtcatctgtcgtgtcatcatgccttgtaactggtgggtggcccgcatgctggggagggtctaataggaggtttgagctcaaatgcttaaactgctggcaacatataataaatgcatgctattcaatgaatttctgcctatgaggcatctggcccctggtagccagctctccagaattacttgtaggtaattcctctcttcatgttctaataaacttctacattatcaaaaaaaaaaaaaaaaaaaaaaaaaaaaaaa

SEQ ID NO: 5812 - DNA, 1136 bp, Homo sapiens
ggacacatgactaacgctttccaacctgccattttcatatgtatcatgcactctccacccacaataattctgcctcccaaaagagcatattatagtcaatgaggtttaaggtttcttcggttcagtcatgtggaagttttgctttcctaaaattatagctggatcactttgattggatttgggatattacccaaatgctaatcaaatattaaaaggcaatcttttttgttatgtgattgctacagattactgctcttacagtttgattcttcaaattttcattctcagaagggaatcttaaacccagtttgaagggtaccttgtccacaaccacttttaaattttggctaacttcccaaccttccaccatgttctgggaaaactttttctgctgttatagtatgtatgtattcaggaagtgcaacattattaaactaagcataattcagaagctaagtttcctttcatcaaaatttaatattacgaattgtgcaaagaagtatgttactttgatcagctttattttagagcttctttatcaagttatcatcagtcctcttgaattatttctgaaataaggggaaggaaggaagggaaaaaatatgaatgcatagatagatctaagcagatgccttcagagccctggaataatcctagctgggatatgggacatgaaaacaactctggcctactgctgctgggggctgttgcatggtgtgacataggaagtaaaatgttgctgtatgaataggaaggagggtcttcctgtcaatgagaattaatgttttcctaatgatttaacttttttactgaaaaaataatatgtgtacatggtaaaaatccaaattgtatcacagaaaatacagtgaataaaaccatcctcttaagagggtgtgtacatttataaatttgcctatgattgcctataaagtcaaagaagttgcaccagtatgcatgactgccaaaagtacataaactgagcatatccatttccctacattcttgcaaacattgtgccttcgaactttttggcctctgatagaggaaaaatggtaactccttgttttattttttatattcattattccttttgtaagattaaatatcatctcatgaataaaaaaaaaaaaaaaaaa

SEQ ID NO: 5813 - DNA, 3808 bp, Homo sapiens
  misc_feature (1504)..(1519): n is a, c, g, or t
  misc_feature (3464)..(3480): n is a, c, g, or t
  misc_feature (3488)..(3490): n is a, c, g, or t
  misc_feature (3495)..(3496): n is a, c, g, or t
  misc_feature (3502)..(3504): n is a, c, g, or t
  misc_feature (3508)..(3508): n is a, c, g, or t
  misc_feature (3618)..(3635): n is a, c, g, or t
  misc_feature (3639)..(3639): n is a, c, g, or t
  misc_feature (3645)..(3649): n is a, c, g, or t
  misc_feature (3652)..(3653): n is a, c, g, or t
  misc_feature (3657)..(3658): n is a, c, g, or t
  misc_feature (3663)..(3665): n is a, c, g, or t
  misc_feature (3675)..(3676): n is a, c, g, or t
  misc_feature (3681)..(3681): n is a, c, g, or t
  misc_feature (3684)..(3687): n is a, c, g, or t
  misc_feature (3703)..(3710): n is a, c, g, or t
  misc_feature (3717)..(3719): n is a, c, g, or t
  misc_feature (3736)..(3738): n is a, c, g, or t
  misc_feature (3748)..(3753): n is a, c, g, or t
  misc_feature (3770)..(3770): n is a, c, g, or t
  misc_feature (3772)..(3772): n is a, c, g, or t
gggcaaatcgggcgggaagaggtaaaaaaggaactgggatcgcgccgcggcggttcctgtccttacagttgcgctgcccagggaccgatgttgcgcgaggaaaatgcgggacgcccaggtcggtgctcggcccagacttatgcccgtgttttcacagcccacactcgtgcccgaagccccttaccccgccccgggctgtggtctgtgggctgtgggacgagctgcggcgcgggccatttctgagcagtggaggtttcaagtaatccactaacaaccagttccaaattctgtcatcaaatcctgtgctgctgttcctcgtggtaatagatgcatattatttcttttatttaaaagaaatgaatgtgactagtattgcattaagagctggaacttggcttttagctgcatggcatgttaaagtacctccgatgtggctggaagcttgtattaactggattcaagaagaaaataataatgttaacttgagtcaggcccaaatgaataaacaagtgtttgagcagtggctccttactgatctgagggatttggagcatcctcttttacccgatggcattttagaaattccaaaaggagaattaaatggattttatgctctgcagattaattccttggttgatgtaagtcagcctgcatactcccagatacagaagttgagaggaaagaatacaacaaatgatctagttacagctgaagcacaagtaaccccaaaaccttgggaagcaaagccttcacgaatgttgatgctgcagctaactgatggaatcgtacaaatacagggaatggaatatcagcctattccaattcttcatagtgatcttcctccaggtacaaaaattttgatttatggaaatatatctttccgtcttggtgttctcttattgaaaccagaaaacgtgaaagtgttaggaggtgaagtagatgctcttttagaagaatatgcccaagaaaaagtacttgcaagattaataggggaacctgatcttgtagtttcagtcataccaaacaattctaacgaaaacattcccagagttacagatgttctagatcctgcattaggtccttctgatgaagaactcttggcaagtcttgatgaaaatgatgagcttacaacaaataatgacacttcctcagaacgatgtttcaccacaggtagttcctcaaataccattcccacaagacagtcaagttttgagccagaatttgttatttctccaagaccaaaagaggaaccatcaaacctatctatacatgtaatggatggagaattagatgacttttcactggaggaggccttgcttttagaagaaactgtccagaaagaacagatggaaactaaggaattgcaaccattgacttttaacagaaatgccgatcgaagtatagagagattttcacataatcctaatactacgaataacttttctttgacttgcaaaaatggaaacaataattggagtgaaaaaaatgtatctgaacaaatgannnnnnnnnnnnnnnnatttggttgtccatctgttagagaccaaaacaggagtattttttcagttcattgtaatgtacccttagcccatgattttacaaataaagaaaagaacttagagacagataataaaataaaacaaaccagcagttcagatagccattccttaaataataaaatattaaatagagaggtggtcaactatgtacagaaaaggagttcacaaatttctaatgaaaatgattgtaatttacagagttgttctttaagatcatcagagaatagcattaatctttctattgccatggatttgtattctccaccctttgtctatttgtctgttctaatggccagcaaaccaaaggaagttacaacagtgaaagtgaaagcatttattgtaaccttaactggaaatctctcaagttctggtggtatttggagtataactgcaaaggtgtctgatggtactgcatatctagatgtagactttgtggatgaaatacttactagcttgatagggttctcagtaccagaaatgaaacagtcaaaaaaggatcctcttcaataccaaaagttcctggaagggttgcagaaatgtcaaagagatctaatagatttgtgctgtctaatgactatttcatttaatccttccttgtctaaagcaatggtactggcattacaagatgttaatatggaacaccttgagaatctaaagaagcggttaaataaataattaaactaaaatagtattaggaacaattaaaaacaacaaggaaatatttagaatttgttcacaattttacttatgatactttgtgtaaaaaggaaaaatgaaatttcatagcttatttcagtttaattttaaagtgtttaatcatgtttgttatatgtggagcttttgaaaataagttaatctttttttttttttttaatgtcagggtattgctctgttgcccaggctagagtgcagtggcatgatcataggttattgcatcaacctcttgagctcaagcgatcctcctgccttagcctcttgagttgctgggactataggcatgtaccaccatgcccagctaatttataattactattattgttttgtagggacagagttttgctatgttgcccagattggtctcaaactcctggcctctcactcctgccgtcatggcctccaaagtttaatttttttaaaagtaactgttagatggaggaatatggtgacccactattgttgagaaatttgttttccacttgtcacgtcacataagatgattgctaaaatattgtactggtgttcggtggtgagtcatatttttgaaagttaataattataaataggtaatttccttctaatatgttggtactgtctatggccataccaccctgaacatgcctgagcttgtcataatatgttgagtacccaaaagatttgtttatattgttaatcttagggaaaaaaaattaaaatccagtagatcagaacatcaggctttcagatacaaattgatttactggtttttattttgctgattataatatttggtatatttaaggtaatctagttaactagatgctatttcatagattatattgaatgatttaaaactttattttcaaggatagtttattttaaatggcatattgaaaacatcattattaagatccagtaggtaggacatttattggattaaaatgaagcatttatctatgtctttaggtgtcattgttccctttctgaattagctgtacatataagccttcctttggttttaagtactgatttttttttaaaaaaaagagggactgtttaccattcttccactgtgctgttataaagttgtatttgaaaggtaatgttgtttttattaatcttttgtcttaaaataatttaaagtgctttgaattttaaaacattaaacaaatccttaaataacaaaaaaaaaaaaaaaaaaaaaattgnnnnnnnnnnnnnnnnngggggggnnngtttnngaatannnggangggggttgggtttgcaaatttttggagtttaaatttaaaaatttttttttttttaaaaaaaattggggatattaaaaaaaaattaattggtaaaaaattgtccttttttnnnnnnnnnnnnnnnnnnaaanaaaaannnnnaannaagnnaaaannnaaaaaaaaannaaaanaannnnaaaaaaaaaaaaaaannnnnnnnaaaaaannnaaaaaaaaaaaaaaaannngggggaaggnnnnnnaaaaaaaaaaaaaaaananaaggaaggaagaaaaaaagagggggggggggggaaa

SEQ ID NO: 5814 - DNA, 708 bp, Homo sapiens
catattaaatcttcagaccctggtaggtatttactcaccgcacacctcaactctggattagccacatatcaagtgctcacagccacacatactcatggctcatggttacagtgctgggcagtgcagctcgaaagcatgacaggcttttgctaaccacaagccttcagccacacagtcctttttcccttcccacctccttttcgttatccccctcttcatccagattcctcaaggtccaactcaagtagaacctcttgagaaaggcctatcccagcaactccagctcttaatgatcctgacgcactacaataaaactgaatgcaaactgtgggcaatgagtatgggaggcctattacagaaaaaagttcaagacagaaacactcaaggaattgaccttttcggattacaaatatgtataaatgtaatgctatcatttgtaataaagagacaaaataactaaatgtcggctgggctcagtggctcatgcctgtaatcccagcacttttgggagatgggtggagcccttgagcccaggagttcaagttgcagtgagcagagatgacataactgcactccagcctgtgcaagagagtgagaccctgtctcaaaacaaagagaaagaaaaaaacaacttaatgtccattgatagaaaaactagttaaataaatggtagatccacataacggaaatattatggagctaaaggat

SEQ ID NO: 5815 - DNA, 2245 bp, Homo sapiens
aaccttcggctgggtacggaattctgggtttgaattgtgaccagagcggtggcgggctgagcggtttcgagccggcgtcggggagcggcggtaccgggcggctgcggggctggctcgacccagcttgaggtctcggcgtccgcgtcctgcggtgccctgggatccgccgacatgaatcccatcgtagtggtccacggcggcggagccggtcccatctccaaggatcggaaggagcgagtgcaccagggcatggtcagagccgccaccgtgggctacggcatcctccgggagggcgggagcgccgtggatgccgtagagggagctgtcgtcgccctggaagacgatcccgagttcaacgcaggttgtgggtctgtcttgaacacaaatggtgaggttgaaatggatgctagtatcatggatggaaaagacctgtctgcaggagcagtgtccgcagtccagtgtatagcaaatcccattaaacttgctcggcttgtcatggaaaagacacctcattgctttctgactgaccaaggcgcagcgcagtttgcagcagctatgggggttccagagattcctggagaaaaactggtgacagagagaaacaaaaagcgcctggaaaaagagaagcatgaaaaaggtgctcagaaaacagattgtcaaaaaaacttgggaaccgtgggtgctgttgccttggactgcaaagggaatgtagcctacgcaacctccacaggcggtatcgttaataaaatggtcggccgcgttggggactcaccgtgtctaggagctggaggttatgccgacaatgacatcggagccgtctcaaccacagggcatggggaaagcatcctgaaggtgaacctggctagactcaccctgttccacatagaacaaggaaagacggtagaagaggctgcggacctatcgttgggttatatgaagtcaagggttaaaggtttaggtggcctcatcgtggttagcaaaacaggagactgggtggcaaagtggacctccacctccatgccctgggcagccgccaaggacggcaagctgcacttcggaattgatcctgacgatactactatcaccgaccttccctaagccgctggaagattgtattccagatgctagcttagaggtcaagtacagtctcctcatgagacatagcctaatcaattagatctagaattggaaaaattgtcccgtctgtcacttgttttgttgccttaataagcatctgaatgtttggttgtggggcgggttctgaagcgatgagagaaatgcccgtattaggaggattacttgagccctggaggtcaaagctgaggtgagccatgattactccactgcactccagcctgggcaacagagccaggccctgtatcaaaaaaaaaaaaaaaaaaaaaaaaaaaaaaagaaagaaagcagcagcatgatcctgacatgacagatgtgggagacccacagcctgcagacactgtgggctggaaggtgggaagggaggggccggtggaggtggagctgtttgaaagtgacacagcagcagtagaagcagtggtgggcgaagcccaggtgaccctcagaacgttgcacaagaacatcagggaaaagaaccagaatcctttaaggaaaatgttcttcatgtatgagagactaaagtgatttttctaagaaagttcagcccttctctgacttacctggacatttctagatacttccaaaggaccctctgggaatccatagcttcctaatctggagatgggaggtcataagggagacgctgtggggttccttgaagtttcttgggttcacagaggagccccctcacttggtgttctcccgtgagccagcctccacctgccaaagacactctggtcctcgtatagtgagtaatggggctcagggcctctccaacaacagagaggagctgatgctgtagggctgaccccgtgacttcctgagtcctcaccctgtccagtgctttgagattcttcccacctccccatcctcaccagccggatcgggcgctgtgcagtgtggtcagcatggtgaagaaagtcatttcctcggtgggcagtattcctctttatctctcattacactggaaatgttatttctgctgtatcatccgtgctcaacgttttagtctgtcaggctcaccttctctctggaaagaatttgcttaacttgacattccatgtgccgctaataaaatatattttgaaagaaaaaaaaaaaaaaaaaaagg

SEQ ID NO: 5816 - DNA, 738 bp, Homo sapiens
tttccttagagcaatgtataataatggggctgttaaccagttaagtgcctttctcctcttactggaagggcctgaaaattcatgaccaaagaaataacactatgaggacagtggcaccattgtgccaaaaaggttttaaaaaatgtttgccatgttgaaaaggaaaacattaacacctttaaacctttaaaaggcatcaggctgaacagggcagctggactaagatctggaatgagttacattgggttgacttatttaaatacaattaatatcagaacaaagaatgccaaggatttttatcacacttttaaaccaaattcctcattatctatcctttttttctctctttccatagcatgcagatattcccgaaagcggactaaacctgatatttacaaaaacatagttttaaatgatcaagacagtacaagtttcaacatcagctagagaacatgcacagtcataccgcctaattttgtacctgtgataaactctggctaaaaccaatcacatggggaaaagcttgtcggatgaacatctacatcactattaattttcagccagcatagaatgcatgtggcttgagagaaactgtttaacaacaaaaaactcctatgaaaaagcaaatgagtaggaatgggcaaagatgagctccatgactaaaacgctgatctctttatccttcctgtttgcaaataagccatgggatcaccatcttaactagaattctagttaagt

SEQ ID NO: 5817 - DNA, 2878 bp, Homo sapiens
  misc_feature (657)..(671): n is a, c, g, or t
ggcctggtggcgaattcaggcttgcgagggtttttgtgcaggaacagcccctcccgtctttgtcctggcggtgagcacccagggctaagcttttgaacactttctttgtgtttggattcagcccaggcaatgcatatttgctttcatttcttcttgagcttgaggagctcctgggtgcaaatcttggaaaatgaggatctctgagcctttccaggccagctctttgttttgtagcagacaattgaggctttgaaaaggaaagtgggtgggggcaccccacaggtggccctcatcacccaattgccagtgcctgcaggctgcttcagcagaggcccagagtcaaagaggacttaaaaccagctgtcgtttctcccttagcttctgtgtatgagagaaacgacttctgtttttcaaagtaagaacaaggaggaatttgtttctaaaagaacattaaaacacaggctcgtggtctaaaagcaaatggttcagcaggatgttcagggccttaaagcacagtcagcaggactcagcatctcccagcacctgctctccggttgtcatggtaacatcatccccaacccaaccaccttgtccagccgagagacagcaatcataaggagggacctcggtttcccccgaggatcctgggcttccttnnnnnnnnnnnnnnntctgagctcagcaaccaggaacaccaggccagcccatccccagcacctctgtggagatgagggacaaagtcctacagtccctcttcctgttctgatgagaaagggagggaagaaaacataccccgagcgcctgcaatatggtcatgacactttcaaaaagcctgtgctatggagtcatgatcagaaaccagagtgtggagagggtcagcagcctgcctcagagcagccagctaggcggggagtggtaaatttgggacttgtacccaggcatgactggctccgagcccagtgctccactctatggaatgttccctgggcctcagttgctttcctttcctttgcaggccgcgggctgctgccactctggcagctggtgagttagctggagggcaacattccaaagcaggggcagcatgctgctttcctcctgtgcccactcctgcggggaagtccgttgactcccaccgctgaagggagctggcaacaccaggatgaggtcccaggggacgggagcaggtacccactgtctgtctaccttcccactggaaaagcacggacaggccagcccttgcgggggcaggcagaggacagagttggctttgcgcggtctctgcctgctgagcagttccaattcctctcatgggagaaacaaggaggcagtcgcttgtgcatgttccagaagttttactggggaggaggaagcggacagaggaagctgtgtgtgcatgtgaaggggtgggcagggtgggagggatgcacgcgtatgtgagcatagcatgtgtgagtactacacacatctccatgcagaagcacaactgggcagccctggcttccagctctgggcttcagcacaacagacaccagcctgtggtctctcagaagccagggagaccacatcgggctcaggacgttttacccaaagtccagagtttttatgcctctccctggcattctccataaagaagggaaggtcagatgaccccttagatctgtgtcatctgggaatttccttgggctggtttagacacgatgccctctttttctcaggatagcagataacctgctttgaaagagggcttaattctgtgggtcctaaattttctcctttctctctctctttctgtgtgtgtgtgttgggaaaatggcaagtttccaataccagctttggaggaacgattacgttttccctccaatttcaagtccgaaagaccagagccctcattccaaagccccccacccagatggattttttcgtttcatttgtcatccgtcccatgggagggccccatgtctcctcagaacccatcctggaggcagcaggtcgggtagagtgagtttggcctgctcatgacctccacccctgagattgtgaacaaggatgtctggggcgatgctgagaatgtttttgaagctgctcccagatgacgctgatgatcacaccagattgagtgctgcgatcgccttgagtccagcctctgcataaacgaggttctcataaacaagttcactctaccctaagctaagtctatgtgagcaaacccacttcatcctttgtacctggagacctggttacactaacctgatactgacctgttcatgtagctggaatggtgtgtttcatgcagtgtggaccaagcaatggcatggggtgtgtgtgtgtgtgtgtgtgtgtctgtgtgtgtgtgtttgtgtatgcgttcacacttgtgtgtgtatatgtgcatgtagatgctgcataaatgatttttgatgtcaaagacaaacacattccattgttttaaatattctattatgtaaacaatacgcagagggaccatatctactcttgtcatattatttgtgatggtaaaacatgcatttgcaataaattaagctttctgggaaggcaagcagtattggagccaaacgactgtctcggaacatgtgtgtgttatctcggttcatatcaagtccaaagctaatggagccttccccgccatccagggaggaacaccaggaccccggagtttcttcttagtgctatattttaaagttgcattgacgttttcctccccttccttttgtgcaagttggaagtagcagtgttctaaaagatggtttgacgtttttgctgttgttttatgtttttaaaaatgtatctgctttgtgtttggaaataaaaatctctattttggtctatgaaaaaaaaaaaaaaaaaaaaaaaaaag

SEQ ID NO: 5818 - DNA, 5525 bp, Homo sapiens
  misc_feature (1044)..(1060): n is a, c, g, or t
  misc_feature (1507)..(1535): n is a, c, g, or t
gcgcctttctccgcgtcggggcggcccggagcgcggtggcgcggcgcgggaggggttttctggtgcgtcctggtccaccatggccaaaccaacaagcaaagattcaggcttgaaggagaagtttaagattctgttgggactgggaacaccgaggccaaatcccaggtctgcagagggtaaacagacggagtttatcatcaccgcggaaatactgagagaactgagcatggaatgtggcctcaacaatcgcatccggatgatagggcagatttgtgaagtcgcaaaaaccaagaaatttgaagagcacgcagtggaagcactctggaaggcggtcgcggatctgttgcagccggagcggacgctggaggcccggcacgcggtgctggctctgctgaaggccatcgtgcaggggcagggcgagcgtttgggggtcctcagagccctcttctttaaggtcatcaaggattacccttccaacgaagaccttcacgaaaggctggaggttttcaaggccctcacagacaatgggagacacatcacctacttggaggaagagctggctgactttgtcctgcagtggatggatgttggcttgtcctcggaattccttctggtgctggtgaacttggtcaaattcaatagctgttacctcgacgagtacatcgcaaggatggttcagatgatctgtctgctgtgcgtccggaccgcgtcctctgtggacatagaggtctccctgcaggtgctggacgccgtggtctgctacaactgcctgccggctgagagcctcccgctgttcatcgttaccctctgtcgcaccatcaacgtcaaggagctctgcgagccttgctggaagctgatgcggaacctccttggcacccacctgggccacagcgccatctacaacatgtgccacctcatggaggacagagcctacatggaggacgcgcccctgctgagaggagccgtgttttttgtgggcatggctctctggggagcccaccggctctattctctcaggaactcgccgacatctgtgtttccatnnnnnnnnnnnnnnnnngcatgtccgaacgaggtggtgtcctatgagatcgtcctgtccatcaccaggctcatcaagaagtataggaaggagctccaggtggtggcgtgggacattctgctgaacatcatcgaacggctccttcaacagctccagaccttggacagcccggagctcaggaccatcgtccatgacctgttgaccacggtggaggagctgtgtgaccagaacgagttccacgggtctcaggagagatactttgaactggtggagagatgtgcggaccagaggcctgagtcctccctcctgaacctgatctcctatagagcgcagtccatccacccggccaaggacggctggattcagaacctgcaggcgctgatggagagattcttcaggagcgagtcccgaggcgccgtgcgcatcaaggtgctggacgtgctgtcctttgtgctgctcatcaannnnnnnnnnnnnnnnnnnnnnnnnnnnntgattaactcagtggtcatctcgcagctctcccacatccccgaggataaagaccaccaggtccgaaagctggccacccagttgctggtggacctggcagagggctgccacacacaccacttcaacagcctgctggacatcatcgagaaggtgatggcccgctccctctccccacccccggagctggaagaaagggatgtggccgcatactcggcctccttggaggatgtgaagacagccgtcctggggcttctggtcatccttcagaccaagctgtacaccctgcctgcaagccacgccacgcgtgtgtatgagatgctggtcagccacattcagctccactacaagcacagctacaccctgccaatcgcgagcagcatccggctgcaggcctttgacttcctgtttctgctgcgggccgactcactgcaccgcctgggcctgcccaacaaggatggagtcgtgcggttcagcccctactgcgtctgcgactacatggagccagagagaggctctgagaagaagaccagcggccccctttctcctcccacagggcctcctggcccggcgcctgcaggccccgccgtgcggctggggtccgtgccctactccctgctcttccgcgtcctgctgcagtgcttgaagcaggagtctgactggaaggtgctgaagctggttctgggcaggctgcctgagtccctgcgctataaagtgctcatctttacttccccttgcagtgtggaccagctgtgctctgctctctgctccatgctttcaggcccaaagacactggagcggctccgaggcgccccagaaggcttctccagaactgacttgcacctggccgtggttccagtgctgacagcattaatctcttaccataactacctggacaaaaccaaacagcgcgagatggtctactgcctggagcagggcctcatccaccgctgtgccagacagtgcgtcgtggccttgtccatctgcagcgtggagatgcctgacatcatcatcaaggcgctgcctgttctggtggtgaagctcacgcacatctcagccacagccagcatggccgtcccactgctggagttcctgtccactctggccaggctgccgcacctctacaggaactttgccgcggagcagtatgccagtgtgttcgccatctccctgccgtacaccaacccctccaagtttaatcagtacatcgtgtgtctggcccatcacgtcatagccatgtggttcatcaggtgccgcctgcccttccggaaggattttgtccctttcatcactaagggcctgcggtccaatgtcctcttgtcttttgatgacacccccgagaaggacagcttcagggcccggagtactagtctcaacgagagacccaagagcaggatacagacgtccctcaccagtgccagcttggggtctgcagatgagaactccgtggcccaggctgacgatagcctgaaaaacctccacctggagctcacggaaacctgtctggacatgatggctcgatacgtcttctccaacttcacggctgtcccgaagaggtctcctgtgggcgagttcctcctagcgggtggcaggaccaaaacctggctggttgggaacaagcttgtcactgtgacgacaagcgtgggaaccgggacccggtcgttactaggcctggactcgggggagctgcagtccggcccggagtcgagctccagccccggggtgcatgtgagacagaccaaggaggcgccggccaagctggagtcccaggctgggcagcaggtgtcccgtggggcccgggatcgggtccgttccatgtcggggggccatggtcttcgagttggcgccctggacgtgccggcctcccagttcctgggcagtgccacttctccaggaccacggactgcaccagccgcgaaacctgagaaggcctcagctggcacccgggttcctgtgcaggagaagacgaacctggcggcctatgtgcccctgctgacccagggctgggcggagatcctggtccggaggcccacagggaacaccagctggctgatgagcctggagaacccgctcagccctttctcctcggacatcaacaacatgcccctgcaggagctgtctaacgccctcatggcggctgagcgcttcaaggagcaccgggacacagccctgtacaagtcactgtcggtgccggcagccagcacggccaaaccccctcctctgcctcgctccaacacagtggcctctttctcctccctgtaccagtccagctgccaaggacagctgcacaggagcgtttcctgggcagactccgccgtggtcatggaggagggaagtccgggcgaggttcctgtgctggtggagcccccagggttggaggacgttgaggcagcgctaggcatggacaggcgcacggatgcctacagcaggtcgtcctcagtctccagccaggaggagaagtcgctccacgcggaggagctggttggcaggggcatccccatcgagcgagtcgtctcctcggagggtggccggccctctgtggacctctccttccagccctcgcagcccctgagcaagtccagctcctctcccgagctgcagactctgcaggacatcctcggggaccctggggacaaggccgacgtgggccggctgagccctgaggttaaggcccggtcacagtcagggaccctggacggggaaagtgctgcctggtcggcctcgggcgaagacagtcggggccagcccgagggtcccttgccttccagctccccccgctcgcccagtggcctccggccccgaggttacaccatctccgactcggccccatcacgcaggggcaagagagtagagagggacgccttaaagagcagagccacagcctccaatgcagagaaagtgccaggcatcaaccccagtttcgtgttcctgcagctctaccattcccccttctttggcgacgagtcaaacaagccaatcctgctgcccaatgagtcacagtcctttgagcggtcggtgcagctcctcgaccagatcccatcatacgacacccacaagatcgccgtcctgtatgttggagaaggccagagcaacagcgagctcgccatcctgtccaatgagcatggctcctacaggtacacggagttcctgacgggcctgggccggctcatcgagctgaaggactgccagccggacaaggtgtacctgggaggcctggacgtgtgtggtgaggacggccagttcacctactgctggcacgatgacatcatgcaagccgtcttccacatcgccaccctgatgcccaccaaggacgtggacaagcaccgctgcgacaagaagcgccacctgggcaacgactttgtgtccattgtctacaatgactccggtgaggacttcaagcttggcaccatcaagggccagttcaactttgtccacgtgatcgtcaccccgctggactacgagtgcaacctggtgtccctgcagtgcaggaaagacatggagggccttgtggacaccagcgtggccaagatcgtgtctgaccgcaacctgcccttcgtggcccgccagatggccctgcacgcaaatatggcctcacaggtgcatcatagccgctccaaccccaccgatatctacccctccaagtggattgcccggctccgccacatcaagcggctccgccagcggatctgcgaggaagccgcctactccaaccccagcctacctctggtgcaccctccgtcccatagcaaagcccctgcacagactccagccgagcccacacctggctatgaggtgggccagcggaagcgcctcatctcctcggtggaggacttcaccgagtttgtgtgaggccggggccctccctcctgcactggccttggacggtattgcctgtcagtgaaataaataaagtcctgaccccagtgcacagacatagaggcacagattgcaaaaaaaaaaaaaaaaaaaaaaaaaaaaaaaaaaaaaaaaaaaa

SEQ ID NO: 5819 - DNA, 2157 bp, Homo sapiens
  misc_feature (182)..(192): n is a, c, g, or t
tcagccgctccctctgggcttccgtcctccgcccgcgcccgacggagcctgttcgcgtcgactgcccagagtccgcgaatcctccgctccgagcccgtccggactcccccgatcccagctttctctcctttgaaaacactaagaataatgtcactgcatcagtttttactagagccaatcannnnnnnnnnncccgggatagggatcgtactcagattgccctcagtcccaataatcacgaagtgcacatctataagaagaacgggagccagtgggtgaaagctcatgaactcaaggagcacaacggacacatcacaggtattgactgggctcccaagagcgaccgcattgtcacttgtggggcagaccgcaatgcctatgtctggagtcagaaagatggtgtttggaagccaaccctggtgatcctgagaattaatcgcgcagctacttttgtgaagtggtcccccctagagaacaaatttgctgtgggaagtggagcacgactcatttctgtttgttactttgagtctgaaaatgactggtgggtgagcaagcacattaaaaagccgattcgctccacagtcctcagcttggattggcatcccaacaacgttttgctggcagcaggatcatgtgacttcaaatgcagagtgttttctgcctacattaaagaagtggatgaaaagccagccagcacgccctggggcagcaagatgccttttgggcagctgatgtcagagtttggtggcagtggcactggtggctgggtccacggggtaagcttctctgccagtgggagccgcctggcctgggtcagccacgacagcaccgtgtctgttgctgatgcctcaaaaagtgtgcaggtctcgactctgaagacagagttcctgccgctcctaagtgtgtcatttgtctcagagaacagcgtcgtggctgctggccatgactgctgcccaatgctctttaactacgatgaccgcggctgcctgaccttcgtctccaagttagatattccaaaacagagcatccaacgcaacatgtctgccatggaacgcttccgcaacatggacaagagagccacaactgaggaccgcaacacggccttggagacgctgcaccagaatagcatcactcaagtctctatttatgaggtggacaagcaagattgttcgcaaattttgcactactggcatcgatggagccatgacaatttgggatttcaagaccctcgagtcttccatccagggcctccggataatgtgaagctgagtgagcctccgccatccagcatgacaaactgtggccgaccgcagctgtgccgtggcacgatggcgaggaagccagccccaaggaaacactgaaaacacatatcacgccaatgccgtgtggttttgtttgaatataaaattggtgaaagtgttggtttttttaaggcagtaatttttttgtttgtttttttgcgatttcattccattcttgaccaaagcttctctttaagtagtttattatggaaaattgtcacactaacttaaaagacagggtgagggagatatgtaaattgtccactagaaaattaaataaaagaactgaatgtggaaaaaaaaaaaaaaaaaaaaaaaaaaaaaaaaaaaaaaaaaaaaaaaacaaaaaaacaaaacaaaaaacagcaaccaaaaagaaaaacaagaaaacaaaaaaaaacaggagggggggggcgccagctgcaaaatccgccccgagcagggagcgcccaatatataagaccacccaccaggtgtaaaaaaaaagggaggcccaccataagagaggacaaatataaaataggacgggcacgcggagtcataacaaacggatatggagaagaaacaacacatgtgataggggagagaacaatagaaggagaaaacacaacatagtggggggaggaagagcacattacgttagagtagaaacaaacacctccatagtggatgaaagttatgatgttacctgctccgggggtgtgagaaattatacaaacaagtttgtgcgattagttatgatatgtagttggtgaaaaaaaaaacagttatatatctaatctggtgctcggacgaagaaaaagatttagtttatcgtcaaagacgagaattatgtagtatggagaaaatattttag

SEQ ID NO: 5820 - DNA, 5544 bp, Homo sapiens
  misc_feature (2347)..(2362): n is a, c, g, or t
  misc_feature (2527)..(2527): n is a, c, g, or t
  misc_feature (2929)..(2943): n is a, c, g, or t
  misc_feature (3685)..(3703): n is a, c, g, or t
gggccgggccgggctgggctggagcagcggcgcccgggagccgagcttgcagcgagggaccggctgaggcgcgcgggagggaaggaggcaagggctccgcggcgctgtcgcgctgccgctcactctcggggaagagatggcggcggagcggggagcccggcgactcctcagcaccccctccttctggctctactgcctgctgctgctcgggcgccgggcgccgggcgccgcggcggccaggagcggctccgcgccgcagtccccaggagccagcattcgaacgttcactccattttattttctggtggagccggtggatacactctcagttagaggctcttctgttatattaaactgttcagcatattctgagccttctccaaaaattgaatggaaaaaagatggaacttttttaaacttagtatcagatgatcgacgccagcttctcccggatggatctttatttatcagcaatgtggtgcattccaaacacaataaacctgatgaaggttattatcagtgtgtggccactgttgagagtcttggaactattatcagtagaacagcgaagctcatagtagcaggtcttccaagatttaccagccaaccagaaccttcctcagtttatgctgggaacaatgcaattctgaattgtgaagttaatgcagatttggtcccatttgtgaggtgggaacagaacagacaaccccttcttctggatgatagagttatcaaacttccaagtggaatgctggttatcagcaatgcaactgaaggagatggcgggctttatcgctgcgtagtggaaagtggtgggccaccaaagtatagtgatgaagttgaattgaaggttcttccagatcctgaggtgatatcagacttggtatttttgaaacagccttctcccttagtcagagtcattggtcaggatgtagtgttgccatgtgttgcttcaggacttcctactccaaccattaaatggatgaaaaatgaggaggcacttgacacagaaagctctgaaagattggtattgctggcaggtggtagcctggagatcagtgatgttactgaggatgatgctgggacttatttttgtatagctgataatggaaatgagacaattgaagctcaagcagagcttacagtgcaagctcaacctgaattcctgaagcagcctactaatatatatgctcacgaatctatggatattgtatttgaatgtgaagtgactggaaaaccaactccaactgtgaagtgggtcaaaaatggggatatggttatcccaagtgattattttaagattgtaaaggaacataatcttcaagttttgggtctggtgaaatcagatgaagggttctatcagtgcattgctgaaaatgatgttggaaatgcacaagctggagcccaactgataatccttgaacatgcaccagccacaacgggaccactgccttcagctcctcgggatgtcgtggcctccctggtctctacccgcttcatcaaattgacgtggcggacacctgcatcagatcctcacggagacaaccttacctactctgtgttctacaccaaggaagggattgctagggaacgtgttgagaataccagtcacccaggagagatgcaagtaaccattcaaaacctaatgccagcgaccgtgtacatctttagagttatggctcaaaataagcatggctcaggagagagttcagctccactgcgagtagaaacacaacctgaggttcagctccctggcccagcacctaaccttcgtgcatatgcagcttcgcctacctccatcactgttacgtgggaaacaccagtgtctggcaatggggaaattcagaattataagttgtactacatggaaaaggggactgataaagaacaggatgttgatgtttcaagtcactcttacaccattaatgggttgaaaaaatatacagagtatagtttccgagtggtggcctacaataaacatggtcctggagtttccacaccagatgttgctgttcgaacattgtcagatgttcccagtgctgctcctcagaatctgtccttggaagtgagaaattcaaagagtattatgattcactggcagccacctgctccagccacacaaaatgggcagattactggctacaagattcgctaccgaaaggcctcccgaaagagtgatgtcactgagaccttggtaagcgggacacagctgtctcagctgattgaaggtcttgatcgggggactgagtataatttccgagtggctgctctaacaatcaatggtacaggcccggcaactgactggctgtctgctgaaacttttgaaagtgacctagatgaaactcgnnnnnnnnnnnnnnnntagctctcttcacgtacgcccgctcgttactagcatcgtagtgagctggactcctccagagaatcagaacattgtggtcagaggttacgccattggttatggcattggcagccctcatgcccagaccatcaaagtggactataaacagcgctattacaccattgnaaatctggatcccagctctcactatgtgattaccctgaaagcatttaataacgtgggtgaaggcatccccctgtatgagagtgctgtgaccaggcctcacacagacacttctgaagttgatttatttgttattaatgctccatacactccagtgccagatcccactcccatgatgccaccagtgggagttcaggcttccattctgagtcatgacaccatcaggattacgtgggcagacaactcgctgcccaagcaccagaagattacagactcccgatactacaccgtccgatggaaaaccaacatcccagcaaacaccaagtacaagaatgcaaatgcaaccactttgagttatttggtgactggtttaaagccgaatacactctatgaattctctgtgannnnnnnnnnnnnnngaagatcaagtacatggagtatgacagcccatgggaccacctttgaattagttccgacttctccacccaaggatgtgactgttgtgagtaaagaggggaaacctaagaccataattgtgaattggcagcctccctctgaagccaatggcaaaattacaggttacatcatatattacagtacagatgtgaatgcagagatacatgactgggttattgagcctgttgtgggaaacagactgactcaccagatacaagagttaactcttgacacaccatactacttcaaaatccaggcacggaactcaaagggcatgggacccatgtctgaagctgtccaattcagaacacctaaagcggactcctctgataaaatgcctaatgatcaagcctcagggtctggagggaaaggaagccggctgccagacctaggatccgactacaaacctccaatgagcggcagtaacagccctcatgggagccccacctctcctctggacagtaatatgctgctggtcataattgtttctgttggcgtcatcaccatcgtggtggttgtgattatcgctgtcttttgtacccgtcgtaccacctctcaccagaaaaagaaacgagctgcctgcaaatcagtgaatggctctcataagtacaaagggaattccaaagatgtgaaacctccagatctctggatccatcatgagagactggagctgaaacccattgataagtctccagacccaaaccnnnnnnnnnnnnnnnnnnntccaattcctcgcaactctcaagatatcacaccagttgacaactccatggacagcaatatccatcaaaggcgaaattcatacagagggcatgagtcagaggacagcatgtctacactggctggaaggcgaggaatgagaccaaaaatgatgatgccctttgactcccagccaccccagcctgtgattagtgcccatcccatccattccctcgataaccctcaccatcatttccactccagcagcctcgcttctccagctcgcagtcatctctaccacccgggcagcccatggcccattggcacatccatgtccctttcagacagggccaattccacagaatccgttcgaaatacccccagcactgacaccatgccagcctcttcgtctcaaacatgctgcactgatcaccaggaccctgaaggtgctaccagctcctcttacttggccagctcccaagaggaagattcaggccagagtcttcccactgcccatgttcgcccttcccacccattgaagagcttcgccgtgccagcaatcccgcctccaggacctcccacctatgatcctgcattgccaagcacaccattactgtcccagcaagctctgaaccatcacattcactcagtgaagacagcctccatcgggactctaggaaggagccggcctcctatgccagtggttgttcccagtgcccctgaagtgcaggagaccacaaggatgttggaagactccgagagtagctatgaaccagatgagctgaccaaagagatggcccacctggaaggactaatgaaggacctaaacgctatcacaacagcatgacgaccttcaccaggacctgacttcaaacctgagtctggaagtcttggaacttaacccttgaaaacaaggaattgtacagagtacgagaggacagcacttgagaacacagaatgagccagcagactggccagcgcctctgtgtagggctggctccaggcatggccacctgccttcccctggtcagcctggaagaagcctgtgtcgaggcagcttccctttgcctgctgatattctgcaggactgggcaccatgggccaaaattttgtgtccagggaagaggcgagaagtgcaacctgcatttcactttgtggtcaggccgtgtctttgtgctgtgactgcatcacctttatggagtgtagacattggcatttatgtacaattttatttgtgtcttattttattttaccttcaaaaacaaaaacgccatccaaaaccaaggaagtccttggtgttctccacaagtggttgacatttgactgcttgttccaattatgtatggaaagtctttgacagtgtgggtcgttcctggggttggcttgttttttggtttcatttttattttttaattctgagtcattgcatcctctaccagctgttaatccatcactctgagggggaggaaatgttgcattgctgtttgtaagctttttttattatttttttattataattattaaaggcctgactctttcctctcatcactgtgagattacagatctatttgaattgaatgaaatgtaacattgaaaaaaaaaaaaaaaaaaaaaaaaaaaaatttcagtattgggccgggtgggggctcttgggggttgtcaaacgaaaagggaggccttggccgagagtccggcccacgcgttctggccttggcccttcctctccaaaggcctgccagacaggggaaacccctcctctttccatgcccgttccccggggtggcccccctccctattggctgccacactcgcccacgtgtgggattttaagatttgcgactctgctccctcgcgagccactttcc

SEQ ID NO: 5821 - DNA, 4053 bp, Homo sapiens
ggcacgaggggctcgggacgcctcgggacgcctcggggtcgggctccggctgcggctgctgctgcggcgcccgcgctccggtgcgctccgcctcctgtgcccgccgcggagcgcagtctgcgcgcccgccgtgcgccctcagctccttttcctgagcccgccgcgatgggagctgcgcggggatccccggccagaccccgccggttgcctctgctcagcgtcctgctgctgccgctgctgggcggtacccagacagccattgtcttcatcaagcagccgtcctcccaggatgcactgcaggggcgccgggcgctgcttcgctgtgaggttgaggctccgggcccggtacatgtgtactggctgctcgatggggcccctgtccaggacacggagcggcgtttcgcccagggcagcagcctgagctttgcagctgtggaccggctgcaggactctggcaccttccagtgtgtggctcgggatgatgtcactggagaagaagcccgcagtgccaacgcctccttcaacatcaaatggattgaggcaggtcctgtggtcctgaagcatccagcctcggaagctgagatccagccacagacccaggtcacacttcgttgccacattgatgggcaccctcgatgaaagctttgccagggtggtgctggcaccccaggacgtggtagtagcgaggtatgaggaggccatgttccattgccagttctcagcccagccacccccgagcctgcagtggctctttgaggatgagactcccatcactaaccgcagtcgccccccacacctccgcagagccacagtgtttgccaacgggtctctgctgctgacccaggtccggccacgcaatgcagggatctaccgctgcattggccaggggcagaggggcccacccatcatcctggaagccacacttcacctagcagagattgaagacatgccgctatttgagccacgggtgtttacagctggcagcgaggagcgtgtgacctgccttccccccaagggtctgccagagcccagcgtgtggtgggagcacgcgggagtccggctgcccacccatggcagggtctaccagaagggccacgagctggtgttggccaatattgctgaaagtgatgctggtgtctacacctgccacgcggccaacctggctggtcagcggagacaggatgtcaacatcactgtggccactgtgccctcctggctgaagaagccccaagacagccagctggaggagggcaaacccggctacttggattgcctgacccaggccacaccaaaacctacagttgtctggtacagaaaccagatgctcatctcagaggactcacggttcgaggtcttcaagaatgggaccttgcgcatcaacagcgtggaggtgtatgatgggacatggtaccgttgtatgagcagcaccccagccggcagcatcgaggcgcaagcccgtgtccaagtgctggaaaagctcaagttcacaccaccaccccagccacagcagtgcatggagtttgacaaggaggccacggtgccctgttcagccacaggccgagagaagcccactattaagtgggaacgggcagatgggagcagcctcccagagtgggtgacagacaacgctgggaccctgcattttgcccgggtgactcgagatgacgctggcaactacacttgcattgcctccaacgggccgcagggccagattcgtgcccatgtccagctcactgtggcagtttttatcaccttcaaagtggaaccagagcgtacgactgtgtaccagggccacacagccctactgcagtgcgaggcccagggagaccccaagccgctgattcagtggaaaggcaaggaccgcatcctggaccccaccaagctgggacccaggatgcacatcttccagaatggctccctggtgatccatgacgtggcccctgaggactcaggccgctacacctgcattgcaggcaacagctgcaacatcaagcacacggaggcccccctctatgtcgtggcctgtgccggaggagtcggagggccctggcagccctcccccctacaagatgatccagaccattgggttgtcggtgggtgccgctgtggcctacatcattgccgtgctgggcctcatgttctactgcaagaagcgctgcaaagccaagcggctgcagaagcagcccgagggcgaggagccagagatggaatgcctcaacggtgggcctttgcagaacgggcagccctcagcagagatccaagaagaagtggccttgaccagcttgggctccggccccgcggccaccaacaaacgccacagcacaagtgataagatgcacttcccacggtctagcctgcagcccatcaccacgctggggaagagtgagtttggggaggtgttcctggcaaaggctcagggcttggaggagggagtggcagagaccctggtacttgtgaagagcctgcagagcaaggatgagcagcagcagctggacttccggagggagttggagatgtttgggaagctgaaccacgccaacgtggtgcggctcctggggctgtgccgggaggctgagccccactacatggtgctggaatatgtggatctgggagacctcaagcagttcctgaggatttccaagagcaaggatgaaaaattgaagtcacagcccctcagcaccaagcagaaggtggccctatgcacccaggtagccctgggcatggagcacctgtccaacaaccgctttgtgcataaggacttggctgcgcgtaactgcctggtcagtgcccagagacaagtgaaggtgtctgccctgggcctcagcaaggatgtgtacaacagtgagtactaccacttccgccaggcctgggtgccgctgcgctggatgtcccccgaggccatcctggagggtgacttctctaccaagtctgatgtctgggccttcggtgtgctgatgtgggaagtgtttacacatggagagatgccccatggtgggcaggcagatgatgaagtactggcagatttgcaggctgggaaggctagacttcctcagcccgagggctgcccttccaaactctatcggctgatgcagcgctgctgggccctcagccccaaggaccggccctccttcagtgagattgccagcgccctgggagacagcaccgtggacagcaagccgtgaggagggagcccgctcaggatggcctgggcaggggaggacatctctagagggaagctcacagcatgatgggcaagatccctgtcctcctgggccctgaggcccctgccctagtgcaacaggcattgctgaggtctgagcagggcctggcctttcctcctcttcctcaccctcatcctttgggaggctgacttggacccaaactgggcgactagggctttgagctgggcagttttccctgccacctcttcctctatcagggacagtgtgggtgccacaggtaaccccaatttctggccttcaacttctccccttgaccgggtccaactctgccactcatctgccaactttgcctggggagggctaggcttgggatgagctgggtttgtggggagttccttaatattctcaagttctgggcacacagggttaatgagtctcttggcccactggtcccacttgggggtctagaccaggattatagaggacacagcaagtgagtcctccccactctgggcttgtgcacactgacccagacccacgtcttccccacccttctctcctttcctcatcctaagtgcctggcagatgaaggagttttcaggagcttttgacactatataaaccgccctttttgtatgcaccacgggcggcttttatatgtaattgcagcgtggggtgggtgggcatgggaggtaggggtgggccctggagatgaggagggtgggccatccttaccccacacttttattgttgtcgttttttgtttgttttgtttttttgtttttgtttttgtttttacactcgctgctctcaataaataagccttttttacaacctgaaaaaaaaaaaaaaaaaaaaaaaaaaaaaaaaa

SEQ ID NO: 5822 - DNA, 940 bp, Homo sapiens
  misc_feature (2)..(2): n is a, c, g, or t
gntacactatagtggaagttgtacaagaatgcagtttgaagaaggctcttacagcatggccgccggtactgcagctgccttagcgtttttgagtcaggagagccgaacgcgggccgggggtgtcgggggcctacgggtcccggccccggtcactatggacagttttttcttcggctgtgagctctccggccacacccgctccttcacctttaaggtagaggaagaggatgatgcggagcacgtgctggcactaaccatgctctgcctcaccgagggagccaaagacgagtgtaatgtggtagaagttgtggcccggaaccatgaccatcaggagatcgcagtccctgtggccaacctcaagctgtcctgccaacccatgctcagtctggatgacttccagctccaaccacctgtaaccttccgcctgaagtcgggctctggccctgtgcggatcactgggcggcaccagattgttacgatgagcaatgatgtttctgaggaggagagcgaggaagaggaagaggacagtgatgaggaagaagttgagctgtgccccatccttcctgccaaaaagcaggggggcaggccctagccctcctaggtcagctccatgtgccatgcaccgccatgcaccctgttccctgacaaagtttcaacaattgtaaatatttcttccttgaagaggagagcttgggtgggggttgggtgggagggacttgggtctttggtgctaggagagggcctgtgctccacacagccgtggttttctgattttcaccatgcccggggcctcccttcccacctgcctgtgagaattggaggttagtgcctgaagctcagagctacacatttttaatagtttttacatttttggataaaggttgaaataaagtggtgtggagtttttgcaaaaaaaaaaaaaaaaaaaaaaaagaattta

SEQ ID NO: 5823 - DNA, 994 bp, Homo sapiens
cttttacctttagatggaaatccttgtggcccaaaccccgattggggcttcattctacgttttacacgtcttttttctttgtacaagtgtaactggaggctcccaaagccaaaagccaatccagggtgcagttccagtgaataatgaggaacgcagtgtttgtgatttccatctcaaagcttgttgaaaattattgaggaatttggtaatccttattaacgacctaacatggtcctattagttttgccagaaaacccatttggctggggtttgattgcaaaagatgggtgttgactccagctcactgtaatttgacaaaaggtcccaggtcattctggggctcactcaatacccagggaagagccaccaaaacagataatgcttgttaagaaagagtttccctatccatgctatgacccagccacacgcgaaggtgaccttaaacttttacagctgacggaaaaagcaaaaattaccaaatatgtgactatccttcatctacctaaaaagggggatgatgtgaaaccaggaaccatgtgccaagttgcagggtggggcaggactcaccaatagtgcatcttggtccgatactctgagagaagtcaatatcaccatcatagacagaaaagtctgcaatgatcgaaatcactataattttaaccctgtgattggaatgaatatggtttgtgctggaagcctccgaggtggaagagactcgtgcaatggagattctggaagccctttgttgtgcgagggtgttttccgaggggtcacttcctttggccttgaaaataaatgcggagaccctcgtgggcctggtgtctatattcttctctcaaagaaacacctcaactggataattatgactatcaagggagcagtttaaataaccgtttcctttcatttactgtggcttcttaatcttttcacaaataaaatcaatttgcatgactgtaaaaaaaaaaaaaaaaaatcttccgaccgatcctgagcc

SEQ ID NO: 5824 - DNA, 3425 bp, Homo sapiens
cttcttctcgtgttctgttgtggtgtttgatgtttttctttcttcttttcttgtcttttcgtgtcttcttctctttcttgtttgttgttgttttctcattttttgttgttgtgttagtttgtttgtcttctttggtcttttgtttttttgtctttttttccttttttttcttttttttttttcttttttttttttttttttttttttttttttttttttttttagatttttaaaaactattttaatacaagattaatagcaattttctatccaaatcagaaatgaaaaatcttaacccaaataatattcatttgacagtcacataaaattttagatttgattggtgcacacatttatcctgcatatatattatgtatatgcacagagagacctcactattatgccattgttaggggtctttttttggaagtacctcattacaaggcaatgtcaaaggttccagtaactactcaactttgaatgaagttcaaaatgtccccatgctaagctgagtctgtgccatagcaaaccatgatatagcaagtctccagaatgtgtacaaatcaatactctgtttgtataagttggtctaaaactaaacactggctaatgtctccaacaaggaggaacacattacaaatttataagttatggtttcctttactcttctgttggcaaagctaaattgtgtttttaaataaaaatcaggtctgttcgttagtaagtaaatggaaatgtgtttaaatttctgcaagttttaggtaaaacttgcatttcctaatgcgtctaggtttaatcaaatcatttgataattagctttgcaaaaagaagtaataaaagaatcacatctcaggaatatgttaaggttttttcctccttagggactttagttcgtgttcagtctgtagccgaaacatgtatgtaatggcaaaagaattaaagaaggctaatgtctgcagcagggaatataaattaaaaatcagggttctgcctgtaataatattttcaatgtgtttgctttaaagaatgttacttttataattattactacttatcaatgaataataatgtttttcagtgtagacaaaatagtattttctatcccttacatttaaagcaggtgatacaagttacttgatgctagctaggtaagtcattgtaagggagacagatttctagtgctaatgttctacgatggctataatcaaagtaccaacttggccttcgtgaaaatgacagaaggttgtcatggttgtccttcaatacagaaccataaacagagctcttattggtaaatttgtaattcattcttctctgctaaagactttagcctctgtttagcttttgttgtgacacatacaaagtataatatataccaattacagacgtgtatttctgttagaaaaatacatattataactaaagaacatgtaaatagaggcacttcaataagctaagtgtttgcagttatgagcatcacccaccaatttctagtgtcaggtttcagtgagcccattcctctctattcataacaaaagttatgatatgattacagaatttagggaacatcagagcaaatgaggggcaggtcataaaaaataatgaagcctcattgcatcccgtatcactatgctgaaatgagaaaaaataattggagggttgaattccaaaatgcttcatgaaatacgggtaggtgggtataagtgaaatcctttagggccaaaacatttttcatgtttaattaggtctgaaaatcatatgacatagtagtatgatgataaaaaactaggaagtgcacactttgaatgatattttgaccacatccatgtcagggtgcctaacagctgtgacatcattatctgatatcatttcagctctctgcgtggatcattatgcatctctatatctcatcaatatgaatcatattgataatgaaggtgttgaaacaaatgaagcaggcgtttatatattagctgtgtgtttagtgcgtatagaacatgggttcacattcgttaatattatgtgtattcatacacatgcacaaaaccttttgggggtgaaagcacaggaaaatcaaggcatcctgatctagttcataaaagagaatgcagaaatattttaaaaaggaaagtcgtggagtttaaagccataaaagcaagttattattcaaatagtctggaaaatcaaggttgatttaatttgtattgcaccttaattattggagaaagacaatactgacttctgaacacagaatgaaatgagcaatgtaaatgactggtccttcatagagaagtcttatgtggaatttgtggtaggaagccaaaatgtgggcagtgaaatggatggttttctaggagtatgtaatgatgaactagatggttaatttcataaaggtttaaatgaaagaatgccacaaagtctctcatcatcctacattttatatttcattaggcataaagtagcaatagatgcttgtaaatactttctgtcttgcaaaagtgctcaaatatacttaatactattgtgccacatgtgttctacttaaatgtgatgactaaatcaataactaattttaattttgatgagaacagattgaaaaataccatttacgtgtcaatactgtcgatgagttaattaaaatgtaactggcctactatggtgtcttgaaacattacttttccctactccagatgcatcataaaaactaagaaacatatggatagccaactgtattcataaagcccccagttgggtttattttgcttctctctgtcagggggagcgaaaggcctggctttggcctacttggtgaacaggttaggctgtggctctaaactggcctattgagttaggtaatgtatccaagtgccaggcaggaatcctaggccgaaggtgttttacatgaaagcaatggtttttcatgaataacattctttacacatacagtttccatcaccggtaaagccctgcacaccaatggctcatcccatgagtttggtgtagtctggagcacccaggctgaagcacactcatgcagaagggtgtgccctggcaaatttttaataaatggacagttagatacataaaaagttctctttcttgattcttggtgcctcaccgatcactgaggaatcccttctttgagcagcacaaaacaagaagagctggttgacaaaacattttcttacaaaggtgtgtcaaccctgagcttggaattaagaagttaaaatctgtgatttatatatacatagatataaaaatagatgatcatactaagactaaaaaagttgaagaaatctccatgtcaatactatatatatatatatttttgtcttggactttttttttctgttgtgagttgttttgtaagagaaatgcccttgtgatgcagaaaccaactgacacaaagttaatagttaaaaatg

SEQ ID NO: 5825 - DNA, 2740 bp, Homo sapiens
  misc_feature (12)..(12): n is a, c, g, or t
  misc_feature (57)..(57): n is a, c, g, or t
  misc_feature (62)..(62): n is a, c, g, or t
  misc_feature (90)..(90): n is a, c, g, or t
  misc_feature (104)..(104): n is a, c, g, or t
  misc_feature (1058)..(1058): n is a, c, g, or t
cccgggaacctncaatcctgggtcctgccctttccaatgaaaccttaaaaacttggnaggancccaacctgtcctgtaaaaccccaagtnccctcagcccatanccaaacgggtttaatccctaagagttcaggacccagttgggtgtcgtgaacggagccattagcaaggtctgtaggattcaaggacttgggcacattcacagtccacactattgtcatggtcattgacttactacttgagctcaaagccctgacatttcaaaaggttgtcatgataacagtgaaacctctgaatcccttaaatcagaaggcatggcaacatactttttctactggcaatagctcttacaatgagtgtttcataatgaaatagtctctgctgaagaaaacatgttttccttttgctctctctgctttgttggtttctgtgctgtgtggaattggagaagatatatgctctgaaatattttatacagattactgactactggacagggtttaccactatataacatctcaaagttattcaaggatatttaaagcatatttagtttagttacaccttattttaaaccgcagaaaacaatagctttaaaatttttgccattaaaataattataaatttatacttttactcaaggactagatcacagttttaggacaaaaatctctcctatttaaagttcataccttgtaagtatttagtttgtatattcatgaacaaatctggacatttatactttttttgtttccttatcaactgttcacaattattagttaattggtcttaacagttctacattataattgaaagaaaaattacttgagaaaataattgtttcagaatagtgcctactatatctgtgtcagctaaaaatttgtccagagttttagatataagctagtattttgtggagttttatccaggcgttaatagttcttcctggctgaaatttaatataggtgcagaatcctaaataacactgtgagatgtaatcttaactgccctcaataccttataaaactgctgcatttaactgttttcttcaagaatgngtggctggtcgttgatacactccactttagagtgctgaattgtcgtgttttctccagcccttgtaaaagtgggtttcttgatgaacgcgtgctcccaatgctgaagcaaaagatttgcatttaaggagagaaatacaccctgaaatttgagtttgaaagattagaacatagagggtctctacagtgtttttctgcaacaccaagtagtcaaatctatttatagaaactctgattacaacagaaattttaaaatgaaattttccacatcggtattttgtaggaaagctcttataatcaatgcttaagctgctttttgaggcttttcttgtacagaggttgcagccaattacattttaattggtaggctgctgaataatgtttttgtatgttttaaaataatatttattttaataggttttttaacattatgcaaatcccaataaagaactgacacgttccataggccattgactgggaaattttgtgaaacacagcctaaatacacagtttttacaccaactaatttgtcttgcctttaaaactgattataactcttctttaagtacaacttttataaagaaaaaatacaacactaagactgtatgttctgtaaattatagtgtgatgacccatgcagaaccgctgtctgaagcttactcagcgattcatagccatctccagccatgttttatcaaatcacacactaaaaataaatggaaatgctacagtgaaaaaccaaaagttacagagcaacataagtaaaatgactaggcagtttcttagtaacatgtttgaaatgggaaaggtgactgactgcctttcaccagagtcttagctgtttcacgttcactattttaggttaattttcttgggaaatcaatttgaatattcccccctgtccttttgcattaaaggacgaaaatatatgttgagagtttgacagactttttaaatatgcctctttcccaattttatgtatttttggttctgcgcacacagatttatcaatgaagtacatttgcctctggctttatcacaaggaaaaaggaatcaaacattgaacacaaatgtgttccaaaccagtcttgtccatcttgtcacttttatgtgactgctcctctgaaccagaaggggcacgatagaaggccataggaatgaaagtaaatcattcaggtgaagtgagaaattcttccatatacagagtgaaaatgtgtgatttcattcctgccttcctttaaacgttgtcttgatctctgcctagtagtagttgagccctcagtcgcccaaacatgaggagagacccaactccagcagccagaatttagtatttacatttgccttcccaagttgagaatagaatgtggtgttctgtgctttctgtttttattattccaaaatatttttttaaagaagtgttatttttcaacagattcataaattagttcctgatgtacggtaaattaaaactcccactgtgtcagtcaaactgagatgtgctcatttcataaccactcatttctagtctgtcagagctgcactggtggcttattgctggtttttaaaggtgtttttaacttacatgtaacatgtttaggacatgttttttttttctaatttgtgtgtctttacaactgattaaacagtagtttaaaaataaaaaaaaaaaaaaaaaaaaaaaaaaa

SEQ ID NO: 5826 - DNA, 633 bp, Homo sapiens
gcgtcgacgatgatactggttaaaatgctcaaaaagcctctggatcatccgagacagactcacagttcttggtcctcttcctccaggcctcattgtcttactgcttccatgttaaagcacccagacccttgtccagaacttttatagcaagataaaagatcccttccctgagcaacttcctcctgctttgggacacatcttccctcagggcacaatctgtcagacactcgctcgcctggcctgctgtctcccctcccggcctgatgttggatttcagtaggttgcagctaatgttgaatatatttcagatgctgtaccctctctgtgaactatgaagacatgattagcagatacaattagctactttagcattaaaaaaaaatcaaaagatctagattttagttattgccctgttggttattactacattggcttctgcaatagtttatttctaaagcaggaagagagtggaaaatgggtagacctgagaatacagcatttcttttttcttctgaaggaaagaaacccagcactctttcaaaagctgtgaaagcattctcatgatctggtagatcccatctgtgcgttttcagtgacatacttcaagtacacgagctgccgtcaaaggaccta

SEQ ID NO: 5827 - DNA, 4920 bp, Homo sapiens
aactgggctggccatagggggaagcggcgcgttaaatccgccccctctccataccctactttcaaggggtgggcggtagaggggaggttggggttggagcagcggcgagggggcccctcccttgcacctccccccaccggacttggtcgcgcccgaagtgtaacactttctctttgtcggagccgctcctctgtttcctgtgcagtagctcccgttgcggcggcacccgtggcagccctggcggacgcaggagcgatggcagcgaccgatatagctcgccaggtgggtgaaggttgccgaactgtccccctggctggacatgtggggtttgacagcttgcctgaccagctggtgaataagtccgtcagccagggcttctgcttcaacatcctgtgcgtgggagagacaggtttgggcaagtccaccctcatggacaccctgttcaacaccaaattcgaaggggagccagccacccacacacagccgggtgtccagctccagtctaatacctatgacctccaagagagcaacgtgaggctaaagctcacgatcgttagcacagttggctttggggaccagatcaacaaagaggacagctacaagcctatcgtgaattcatcgatgcaacaattcgaggcctacctgcaggaagagctaaagatccgaagagtgctacacacctaccatgactcccgaatccatgtctgcttgtatttcattgcccccacgggtcattccctgaagtctctggacctagtgactatgaagaagctggacagtaaggtgaacatcatccccatcattgccaaagcagatgccatttcgaagagtgagctaacaaagttcaaaatcaaaatcaccagcgagcttgtcagcaacggagtccagatctatcagtttcctacagatgatgagtcggtggcagagatcaatggaaccatgaacgcccacctgccgtttgctgtcattggcagcacagaagaactgaagataggcaacaagatgatgagggcgcggcagtatccttggggcactgtgcaggttgaaaacgaggcccactgcgactttgtgaagctgcgggagatgctgattcgggtcaacatggaggatctgcgggagcagacccacacccggcactatgagctgtatcgccgctgtaagctggaggagatgggcttcaaggacaccgaccctgacagcaaacccttcagtttacaggagacatatgaggccaaaaggaacgagttcctaggggaactccagaaaaaagaagaggagatgagacagatgttcgtccagcgagtcaaagagaaagaagcggagctcaaagaggcagagaaagagctgcacgagaagtttgaccgctgaagaaactgcaccaggcaggaccgagaagaagaaactggaggataagaagaaatccctggatgatgaagtgaatgctttcaagcaaagaaagacggcggctgagctgctccagtcccagggctcccaggctggaggctcacagactctgaagagagacaaagagaagaaaaattaaactctgctgtttgctgcatgcttgcatgagacccagggtcctgtttgggcttcctgtagacacccttttcctgcggcaacagagctgggcctccctttctctaatttcccccttaacatgcctggggggcatacaatccaacccgcgccctctcctctcttcctgccggggtttatagaaacctgagaatctgagggtgatgtctggccgctggtcaagaagccaacagtcatgtggctcgcagatgcatcctgcatcccagtccccctcccagcacccccagccatcccccctgtcttcccccacatctttgccagaggtgtgacatggtcagggggcccatctgctactctttcccaccagctcccctgttccagttctggttgctgttagtttccctgaggtatttgcaaccaccatggctgggtaaccaccgatcagcacagctgtccccttggtctcctgtatcccagtcactagtcctccctggtccaccccaccctcatcctcaggagccacagccatttcttagagggtttcaaaaggacagcctttggcgccttttccttctaacctttgagtccagccctttccagttttcattcactcgaagtaactgcactcaagctgtgctcaaaatcggcaacgcatttatttacaccaagcccttcccataaaacacaactgctgaagaaaatagcagacgtttcccctctctctaactctgggtatcccacagatgcaaaagggagaataaacctgaatattattaccagccaagagtcttgaatgatagccttaccgaattcttcttgtgaggtatttcagcatctcggggggtaatttccggaagggctccatactgtcccaataaggtgaggccagtagcaggaataataaatcccactttgtaggctggaaaactgagctgtcaaaagaatcaagtgtttgggggtttgctctgatgagtcttctagttcatttggtgaatgtcatgatgatttttaacatgcattttgcatgcatcccccaataagaagagatgagactcggccggagagaagaaaaggcccttaactttctttccaatttaaggagttgagagtttaaaaatattccagccctaagtttttatcatgggtcccatctgatagtggctttgggaacctctgtgaagtagagagccctcccttgtcagggttatgaggcacagtggcctttggtgtttggccagtgacagtgtgagagatggagttgacctggcaatgatctgtggctaacatgccgtctctctgcccttcctttgcagtaatccatggctgtgtactgaatagtattccccgctacagctggactggactccatttagccttttaagccgaggttcctattttaactgacagctttcctttggggtgccaggcagcgaggccccccacccctatcctgccatgtacttcaagctcacttcttctttttgagttccgcaacttgctcctgcctcccagccccactggcactgaccatgaccacctacttctattttttttttagagtttctttttttgatcacttactttcaaagcacacagtcaaacaaggttatgccaaatttccaggcctttttgaagtattgagaaggggaaggggatttctcacttcaattatagatcataataggaagcaaaaagacaaaaatgaaaagcaaacatatgcacgcacttttcttgttgacaaagcaagaatataggtttgctgtgtaggtttggtgctctattgattggtgagtgaccagagcaagtatgaaggtgatgctgccaaagcacaagcctttttgaagtattgagaaggggaaggggatttctcacttcaattatagatcataataggaagcaaaaagaaaaaaatgaaaagcaaacatatgcacgcacttttcttgttgacaaagcaagaatataggtttgctgtgtaggtttggtgctctattgattggtgagtgaccagagcaagtatgaaggtgatgctgccaaagcacaagccagtttcttgggaaaattcaagttacagtggagtatttttttgaagaccatatgcttggaggtagaaacaaaccaacgaccaaaaaaaaaaaaaaaaaataaatctgctcagatactcagccagtagctcagagagatgctgagttaggcctgtcaggtctccttgggaaaggcttcatatttgcaactttgatgattctatgtccagcttcagagctgctttcccagaaattcacgcttaaacaaccaaccggtaaccaccacttccccacaccgccgcccggtaattatttgcattacaaaccggaggcgccctcatttgcatttgtgtacagattaactagttaaggcttgagaagctctgaataattcaaaagtattagacccacacagccttggagagaccttcagaaactaaggaggagttttatattaagggagacattttagtcagtaagacgatataacctacttactccgtaaggggaaatgaaggcccggagaagggaagggacttgaccgaggtcccacttctgtttcgaggcagaagccagactaattttcatgcctcctgactcccaatcagtttcacaaagggattcaatctgtttatatacgttacattcctggatacgaggtcttttgatgttcagagtaactgactagttagtattagaagaccctcgaggtttttttccacagaaaaacatctgaagatggattgggtgagggctggcaaaacgaaggcatgccgggccagctccttaacccaatgacccagtgatgctgcaaggctggaacggggtccaggagactgtgtgtaacaggtgccctaggtgacccttataatcagggaagtttggtgaacaaaaatcgaacccatgagtgaacataaattaaaaagttgatcaacctattaaaatgtgtatttcattgggtagcttttctcactgtagacagattttttccttcttcaatgaaaaggcttttaaattagtacaactgttactatttaaaaaaaaaataccctaagtactctgtttacttctggtgaaacaaaaccagtcattagaaatggtctgtgcttttattttcccagactggagtggcttttctgaaacacacacacacacacacacacacacacacacacacacacacgtacacacatccctcacttctcttaagccaagaagtttgctttccctagctgcagtgtagatggctcttgtttttgtttttttgttttaatcatttggcattcacatgtggctgttaatatgtgcttgtttttaattaaaacaagaagctttaaaaaaaaaaaaaaaaaaaaaaaaa

SEQ ID NO: 5828 - DNA, 7161 bp, Homo sapiens
  misc_feature (1388)..(1406): n is a, c, g, or t
  misc_feature (1566)..(1587): n is a, c, g, or t
  misc_feature (6029)..(6060): n is a, c, g, or t
  misc_feature (6257)..(6275): n is a, c, g, or t
gagtcggagggagaacaccaggcgcggcgcgggcggctccggctccggccccggcccaggcccgggagaggcgatggcgagccgcgatagcaaccacgctggcgagagctttctcggctccgacggggacgaggaggcgacccgggagctggagaccgaggaggagtcggagggcgaggaggacgagacggcggcggagtcggaggaggagccggactccaggttatcagaccaggatgaagagggaaagatcaagcaggagtatatcatatctgacccctccttttccatggtgacagtccaaagggaagatagtgggataacctgggaaaccaattcaagtagatcttctactccttgggcttcagaagaaagtcagacttctggtgtgtgtagtcgggaagggtcaactgtgaattctcctcctggaaatgtttcctttattgtggatgaagtgaaaaaggttcggaaaaggactcataagtcaaagcatggttcaccatcattacgccggaaaggcaacagaaaaagaaattcttttgaatcccaagatgttccaacaaacaaaaaaggcagtcctttaacttcagcaagccaggtactaaccacggagaaagagaagtcatatactggcatttatgataaagcaagaaaaaagaagaccacttcaaatacacctccgattactggggcaatatacaaagaacacaagccattagtgttaagaccagtctacataggaacagtacaatataaaattaagatgtttaattcggttaaagaagaattaattcctctacaattttatggaacattgccaaagggttatgtaattaaagaaatacattataggaaagggaaagatgcatccattagtctagagccagatttggacaatagtggttctaatacagtgtccaaaacacgcaaattagtagcccaaagcatagaggataaagtaaaagaggtttttccaccctggagaggcgcactctccaaaggatcagagtccctaaccttaatgttcagtcatgaagatcaaaagaaaatttatgctgattctcccctaaatgccacatctgcattggagcacacagttccctcttattcaagtagtggcagagcagaacaaggaatacagctcaggcattcacagtcagtgccacaacagccagaagatgaagcaaaaccacatgaagtggaacctccatctgtgacacccgacacacctgcaactatgttcctgagaacaacaaaggaagaatgtgagcttgcttcaccaggaactgcagcttcagagaatgactcttcagtctcaccatcatttgctaatgaggtaaagaaggaagatgtgtattctgctcaccattccatttctctggaggcannnnnnnnnnnnnnnnnnncatctacccaggatggtttggacccagaccaagaacagccggacctgacttcaatagaaagggcagaaccagtctccgcaaaactgacccctacccatcccagtgtcaaaggagagaaggaggaaaacatgcttgagccatccatttctctttctgaacnnnnnnnnnnnnnnnnnnnnnngaaagaagaaatagaaacttccctacccatagctattacccctgaacctgaagattctaatttagtagaagaagagatcgtagaacttgattacccagaaagcccattggtttccgagaagcccttcccaccacatatgtcccctgaagtggagcacaaagaagaagagcttattctaccattattggcagcatcatctcctgaacatgttgctttgtctgaggaagaaagagaggaaattgcatctgtttctactggttctgcttttgtatcagagtattcagtaccacaggatttgaaccatgaattacaggagcaagaaggtgagccagttcccccatccaatgtagaagctatagctgaacatgcagttttgtcagaagaagagaatgaggaatttgaggcttattccccagctgcagcccctacatctgagagctctctctcaccatccacaactgagaagacttcagagaaccagtctccactgttttcaacagttacaccagaatacatggtcctatcaggagacgaggcctcagaaagtgggtgttacacaccagactccacatctgcttctgaatattcagttccatcactggcaacaaaagagtcactgaagaaaacaattgaccgtaagtccccgttaatattgaaaggtgtttctgagtacatgattccatcagaagagaaggaagacactggatcgtttactccagctgtggcccctgcttctgagccctctctctcaccatccacaaccgaaaagacttctgaatgccagtcaccactgccttctactgccacatcagaacacgtggtcccatcagaaggagaggacctaggaagtgaacgtttcacaccggattcaaagttgatctccaaatatgcagccccactcaatgcaacacaggaatctcaaaagaaaataatcaatgaggcatcccaattcaaaccaaaaggtatttctgagcacacagttctgtcagtagacggcaaggaggtcattggaccatcttccccagatttggttgttgcatctgaacactctttcccaccacacacaaccgagatgacttctgaatgccaggccccaccactttcagccaccccatctgaatatgttgttctatcagacgaagaggcagtcgagttggaacgatacacaccctcttctacatctgcttctgaattttcagtaccaccatatgcaacaccggaggcacaggaggaagaaattgtccatagatctctaaatctaaaaggtgcatcctcacccatgaatttatcagaagaagatcaagaagacattggacctttttctccagattctgcatttgtgtcagaattctcatttccaccgtatgcaacccaggaagcagagaaaagagaatttgagtgcgattctccaatatgtttaacatcaccatctgagcacactattttgtcagatgaagacactgaagaagcggaactgttctctccagactcagcatcacaagtttcaatccctccctttagaatctcagaaacagagaaaaatgaacttgagcctgattcactattaactgcagtgtctgcttcaggttattcctgcttttcagaagcagatgaggaagacattggatccacagctgctacacctgtatctgagcagttcagttcatcacagaagcaaaaagctgaaactttccctttgatgtctccgcttgaagacttaagtctgccgccttcaacagataaatcagagaaagcagaaattaagccagagattccaacaacctcaacatctgtatctgaatatctcattttggcacagaagcagaaaactcaagcatatttagagcctgagtctgaagacttgattccttcacatttaaccagtgaagtggagaagggagaaagggaggcaagttcatcagtagctgcaatacctgctgctttacctgcacaatcatctatagtaaaggaagaaaccaaacctgcatctccacattcagttttacctgattcagtccctgcaatcaagaaagaacaggaacccacagcagcactcactctaaaagctgcagatgaacagatggctttgtcaaaagtcagaaaggaagaaattgtgcctgattctcaagaagctacagcacatgtatcacaggatcaaaaaatggagcctcagcctccaaatgttccagagtctgagatgaaatattcagttttgcctgacatggtagatgagccaaagaagggtgtcaagcccaaattagttctaaatgtgacttctgaactagaacagagaaagttgtccaagaatgagcctgaagtaataaaaccatattcacctctaaaggaaacatctttatctggacctgaggctttatcagcagtgaaaatggagatgaaacatgattccaaaataacaactacacctatagtgcttcattcagcttcctcaggagtggaaaagcaagttgaacatggtccacctgcactagcattttcagctttgtcagaagaaattaaaaaagaaattgaacccagttcctcaacaactacagcatctgtaactaagcttgattcaaacttaaccagagcagtaaaagaagaaatcccaacagattcatctcttatcactcctgtagatcgtccagtcttaacaaaagtaggaaagggtgaattaggaagtggtttgccaccactggtaacatctgcagatgaacattcagttcttgcagaagaagacaaggtggcaattaaaggtgcttctcccattgaaacttcatccaaacatttagcttggtcagaagcagagaaggaaattaaatttgattcacttccaagtgtctcctctatagcagagcattctgttttgtcagaagtagaagccaaagaagttaaagctgggttgccagtaatcaaaacatcatcttctcagcattcagataaatctgaggaagcaagggtagaagacaaacaagatcttttattttctacagtctgtgactctgaacgtttggtttcatcacagaagaagagcttgatgtctacctcagaggtgttagagcctgaacatgagcttccactcagcctatggggtgagataaagaagaaagaaactgaacttccttcatcacaaaatgtgtcacctgcatccaaacatataatcccaaaaggcaaagatgaggaaacagcaagttcatctcctgagttggaaaatttagcatcaggtttagccccaacattactgctcctcagtgatgataagaacaaaccggcagtggaggtatcttctacagctcagggagacttcccatcagaaaaacaagatgttgctttggcagagctgtctttggaacctgagaagaaagacaagccacaccaaccgttggaattaccaaatgctgggtcagaattttctagtgatttaggtagacaaagtggatccataggtacaaaacaagcaaagtctcccataactgaaacagaggattctgttttagaaaaaggcccagctgagcttaggagcagagaaggaaaagaagaaaatagagagctttgtgcatcttctacgatgcctgcaatttcagagctttcatcattgcttagggaggaatctcagaatgaagaaattaaacctttctctcccaagatcgtcagcctagagtcgaaagaaccacctgcctctgtagctgaaggaggcaacccagaagaatttcagccatttactttttctttaaaaggattatcagaggaggttagccatccagccgactttaaaaagggaggaaatcaagaaataggcccattaccaccaactggaaatttgaaggcacaagtcatgggagatattttagataagctaagtgaagaaacaggccacccaaattcatcccaggtactccagagtataacagaaccatcaaagattgctccttctgacctccttgtggaacaaaaaaagacagaaaaagcacttcattcagatcaaactgttaaattacctgatgtaagcacctcttctgaagataaacaagatctgggtattaagcagttttcacttatgagagagaatttgcctttggaacaatcaaaatcatttatgacaaccaagcctgtggatgtcaaagaaacaaaaatggaagaattctttatttctccaaaggatgaaaactggatgttgggaaagccagaaaatgtggctagtcaacacgaacagagaatagcaggatctgtgcagctgggttcctctggcagcaatgagctgaggccagggcagctcaaggctgctgtgtccagtaaggaccatacatgtgaagtgagaaagcaggtcctgccgcattctgctgaagaatctcatttgtcatcacaagaagcagtatctgctcttgatacttccagtggtaatacagagaccttatcaagtaaaagttactcttctgaagaagtannnnnnnnnnnnnnnnnnnnnnnnnnnnnnnnagctggaaatgtagagagaaacatagcagaggggaaggagattcattctttgatggagagtgaaagtttgctattggagaaagcaaacacagagctttcctggccttccaaagaagatagccaggaaaaaattaaactacctcctgaaagattcttccagaaaccagtgtctggcctatcagtggaacaggtgaagnnnnnnnnnnnnnnnnnnnctgtcaaaacagcccatttcccggcagaaggtgtggaacctgcattgggcaatgaaaaagaagcacacaggagcacacctccttttcctgaagagaagccattggaagaatcaaaaatggttcagtcaaaggttattgatgatgctgatgagggaaagaaaccatcacctgaagtaaaaaaaaaaaaaaaaaaaaaaaaaaaaaactcaatccatgcaagagagcctcaatccccagagtcacctgaggtgacacaaaatccacctacacaaccaaaggtggctaagccggaccttcctgaggaaaagggaaagaaaggaatttcatctttcaaatcgtggatgtccagcttgtttttggatcgagcactccagataacaaagttgctgaacaagaagacttagaaacacagccaagtccatccgtagaaaaagcagtgactgtgatagatcctgaaggtacaattcccaccaattttaatatagctgagaaaccagctgatcattcattatcagaggtaaaacttaaaactgtgatgaacccagaggtactttagtaaaatctggtgacggtcaaaacgttaaagaaaaatccatgattttatccaatgtagaagatttacaaacagccaaaattcattctgaggtgtctaggaagattatggaaaaagaatctcagggaatcagaggaaatgacataatcagagtactttgtgatggtgagaacttgaaatcatttttcactaatcggagaatggtttgagagccaaatatgtccctcagtaggtggtaaaagtcgagaggatggctcataaggtttcattagggaagagaggtaaaaaactaagagggaaaaggaaaggaaagtatggaaaagggaaaagatg

SEQ ID NO: 5829 - DNA, 1689 bp, Homo sapiens
ctgagctgcatcatggtgcggtctgtggcctgggcaggtttcatggtcctgctgatgatcccatggggctctgctgcaaaactggtctgctacttcaccaactgggcccagtacagacagggggaggctcgcttcctgcccaaggacttggaccccagcctttgcacccacctcatctacgccttcgctggcatgaccaaccaccagctgagcaccactgagtggaatgacgagactctctaccaggagttcaatggcctgaagaagatgaatcccaagctgaagaccctgttagccatcggaggctggaatttcggcactcagaagttcacagatatggtagccacggccaacaaccgtcagacctttgtcaactcggccatcaggtttctgcgcaaatacagctttgacggccttgaccttgactgggagtacccaggaagccaggggagccctgccgtagacaaggagcgcttcacaaccctggtacaggacttggccaatgccttccagcaggaagcccagacctcagggaaggaacgccttcttctgagtgcagcggttccagctgggcagacctatgtggatgctggatacgaggtggacaaaatcgcccagaacctggattttgtcaaccttatggcctacgacttccatggctcttgggagaaggtcacgggacataacagccccctctacaagaggcaagaagagagtggtgcagcagccagcctcaacgtggatgctgctgtgcaacagtggctgcagaaggggacccctgccagcaagctgatccttggcatgcctacctacggacgctccttcacactggcctcctcatcagacaccagagtgggggccccagccacagggtctggcactccaggccccttcaccaaggaaggagggatgctggcctactatgaagtctgctcctggaagggggccaccaaacagagaatccaggatcagaaggtgccctacatcttccgggacaaccagtgggtgggctttgatgatgtggagagcttcaaaaccaaggtcagctatctgaagcagaagggactgggcggggccatggtctgggcactggacttagatgactttgccggcttctcctgcaaccagggccgataccccctcatccagacgctacggcaggaactgagtcttccatacttgccttcaggcaccccagagcttgaagttccaaaaccaggtcagccctctgaacctgagcatggccccagccctggacaagacacgttctgccagggcaaagctgatgggctctatcccaatcctcgggaacggtccagcttctacagctgtgcagcggggcggctgttccagcaaagctgcccgacaggcctggtgttcagcaactcctgcaaatgctgcacctggaattgagtcgtaaagcccctccagtccagctttgaggctgggcccaggatcactctacagcctgcctcctgggttttcctgggggccgcaatctggctcctgcaggcctttctgtggtcttcctttatccaggctttctgctctcagccttgccttccttttttctgggtctcctgggctgcccctttcacttgcaaaataaatctttggtttgtgcccctcttcaaaaaaaaaaaaaaaaaaaaaaaaaaaaaaaaaaaaaaaaaaaaaaaaaaaaaaaaa

SEQ ID NO: 5830 - DNA, 1836 bp, Homo sapiens
  misc_feature (1648)..(1649): n is a, c, g, or t
  misc_feature (1651)..(1664): n is a, c, g, or t
ggaggttgatttactcagttattgtgcaagagaatggaaaggagagacaccccgtaacaagctgatgaggaaggcttatgaggagctattttggcggcatcacattaaatgtgttcgacaagtaaggagagataactatgatgctctcagatcagtgttatttcagatattcagccaggcatctcttttccatccatggatgaacagaacaggacattgttaagcttcctgaacaaactgctgttttcacaaggttgtaattggattcagcagtacagttttggtcctgagaagtatacaggctcgaatgtgttctggaaaactacggaaatatgtggaattattgaacaacacagtggactgaatttaactggcatctagaggattatcacaaagagaggacagtatgtgcaagcagcacttttttgcaggatgccatttctggaaatataagacctttactgacacgctttcaaagttcatcactgctgctatcaaggtcactgaaagtttgatgacaccagaatgaagcacctaaaaacaggttcatatcccaggtctatttttaagactacctgattgttacaagggagacatcctctgatcctttgagcttcatgatgaatcacctgaattctgtaggcgacacatgtggactagagcagattgatatgtttatacttggatactcccttgaagtaaagataaaagtgttcagactgttcaagtttaactccagagactttgaagtctgctacccagaggagcctctcagggactggccggagatctccctgctgaccgagaacgaccgccactaccacattccagtcttttaagtccgctgggggccgaacagcagtgctcaccagtgacggtggtcacagttgcaataaagtctctctctgaaaccaaagctagcatttcagcatggaaggaattaggaccttttcttcaggattacaggtacactggatgcagccatgcatggatggtttttctttatttttcagtgatttcctctgaagcagctgcactgatacatttgggagttggtggcttgactttgtccataaggggcgtggccacttcacatgatggcgggcctttaagagcacaaagaagtttaatatggacaacaacaggaaaaagcaagaagaaaacaagtagggaaaaacagctaacctggagagaaagaatttctttaacctttatgttcttcattaaaaatcttatcttggactgatttgagggatttttagaaacatggccttattttatataagcattaccttcccaggaatctttgttgtatattaatttttgataaccatttgattaactttaaaattaagtatatgtgtgtatatatacatatgtatgtttatatacacacatgtatctgtatagttttatatatacatatatacacatagacatacagagaaccactactttgtaatagtgtacagtttgttttatatctctttactttttttgttactattttatctggccagcgtaatagttttatttagattttttaaaattctgtagattaaagcaaatgacagttattgaactatcacaaaactattaaactgtggtacatttaatgtgtaaaaaaaaaaaaaaagggcggccgctnncnnnnnnnnnnnnnnaaaaagggcggccgcctctaaagtaaccctcgagggggcccagcttacccggacccagcttttcttggacaaagggggccccaatagggaggcggattataacctaggcacctggccgtccttttacaaccccgggactgggaaaaccgctaacttggggaacctttgggaa

SEQ ID NO: 5831 - DNA, 2145 bp, Homo sapiens
atcacttactgtgttgctttcatccctcctggagaatagaagtttcctactcccatgtacctgatggctgacaagatcctctcaccagttcatgggagctaccctgattggaactctttcagcagcagccatggcacaccctcataactctcccacagtacccttagaatactgcaacgcgttgattaggctgtctccgagcgcattggccggtactacaccgcctgcgcgagggtccctccgcccgacagcaatccatggagcgggtgtggctcactgcaggcactgtcaaggcaacccagaatgtgagcagagcctccaccttaaccaattcaacccacccaattaccaccaaactaaattcatcgggacagtatgcatgagtgcactgtaagagtttatgttcgccatttcctggcttgctgctcccaggatgctcaggggcaggagaacacaggtggagatcgacatcgctcaggaacgcttgtggcccatggcctcatgattctggcccgaaactatctggatgtgtatccatatgatcactggagtgacaagatcctccctgtctatgagcaaggatcccactttcagcccagcaccgtggagatggtggatggggagaccagcccacccaagctgctcaccgaggccgacctcattgccctcatggagaagcatggcattggtacggatgccactcatgcggagcaacttcgagaccatcaaagcccggatgttacgtgggcctcaccccagacaagcggttcctccctgggcacctgggcatgggacttgtggaaggttatgattccatgggctatgaaatgtctaagcctgacctccgggctgaactggaagctgatctgaagctgatctgtgatggcaaaaaggacaaatttgtggttctaaggcagcaagtgcagaaatacaagcaggttttcattgaagcggtggctaaagcaaagaaattggacgaggccttggcccagtactttgggaatgggacagagttggcccagcaagaagatatctacccagccatgccagagcccatcaggaagtgcccacagtgcaacaaggacatggtccttaagaccaagaagaatggcgggttctacctcagctgcatgggtttcccagagtgtcgctcagctgtgtggcttcctgactcatgtgctgtaggccagcggggacagcagtgtgtgtccagtttgtcagccacaccctgtgtacaggttaaagttaaagtttaagcgcggtagccttcccccgaccatgcctctggagtttgtttgctgcatcggcggatgcgacgacaccctgagggagatcctggacctgagattttcagggggcccccccagggctagccagccctctggccgcctgcaggctaaccagtccctgaacaggatggacaacagccagcacccccagcctgctgacagcagacagactgggtcctcaaaggcgctggctacagaccctcccaccacccacggcttgctggtgaaagcaattctgtgacctgcaactgtggccaggaggctgtgctgctcacttgtccgtaaggagggcccccaaccggggccgggcagtatctttaagtgggcaacggaagtagcttgtcaaatttcttccttgggggcagaactgcccacctattccaggaaacagcgagggccctacctggcctttgggcatttctcaaccccctggggcgcccttccccctgagcatttttccccctaggttcctcaggagattctcccccatacttcgggcttttcttcaaaacctcccggtctgattggcgcaatgtcatttgaatgagaaaaattctttggcacttttcactccccacacaactcactcattacaccacctgtaatcctggttcctccccactatgatagcggccccacccatgcaaggggcgacttcaccaagacgtgcaggtggtcctttacaccgcctaccaccccgttgacaccccaacccattctccaagaggattgcattttttgttcccccagtcccatctgtaatttcagctccgctaaacagcaccgcggttataccatgcagttgtatttatttatagtacgtttctcccacctctgtatcttcacccttattaca

SEQ ID NO: 5832 - DNA, 2297 bp, Homo sapiens
  misc_feature (701)..(715): n is a, c, g, or t
  misc_feature (1393)..(1429): n is a, c, g, or t
cttttttttttttttttttttttttttttttttttttttcgctgcagccttttattctatccatcaaatctcttgtccatgatagtcaggttgggggcccctcctgggcagccccctgaacattcttaccctggttagccgtccccaccccctagcaaccccttcccacacgcatgtgcacaatggtcattgctccttagtccctggcctggggccggactccctcctccagggactaggctagcatgagggggattaggtctcaggggctgggggccctacaccacccccgcctccttcagccctctgcagcatgtccagggcctcccagaagaagtccttctgtgcggccatcaggggcatccaccctacgatctccttcatcttctccgtgcggtcctgcaacgtttggcaactgtggatctggctgaggtactcctcgcaggcctgggccatccccccggggtcctggggtgctctggcccccaggctgggctcaggagtccccaccaccctgctggctggcaggtggcgatagggggcgtgctgctcaatgtcgtggctggacaggatgtataggcactccctggtggcacagagggcacaggcacacagagggaccttgacttggagcttgacgaaggaggcactccccttgggccagcctgggaggcggcccccagccccacagccgcagcccnnnnnnnnnnnnnnnaactctgagctctggctcagcaccagggagtggttgaggccgcaccacagggtgatgggccgctgcaggtaacaaacctgtgtgggttcccctcggtccattttgtcccctgttcctagctgcccgtatctgttatttccttgcatgaagattcggccaaattcatccaccaggccaaggtggttgtagccaagagcacagaataggatcttggcaggcagtgagagagcaagcggcatctgctggtccagggggtcaaaggcttgaagggtcccaaagagatcgcgatacacccctggggtatgcacctcaaaatacactcccccctggtctgtgacgtagagggtgctgctctggttggaagtcatgcaggccacgcgcaggtgaggcaggtagtgggacaccttcctcagggccagctgaaccgtgtaggagcgtggctggtcaagctgggtctcattcactaccaaagagtagatctttccttcctctgtgaggagcagtagagcccgctgggtctcctgaccaaccagcacgatctgcttgaaggtcattgagtggtggaatgtcatcttgaagacccgctgcccactagactgcagatagacctcaacacagtcacaggcccggctgctggtggtacccaccacttcctgcggctcccgagtggccaagacnnnnnnnnnnnnnnnnnnnnnnnnnnnnnnnnnnnnngtccgaggcaaaatccttggctccacgacacaacacaacatagcgacaggcccgcttccactgcatctggccgagggtggagaccagggcatttttgaggaagaagagggtccccacgtagtcaagaatgaagacgtgatccttggtgggcaagaagcggcggtagccgtgggctagcaagggggccacgctcttgctgagacatcggcggcggcctccaaatgcctggaaatacaggcccttcgtgtagttcagaatggcagctctcttccagggccggactccagaaccctgatcttggaggcgcggactgagtctgcgacagatgcgtctccacacgccttccccatcgcacacttcgtggaagtagcggcaggtctggccgagggcaacaaggtctctgactgggaggaatgagatgatatgctccaccagctctggggggaacaactggatggaaatcggatttcctttccccctcttctcttcaaccccaagctccgagccacaagaagggcagcttctcttcacccgcctcctccttagcaaagggaccgccttctcgcccatgctattggtaggtagagccgtccctcagagaagaggcaggtccagatatccttcggaggctctaattggccttcttgacagtcactcgcctgtatctggcttacgattggtctttgggggacgaggactaggcaccccctgcttgcggtccctcggcccgttttcctgctagtggagtgccggtgtcccctcctcttggttggacctgattggctccacctcccgatctgagcattgtgattgggtgcagctgcgctgggcgggacggcctggagcgtcggccgttggcgagcgctcc

SEQ ID NO: 5833 - DNA, 1563 bp, Homo sapiens
gagtcccgccccgccagggatcccgggagctgtccggccgcctcggtgctgatcccgccaccgcccacgggccgctagcagcgcagcgggcactatgagcgggggcgtctacggcggagatgaggtgggggcgctggtctttgacattggctccttctcagtccgcgctgggtacgctggggaggactgtcccaaggctgacttccccaccacagtggggctgctggccgcggaggaggggggcgggctggagctggagggggacaaagagaagaaagggaagatcttccacatcgacaccaatgccctgcacgtgcctcgggatggagcggaggtcatgtcgcccctcaagaatggcatgatcgaggactgggagtgcttccgagccatcctggatcacacctacagcaaacacgtcaagtctgagccaaacctgcacccagtgctcatgtccgaggctccgtggaacacacgggccaagcgggagaagctgacagagctgatgttcgagcagtacaacattcctgccttcttcttatgcaagacggctgtgctcaccgcctttgcaaacgggcggtccactggcctcgtgctggacagtggagccacccacaccacggccattccagtacatgacggctacgttctgcagcaaggcatcgtcaagtcccctctggcaggggactccatctccatgcagtgccgggagctgttccaggagatggccattgacatcatcccaccttacatgatcgcagccaaggagcctgtccgggagggtgcccccccaaactggaagaagaaggagaagctaccccaggtctccaagtcctggcataactacatgtgtaatgaggtgatccaggacttccaggcctccgtgctgcaggtctcagactccccctacgatgaacaggtggctgcacaaatgcccacagtgcactacgagatgcccaatggctacaatacagactacggcgccgagcgactccgcatccctgagggcctgtttgatccctcgaacgtcaagggcctgtcggggaacaccatgttgggtgtgggccacgtggtgaccaccagcattcggcatgtgtgacattgatattcgcccgggcctgtacgggagtgtcattgtcaccggcgggaacacactgctgcagggcttcactgacaggctcaatcgagagctttcccagaagaccccaccgagcatgcgactgaaactcattgccagcaacagcaccatggagcgcaagttcagcccctggatcgggggttccatcctggcctcactgggcactttccagcagatgtggatctccaagcaggaatatgaggagggcgggaagcagtgcgtggagcgaaagtgcccctgatggcactcctccccacacacctgctcccaagctcagatggaagtcccttaacccccatgccacattgcccccctcctcctttccctcttgtcctcataaatggtgatgtttctgggttgaaagaagtaaaaatgttttaagaaaaaaaaaaaaaaaaaaaaaagagggaaaaaaaaaaggggggggg

SEQ ID NO: 5834 - DNA, 3172 bp, Homo sapiens
  misc_feature (1902)..(1918): n is a, c, g, or t
gcatataaaggtgagccacaacttttatggtctaacttatggatttaatgagtttggatttgttattgctgtttatttaaactgtcacttctattccttaggcagtctcgtcagacagtacctgatgtcaacacagagccttcccaaaatgaacagatcatttgggatgaccctacagcaagggaggagagagcaaggcttgccagcaatttgcagtggcctagttgtccgacacaatactctgagcttcaggttgacattcaaaacttggaggattctccttttcaaaagcctttacatgattcagaaattgctaaacagggtaacaagaaagaaatctttgcatttgtttgtattaagtacatgttgacctcttaaaaataaacagatgagcatgttgtagttctctgatctgaatgtgcaaacaaaaaaaacttcgtagatatttctggttttggtttaaacttgagccagaaaaataatttgtaaattgaggtacttcatcagtaaattgaaaaacattttcataaatttggaaatttagaattgggcgtttttttctagacatggtgtctaccattgttcttttattctagctaaccctttttgtgtttgtggagttaatgcttggtttttcttcctatcatcttattttcatttaagtcttttgaattctgcctagcacatacctacatttgttctttggattgtatgagtttctttctgaattctcctattttttttcttccttgagctttaccttaaaaacaaaattttcctatctctcatcttttttcttccttttcttctttttcacattgcatgatgacctcccattagatatatagatttatctctgcttctgcttttctccaagtgtagaattgctctcatgttacaaatttgggttacacttaacaatgaaaacttggtatttaaggaaaatgttgggagaagcccacagataacacacttgctctgtttaatgctaataaattgcattttttctttattgttattattgtcacatgcagatgggatgcatttatttataagttctggggataggatacttttttgcctgtactttttacattccagagtttgtgcttgacttcatcttgactaagacagatgagaatatttcctagaatttgtttttagtcttatttggatcctgtcacactgcagcattttattgtcctcagctgtctgtgatcctggaaacatacgtgtgactgaagctcccaaacacccaatctctgaagaactggaaactcccataaaagacagccacctgatccctacgcctcaagcccccagtattgcctttccactcgccaacccccctgtggctccgcaccctagagaaaagattataacgatagaggagactcatgaagaattaaaaaaacagtacatatttcagttatcatctctgaatcctcaagaacgtattgactattgtcatctgattgagaaactaggtggattggtgatagaaaagcagtgctttgatcccacctgtacacacattgttgtgggacatccacttcgaaacgagaagtatttagcctcagtggcagctgggaagtgggtgcttcatcgctcctaccttgaagcctgcaggactgctggacacttcgtgcaggaagaagactatgaatggggaagtagttccatacttgatgttctgactggaatcaatgtacagcaacgaagactagcacttgcagcaatgagatggagaaaaaaaatccagcaaagacaagaatctggcattgttgagggagcatttagtgggtggaaggttattttacatgtggatcagtctcgagaagcaggcttcaaacgccttcttcagtcaggaggagcaaaggtgctacctggtcattctgtacnnnnnnnnnnnnnnnnnccacatcttttttctgacttgaataaactgaaaccagatgactcaggagttaatatagcagaagctgctgcccagaacgtgtactgcttgagaacagaatacattgctgattatctcatgcaggaatcacctcctcatgtagaaaattactgtctaccagaagctatttcatttattcagaataataaggaacttgggactggattatcacaaaagaggaaagctcctacagaaaaaaataaaatcaaacgacctagagtacactaatcgcatctaccctttagttaccaaacattaaatgtttttaaaaattgaaagcctgaatgtgactgtgatagatttgggtagtaatttaaagatgagtacctgaagaattctgcttcagagtataatgatgacccttcttgagttttgaaatttgtaatcactgaaatattaactgtttcttaataaaaagttacctgaaataacaacaaaatacaactcctcagctagcttgctgttaaaccacattgaagtctgttaaaagatatttatttttcttgtaaatatctgaagctgtagcttagtggaaattttagcaaggtaatggattttgctttaaaatgtctgccttacaaattcataacaacaagatttgtcagtcagcatttattcatgttttccctgatttttatcttctcaccattttacctcttttaacaggagcctgagcacaaggtttaatgaggaagctggggctataaatatgtgtgtatatatgtatatgtatgtttgtacaaatctccatgatgtttgccaagtttgaatgcgcaaaacttggaaaatgtgacaataaagaataaaagtagtaactcaaaaaaaaaaaaaaaaaaaaaaaaaaaaaaaaaaaaaaaaaaaaaaaaaaaaaaaaaaaaaaaacagtagcagccgacccaacgcagaaacaacagaaaagctctcaaacacacacctgacggaacaccgacggccaccagaagacacacccacaacgcggcccacacagcacgggcaacacaaaggacaacactttgtgacgatgcaacaaaaaccgagtgatgagaatctatcgacacgagacaatataaaatcacatccactgtgggacaacacacaactatactaagaaaacaatacccaacaacaggcgtcccgaggaagacatctaagggagacaactaacccaagggagcacacccgcggaagcacgataactcacatagtaagcaccgg

SEQ ID NO: 5835 - DNA, 3309 bp, Homo sapiens
  misc_feature (58)..(73): n is a, c, g, or t
  misc_feature (2203)..(2229): n is a, c, g, or t
gcagcgcctccgcacctggtaggtgctcagttaacgtgggagaaatgaagagtgaagnnnnnnnnnnnnnnnnatattctccaggacatggtgggcgggtgctatgagttttcctgttctgcagaatgaagaggctgcggctcaggaatatgaacaacccggccaaagccacaaaacaaggaagcaccggcagggccgggattcaggtctgggtttgtctgactccagagcccagtgccttgttctccatggctgctgtgtgctacctctttgatgaacatctagatttgtgtccttctctgaggggtccccagatttcagcagttcgaggccagctcagcttttcctttcaccaatggcctagaagaggccaacaaggtagctttgaggctgccccaaagtggagagtggcagtgaaacattggacgccagagtgagggccacagcgcagtggcctatatgggtttagagcgtgaggcctccacgtggacttgaatgcagaccccaggcctgcccgtgttgaccttgggcaagtgacttaacctctctgagcctccattgccccacctgtaaaatgaggggtttatagtacctgcttcataaagttgctatggagatgacacgagaagccataggaccccggtgccatttggaggacccgtcgtggggggcacttttcccaggccaggcacccccttcatcccggagcccctcagtggcttggaactcctccgtctcagacccagcttcaacagagtggcccagggctgggtccgtaacctcccagagtccgaggagctgtagccctagcctgaatcttcagttccccagtctcgggggcctggtaacatccggagccaagacttgtggacagcacttcacagttgaagaagggccttcacacacaaaacctgattgcaaatggcttcagaggtcaccaagttcagtcgtcccaaaacatgggtgtgtttcaaaattacctggggatgttgttccaaatccagacaactggactgtcccagacttgcagcatcagagtctcctgagtcgaggaatctgtattattaatagcaaccagggccgggtgtcgtggctcacgcctgtcatcccagcactttgggaggccgaggcaggaggatcacctgaggtcaggagtttgagaccagtctggccaaaatagtggaaccccgtcgctactaaaaatacaaaaatgagtcggacatggtggtgcatgcctgtaatcccagctacttgggaggctgagacaggagaatcacttgaactacgaggcagaggttgcagtgagccgagattgcgccactgcaccccagcctggacaacagagtgagactccttctcaaaagtaaataaataaatagcaaccagtactccaggtgattccagcataacttatccatggtttgtgtcattaggagtccacatccacacctctgctctttcctgttcctgtagtgtacactcccccggtgacagggtgctcactggcaccccatcttcctgtgaataactcaaataattagaaaatgttccttttactgagatgcagttggtcttcatctattcatgctctaaacagttcctaagcgctgactgtgcgctagacactgccaggcccgggcctcgaggaggaaaagacagtagggaagacattatagagcatgaagtcaccataattttccctaaagcatgcttattgacaattgaggaacaaagtgttgtggagcagaagaaggagtccctcaccctaggtgtgagatgggattctggaagcttcctgaaggatttgagtgggaccttgtgggaggcgtgagagtccatgaagggggtgtgagggggagggtatttctggaaagtggaccagcatgtgcaaaaatatggaactgagcacgggtgcagggtgttctgcagaagggagaaggctgtgctagaggagccagtgagggccagcatggggtgggcttcactaaggaaatggggaaggttttagtgatgggtcttgctgggtgctgtgtggggcgcatattggagaagggtaatgccagaagccaggaagcctgcaagggatgaggccatgggaatggagagaaggggccacccactgggcacctaacaggacaggtgcaaagtggggtgcttattaagattccttctttccactccattttgagcaggctgcttaaannnnnnnnnnnnnnnnnnnnnnnnnnngcagctttatatcgagtgcctcagtgcttgggctggtagtagtttctctacatatcttatttctaattctcagaacaaccctgagagaaagatattgttgtccccactttacagatgtggatatttaggccaaaaggaggaagtgacttgtccaggggcagacaccaaatgggaatctgattccagtggatgtctcttttcagtgcactgggtggtcaatgcccactcgctctgaaatcatctgactgtgatgccctgccttggagtttagaagttgagtgcaggcttgggagtcagactggatggggtaggttctaactctgccactgctagccggatgaacttgagcaagtcatttcacatctccgagcctctgtttctccaagtgtaagatgaggacaagtataaaacctcctttatgggtttgttgtgaacacagtgcagggcacatttataataagagctcagtcaatggtaggtttcatgcaactgctgctctaggctggaaaagttgttcttgcactggatgcagcatgagaagctggctgctaagatgtcactgggggtcactaaagctgaagcctgaaggaaagcctctcattgctgtagagctctccctgcctctctctctgggggcgatggggaaggtcaggagtccagcccattcccagggtgtgtgggatagcgattgcattttccttttgctctggagtttcactccccttctgggtcccaagggcccaatggcctgacttttagaattgcttgcaattggtgttttctcttgaatttgggggctgccatttaaagccaggtttccatgagctgaagaccagccattcaagaatctgaaaagtagacaagaggactccagttgcctcaggttggttctgctgtgctctggaaagtaactgcagccaccaggtatgaaaaggagcctggtggggagaccactgcacccaaaacaaatcctttcttcttctgagaatgtgactttttctggtgttgtaaaaaagaaaaaaaaaagaatgctcattgtaaaaataaaaaaataataataaaaaaaaaaaaaaaaaaaaa

SEQ ID NO: 5836 - DNA, 2723 bp, Homo sapiens
  misc_feature (2405)..(2419): n is a, c, g, or t
ggaattccaatgaatgaatgaatgaatgagtgaatgaatcaacgaaggagtgagtcaaggcccgggaaccacagactccaagcctacgcagagcccgggaagggggattccggaggggcggggcctctttccggaagcgcccgccgggggcggggagggggcggggccatccgcgtgaggcgaccctgttggtccggaggggcggggcgaggaggaggacggccttgggcggttcggctgcccacagtaaccgctgggtggacctggccagcgctccgaaccttgtcctcgctgcgcgccggcccctcggagccccacagcccgggaaggaggccgccgcgggccgggcgcccgctctgccaagcggacccgcaacccggaaaggcggcgcggcggagcctggagccggatcctgctcagaccgggccccggccggccagagccgcgggcatgtcggaggcgcggaaggggccggacgaggcggaggagagccagtacgactctggcattgagtctctgcgctctctgcgctccctacccgagtccacctcggctccagcctccgggccctcggacggcagcccccagccctgcacccatcctccgggacccgtcaaggaaccacaggagaaggaagacgcggatggggagcgggctgattccacctatggctcctcctcgctcacctacaccctgtccttgctggggggccccgaggctgaggacccggccccacgcctgccactcccccacgtgggggcgctgagccctcagcagctggaagcactcacttacatctccgaggacggagacacgctggtccacctggcagtgattcatgaggccccagcggtgctgctctgttgcctggctttgctgccccaggaggtcctggacattcaaaataacctttaccagacagcactccatctggctgtacatctggaccaaccgggcgcagttcgggcactggtgctgaagggggccagccgggcactacaggaccggcatggagacacagcccttcatgtggcctgccagcgccagtcttggcctgtgcccgctgcctgctggaagggcgggccagagccaggcagaggaacatctcactctctggacctccagctgcaaaactggcaaggtctggcttgtctccacattgccacccttcagaagaaccaaccactcatggaattgctgcttcggaatggagctgacattgatgtgcaggagggcaccagtggtaagacagcgctgcacctggctgtggaaacccaagagcggggcctggtacagttcctgctccaggctggtgcccaggtagatgcccgcatgctgaacgggtgcacacccctgcacctggcagctggccggggtctcatgggcatctcatccactctgtgcaaggcgggtgctgactccctgctgcggaatgtggaggatgagacgccccaggacctgactgaggaatcccttgtccttttgccctttgatgacctgaagatctcagggaaactgctgctgtgtaccgactgaagccaggcagggtctgggatcctcagggctccacctctccatctggaagccggagccataactgctgcagtttgggcccaggcttatgtgctcttctggtgccctagggactgctgtggccagagcctggggccagccagtacagtcctgagccgaggaggagggactgcaagtggaagagagccagtctggaaggaagagctttccaggtggacagggcttcttggaagacccccaaagccccaggtatcctgggtgaagcctgtttgcctctcttgaaaatggcaggtgctcttgttttacccatgttgggtcagcctgaaactgccaaccagtaggaagcatggactctcctgagtgagaagagactgaaataggagcaagcagaaccctgagaggtgtcccatcttattgctgttgaggaccctgaaacaccgttgtttaaagacttcacacagaaggctctgaactgagccactggggaagggaagtttcagtaacatgacactaaaatggcagagacgttaaaaaaagtttttcccttctaaaaaaaaaaaaaaaaaaagcatgcatgtctgtgtgcattggggctttttagacaggcctgccctgtgactttgtggtagaggcagagagaaggaaattgtcccctgagcacggtagggccttgctgggtggggtcagaggccagtagttccaggcctttctctgtgtcccagcacagacccttgtccttgctgtggaaatgatgaggggatggagggacaagaggaagaatgagaggacacaaccctggagcctcacaatgcctgggtgttgccatctggaggagcctgggcataaggtaacccaggaggctggcaccgagnnnnnnnnnnnnnnnttcccccgttctcacttgagggccgtttggtcctcttatgtggctgaaactgtggcataacagcgttctgccccggggacgccaccaggggaagaaacgggcgaaagatagtcccgaaaaaagcctcccggcaagacaaaaaggggggcgatagtacacaggggcagacacgccccccgagtaagggcagagacggatatcaaagcgggaaaaacaggagagcgcatcgacaatcgggggcagccacacacacagactacgtgggaggagagataaaaaaagcaacgccacacaaagaacaccg

SEQ ID NO: 5837 - DNA, 715 bp, Homo sapiens
tttttttttttttttttttttttaaattttatttttattttttttttagaaaagagagagaacatcatcacaatgaagaaagcctggtgcagtaaatcaaggtggtgccagggatgacttgcgtatatacaacgtttgccatggagtcctgtgctctttgcagaggtgagattcaggtttgactctgaacttctcagcagcatgaactgggaaactgttgaaaccaagctgatatgtggttgctagctgattccaatagaggctcagaattagaatattgatccagagttttacattattcatccctccctcttgtttcttctgagcagcagccagagatcacaggtttgctatagtcgccactccactcagcacccaaaatggaactggcaaggctcaaacttgctcctggatggaccctgtcagctttcatccaacctctgaccaagagtttcaacatgatgtttctgggcaagatgatcgccccaaagttggcccattggtgctgcagtctatttccttagggtcaggggtctcttcagtattgtcccttcatggtcaccaggaagatgttaccagaaaagggtcccaatccagaccctacaagaaggttcttggatctctatttctctctgcccgtcagcttcattctccatacagagtggattcctccacacagcccaagaaaaagccagagacagcttacaagacctta

SEQ ID NO: 5838 - DNA, 1747 bp, Homo sapiens
ggcttccgcgcgggccacccgggtcaagcgcgctccgccgggaaacttctgcgggcgccgggctgaagctccgggcagggctgggaaggaaaggaaataccaaaatatttgcagactggatccaaatcaggagcccagatgaacttaaagaagcgagcatgggattcttagtttttcaagatccgtacacacgaagcctttaatcagcatcaactccagtgtccgttttctctggttttgtgaagactgcacaaaactctcatgatggagaaccaaaggacttagttacctgtttcagtgtcatctaaagtcaactgaaaagtgaagcaggcagtaatacagccatggaaagaaattcaagtttatggaagaacctaatagatgaacacccagtctgcacaacctggaagcaagaggccgaaggagccatttatcatcttgccagtattttatttgtagtaggtttcatgggtggcagtggattcttcgggctcctttatgtcttcagtttgctggggttgggttttctctgttctgctgtctgggcttgggtagatgtctgtgcagctgacatattttcctggaattttgtactgtttgtcatctgcttcatgcaatttgttcatattgcatatcaagttcgcagcataacctttgcccgagaattccaagtgttgtacagctcccttttccagcccctggggatctctttgcctgtcttcagaacgattgctttgagctctgaagtggttactttggaaaaggaacactgttatgccatgcaggggaaaacttccattgataaactctccttgcttgtttcaggaaggatcagagtgacagttgatggcgaatttctgcattacattttcccccttcagttcctggattctcctgagtgggattcactgagacccacagaggaaggcatttttcaggtaaccctcactgcagaaactgattgtcgatatgtgtcttggaggagaaagaaattatatctgctctttgctcagcatcgctacatctcccgccttttttcagtgctaattggcagtgacattgcagataaactctatgccttgaatgacagggtatatataggaaaaagatatcactatgatattcggctacccaacttctatcaaatgtcaactccagaaatacgcagatcacccctgacacaacattttcagaattccagacgatactgtgataaatgacatcaaagtctgaaatttataagtataaaaaaagactctctcttcatcattccccagtgaaatagcaaaatacaaaaaaagagctccctaatgtttttataaatcaaattcagaagcgagatgccattgccaactgttttattcctttcaacaactgcattgtgaataaactttacaaatttttcttgtaaaaaaaaaaaaaaaaaaaaaaaaagggggtggataactatgggcagtttgcccttttttgcatcaaaactgggagaatgaaattccactttctcaattcttttctcacatttactcaaatgcattgtcttgccctatggactcaggagttgcttttcaagaaacagccagcaagtattttcagcctgagggtgggttgctactgtccacataggcatttccggaattcacttttttgctacaacctccagtgaaagcaattattttaaatgtgcagttacttgatgtgactaaaaagtagaataaatgcaaggggtaataataaaaaaaaaaaaaaa

SEQ ID NO: 5839 - DNA, 1221 bp, Homo sapiens
ctggtacggcccggggtatcgttgaggaagcaaccatgcaggtgctaaccaagcgttaccccaagaactgcctgctgaccgtcatggaccggtatgcagccgaggtgcacaacatggagcaggtggtgatgatccccagccttctgcgggacgtgcagctgagtgggcctgggggccaggcccaggctgaggcccctgatctctacacctacttcaccatgctcaaggccatctgtgtggatgtggaccatgggctgctgccgcgggaggagtggcaggccaaggtggcaggcagcgaagagaatggaaccgcagagacagaggaagtcgaggacgagagtgcctcaggagagctggacctggaagcccagttccacctgcacttctccagcctccatcacatcctcatgcacctcaccgagaaagcccaggaggtgacaaggaaataccaggaaatgacgggacaagtttggtagaccttggacactagggaagatcccttcacatgatagaagacagactctttgatgaggtcggcggagcagttcactagccaatgatgagagcagaaaggcctagacctgcagccagaagtgaaggcggctcagttctccgggatgcttctctacctcctgagcaccaattcctggattccagtcactggctcacctttagaatgtctgttgctattcactgctcccctcgctcctcttaacagcttggggaggtgaccagtggttcaggagggactagacaattacctgtccagtgtggtatggtaggaagagtgtaggtgttggcacgtgaccaaaattcacatccctcctcatggcagtcattcagtatgtgtacttgtacaagttatttaacccattggagcctaaattccctcatctataaaatggggataatattatctacctcacaagcttatgaaaactaaacatgatgaatcaaaagcacttggcatgtgagggctattaaaatagcctgattttttttttctccccctctccccaatgtatttgctctggcccttgctttttaccctccagagctaagaggtagcagagtctcttgggatgagtgattcaccctcttacttggcgaccactgatgagatcaacaacaggtgaactataaacctattatttattgcagaactaataaaaaatccaaagccttgtaaaaaaaaaaaaaaaaaaaaaaaaaaaaaaaaaa

SEQ ID NO: 5840 - DNA, 3091 bp, Homo sapiens
  misc_feature (387)..(402): n is a, c, g, or t
cttcccaccgccagaacgtgcaaataggggataatcagccctgcacggccatcctcagcaatgctgcttatttaacccattttttaaaatgacacttaatgttattggctggcgtacgtgtgtgcgcatacttaaaagttgatgcgtggtgcagctctgctgctaatgtctgctgacagcgtcgcccgatgttgctcagggcctctgggaagaggggacacctttgatgtgggcgtgctggcacccaagaggcaacgtggtcaggctcgatgcttgccagccctggaaggtcccgccagggttggggggtcgggtgagcactcagagatctggggaggaagcgaggagcctggtgtcctcaccaggtgcagaggggaaatgcgtacnnnnnnnnnnnnnnnngactcaagtctcggccctgaggactcagaactcacaagtcatggatcaagtacagagggagggagggccccagcccacccctgcgggggaggaggagggtctgaaggtgggagggcagctccatgagcagccactgttcctgaccagccgaagtgccaggcagggggaggtttccatgtccaggagggagaggacctccaccctctgacctttcagttttccatagcagcccagtgtgaagctcggcgggggtgggcagggcatcaggacaagatgaagatgctggctctggaatggggactccccttgggctaaggggtagtggctggcagaggttgcccagctcttttggaggccacagggaatagaggtggggtggtgcttccgttcctgtgaggcccgcccccctgagccccctcgtctgcttcttgtttggcagaaatagatgtggggcacagcccctagatgatgggaatctgcccaagctgtgccctctggggaatgaaatcttgctcctcgtgcagcttcccctttcccttgcggggtgggggctgggggtgccaaggctccacccttggagggggttgctgggggtgccaaggctccaccctttgctcgctgggcagagggaaggaagcacctccctgtatgctctgcaggggcccctgcaggccactttgcctcagaggaaggaggagaggtcccctgggaaaatgcgcacacacacacacacacacacacacacacacacgcacatgcacacacgcacgcatgcacacacacacacacatatgtgcaggggtgcagcctaagtcagtggagccaggactggctgcgcagctgggcctgccccattcttggagtccccagggaatgagcctcaggatccacttcgtcccttgtttctaagccaggctgcacggccgttcctgggtgtgaaagcattctgtcctgtctccagtcagagggaaccgcccccaaactagaaagctaatttcccccgaaggttcatgaagccagaggcatgcccttgggggttggtcgggagaagggtgagaggcagtgctgtggaaggggcctggcccctgctgcctgcgattccccccgggtatgtggccttctgcctccttcagcctcagtttcctcacctgtaacatgagaataatgatgcctgcctgcccaggccacctcctgggagtgcattggggactctaagtgtaaaactgtcatgaggatggtttatgaagtcccagggaccacacctgccactcagggaagagaccgctgacctcagccatcagccgtgtgcatcgtgaggggcagcgagctcaggacggagagctctcccttggttcggagtcagcacacctgcactcccacacgcccacccagctgtgtgtcctccgccgagggcgagcctctctgtgactcttctgtaaaatgcaccccattctgcccactcctgccacgagacccatcctctgcgatcccgccaggcatgtgtgtgtgaatgcatgtgcaaagctctccatcagaagggtggtgtgggccctgcaggtcctacccctcggccttgaagctccctcgggctgcggactctgcctcctgggtctgagcattagaaccaggagaggggtgtccctgggcagagccaggggtgcaaacagcctgcagccatctggccttttaagtatagtgtgtcgcatttccgggtaggaaggtagcatttcaagttcaaagagaggtcaagtcatgcaaccatctttcctccagcacttttggggtaaggaggacagtttttgttatggtttaggggaaattttcatgaaatttccaccattaccaatagattactgatgtccatggcaagtgatctgttcttggtattttgttttgttttgttttggtttttaaatgtaatcacccattggtcaggcccaggactggtcaccatgagctctgctagccacggccccaacgatgcttccggctctcatggattccacagcaaataaaactgtactgacaacaaaaaaaaaaaaaaaaaacctctggaaggtgcggtgggacttgctgcgtcaaagcacggcaggctctgtgctgggcaaacagggccccgcggcagcccaagggcagcctgcagacgccagtgtgcccggcttctcccatgttctgagatgggggaggggaaggtgtaaaagagagctggatgggggctgtggggactgagggtcctgggaggctggccagggctcagcaagcgcccactttgggaggccttgccctctggggctgtggttggacagcactaggcctgcaggctggctgcaggaggaagagcagtcggaactcagggccccccaaagcggcgatggaggtgaatgggagaattggagagtgtccgcgggggccacttccggaaaggccggtagtctgacaaagggagctcgtccaccccatgctggacaccaaacaggttttcttgagcttgggtgccgagctcgattacagaaagccagccgtgggctcttactcggggtacagcgatataattgtcaaagaaagagaaagggcaatgcacaagacagacagcaggatgaagaacgaaacacgacgagaaagagcacaaacaagacaaaggcatgcacagaggaaaaatagagtcacgtctctcgtgctctgtcttccc

SEQ ID NO: 5841 - DNA, 2372 bp, Homo sapiens
tccggctagtcgggtcgcgggttaatcggcacgagggttaggccaacagggaagcgcggagccgcagatctggtccgtcgctcgcctgggtgcctggagctgagctgcggcaaggcccggctcctgttcgaccgcccgaggggtgtgcgtgtgcgcgttgcggagggtgcgctcagagggccgcgtcgtggctgcagcggctgctgccgccgcaggggatctaatatcacctacctgtccctgtcactcttgacacttctctgtcagggctgccgcgtgggggggggcgggcagagcgcggtcggcgttagctttccttattggaggggttcttgggggagggagggagagaagaagggggtctttgcccactcttgtttcgctttggagcttggaagcctgctccctaaagacgctctgagtggtgcccttctgcccacatcccatgtcttcgtttgcccgctgactttccgtctccggactttttcgcttgagccttccggaggagacgggggcagcttggcttgagaactcggcgggggttgcgtcccctggctctccccgcagcggggaaactccgcgcctagagcgcgacccggagcgggcagcggcggctacgggggctcggcggggcagtagccaaggactagtagagcgtcgcgctccctcgtccatgaactgcatgaaaggcccgcttcacttggagcaccgagcagcggggaccaagctgtcggccgtctcctcatcttcctgtcaccatccccagccgttagccatggcttcggttctggctcccggtcagccccggtcgctggactcctccaacagggggtggaatggagaccaactctccgacacctccagcccggaggccgcagagaaagataaaagccagcaggggaagaatgaggacgtgggcgccgaggacccgtctaagaagaagcggcaaaggcggcagcggactcactttaccagccagcagctccaggagctggaggccactttccagaggaaccgctacccggacatgtccacacgcgaagaaatcgctgtgtggaccaaccttacggaagcccgagtccgggtttggttcaagaatcgtcgggccaaatggagaaagagggagcgcaaccagcaggccgagctatgcaagaatggcttcgggccgcagttcaatgggctcatgcagccctacgacgacatgtacccaggctattcctacaacaactgggccgccaagggccttacatccgcctccctatccaccaagagcttccccttcttcaactctatgaacgtcaaccccctgtcatcacagagcatgttttccccacccaactctatctcgtccatgagcatgtcgtccagcatggtgccctcagcagtgacaggcgtcccgggctccagtctcaacagcctgaataacttgaacaacctgagtagcccgtcgctgaattccgcggtgccgacgcctgcctgtccttacgcgccgccgactcctccgtatgtttatagggacacgtgtaactcgagcctggccagcctgagactgaaagcaaagcagcactccagcttcggctacgccagcgtgcagaacccggcctccaacctgagtgcttgccagtatgcagtggaccggcccgtgtgagccgcacccacagcgccgggatcctaggaccttgccggatggggcaactccgcccttgaaagactgggaattatgctagaaggtcgtgggcactaaagaaagggagagaaagagaagctatatagagaaaaggaaaccactgaatcaaagagagagctcctttgatttcaaagggatgtcctcagtgtctgacatctttcactacaagtatttctaacagttgcaaggacacatacacaaacaaatgtttgactggatatgacattttaacattactataagcttgttattttttaagtttagcattgttaacatttaaatgactgaaaggatgtatatatatcgaaatgtcaaattaattttataaaagcagttgttagtaatatcacaacagtgtttttaaaggttaggctttaaaataaagcatgttatacagaagcgattaggatttttcgcttgcgagcaagggagtgtatatactaaatgccacactgtatgtttctaacatattattattattataaaaaatgtgtgaatatcagttttagaatagtttctctggtggatgcaatgatgtttctgaaactgctatgtacaacctaccctgtgtataacatttcgtacaatattattgttttacttttcagcaaatatgaaacaaatgtgttttatttcatgggagtaaaatatactgcatacaaaaaaaaaaaaaaaaaaaaaaaaa

SEQ ID NO: 5842 - DNA, 1346 bp, Homo sapiens
ggacgcccgagagtttgtgcagcctgggagacggcggggggtttgattcaggggtgcccgtgggaaggggagggctgggtcgtcccagaacctactgactgtcctcgacccccgactctctgcatgctccggatctcactcccgggagggcccggagaaaacccaagttggggtggtggctattgatgtggacatggccttttttgaacctaaaatgagggaaatccttgagcaaaactgcacaggagatgaagactgcaatttctttgactgtttttcaagatgtgatttacgagtcaacaaatgcggagcgcagcgcgtaaacaacaacctgcaggtcatctgtgacaaaatatttcgccattggttttccgcgcctctcaagagctctgcggtctctttccagcttcagctgcagttacaggaggcggtgcaggaatgtgcagaccctggggtccccagtgggaacacccggagagcagcctccagcgtgttctggaagcttcgccaactcctccaagccacactgagggagctgcaggaggcagagaagtagccactctctggccttaaacatgctcacacaggaaaagtgaccttggctggatttcttctgccattgttttaaagatgagccatttcccctgtgctctctggggtgccgttctggtctccacattgtggagtggcaagtgctgctgccagagacagtgctccctcgctctcgtcccaccctggcctctgacctgtcgccttgtgtaaaatgagatgagggaggaggtacagacctcccttcaggagggctctcggtcagaagacaccaacctgtgtgcacttattctctgcagagagcacttgtacctggttatcccagcacgagttccagctgttctttcctgtaaatcgttaccacgttaaaaagtgtgcgtgtgtgcatacaaatgatgtgtatgcctgtgtctgggtgcaaatgagcatgtgagcatgtgtgagtgtgcccatgagtgtctgcatgtgtgtgagtgtgcacaggtgagtgtgcacaggtgagtgtggtgtgctcatgaggagtatgagtatgcctgagtgtgaatatgtatgagtgtgaatgagtgtgtgcacatgagtgcacgggtgtcagcatgtgtatataagtgtgggcatgtgtatgtgattgtgtgagtgtgggcaggtgagtgtgttggggatgtgggttagggtggggagtggtgctttctctagtgtgtcctccggaacatcttgcctacctagcaaagaagtgtgaccattctttcggaattaaatacaataaaaagaaaataagctgcaaaaaaaaaaaaaaaaaa

SEQ ID NO: 5843 - DNA, 4046 bp, Homo sapiens
tttaagtgtgtatgtaagtgtgggtatgtgtgtttttaagtgtgtgtgtttaaaaataatgtttatcttccctccctgttccttaccgttttcattttccaacagtctactagagaaaaacatggttggccttgagaacataaaggaagaggcatgtatttgacatggtatttttccctttctttatgttataattgagtagtagccctctaatttgtagttgggcaagtacagccaacaccctgactcttaaccttattatgagaacttcctttttacccctttttttgtttttgtgcaaaacagagatggggttgaggaaggagggttggcgagcaaggccagcttctgccctacagaattgggtgtgtcttttttttttcaagtgaggctttgggaaagtgttcaaatgagagcagtcttaaggtctctaagagatggggaatgtgctatgtatatcctgcctgtgaaagcccaaaccatatgggagaagctagaggatactaaaaacaatgaaattgtgatttggaagtttagaacattgttttaaaaattacattataaatgtaagacatgctttttatgtgtatatccgaagggaaacagctacatcctcaagtttttgcagcctatatgacttgagattggagcttgtgaatttaacagtactggtgccatgagaatgagcaaagcctagccaatggatactattgtgtttagattgttcatctttggtagctttaggttcttgatcgaggttcttaagatttctaagtcctttataaaaataggtcaagagtcctgttgttatggaggcttgattatcccagatattaggagtgaacatttttaataaatctttcagaaaatcttggctagaaagaattctaagttagttgtctaaccactgaaaactacctagccagagatcatttaatgagatattctttgatcttcattgcattttttttgctctggaaaaggtggttcaatttgagtttgttttcatgatttgattgcagcttacttcatgccaaggattttttagggagaggtcgaattatttttcatttggaagtcatagggagacaggagttgtacttatgctgctacttgccaggaacaggttgggaagaaaattgtggctgttggaattgatgatgtactggcctaatatagaaaggaatttgtaggcaggagtaaacgttaactgacggtgggttagtgccctgcatcttgcatatttgaactgtctagagttcctgccattgctgggtataaaacgaggagctctctgttgacctgtaaatcattaatacttcttgacttagagtgtcacttcactttatagatgacattttcctctttccccttgatattttctatgttgtgttagataattggtagatatatagttgtggtttagtacatttagggcttctatttatttagattttgtttgttggagtctgtttccaaaagggaatgtgccatttagtctgcatctgtatctttgtggacttgatgatcactggtttgattttgaaaaatgtcttttccagcttttagttactctcatcaaatgtcacatattttctaatcacatgcactcctttaccacagaggcacataatcatttggccttatagcagttatccatggccgtactgtagtaaagttccttagaactttgccaggagtgaactagaaaaaagtgcttactagggcctaagagttgctttgtgccgtgtagtctggcctttgcactagtagatcattgctgacataggtcagtttagagacctttctgtgttaatgcctcctggtactgtcttaagatacgtacagtgtctgtttttagatctatgcatatgtcatgaagctccttgtgggctctgcatgaagctgctgctttgtttttgggttaacagatgtgcctgtcaactagcatgtgtattgtccaaattccataaacttaaggtttttaagggctgtgtggtttctgagctctatgtgtctttcctatccttgtaccttcaaagggtgagaaatgagatttatacatccaaagttagtctgataaatatggctttttgtttctccatgtaacctagactgtcaaaaataagtgatggtgataagtaggcctggagcctcagcttctgtaaatctcattcctaaaattttgctagactcgtgttggcaaaaacaaatacctgtggattgtccttaaggcttttaatcagatacctgtgttgctgttagctgaactgtagtgaagcatcgatccaaatcggtcttctgaagtatcagttatgcttttgagtttagaaaatacttaggtgttagtctagtcttcccattcatgaatcagtgtatgtccatatcagagagcctcaacttcttttttcttcctttttaaaaatgattttagtgttttgatttagtgtatactacatagttcagtattattggctttaccagtgttgacagaaaaattttaaatctccagttgcaaacagcaatggattaggatatggaaataaaatcatggtgacatcactgctgagttatcttaaacctctgctacttaattctccatattgaaatgcatactcctccacatacatggcttccaagtaaaggcaattgtagaggggccctgtctatcccagtatggttggattttaaacatatctgtgtttccgttattttgggaactgattaatatttacaattttttttgtttatgagttattttgatactaagaaaagagagaatctagaacatcttgaagttgaaatacaaattttattcttttggtcttgggagaatttaagcagtctatgcaactcatcaaatggtgagaaatagccctccgaggttccagtaagctttcagtgactttgatacctccccaagtttcttgagttgctgcttgttaacacccagcttttaactgagtgtttgctcctgatggtttaggagattttcatgttgtatcacactgtcaagttttattttgtctttttatccctccgtggatgtgagtttgaaacaagcacggtacagtaatcctgcctgatagagtagtctggaatgagaattactttttgggtgagagagttctccattttaatgtttctaaagtttttcatatgaacttggcattggaaaagggaggtaaagaaaaaggacgtttactaaaagcagtgtctactcttcccctttgtgagtgtttattcatggctaatgaaaaaaagagaaggactcttgggttttgtgttgccatgttaagcatggagagggatgcttgacagcatgctaattgaagccagagcaagtatgtccttcatcaggtaatcaggaactcttcagttgaagctgaggaactaactgattagttgttgatcataatataattggttacaaagtggaagtgccagctggcttaagtacccaaagaaaagaatgcagcagcctaacttagtgttaccatatgttactgaatttgaaactgaccttttttcccaccctacttcacacacctaaaactcttttcttgtcagaccaaagagcgaaaagaaaaaaaaaagtaaaacactttaccaatctgtcactcaggtacaattttgtggtgagatttttgtctgttctctttgtattgctcttaagagtcctttctcagcatattattctgccattgcctctgtcttccttggggcacctcagctctggatgctacccctgggatatctactgctgttatgtgaatgataggaggtaagtgaccattatagtaagggctctttgtaaaaaaattcaaaaaatttaaaaaggatgtatacattttatagtctggctatcagtttgatatcttgctgtcaagtatgtttctcaatctgtatttatccatcccatcaataaatgttaatggtaaaacaaaaaaaaaaaaaaaaaaaaaaaaaaaaaaaaaaaaaaaaaaaaaaaaaaaaaaaaaaaaaaaaaaaaaaaaaaaaaaaaaaaaaaaaaaaaaaaaaaaaaa

SEQ ID NO: 5844 - DNA, 1239 bp, Homo sapiens
  misc_feature (18)..(19): n is a, c, g, or t
  misc_feature (95)..(95): n is a, c, g, or t
  misc_feature (98)..(98): n is a, c, g, or t
  misc_feature (182)..(182): n is a, c, g, or t
accagtgccagccagggnngtcgattgaaaacgcaagtaagccaacggcaatttaaagattagtcccctcaatttagacgcaggggctctttttnaanctcgtcgtatgtggttggaagtggaagcgatacccatttttcacccagggaacagttagcagattcgaattttatacgcccccnacttagggattgcctgaagccaagatttcgccagagggttgtcagcctggtgaaccacacaggccagcgctctgacatgcagaaggtgaccctgggcctgcttgtgttcctggcaggctttcctgtcctggacgccaatgacctagaagataaaaacagtcctttctactatgactggcacagcctccaggttggcgggctcatctgcgctggggttctgtgcgccatgggcatcatcatcgtcatgagtgcaaaatgcaaatgcaagtttggccagaagtccggtcaccatccaggggagactccacctctcatcaccccaggctcagcccaaagctgatgaggacagaccagctgaaattgggtggaggaccgttctctgtccccaggtcctgtctctgcacagaaacttgaactccaggatggaattcttcctcctctgctgggactcctttgcatggcagggcctcatctcacctctcgcaagagggtctctttgttcaattttttttaatctaaaatgattgtgcctctgcccaaaaaaaaaaaaaaaaaaaaaaagaaaaaaatgaaagagaaaaaaaaaaaaaaaaaaaaaaaaaaaaaaaaaaaaaaaaggggggggttttttttgggggggggagaaaaaagggggaaaaggggggggggggaaaaggttgcagacccttttttaaaagggggggaaagggggggccccagaggggggggacaaataaatttcaaccggcccgggtttttcctggttatcctcttcgcggcgagagaacgaacggaagaacagccgaaggacaagcccacgaaagcgaccgacaaaacaacgcaaagacggacatcgaaagaacaacaaagcgagcagagagaaaagcagaaacacgagaaacagagcgacgaacgaagaagcgaggaaaacaagacacagagcgacgaaccagagagaacgaagaagaagcgaaaaaagggagacgtcaagcaaccagggcgcaacaagcaggagaaaggaacgacggaaagacacagagcatgaaaaggaccagtg

SEQ ID NO: 5845 - DNA, 5823 bp, Homo sapiens
tgaaaggcacggctggaagaagagttgctgtctgtgaggggaacaccaagcagagctctggccgagagattgagattggaagagagaagaaaagagctgctacagaaacttgaagaaactactaaattaactacttatttgcattcacaacttaaaagcctctctgccagcaccctgtccatgtcatctgggagcagcctgggttccctggcatcgagtcggggctctctgaacacctccagcagagggtcactcaactccctcagttccaccgaactctattacagcagtcaaagtgatcagatagatgtggattatcagtataaactggacttccttctgcaagagaaaagcggttacattccttctggacccatcaccaccatccatgaaaacgaggtggtcaagtccccgtagccagcctggccagagtggactctgtggagtggcagctgcagcaacaggccacactcctccactggctgaggccccgaagtctgtggcctccctgtcctcgaggtcctccctttcctccttgtctcctccaggctctcccttggttttggaaggcacgtttcccatgtcttcttctcatgatgcctctctccatcagttcactgctgactttgaagactgtgagttgagtagccattttgcagatatcagcctcatcgaaaatcagattttgctggattctgattcaggaggagcctcccagtctctttcagaggataaagaccttaatgaatgtgctagggagccattatatgaaggaactgcagatgtggaaaaatcattaccaaaaagaagagtgatccacttgcttggggagaaaaccacttgtgtgtcggctgctgtgtctgatgagtctgtggctggagacagtggggtctatgaagctttcgtgaaacaacctaggtgaaatggaagatgtcacatacagtggaagaggatgtagccattgtagagaccgcccaggttcagataggactcagatacaatgcaaaaagttcaagtttcatggtgattatagcacagctccgaaaccttcatgccttcttgatacctcatacttcaaaagtatattttagggttgccgttcttccttcctcaactgatgtcagctgtctgtttcgcacaaaagttcatccgcccacagaatccattttattcaatgatgtgttcagagtcgccatttcccaaacagccttacaacagaagacactgagggtagacctttgctctgtcagtaaacaccgaagggaagaatgcctggctggaactcagatcagcctggcagatttaccattttccagtgaggttttcactctatggtataacttgcttccttccaagcaaatgccttgcaaaaagaatgaagaaaatgaggactctgtatttcaaccaaaccagccgttagtagattctatagacttggatgcagtgtcagccttacttgcaagaacatcagctgagttgttagctgtggaacaagaattagcacaagaagaagaagaagaatcaggacaagaagagccaaggggcccagatggagactggctaacaatgctaagagaggcctctgatgaaattgtggctgaaaaagaggctgaagttaaattgccagaggacagtagctgtacagaagatttaagttcatgcactagtgtgcctgagatgaatgaagacgggaacaggaaagaaagcaactgtgccaaagacctcagaagtcagccacctactagaataccaacactggttgacaaagagacaaacactgatgaagccgctaatgacaatatggcagttcgccccaaagagcgcagcagcctgagctctagacagcatccgtttgtgaggagcagtgtgatagtgcgctcacagaccttttctccaggagagcggaaccagtacatctgcaggttaaatcggagtgacagtgacagttcaaccctggctaaaaaatcactgtttgtgagaaactccaccgaacgccgcagtttgagggtcaaaaggacggtttgccagtcagtccttagaagaacaacacaggaatgcccagtgcggacatctctagacttagaactggaccttcaggcatctctgacccggcagagccgcctcaatgatgagctgcaggcgctgagggacttgcggcagaagctggaggaactgaaagctcagggagagactgaccttccaccaggcgtgctggaggatgagaggttccagaggcttctgaagcaagctgagaagcaggctgaacagtccaaagaagagcagaagcaaggtctgaatgcagagaagttgatgaggcaagtctccaaggacgtgtgtcggctccgggagcagagccagaaggtgcctcggcaggtgcagtccttcagggagaagattgcctacttcaccagagcaaagataagcatcccatccctgccagctgatgatgtgtgattacatgacttaagaaattattttttcatctgttcactttcttagggagggtaaaagactgaagatttgtgtttttgttttggtgtttggttttttttggtaacgtaactgtcaactcttgaagaacttttatttcacatcagattttcaacacattaatttgtaaagtaccttgagtgtaatttttatatgcttaaaaaagaaaaaatcatataagaaagatgggataacctggtacacaaatgttgcccagtatgtgcgcattgccagtggacttcattttgtaaaaatggaatagaggcagtaccccaccatgtgtactgttgagccggctgttgagaaacaacttggttcagccggtggttttgcttctcctttgtgttcctgtgagtaggctgtgccgatggcagcagcgccacgtggtatctgtgcgctggcgaggagaggagcgctttccatttggaggcagtgtgagcacacgctggagtgcagcgttccaaagtccgcccgaaatggatgctgcgtccacggccatcacctgtgcgggaacacctggtttccttaagacaatttcctttttgtccttttatatttttctaaagaaaactaagatataaactaccaagtgctcttaagaataaaaataagaataagaatacaaaggagcactactcttggctacacgaaagatcttgggattcatgacactgagggcagggagaagaaagaacaccagccacgcagagatacaaataagctcatcaaatgagcagctggtttgtctcactcagcctgaatttgcattaagtgttcaaaagtgagtttctggcttgcactagtgttttgccctaaatctaaggatggtgcctagtggtggccctgtgttctgaggacagagagagctggaggggtggagggaaatgcatcggcactcatttggtgtaaccaagaagagggggaaagatgtcttgatagaatcaaagttgccaaaaacaaagaagagtttatcaagcagatttctaacatttagtagaaactacttcatagctctcatttttagggggttctatctataatttatggtaaatagttgggaggcaaagggaagaatgtgtgtggggggattattaatttgaagtataagctaaattgtttattaaaaagcctattttggatgaacaagtttagagagataaactgactaatgtgtcctccagtttagaatttcaccttacccgacccaggcacttcttaaaaacacagatcctcagtgcagctctgccagcatcaaggcttttaaaatatgtagtatttaggccatttaaaccatacttattactcaataacccaagaaacaattttgggttagccatctaatatagcaaataaaatagattttttaaagaaatccaaaattgtcttaaaggaatggaccccttgaagaaaaaaaaaaaaaagttttgttcctcagttagaatgctcactagctcactagcaagaatttttattttcttgaaagcaattatatatattttggaaagttcatgttattggaattgaagttcaaattaagcaacttctgagcctagaactttaattactttttcctaaatgtcccaacacttacatacaaatttctttgaagacataactggacatggcagacactgctttgaacaaaaaccagcctagtgaattgactgagtacagtcctttaaggctgcccagttcattctattagatgactaaggaaaactagaaaaagaatacagttcacccttgtcaaggtcaaatgtgaaagacagaagtttatttaatgtagaggtaaatgaaggtgagctgttttcagcatcttagtttgaccatgaaaatgtctatagaattatgtgtagttgttccgtacgattttattttcttcatttatttatttacagtcttatttatgttctgtttaatatatagtttgattctggccattttaaatatttgacacagaagagactatattggaatatttacagctttataagtctttcatcagattagctgttgactttttgtaatacaaaaagtttcagacaagtattaaagaataaaatctgtctcaggctggtagttagcagttgtgaccagatgcttttggttgttgtatttcacaaatttcctcatttctaacatgagagatgaacttattttaatataatcctttttctacactttaaaagtcagcatagtgttatgtatttataggcagcttttaataatcttgtcatatttgtactaacccaatgattcacagtgacaaacttttaataacttgatcacaaaccatatggacaatatgaattttaatattataaatactatttttaaaaggtagaatttattcgcacggggtaaaaagaatgtaatatttagttctcaagtttgaattatcagtatattattacattttgtatatcagaatcttaagtgttacaggtacaaaagaatattgctagccaatgaaccaagtttagctaaatctctgtagcatgcaaatcaaataaattaaaattttttgctattgctttatctatattgtcttaaatatcaaagctcaggactgaacttaatatttaatcaggttaaattctgaacatgtttctgttttaatttgtcttgtttgtaaacgtatgcaatacatcacatagattaaaggaaaaaaaaaaaaaaaccatgtgtttgtgggtggaaaaaaattcagtggtttttttttaaaaaaaaaaagcaaaaacaaagctacatattgcctaatactctatttcagtgtcgtttattgttcagtttatttccctgattggcacaaacacaagagtttccttgaaccatgtaccaagcaaatacaaaatatttcatgaagaaatccccaggctggcagtttgtgatgaatagttcttgttggaactatatgtattgctgataaaaaaggacgaaagtatcttcattgagcaaataaaatgaagggctccagaatatgtgctctgtggtcgctgcgctgggctggcagtgtgctccacagagaggcagcgtccaggagttatttaaccaaaacccagtctggcctggccgtgccccccaaaggggaccagtgctgggaagcaagaaaaggggcccggaaataccgaacacaggatgcgaacccgttggtgggcagagtcaatgaacatccaaaacaggaaggctcgacctgtagatagaagggttgaaatggggctttggagggcacaagacggggcgttcagggaaatgacctccggaaactaaacaaaattaaaaaggggctaaagcaacagggtagagttacaagaagaagcgcgatcaaggatg

SEQ ID NO: 5846 - DNA, 1990 bp, Homo sapiens
ggcgtgagccactgcgcccggccaaacttgtctgtctttatctctacttacagtgagtgtcaggtcaccctcttggagaccggtgatcagaggctgatgacctctcacagctgctggccctggggacctaggggatccctttgggaatcccaggtcaaccgggtgccagctccattgctctggctgtgtgggtggtggtgggtggtgaggcacatagaaagtcaccagcgccaggaagggcagctcagaaatcctggtcatgccaagtgccactcagggctattctcactctagtgagtgctcattggttcttcccgaagtccagagggaaggacaccatcgggggcgctgtatcccacccggcaccattagcccctgccacccaccacccagcagctggattcccacgggagttgcgggtgggggcggaaccggctgaggtctgggggcggggcgtccgggcgcggggcggggctggcgggaatgtgcgcacccccgcgcggggccccgcccgagcatcccgcgccgacggggctgtgccggagcagctgtgcagagctgcaggcgcgcgtcatggctgctttgagacagccccaggtcgcggagctgctggccgaggcccggcgagccttccgggaggagttcggggccgagcccgagctggccgtgtcagcgccgggccgcgtcaacctcatcggggaacacacggactacaaccagggcctggtgctgcctatggctctggagctcatgacggtgctggtgggcagcccccgcaaggatgggctggtgtctctcctcaccacctctgagggtgccgatgagccccagcggctgcagtttccactgcccacagcccagcgctcgctggagcctgggactcctcggtgggccaactatgtcaagggagtgattcagtactacccagctgcccccctccctggcttcagtgcagtggtggtcagctcagtgcccctggggggtggcctgtccagctcagcatccttggaagtggccacgtacaccttcctccagcagctctgtccagactcgggcacaatagctgcccgcgcccaggtgtgtcagcaggccgagcacagcttcgcagggatgccctgtggcatcatggaccagttcatctcacttatgggacagaaaggccacgcgctgctcattgactgcaggtccttggagaccagcctggtgccactctcggaccccaagctggccgtgctcatcaccaactctaatgtccgccactccctggcctccagcgagtaccctgtgcggcggcgccaatgtgaagaagtggcccgggcgctgggcaaggaaagcctccgggaggtacaactggaagagctagaggctgccagggacctggtgagcaaagagggcttccggcgggcccggcacgtggtgggggagattcggcgcacggcccaggcagcggccgccctgagacgtggcgactacagagcctttggccgcctcatggtggagagccaccgctcactcagagacgactatgaggtgagctgcccagagctggaccagctggtggaggctgcgcttgctgtgcctggggtttatggcagccgcatgacgggcggtggcttcggtggctgcacggtgacactgctggaggcctccgctgctccccacgccatgcggcacatccaggagcactacggcgggactgccaccttctacctctctcaagcagccgatggagccaaggtgctgtgcttgtgaggcacccccaggacagcacacggtgagggtgcggggcctgcaggccagtcccacggctctgtgcccggtgccatcttccatatccgcggtgctcaataaacttgtgcctccaatgtggaaaaaaaaaaaaaaaaaaaatagagaaaaaaaaaaaaaaaaaaaagaaaagccagggaggacgagaagaggcgcgggggaggacgaagggggggacggggacgagggggcgggagagaga

SEQ ID NO: 5847 - DNA, 1784 bp, Homo sapiens
ttttttgtgtttttttttttttttttttttttttttttttcatttagtattttaataataataaaaaagacatacaaaatccaaacatttctttttacaattcagatacatatttttccccaagtgcaaaatactctatgaactgcatcatttgctgtttattgtcgattgtataggagatgcttactaaattggcagcagtggaaggcagatataaatacaatattttgaaatttcttctgcatttaacaaaaagcctcccacatggcgatgattattctgaaacttgagttcagctcacacagaagtataaagttttcagtttgttcaaactgctacaacctgtggtgtctaaaaaagctgatgacaactgggggttctattccttctaatcatatatttccttgtacaaataatggcacaaggatagggtgtgctacttttgagacgggtcaaatgtaaaaatatccttgtgttgttcgctcccacttttattgtgcttaagaaagaaacctggagggttaacattttctgcttatgctcagttatactttgtcttggtaccccttgtttgtggctgtaatattgaggttaagcagcaaatacaaaagttcgagtgctctataacgttttctgacattttgagatatgacctcataatccattccagagtcacctcaaacatgtatatagagaacacttctcatataaaaagtttctctagggccaaagaccaggactgtgttactgaactttcagcaacaaatctgagtctccaccacctcaaactgaccaaatcttgggggctgttaaagcagtcacagctcagtgccagcctttggggatttctaggcctggagcaggcagctcagatccaggatctggtcagttttcttctgactccaagagttgtctcaggttgtaggaataggcatggcctgataatatagaaagagggaggcagagaagttaagaggagactgccatgttgctgaggatataagtgcctttctggtgtgcattacttggtgcgtgaagccctcccatttccaggctcagagcacgcgtgaggttttgtactaagatgaatggaagccccacaatactgtcgccgccacaccctacacgctgcagagaggcctctgggttgcttcatgaagggatcctatttataccatctttccatttccctccaatggtaaaaacctctcttctgtctgacctgtaaagacctagaatgtccctgagcgttgactcctcattcaatccagttaacccctagtttgatgtcccagggccagcctcctccatagattcagcagcagctttgcctgggttcttaaccctccaacttggaggacctaaattaaacttggtggacaatagcaggtttttacctgctcaccaagatctgccttgacatcaattaagaagcctagtggtctatgccttccgtactgtggaactcatttgcaggtctcataagccatggaataaatggttgaaggatgtgtatttgtatgtatgtatgcatggtgtgacaggaaaggaagggagaaaggagaagccagaccctgaaggcataaattaagaagcatggtcaccgtttggctttccaaggagacgcaaaacggctggcagagaggaatcagaaagttatcctaggctgggcgcggtggctcatgcctgtaatcccagcactttgggagactgaggcgggtggatcacctgaggtcaagagttcaagaccagcccgggcaacatggtgagaccccgtctccaca

SEQ ID NO: 5848 - DNA, 3889 bp, Homo sapiens
gaaaaagaaggaaagggagagggagacggctggagcccgaggacgagcgcggagccgcgggccgagcggggggcgggagacaggaaggagggaggcgagcagagggaaggggaagaggtcggggagcgagggcgggagcggtcgcggtcgcgatcgagcaagcaagcgggcgagaggacgccctcccctggcctccagtgcgccgcttccctcgccgccgccccgccagcatgcccggcgtggcccgcctgccgctgctgctcgggctgctgctgctcccgcgtcccggccggccgctggacttggccgactacacctatgacctggcggaggaggacgactcggagcccctcaactacaaagacccctgcaaggcggctgcctttcttggggacattgccctggacgaagaggacctgagggccttccaggtacagcaggctgtggatctcagacggcacacagctcgtaagtcctccatcaaagctgcagttccaggaaacacttctacccccagctgccagagcaccaacgggcagcctcagaggggagcctgtgggagatggagaggtagatcccgtagccggcgggcggcgacgtcccgaccagagcgtgtgtggcccgatggggtcatcccctttgtcattgggggaaacttcactggtagccagagggcagtcttccggcaggccatgaggcactgggagaagcacacctgtgtcaccttcctggagcgcactgacgaggacagctatattgtgttcacctatcgaccttgcgggtgctgctcctacgtgggtcgccgcggcgggggcccccaggccatctccatcggcaagaactgtgacaagttcggcattgtggtccacgagctgggccacgtcgtcggcttctggcacgaacacactcggccagaccgggaccgccacgtttccatcgttcgtgagaacatccagccagggcaggagtataacttcctgaagatggagcctcaggaggtggagtccctgggggagacctatgacttcgacagcatcatgcattacgctcggaacacattctccaggggcatcttcctggataccattgtccccaagtatgaggtgaacggggtgaaacctcccattggccaaaggacacggctcagcaagggggacattgcccaagcccgcaagctttacaagtgcccagcctgtggagagaccctgcaagacagcacaggcaacttctcctcccctgaataccccaatggctactctgctcacatgcactgcgtgtggcgcatctctgtcacacccggggagaagatcatcctgaacttcacgtccctggacctgtaccgcagccgcctgtgctggtacgactatgtggaggtccgagatggcttctggaggaaggcgcccctccgaggccgcttctgcgggtccaaactccctgagcctatcgtctccactgacagccgcctctgggttgaattccgcagcagcagcaattgggttggaaagggcttctttgcagtctacgaagccatctgcgggggtgatgtgaaaaaggactatggccacattcaatcgcccaactacccagacgattaccggcccagcaaagtctgcatctggcggatccaggtgtctgagggcttccacgtgggcctcacattccagtcctttgagattgagcgccacgacagctgtgcctacgactatctggaggtgcgcgacgggcacagtgagagcagcaccctcatcgggcgctactgtggctatgagaagcctgatgacatcaagagcacgtccagccgcctctggctcaagttcgtctctgacgggtccattaacaaagcgggctttgccgtcaactttttcaaagaggtggacgagtgctctcggcccaaccgcgggggctgtgagcagcggtgcctcaacaccctgggcagctacaagtgcagctgtgaccccgggtacgagctggccccagacaagcgccgctgtgaggctgcttgtggcggattcctcaccaagctcaacggctccatcaccagcccgggctggcccaaggagtacccccccaacaagaactgcatctggcagctggtggcccccacccagtaccgcatctccctgcagtttgacttctttgagacagagggcaatgatgtgtgcaagtacgacttcgtggaggtgcgcagtggactcacagctgactccaagctgcatggcaagttctgtggttctgagaagcccgaggtcatcacctcccagtacaacaacatgcgcgtggagttcaagtccgacaacaccgtgtccaaaaagggcttcaaggcccacttcttctcagacaaggacgagtgctccaaggataacggcggctgccagcaggactgcgtcaacacgttcggcagttatgagtgccaatgccgcagtggcttcgtcctccatgacaacaagcacgactgcaaagaagccggctgtgaccacaaggtgacatccaccagtggtaccatcaccagccccaactggcctgacaagtatcccagcaagaaggagtgcacgtgggccatctccagcacccccgggcaccgggtcaagctgaccttcatggagatggacatcgagtcccagcctgagtgtgcctacgaccacctagaggtgttcgacgggcgagacgccaaggcccccgtcctcggccgcttctgtgggagcaagaagcccgagcccgtcctggccacaggcagccgcatgttcctgcgcttctactcagataactcggtccagcgaaagggcttccaggcctcccacgccacagagtgcgggggccaggtacgggcagacgtgaagaccaaggacctttactcccacgcccagtttggcgacaacaactaccctgggggtgtggactgtgagtgggtcattgtggccgaggaaggctacggcgtggagctcgtgttccagacctttgaggtggaggaggagaccgactgcggctatgactacatggagctcttcgacggctacgacagcacagcccccaggctggggcgctactgtggctcagggcctcctgaggaggtgtactcggcgggagattctgtcctggtgaagttccactcggatgacaccatcaccaaaaaaggtttccacctgcgatacaccagcaccaagttccaggacacactccacagcaggaagtgaccactgcctgagcaggggcggggactggagcctgctgcccttggtcgcctagactggatagtgggggtgggcggaaggcaacgcaccatccctctcccccaggccccaggacctgcagggccaatggcctggtgagactgtccataggaggtgggggaactggactccggcataagccacttccccacaaacccccaccagcaaggggctggggccagggagcagagcttccacaagacatttcgaagtcatcattcctctcttagggggccctgcctggtggcaagagggaatgtcagcaggaccccatcgccatccctgtgtctctacacgctgtattgtgtatcaccgggggcattattttcattgtaatgttcatttcccacccctgctccagcctcgatttggttttattttgagcccccattccaccaccccagtttcctggggcacaagtgtctgtgcatgtcccccaggagccaccgtggggagccgatggggaggggatggagaaacaagacagggcttctctcaggcccagtggccggtcagccacaccagggcaccgcagccaataaaccgaaagtgttacagccaaaaaaaaaaaaaaaaaaaaacttgagggggggccggtcccaaattggccttaggggagcggttaccaatcactgggcggcgttttacaacgtgtgacctgg

SEQ ID NO: 5849 - DNA, 3134 bp, Homo sapiens
ggggggccttccccgcgcagagctccgaccgcgggcggcccaggggcgggcgcgccgctgcatccccatcctcgtcgtcgcccggcacagcgcgagcgggcgagcggcgcgggcggccggagcgccgaggcccggccatggccaccaccagcaccacgggctccaccctgctgcagcccctcagcaacgccgtgcagctgcccatcgaccagcccaatgatgatcattactcagaagatcactagtttggcttgcgaaattcatgatgggatgtttcggaaggatgaagaactgacttcctcacagagggatttagctgtaaggcatgccaagcttactggagtatttgagttacaactgtaacttcatggggatcctggcaggcccactttgctcttacaaagactacattactttcattgaaggcagatcataccatatcacacaatctggtgaaaatggaaaagaagagacacagtatgaaagaacagagccatctccaaatactgcggttgttcagaagctcttagtttgtgggctgtccttgttatttcacttgaccatctgtacaacattacctgtggagtacaacattgatgagcattttcaagctacagcttcgtggccaacaaagattatctatctgtatatctctcttttggctgccagacccaaatactattttgcatggacgctagctgatgccattaataatgctgcaggctttggtttcagagggtatgacgaaaatggagcagctcgctgggacttaatttccaatttgagaattcaacaaatagagatgtcaacaagtttcaagatgtttcttgataattggaatattcagacagctcttgggctcaaaagggtgtgttatgaacgaacctccttcagtccaactatccagacgttcattctctctgccatttggcacggggtatacccaggatattatctaacgtttctaacaggggtgttaatgacattagcagcaagagctatgagaaataactttagacattatttcattgaaccttcccaactgaaattattttatgatgttataacatggatagtaactcaagtagcaataagttacacagttgtgccatttgtgcttctttctataaaaccatcactcacgttttacagctcctggtattattgcctgcacattcttggtatcttagtattattgttgttgccagtgaaaaaaactcaaagaagaaagaatacacatgaaaacattcagctctcacaatccaaaaagtttgatgaaggagaaaattctttgggacagaacagtttttctacaacaaacaatgtttgcaatcagaatcaagaaatagcctcgagacattcatcactaaagcagtgatcgggaaggctctgagggctgttttttttttttgatgttaacagaaaccaatcttagcaccttttcaaggggtttgagtttgttggaaaagcagttaactggggggaaatggacagttatagataaggaatttcctgtacaccagattggaaatggagtgaaacaagccctcccatgccatgtccccgtgggccacgccttatgtaagaatatttccatatttcagtgggcactcccaacctcagcacttgtccgtagggtcacacgcgtgccctgttgctgaatgtatgttgcgtatcccaaggcactgaagaggtggaaaaataatcgtgtcaatctggatgatagagagaaattaacttttccaaatgaatgtcttgccttaaaccctctatttcctaaaatattgttcctaaatggtattttcaagtgtaatattgtgagaacgctactgcagtagttgatgttgtgtgctgtaaaggattttaggaggaatttgaaacaggatatttaagagtgtggatatttttaaaatgcaataaacatctcagtatttgataaaaaaaaaaaaaaaaaaaaaaaaaaaaaacaatccatagtgaaactgtaaacagtaatggacgccaaattataggtagctgattttgctggagagtttaattaccttgtgcagtcaaagagcgcttccagaaggaatctcttaaaacataatgagaggtttggtaatgtgatattttaagcttattctttttcttaaaagagagaggtgacgaaggaaggcaggaatgaagaagcactgcgtggcctccggtggaatgcacggggcacagccgcgactctgcaggcagcttcccccccatgccaagggctctgcgccgtcatgtgagacttaaaaaaaaagttgaatgacttcgtgatactttggacttctaaattaaatttatcaggcataaattatgtagaattagaggctttgaaaataatactggtaggttgctcaaaggttttgaaagagaaatcgctaggtaggttactatctggctaatccatttcttatccttgacaatttaattcatatttgggaaacttttagggaaatgaaaaataaaagtcactgagtctgggtgacattttttaagaataatataaattcagtttcaaactcttctcacattaaaattgtggctgtgaactcttactaaaatgagttttaggttcgtgtaagtggtaaaaatgtgctgtttattttatggggccatttttaccacaactaatcttgcctgtggtttactaagcatctgcctgcgatcccacagaggtactgtggtgtgccacaggagcttgaatagtcgagaagagtgggatttgatgccacggtagtggacgtggtacgtcatgtcctcagatgtgtacctcctgccgctgtatggaggggatgggggcaaacgccattcgtgacttacatcttgggtgtgtgacctatgtatggaacttacttgtactttttgccttactatttttaatgaagatgcaagattttctgtgatggggttctctctctcttttttcggggggtggagtcactaaataaagtttgcaaaaatagtttaagacaaggcaacatctggttatggtatatgatacttcatttaaagaagaaaggcaaagcgaatgccttgcaagttttgaggttcaggaaaaatgggattgggtctcttcgaaggtgaatattccagggatttttattaatctaagg

SEQ ID NO: 5850 - DNA, 2345 bp, Homo sapiens
ccacgcgtccgcggacgcgtgggtcgacccacgcgtccggacccacgcgtccggtcgtgttctccgagttcctgtctctctgccaacgccgcccggatggcttcccaaaaccgcgacccagccgccactagcgtcgccgccgcccgtaaaggagctgagccgagcgggggcgccgcccggggtccggtgggcaaaaggctacagcaggagctgatgaccctcatggtgagtgattaagtgcccagaaccccagccttccatccaattttcagtagcctccttttttccgtcagcttttttgctagacataggggtaatgtaatttgctccctcctgggaaagaagttcatacaccccacctacaccatttcttccagcagtccctcctcccaattccatccccccacacgaagttatctcgaacacttccctgaagtcatacaagaccctccctatccagtgtgtccctacttcctagccccaaccaagctttacccacacccaactccccgcccttcttggtatttctagcctatgaatttggttgctttattttggatcagagtgatgagattaaggggaggctgggcgcggtagctcacaccttataatcccaaagtgctgggattacaggcgtgagccaccgcgcccggccagcaactaatattctaattgaactaaagcacaggatgccaatttacaatccttagaccaaagagtcactgatgtctccaccagataagaggaaagcatcaggctaggcatagtggctcacacctgtaatctcagcactttgggaggctgaggcaggcagatcacatgagcccaggagtttgagactggcctgggcaacatggtgaaaccctgtctctaaaataaaaactaaactaaaaaaactttttaaaaaggcagtggggagcatcagaaccagctcaacagtttgtctactgtccggtcccagagaaactcaagattctagcaagccccttgtgtggggcttgggttgggacatgaggctgctgctggagcttactctgcaactgtttctccaaatgccaggtatatgaagacctgaggtataagctctcgctagagttccccagtggctacccttacaatgcgcccacagtgaagttcctcacgccctgctatcaccccaacgtggacacccagggtaacatatgcctggacatcctgaaggaaaagtggtctgccctgtatgatgtcaggaccattctgctctccatccagagccttctaggagaacccaacattgatagtcccttgaacacacatgctgccgagctctggaaaaaccccacagcttttaagaagtacctgcaagaaacctactcaaagcaggtcaccagccaggagccctgacccaggctgcccagcctgtccttgtgtcgtctttttaatttttccttagatggtctgtcctttttgtgatttctgtataggactctttatcttgagctgtggtatttttgttttgtttttgtcttttaaattaagcctcggttgagcccttgtatattaaataaatgcatttttgtccttttttaaaaaaaaaataaaaaaaaaaaaaaaaaaaaaaaaaaaaaaaaaaaaaaaaaaaaaaaaaaaaaaaaaaaaaaaaaaaaaaaaagaaaaaaaaaaaaaaaaaaaaaaaaaacaacacgaaaaaacaaagagaagcggagcggcccgcgcagccagataaacggacgcggagagacgacacagcgaagagacgcagcacaccccgccccgaccacagcgcgcagccaacggaggagagagactgatatcgcaccagcgcacggccgccgagcacaacacgagacagacgagcagcgacgacgcagtgagaataactgcggcggaaagcacactcactactgcgggtgcaggatcaaacgacaagacaaccacacaatcgagacagagagagagacaagatcaccaaccagatagccgcgcgagtaacagaatcatactagggggagagacgaacaccaccgagtgagcgaataatgagccgcgcacaaagcacaatacggagagacgaacaaagaaccagaacacgagagaacagaagagaaggagaagcaggagaggacgacgagaacggacagacagaaggcgacagagagcgaatgcggaagacactagagcgtacgagcctgacatcttgaggatccggcacccccacacggcacaaagagaaagcgaggcaaaaggaaagaagaagacagagaagacagagaggagcaaggagagagaaaagagcgagaagaggagacaaacgagcacgaaagaacacggaaagaaggcagaaa

SEQ ID NO: 5851 - DNA, 2150 bp, Homo sapiens
  misc_feature (525)..(547): n is a, c, g, or t
  misc_feature (700)..(715): n is a, c, g, or t
agttcgtaaaggagccgggtgacttcagaggcgccggcccgtccgtctgccgcacctgagcacggcccctgcccgagcctggcccgccgcgatgctgtagggaccgccgtgtcctcccgccggaccgttatccgcgccgggcgcccgccagacccgctggcaagatgccgcgctccttcctggtcaagaagcatttcaacgcctccaaaaagccaaactacagcgaactggacacacatacagtgattatttccccgtatctctatgagagttactccatgcctgtcataccacaaccagagatcctcagctcaggagcatacagccccatcactgtgtggactaccgctgctccattccacgcccagctacccaatggcctctctcctctttccggatactcctcatctttggggcgagtgagtccccctcctccatctgacacctcctccaaggaccacagtggctcagaaagccccattagtgatgaagaggaaagactacagtccaagctttcagaccccnnnnnnnnnnnnnnnnnnnnnnntcagtgcaatttatgcaataagacctattcaactttttctgggctggccaaacataagcagctgcactgcgatgcccagtctagaaaatctttcagctgtaaatactgtgacaaggaatatgtgagcctgggcgccctgaagatgcatattcnnnnnnnnnnnnnnnnttgtgtttgcaagatctgcggcaaggcgttttccagaccctggttgcttcaaggacacattagaactcacacgggggagaagcctttttcttgccctcactgcaacagagcatttgcagacaggtcaaatctgagggctcatctgcagacccattctgatgtaaagaaataccagtgcaaaaactgctccaaaaccttctccagaatgtctctcctgcacaaacatgaggaatctggctgctgtgtagcacactgagtgacgcaatcaatgtttactcgaacagaatgcatttcttcactccgaagccaaatgacaaataaagtccaaaggcattttctcctgtgctgaccaaccaaataatatgtatagacacacacacatatgcacacacacacacacacacccacagagagagagctgcaagagcatggaattcatgtgtttaaagataatcctttccatgtgaagtttaaaattactatatatttgctgatggctagattgagagaataaaagacagtaacctttctcttcaaagataaaatgaaaagcacattgcatcttttcttcctaaaaaaatgcaaagatttacattgctgccaaatcatttcaactgaaaagaacagtattgctttgtaatagagtctgtaataggatttcccataggaagagatctgccagacgcgaactcaggtgccttaaaaagtattccaagtttactccattacatgtcggttgtctggttgccattgttgaactaaagcctttttttgattacctgtagtgctttaaagtatatttttaaaagggaggaaaaaaataacaagaacaaaacacaggagaatgtattaaaagtatttttgttttgttttgtttttgccaattaacagtatgtgccttgggggaggagggaaagattagctttgaacattcctggcgcatgctccattgtcttactattttaaaacattttaataatttttgaaaattaattaaagatgggaataagtgcaaaagaggattcttacaaattcattaatgtacttaaactatttcaaatgcataccacaaatgcaataatacaataccccttccaagtgcctttttaaattgtatagttgatgagtcaatgtaaatttgtgtttatttttatatgattgaatgagttctgtatgaaactgagatgttgtctatagctatgtctataaacaacctgaagacttgtgaaatcaatgtttcttttttaaaaaacaattttcaagttttttttacaataaacagttttgatttaaaaaaaaaaaaaaatactattttcagagactttacttgcttcatgattagtaccaaaccactgtacaaagaattgtttgttaacaagaaaaaaatgaataatgcttattatgcatctgaagtgttattttatgtgttagatta

SEQ ID NO: 5852 - DNA, 5371 bp, Homo sapiens
  misc_feature (1268)..(1284): n is a, c, g, or t
  misc_feature (5308)..(5333): n is a, c, g, or t
cactctctgttgtccaatggacacacctgtcgtgttttgagccagcgagagatgcagtggaagtgaaaagcatggttacagactccccatgcgacagtacactcttctgaagtagcggacgcctggttagcttgacattctatgcaaagatccataatgtggttcctgcagatggcacagttatcaaccacaatatcccaggcccagagggctactgcattccactttttcacttcaaagcgcttcttgcccgcgccgctgttggtgccgctcggggtatccacatccatcgctgcgggctgacggagcggccagacgctcggcggcggcgtgtggcaggagcgcaggggcgcgagccggcgatcagccttcccggcgaccgtgccgcgggagctcgagcaactcggactaggggacccgggccggcccccaagatgccggcgatcgcggtgttggcggcggccgccgcggcgtggtgcttcctccaagtcgagagccggcacctggacgcgctcgccggaggcgcgggccccaaccacggcaatttcctagacaatgaccagtggctgagcaccgtctcccagtacgaccgggacaagtactggaaccgctttcgagacgatgattatttcagaaactggaatcccaacaagccctttgaccaagccctggacccatccaaggacccctgcctgaaggtaaaatgcagccctcacaaagtgtgtgtgacccaggactaccagaccgccctgtgtgtcagccgcaagcacctgctccccaggcaaaagaaggggaacgtggcccagaaacactgggttggaccttcgaatttggtcaagtgcaagccctgtcccgtggcacagtcagccatggtctgcggctcagatggccactcctacacatccaagtgcaaattggagttccatgcttgttctactggcaaaagcctcgccaccctctgtgatgggccctgtccctgtctcccagagcctgagccaccaaagcacaaggcagaaaggagtgcctgcacagacaaggagttgcggaaccttgcctcccggctgaaggattggtttggagctctccacgaggatgcgaacagagtcatcaagcccaccagctccaacacagcccaaggcaggtttgacactagcatcctgcccatctgcaaggactccctgggctggatgttcaacaagttggacatgaactatgacctcctgcttgacccttcagagatcaatgccatctacctggataagtacgannnnnnnnnnnnnnnnntcttttcaactcgtgtgactccttcaaggatggcaagctttctaacaatgagtggtgctactgcttccagaagcctggaggtctcccttgccagaatgaaatgaacagaattcagaagctgagtaaggggaaaagcctgttgggggccttcatacctcggtgtaatgaggagggctattacaaagccacacagtgccacggcagcacggggcagtgctggtgtgtggacaaatatgggaatgagttggctggctccaggaaacagggtgctgtgagctgtgaagaggagcaggaaacctcaggggattttggcagtggtgggtccgtggtcctgctggatgacctagaatatgaacgggagctgggaccaaaggacaaagaggggaagctgagggtgcacacccgagccgtgacagaggatgatgaggatgaggatgatgacaaagaggatgaggtcgggtacatatggtagtgcccacaagaaagaggacacaagttttgcacaaaattgcaagtcacttcctattcctgcatttgtatctaagactccaaggcaccaaggtctcttctccattgttgctctctatacccgacctaaggtttggaagacaactgcttgttcccagaggattctgattttgcatatgtttgtatgggagaaagggtgttgtgtttttttttttgttgttgtttattttttggatagggaagtcattggcttaattagagcctccttcctttctgtgagatttttccaacaagcatgtgatttacgtggaattctgacagtgcagggagcccccaccctcttaaatgtcaaagaccctttttgattacccacactggtggttattacagcatggttcccagccttacagtgtctaagtgcttctcttgtgtcctgtagatgttgtgaaaaagaaaaaaacaaaaaatacaccacactgtactttttccccctgcccccgttactgccggtgattattattaaaaattagtttttttcacatcattatatctggcttcctataaacaacagccttaattcagtcaagactccctttgggaattcattttattaaaaattggtgtctggatacttccctgtacatgcataaatatgcatgcatgtacaggaagactgtatgtgtgtgccttgcacacacacccatacctctcagaaaaagtgtttgggtatattaaaaactcgaaaaacaatgataaatttctcagcttgtccagacctggaacaaaatttctggaataagaaatttgtattaaagtccttttttgcactaacagttggctcttgtagcctgcaggctgaggaagtctcttctctgtgcatcagcagagttactgaaagcctctgattgagaaaaaacctccgtctgcctaaatcacttttctcgcagaagccatgcgactcccacacgacacgggcagcttcacaagccatctctttcatttctgcttgaagcccccttggctgcagcaatcctgtctgccataggtttcttccttccttacctactcaagggctttttctaaggcatgcacacatatctcctgttctctgagagtaccatggtgttccttaaaagaagaaaatttctaattctgaactcaatgttttgcttttactccctttctactgacaaatcatgataagggcacaaaagctgtacagatttttttttttaaccactcaatcccaaatggaggcctacaaagaacatcgtaataacacatggaagcaaaccctgggtttttaagagcaaattctgtccccccctcactcccccaagtgacaagatactaatgaagaaagttcttcaccatagtgtttgttttaactaaactcattggagtctagttccaaatttggtagggtcatcatctctacattccttaggatttctctccctatcaagctggcccagatacaagtaccaaacagtagtctctgaagttcccccatttccttcagtaccagtctataagctactgtccgccactgattttcatctatcagggtgtcctaatcagaatcagccacccaagcaagcctctctggcccacatatctatctcttgccttcccccatgaacttcagcctgtccacacaaaagccacataaactcaagcaagaaatatgttcagccaaaacatgattatagtggcagctgaccaatcccccatcccaaattgaccatttagatgtaccaactcaccttaaattagcatgttccaatccagtcggcattgcctgaatacagtagcatcatacctatagttggtcttagataagaaatgaactacttgatatagcaaagtcctttggcttcgtaaataaccctgaggttttgtacttactttccccataggaagacagaccataggcaaactctgttttgggatctcaactccatcacctttgtttcaatattttttttctctcttgaacaaaactgagataatttagaaaacaggtgcttaattgcaataaaattactatgaagtatattaaaaatcacgacattgtaaaatctcactttagatcatcaaagaaaaccattgttactatctcctttgagcttaggaaaatgtacaagagaacaaattaaaattgaaaaattgatttcacttagaaaaacttctaggaacagggtgaaccactgattttaatttgcctaattatcttatgacaagtatcaaattaagatgacacttaaagatccttagcattaacttaatgatggagaagagtgctcaacagacagttcccagtaaggtaatgagatgccattttcagagacattctaagaagatattttgattcattaaaacattaaataaaaagccctcctcagattggaacccccaaatcgatggagccacattaataatacttttcatgcctcactttgacatgacagcattcgatttttttaaagatctttaatactttccatgagtactaaagattgtaatgagttaccttatccttagaagtagaatgtttgctttcttcttcttggaaatagtcctccaaaaagtccacttgtaccagtgacaagaagtcacttgtatagtgaccaagtacacataaaatactgattataaaaatattgtaataaaccacttcctcatttgatacaggtattaagctgaatcctcactaattcacttttgaaaagttcttaatgaacagttttattcttattccatgaacagctcttttaatacaatttccttggtatccaacttaaatcccagaattttgttccaccatggttagttatttgccatatgaatgtattcttgtttctaccaatattctaggcatgagaataccttaatactgagttggagattttgtatctgtttctcctcctttacgcccattttcctacccacagcagcaaatgacaacgtgtctgtccaggtctgtccccctgctcatcccaggatgccactcacatttttttcttcttgttaccttgaccacgctgtacagtaacatccaagagcccattctacagtgggtggttttggtctttttataactttttctcaaagtcactgatgtttgttcctgttaaatgtatagcattgtaatgagagcccatcaaatcctgagtgtcagtttgttgtccctattgtagatgaaatagtgatgtagcaaaaacctagtaaattctgaatgcttttccacgtagacttatctggaatgtgaacacaactctttggttaatagtaaatgcttaactgtagtcctgagtaggtgcatttctgtctgtctcaataaattttactttgtctgcaaaaaaaaaaaaaaaaaaaccacaaaaacaaacgtgtgttgcgggcgcgcccttcggccccctggagaaaagagctttctcaaagaacccatttccgttgtgggcgcggcggggcccccagatgatgtatagcggtgacaccggggtccaaaacgagtgtccccaaaagaaaaaccgcgggcaagaaaaggtcgcgnnnnnnnnnnnnnnnnnnnnnnnnnncgcgggggacaaaccacgctgtcgtgaacaatcccgag

SEQ ID NO: 5853 - DNA, 3033 bp, Homo sapiens
tgtattgtgactatcagcattctggtgcaaatgaacttttctccatcatcgactgtggaaaattgatacttttaaagcatattcttctatgagcacaggtcctcctagtgaagcttagtttgacaaagggtgtcatatgctttcctaacctgatttgtagttaacattcacagagcctacattttctcattagggttatgatgctcagtatctttccaagtgccaggcacgggcttccttttctgatcaaacataccattttttgtatttcacaactatagacagtcacttctgcagtcccaatttaaaaatgcagaactgctttatccaagaatgctgaaaaatactgttctatccaggtttcctaaactataaaagcagattttgcttttgtttgttaatcataggcatggccgagcattgtggattagcctgaggcttaaaatcagatgcatgtctggtaagatgaccactgtctcactatcaagagcctgcagagccattttccagacctgtgattgcccagaacacatagtccccacgtttctaatttggagcaaatctaaaaggtgctgagggattggacagctctgactttcctcgagactatggatatagtccttctcggattagctggaaatggggacagagttctcatttatcccagacatatacattggcttttttggaatctacagattgagattttgatgaatttatattggttttaatgagacccaaatgactctctcttaacaattcaagcagtagacaaagttgctcacaaatacagaaaacatctttttgtctacttcgcaagtatcaaaacgtgataatatttaagcccatttgtagaagaaatcttgtatatactatattacaccttgatatctatacaaaacatcacttgtattaaaacatgtagataactttctggcatttagaattttgttccattcatttgatttgttcatctgagaattttttttttttgcctgaaaacccattaaaagaaaacgtgccttctgtataagtttatgtttattcctacattttatacatttttaatgtatgggtaattggtggcacgtgactttacataatgactttctagactctgaaaaaaatgcttttatcatttttgcaattcagacaagggtaaacattttactttatgtaattgccacatcccaagatgtaaaacggcagtaatttatgaccacatatggaagaaattcttcaaatagctaccttacatttctgcgtatatatgaaaactgagtgatatttctcagtgtatttgcttgcatttgaatggttcaattctgttgtgtttatgtagaaaattcacaaatctgttcatttaattttttaatttgagaatttttatttcttttgactgaaaacacattagaacctatgagtaaattctgaaggttttaagatttacttcagcttgtcaccagtttcaaataaatccctaataggtaacaagtaaaatacaaattcttgtctactttcatgtggttttaaatggcagggacttcgctgagtcagtaagtataatcactctagtttattcaaggatgtgtggcaactttcaacttccatacgtatatatgtatgtatggaaggccatgtcaatactagtatcattggatataactttgattcttaatcagagggcaaattcattagagaagaatctttagtagatacacagactaatatttgtgtggaggttcttttgaccaattttattcctaagaataaacaaacccctacagttaaaatgcaaagatgcctgtcatctaagtattgaaagaatttttgcctttcaagagttgttttttaaaaatttaataaattcataaaaaagactcatatctctgcaaacaaaagaagggcagatactgggcttctacatgctatccttaagagcttctccccctcacccattcctagtgctcttggtatacacttgggaaaataatgtcctccaggagaaagtgttagagggaactaacattttaggaatgcttattcagaaaaaaatcctagagttgattcattgttttcctccatcctgcaaaagaagatccctttgttaagcagctcacttggaaatatgattcttggagtcaatgatctctaaacaaactggattatcaactatttacaacgtctatacagtataaactacctcacttgcctttcttgggaaaaaaaaaatgaatggactttaacaattgttgttacaaactgtgcctgaatcttattatttaaatcacttcagttagctttcagtgtatgtttaataatatacatttaatgatgaaaaatattttcagcaaagctttaaaaccagaaatactgtgtaactgtgatctatgtggtatactctgagagaattctgtgtcctgctcattgtcttgagtttctaaccatgtgcagatgcaagcgttcgggagtaggaattaatgtccatcttttctttcaggcattttcatctgctgtccacgtatttcacttgactgaaagctcatatgagttaaaatgtcccttcttcctagcgagcatatttcaactgttcttcataaatgtttatgtgccttaaaagactttatgttaaaggattaaatagtttctctgacaggcagtttttaactgttttccacaaataaaaataatatgtcatgggattaaaatgtttgttttcaagcatttttaacagttttacacacttacatacaccttaattaaaaattttttttctgtcagacatttaccattttctaaaactaatttgacaaatcatgacactagaaaacgccaatgttttatgtctttgcccatctcaaaagctaatattgattcttctgtcccatcagctttcattgttaagtagaatatgtatgttgcattttatccataagaaataaagagaaaaaaactaaaaaaaaaaaaaaaaaaaaaaaaaaaaaaaaaaaaaaaaaaaaaaaaaaaaaaaaaaaaaaaaaaaaaaaaaaaaac

SEQ ID NO: 5854 - DNA, 1292 bp, Homo sapiens
ggacgtgactgggaggagcctgcccgccccggctcgctgcgccgcgcgcacagggcccgcgccagcgaccatggcggagcccacagtgtgctccttcctcaccaaggtgctgtgcgcccacggcggccgcatgttcctgaaggacctgcgcggccacgtggagctgtcggaggccaggctccgggacgtgctgcagcgcgccgggcccgagcgtttcctgctgcaggaggtggagacgcaggagggcctcggggacgcggaggccgaggcggcggccggcgcggtgggcggtggcggcacctccgcctggagggtggtggccgtgtccgggactataggtgcatgccaccatactcagctaatctttttaggtttttagtagagacaaggtctcactatgttgcccaggctggtcttgaactcctaagctcaagcagtcctcccgccttggcctctgaatgtgctgggattacaggcatgagccactatgcctaaccatattttttccaatattaaaaaatctttttttccccctaaggaatgtgttatataaggtcaacatgtttttagtgcttcagtttgacttgtctacatctaaagttaactctttaaggcttacatttatgattataattctttccatcgagggatttagtctccattattgtcatgtttcttgatttttttcattatacttggttcttctttttgtctaggttttatatataccttaattaattctttcttggctgttttatatctatgttgctgtcagcatgggaatctctattattagaaagctattaacttttaaaatatgtatcttttggtgattttctttgttctaacagttttagatggcctgtttgctctttctaaatataaaatcataggtatttctattttgtttttgtgtttcataaaattgtaataagtttttttgatattttttcattacatatgaagttaattgttggttttaaacaaatgttctttgttaggataacagaaataacatcttctattcttgtttgttggaagctaaaagcttgataaaaggaattggtgtcttttgatacaatcaaatttttatcacttaaattgcctaatatgattataataagggtttttgtaatattaaaacatccttaaattcctgagataaaactctacctggttatagtatatgttcttttaatgtattatctttcctatttgctgtacatctatacattcataaataaaattcatttatattttagaaaaaaaaaaaaaaaaaaaaaaaaaaaaaa

SEQ ID NO: 5855 - DNA, 2864 bp, Homo sapiens
gtggaccggtccggaattttcgggatccccctccttgttgctaaggtccggaccgtcatcccagcaacagcctcagtcatgtgaccggcaatggcggcgctgacgagaggtaggtgagcccggcgccccccacacccaccgcgcgccccccgggccccgctcgcacccctcacgcgccccccgctcccctggcgccccctcctccacctcccctccccgcgcgcggctccgggctccccgctccgtgcccggccgatcatctttctagcaccctccagccttggcctccattcgggggttctgagggctgcgatcgggccgacatgcacccccacccggcggtggggatccgggggctttggctactgagggatgtggggagttggttccgggtcgggtcttggaggaggccgtggggggagggcgggagctgcttcagtggatgcccccagggacccttgcccatccgggctgtgcctccctctggcctctgtctggagggagagactggttccttgtccggcctgggttgccacagaggaatcacagacccaccctaaactggggctccgcctcccttttctgtgccagcaggacttggacctaggacacctaggtcctgggtcccccgtgatggggagagaagtgttgcatcgcggatagactgtatgggctgagactctagggttccattttcacttatgaatctcgaggtgcatctggccttgggggacgatgatggaggcatgaagggacagctgctccttcttggatcagtcaataaatggaggtctcagtcatgtgaccggcaatggcggcgctgacgagagctgcatttggaagtgttgtggagacagccccgtagcccaatgcgaccagactcagggaaaacatcaggcccctccagctgagcccttgtgtgagccccgcccctccctaaatgccagacttgggagctgacagacagcactgcctgtgctgggtttaaaagtcctggtcagctgagtggaaatagaaggatttctgctgccatcatcttccatgggctttccaggtcacacgacctacaagtagggagcagggaaagaagagtgagcctgcatgccaattctaagctcttcaggatcaaatgtcgttcgtcctgtccagaatggcagcctgtggaggcacctgcaagaacaaagtgactgtgtccaagcccgtgtgggacttcctgagcaaagagaccccagcccggctggcccggcttcgggaggagcaccgtgtgtccatcctcatagatggcgagacttctgacatctatgttctcccacagggtcctcccccggcccctccaaatgggctctacctagcccggaaggctctcaaggggctgctaaaagaggcagagaaagagcttgaaagaaagctcagaggcagggggagctgatgggctgcctggctctggggggtggaggggagcaccctgagatgcaccgcgcaggcccaccccctctccgagcagccccacttctgcccccaggagctcgggggctcccccctcctcctccccccctgcccccacctcttcctcctcgccttcgggaggaggcagaagagcaggagagcacctgccccatctgtctgggggagatccagaatgccaagacattggagaagtgccggcattcattctgcgagggctgcatcacccgggctctgcaggtgaaaaaggcctgccccatgtgcggccgcttctatgggcagctggtgggcaaccagccccagaatgggcggatgctggtctctaaggacgccaccctcctactgcccagctatgagaagtacggcaccattgtcatccagtacgtcttcccgcccggtgtccagggggctgaacacccaaacccaggagttcggtatcctggcaccacacgggtggcctacctcccggactgccctgagggcaacaaggtgctgaccctgttccgcaaggcgtttgaccagcgtctcaccttcactatcggcacgtccatgaccacagggagaccgaatgtcatcacctggaacgacatccaccacaagaccagctgcacagggggaccccagctgtttgggtacccagaccccacctacctgacccgggtgcaagaggagctgagagcgaagggtatcacagatgactgaaggacatcgcctttgccaaggcccctgctgtctgcctctactaggacccagcagaagcctctttctcctctctgccccctgccccccacaccacacctgtaggggacctgtctgactgggaagggagttccgagagggagggggcaatcccttcccccatcccccactggccaagtgtttcaatgcagtgtgagccactcccttctggcagaggccgacctccaaggctctgttctcccctccccgtgtacatatactcccggtttccctgcccctccattgcccttggctttttctggtatgtgctgtgctccacgaccaagccgagaaaggacctagggtggggaagggagggtctcttgattcctaaccgcccccacatactgctccaccgctgaacttcgggtgccggggaggagaaattgggctgatgtgagctccccgtcacccgccatggagccggctgtgtgtgttcatcagatacagttctcccttaaccttgtcctttctctcctgtgtctcagtctccgtcagtctgtctttctccgctcttctctgacccctgtgaggaacctccttaccctgttctggaatcgctgccagactgtagcttttaatttaataaaaataaagtaaaatatgcaactctttaaaaaaaaaaagaaaaaaaaaaaaaaaaaaaaaaaaaaaaaaacccc

SEQ ID NO: 5856 - DNA, 665 bp, Homo sapiens
ggaaatgaaatgcttatgttctagttaaagatgcgtattgatgatgatatttctgaaatctactacaacaaaagcagagatcttctttttttttttttttttaaagcataatcccacaaggacaaaggaaacaagaagaggatgacagcaacaaggtttcagaagccagaaagctgatgaatgatcagtgcctaacagcatgagagaaaaacaaatgctaagacatcatggaaatactggaaggtgaccgagtgtacactgttacggaatcacccaaaggttcgggccttagtgaccttgggcacttacaggagtgggggcaggaaagcgggttatgaaaacaggagcgctggttgaagtctcttcaagaagcagttattgagaatccctctcccctcggccaagggagcgtcacagtttcccctccattccaaggtttcatgtcaagagaggacagagttacaggtgcctagactgggggcagtctgcacagttggggcactggcagcacacagagaatagggagcttcggggaaggatcccacagcccagcccttctctcccactcagccggaaaactctggcagcgggacttaccccctctgaacagtggactgggggagctttctttggggaaatctcactttaactttaaagaaaagatc

SEQ ID NO: 5857 - DNA, 3377 bp, Homo sapiens
  misc_feature (865)..(924): n is a, c, g, or t
ccccgcgctgcgcggagcagggaccaggcggttgcggcggcgacagccatggccggcgcgctggcaggtctggccgcgggcttgcaggtcccgcgggtcgcgcccagcccagactcggactcggacacagactcggaggacccgagtctccggcgcagcgcgggcggcttgctccgctcgcaggtcatccacagcggtcacttcatggtgtcgtcgccgcacagcgactcgctgccccggcggcgcgaccaggaggggtccgtggggccctccgacttcgggccgcgcagtatcgaccccacactcacacgcctcttcgagtgcttgagcctggcctacagtggcaagctggtgtctcccaagtggaagaatttcaaaggcctcaagctgctctgcagagacaagatccgcctgaacaacgccatctggagggcctggtatatccagtatgtgaagcggaggaagagccccgtgtgtggcttcgtgacccccctgcaggggcctgaggctgatgcgcaccggaagccggaggccgtggtcctggaggggaactactggaagcggcgcatcgaggtggtgatgcgggaataccacaagtggcgcatctactacaagaagcggctccgtaagcccagcagggaagatgacctcctggcccctaagcaggcggaaggcaggtggccgccgccggagcaatggtgcaaacagctcttctccagtgtggtccccgtgctgctgggggacccagaggaggagccgggtgggcggcagctcctggacctcaattgctttttgtccgacatctcagacactctcttcaccatgactcagtccggcccttcgcccctgcagctgccgcctgagnnnnnnnnnnnnnnnnnnnnnnnnnnnnnnnnnnnnnnnnnnnnnnnnnnnnnnnnnnnncctggatgacttcatggacatctcagatttctttaccaactcccgcctcccacagccgcccatgccttcaaacttcccagagccccccagcttcagccccgtggttgactccctcttcagcagtgggaccctgggcccagaggtgcccccggcttcctcggccatgacccacctctctggacacagccgtctgcaggctcggaacagctgccctggccccttggactccagcgccttcctgagttctgatttcctccttcctgaagaccccaagccccggctcccaccccctcctgtacccccacctctgctgcattaccctccccctgccaaggtgccaggcctggagccctgccccccacctcccttccctcccatggcaccacccactgctttgctgcaggaagagcctctcttctctcccaggtttcccttccccaccgtccctcctgccccaggagtgtctccgctgcctgctcctgcagccttcccacccaccccacagtctgtccccagcccagcccccacccccttccccatagagcttctacccttggggtattcggagcctgcctttgggccttgcttctccatgcccagaggcaagccccccgccccatcccctaggggacagaaagccagcccccctaccttagcccctgccactgccagtccccccaccactgcggggagcaacaacccctgcctcacacagctgctcacagcagctaagccggagcaagccctggagccaccacttgtatccagcaccctcctccggtccccagggtccccgcaggagacagtccctgaattcccctgcacattccttcccccgaccccggcccctacaccgccccggccacctccaggcccggccacattggccccttccaggcccctgcttgtccccaaagcggagcggctctcacccccagcgcccagcggcagtgaacggcggctgtcaggggacctcagctccatgccaggccctgggactctgagcgtccgtgtctctcccccgcaacccatcctcagccggggccgtccagacagcaacaagaccgagaaccggcgtatcacacacatctccgcggagcagaagcggcgcttcaacatcaagctggggtttgacacccttcatgggctcgtgagcacactcagtgcccagcccagcctcaaggtgagcaaagctaccacgctgcagaagacagctgagtacatccttatgctacagcaggagcgtgcgggcttgcaggaggaggcccagcagctgcgggatgagattgaggagctcaatgccgccattaacctgtgccagcagcagctgcccgccacaggggtacccatcacacaccagcgttttgaccagatgcgagacatgtttgatgactacgtccgaacccgtacgctgcacaactggaagttctgggtgttcagcatcctcatccggcctctgtttgagtccttcaacgggatggtgtccacggcaagtgtgcacaccctccgccagacctcactggcctggctggaccagtactgctctctgcccgctctccggccaactgtcctgaactccctacgccagctgggcacatctaccagtatcctgaccgacccgggccgcatccctgagcaagccacacgggcagtcacagagggcacccttggcaaacctttatagtcctggccagaccctgctgctcactcagctgccctgggggctgctttccctgggcacgggctccagggatcatctctgggcactcccttcctgccccaggccctggctctgcccttccctggggggtggagcagggtccaggtttcacacttgccacctcctggaggtcaagaagagcagagtccccgtccctgctctgccactgtgctccagcaccgtgaccttgggtgactcgtccgctgtctttggaccgctgtgtttcaatctgcaaaatggggatggggaaggttcaatcagcagatgacccccaggccttggcagctgtgacattgggggcctaggctggcaactccgggggctcaacggtggaaagaggaggatgctgtttatctgtcacctccacttgctccccgacaggtggggcacagacctctgttcctgagcagagaagcagaaaaggaggttccctctctctgctccttcactgctgacccagaggggctgcaggatggtttcccctgggagaggccaggagggcctgatcccaggagacaccagggccagagtgaccacagcagggcaggcatcatgtgtgtgtgtgtgtgtggatgtgtgtgtgtgggttttgtaaagaattcttgaccaataaaagcaaaaactgtctgctggttaaaaaaaaaaaaaaattgaaaaaatgaaagattaaaaaaaagaaaaaaacattaaaagaaaggagtaatttgaaatttaggggcgaaagagaagagca

SEQ ID NO: 5858 - DNA, 876 bp, Homo sapiens
ggaacatgtgtctttaatatcaaatatggctttatttgcagtgaaatctaaattccttattctacagtagtattttcttgccctgtgttgtatattttcctaaatacatttttcctgacagtggctttaggccagttgaacacacttagactgaaagtgtttaacttaaagagatcagtccagaaaccatgataaattagaatctttatctggaattaccaaatttaaattttaaaatcatggttaagaagagaacaaacattcatggttttttttatcctactgctcatttttaggtctgtgtttacatctagtctctactatttgtgaagtatgtcattatttttttcaagttcttctttgacttaactgaaaaataatattccaaattcttaatgtaacatgaaaagagaaatacaatttttgcttaaaagacattttttaaaaagcgttcaattcagtaatcatttctgttaatacaggaagtttttttggcttgccagttatatactgtgggtattttttaaaatgtgctacccttgggttgtctcatatcaccttgcgtaatcatgtattacaaaggttgataattgtcatttctcagatgtctgtatgttacattggcagcagtaaaatgttttaatgttgttaccttttaaataattgtgttgtattaacatgcctcatattttctggggaaacttgaaatatatctaaacaaaaaaggtctgttataaataggaattggcatttcattgttaatgttttttcctcataaaaatagttacaccaaaagtgacatattgtctattacatgggcccaatcagtattaaagtactccccttactcaaaaatattaaaaaataattcatgag

SEQ ID NO: 5859 - DNA, 1418 bp, Homo sapiens
  misc_feature (360)..(374): n is a, c, g, or t
agcggggagcgggcgcgcctccttcggtttggggctaattataaagtggctccagcagccgttaagccccgggacggcgaggcaggcgctcagagccccgcagcctggcccgtgaccccgcagagacgctgaggaccgcgacgagtcgtgtctgaacccggcttttccaattggcctgctccatccgaacagcgtcaactccatggcgcggttcctgacactttgcacttggctgctgttgctcggccccgggctcctggcgaccgtgcgggccgaatgcagccaggattgcgcgacgtgcagctaccgcctagtgcgcccggccgacatcaacttcctggcttgcgctaatgagaatgnnnnnnnnnnnnnnnttctctgaaaatttgggaaacctgcaaggagctcctgcagctgtccaaaccagagcttcctcaagatggcaccagcaccctcagagaaaatagcaaaccggaagaaagccatttgctagccaaaaggtatgggggcttcatgaaaaggtatggaggcttcatgaagaaaatggatgagctttatcccatggagccagaagaagaggccaatggaagtgagatcctcgccaagcggtatgggggcttcatgaagaaggatgcagaggaggacgactcgctggccaattcctcagacctgctaaaagagcttctggaaacaggggacaaccgagagcgtagccaccaccaggatggcagtgataatgaggaagaagtgagcaagagatatgggggcttcatgagaggcttaaagagaagcccccaactggaagatgaagccaaagagctgcagaagcgatatgggggcttcatgagaagagtaggtcgcccagagtggtggatggactaccagaaacggtatggaggtttcctgaagcgctttgccgaggctctgccctccgacgaagaaggcgaaagttactccaaagaagttcctgaaatggaaaaaagatacggaggatttatgagattttaatatcttttcccactagtggccccaggccccagcaagcctccctccatcctccagtgggaaactgttgatggtgttttattgtcatgtgttgcttgccttgtatagttgacttcattgtctggataactatacaacctgaaaactgtcatttcaggttctgtgctctttttggagtctttaagctcagtattagtctattgcagctatctcgttttcatgctaaaatagtttttgttatcttgtctcttatttttgacaaacatcaataaatgcttacttgtatatagagataataaacctattaccccaagtgcataaaaaaaaaaaaaaaaaaaacaacaaaaaaaaaagcacaaaaaggggggggggcgccaaagaaattccccgggggggggccaagttaggggtcc

SEQ ID NO: 5860 - DNA, 705 bp, Homo sapiens
  misc_feature (138)..(194): n is a, c, g, or t
tgtggaaactgtcaagggttgttcatctctgcctctcgccaggaaatacactgaattgcaagaattaggtactacaaaaagatgcatattttatattaagcagttacatttagaagtaaactggttacttgatggcannnnnnnnnnnnnnnnnnnnnnnnnnnnnnnnnnnnnnnnnnnnnnnnnnnnnnnnngcatatatgtatgtttttttttttttttttactcatgtataaaacacatatatccacatatgggttagtagtagtatttgttgaacacaatttttggttttcacacaaatgcaccttttcaaaaatcaattgttccttctcccaacataccccaggctggcaaatgacaaatgaaaataaaatccctgctggaaatagtggtataaaaagcattttccattttatgtgcacttttcaacccagagaaaataagaaatttgttttatttttgtgcagtagtttctaaaatataatcggagagatgctagtaaacatttaactttagattagctttctcaaaacttttaagcgctggaatgaaagatttgcttacattctgaagctggtgcagggtatcttttttaagccttctttggcatctcattttcacgcaccatctgagatgacttgggaaacaccagaaaataacaacactacttccacaaaacaactgcctggacagtgcctattt

SEQ ID NO: 5861 - DNA, 2143 bp, Homo sapiens
caattgttattattatgtcctacaagcattaaaaaaaaaaaaaaaaaaaaaaaaaaaaaaaagatggcggcgcccaggccctgccacgcagacttccgcccggcgcgagactcgagagctggcgccccttctctcccaggcaacatgtcggaaggaaacgccgccggcgagcccagcacgccgggagggccccgacctctcctgactggggcccgggggctcatcgggcggcggccggcgcctcccctcacccccggccgccttccctccatccgttccagggacctcaccctcgggggagtcaagaagaaaaccttcaccccaaatatcatcagtcggaagatcaaggaagagcccaaggaagaagtaactgtcaagaaggagaagcgtgaaagggacagagaccgacaacgagaggggcatggacgagggcgaggccgtccagaagtgatccagtctcactccatctttgagcagggcccagccgaaatgatgaagaaaaaagggaactgggataagacagtggatgtgtcagacatgggaccttctcatatcatcaacatcaaaaaagagaagagagagacagacgaagaaactaaacagatcttgcgtatgctggagaaggacgatttcctcgatgaccccggcctgaggaacgacactcgaaatatgcctgtgcagctgccgctggctcactcaggatggctttttaaggaagaaaatgacgaaccagatgttaaaccttggctggctggccccaaggaagaggacatggaggtggacatacctgctgtgaaagtgaaagaggagccacgagatgaggaggaagaggccaagatgaaggctcctcccaaagcagccaggaagactccaggcctcccgaaggatgtatctgtggcagagctgctgagggagctgagcctcaccaaggaagaggaactgctgtttctgcagctgccagacaccctccctggccagccacccacccaggacatcaagcctatcaagacagaggtgcagggcgaggacggacaggtggtgctcatcaagcaggagaaagaccgagaagccaaattggcagagaatgcttgtaccctggctgacctgacagagggtcaggttggcaagctactcatccgcaagtctggaagggtgcaactcctcttgggcaaggtgactctggacgtgaccatgggaactgcctgctccttcctgcaggagctggtgtccgtgggccttggagacagtaggacaggggagatgacagtcctgggacacgtgaagcacaaacttgtatgttcccctgattttgaatccctcttggatcacaaacaccggtaaaatgagcaggtggaggaggacggcgcctgtgcccacggctgctgcctgctccagacattttgttcttgaatctgtgagacccagaaggggcccactgagcccactcactccagcctttggcaaccattgttccaggtcccccagggcttcctcccacagcagctgtgaatggcacagtgaccttcctgcagcgtggagatggcacatccttgctgctggggacttggccctgctatttatttttgtatttatgtcttaatctcttccactgatgcatcctccaagggtagatggggagggtctgtgtgaaggggctggcttctcttggtgcctgctgggttgcaggggcaggaagcgtgtggactgcagcttctgctggtgctccccccgtcctcctggaggcagtataggagagagagcaaggattgagtctgagacttaagcactcggtcccagcttgccagttcctggttctgtgtccttggaaaactacctaacctttctgagcctcctatacctcatccgacacaaatggggatgatacctacctccagggttggcgtgaggattcatgggctattatagatgaaaactgcacaaggccagaaccagcaggcactcaataaacgttcatgtcctttttctctaaaaaaaaaaaaaaaaaaaaaaaaaaaaaaaaaatctcatttccgcggggttatcaaaagaggttcacacggatcggggccccgggcttctaatctgtgtattctgcacccgcgctttttgtgtgtacccaagaggcggaataatctgccgtggc

SEQ ID NO: 5862 - DNA, 2524 bp, Homo sapiens
ggatctctctcggctgcttttttccactggtaacttctgaggctgagatcagcagctgatagaaccatggcgaccattgctgctgctgcgtttgaggccctcatggatggagtgacatgctgggatgtccccagaggccccatccccagtgaactccttcttattggagaagccgccttccccgtgatggtgaatgacaagggccaggtgctcattgctgcctcctcctacggccgaggccgcctcgtggttgtgtcccatgagggctacctgtcgcatgctggcttggctccatttctcctcaatgcagtgagctggctctgtccctgtcctggggctcccgtgggagtgcatccatccctggcacctctagtaaacatcctacaggatgctgggcttgaggcacaggtcaagccagaaccaggagagcccctaggggtttactgtatcaatgcctacaatgacaccttgactgcaacgctgatccagtttgtgaaacatggagggggcttgttaatcgggggccaggcctggtactgggccagccagcacggccctgacaaggtgctctccaggttccctgggaacaaggtgacaagtgtagccggagtgtacttcactgacacctatggggacagagaccggttcaaggtctctaagaaggtgcccaagatcccactccatgtcaggaggattccctgggagcacccaccagctgagatctgcacatcagccacaatcctctcaggacggcggaaagggaagggctcagctgccagcctggccacagcctgcatcatctcatcccagaggcggagcacaggctcggggtccttcagggcctgaaggtttgtggttggcactgtcaggatgatgttgtccgtggccagctctccccagggagccaggttctcctgcatctgcctcttccactcctccagcgatgtcttacctgggaataaatatcatggaacctaccacacccacttctccaacttcccttgagctgaaaaataccatttgaactctggaagaacattgcaataatgaactactatcacaggtgtctataggctgtaaagtgaagaaaaggcttcctgactcttctctttgtctgccctgaagtctccatggacacagggtattccgtatcttctgcctccatgttccctcccaacagttcttcctctttctctccaccaaagctcatccctctcccatttagcaaccaccccacagttcccacggcatctgccactcttcctcctccctaaatgttcactccacttacccagcttgtagtatggggcaggcacagctcccctgatagtgacaggcacagggcctagttggctgcccttgggcacgatgacgtagaggaggccgccccagaggcaggagactgaccgctcagtcctgtccatccagcattggtgagtcaccacgggggctcgagatagcttcctggccttggtaaggtcatcggtgtggcagccaatctgtacctggacaggtgattccaccaagcgttggagaaattagagtctttgtgatgctttgtgatgtgcgtgtgaggttgtgtagatggaaggtattagacaaacatgcccatgaaaccccagcttcccttttctatgtgctaggcatggaaacttatgaaattttagcactccaaagtcatttggacttcaaggcatttaaaatcatttttctaaggatttaaacagctccactataagtcttcacctgacatgaattggtgagagaccaggctgatcctggcaaaggtcttgtgtctttctgccaggcaaaatcctgggttcttctagcaggacctaagccagtctggggacgctgatattgaggatgagctgggggactctgctctgtcctctgtgaacacacaggaggcccatccagagtgagtgaggttgattctctctccctctttgcccagagcttccctttctggccgccagatgggtggagatctgttttgtctggagtcctggagttgcttttcttaggtttgatataagcaagctccagaaagaatgctgacagaaaagggaccctagctgtggtaggaagtggccctcagagtcaaggaggcaggatgaatttaaattctgcatgtagggcatattttggggagtgatgggattatgcacacccttcaggtgtcaagataaagagataaaaccagagtttgtacagaatgagcttgctgacacacagcctaaatttgtaccgcatgtttcatactaactccctctgagtttgcacatgggacccatgaggaggcatgaagaggtaactgcccatgcccgaggattttccagcccttccttttctttctgtcaatcacctactaatcacagaatccactccctacaccttttctactaaaataactctttaaaataagtacaatgggacagatttgagctgggctcctgtctccttgttaatcaaattgcaataaaatgttttcttttaaaaaaaaaaaaaaaaaaaaaaaaaa

SEQ ID NO: 5863 - DNA, 2757 bp, Homo sapiens
agcggccgccccctcgcccgtcacgcaccgcacgttcgtggggaacctggcgctaaaccattcgtagacgacctgcttctgggtcggggtttcgtacgtagcagagcagctccctttctgagacagaaggttgtgttggggaactgaagcagtttctgtgggcggacagggaaccctgcgtttctactgtgtgattctgccaccttcctggcccgacgccatgggagtgacttgtgtgtcccagatgcctgtggccgagggcaagagtgttcagcaaaccgtagagctccttacccggaaattggagatgcttggggcagagaagcaaggaacattttgtgtggactgtgagacttaccatacggccgcctctacccttggcagccaaggtcagaccgggaagctgatgtatgtgatgcacaactcagagtacccattgagctgtttcgccctctttgagaatggcccttgccttattgctgacaccaactttgatgtgcttatggtgaagctcaagggctttttccagagtgctaaggccagcaagattgagacccggggcaccaggtaccagtactgtgacttcctggtgaaggtgggcacggtcacaatggggcccagtgcccggggcatctctgtggaggtggagtatggcccctgtgtggtagctagtgactgctggagtctgctgctcgagttcctacagagttttctaggcagccacacaccaggggctcccgcagtgtttgggaacagacatgatgcggtctacggcccagcagataccatggtccagtacatggaactcttcaacaagatccgcaagcagcagcaggtgccggtggctgggattcgttagtgatgagcagctgccagctgagctctgtcaccaggggtactccacaggaggagcaggtgctgactttcaggtccctggaccccagaaacccagggtagacatggactctactctccttctctggttctcagctgtggcttttgttctggggctgagtcccctccccaaccccctgactctcacacatagccccccatcagctgttttactccgtgccttactggatttggcctgtcctcaagaatggtaattatgaagagtggagaagtttggaccttgcctcctttaggggaaaggtaggacaggaatgtccctgcctggtactggtgggggaaatagtccgtatccccaactattaaggatttgtcccaggccaatggtgaacatgctgcattttatgtttggattgtgctgtaataagagcctcttccttccctcagaggatgtggctgggcttctatcctagagatggagtagaaggcacaactggtttgatagttactattttctgacctgtttgctgaagtgatttgcgaattgactttcctagggtgttgcctgagtcctttgaaatctccttctgacatctttcccttctgttgtgaaatatgttaagccacaggccaaactgctataagatcgaagtttgtttttttctcacctaataatagagaggtaatcagatggtctagggcagatttaactctacaaggttatcaggaactttgtttccttctgtcttattcagccattcccagtatgttttcttacccataagatcaaagcagactcatcagctccatatctgcattccactggggaaagagagagagaaaagagcagatttttaaaaaaagatatgactgagcattgctcagatcactgtggccacactttgctgaaagagatgctgggacatagaacctcttatctgggcagtcatgtgctgagttaaaactcagggattctgtgactacaagatgaaagacaatttggttgctgagatgcagttaatggcttctgttacatggagctcaatggacgtgcccaggaatgcttttggctgttattttgcagttaatacctcctgtaactaaagcatttgtttatgagttgacttgagagaagggctgatctcagagccgctttgagctaagttggattagtcacactaggaagttaattccacacctttcgtctaagtctcagtattgaggcctctccagttctcatgcaccctgatcttagggttagaatacttgaccctgatacctgcaccatgcttcatggttcctgagctctttctcctgtttcatttgagcctccaaactacatatttggtcatattgcctgcctaccccatgcctgctgcagaaatattcatccaggttaaccttgatatacacagagatggtcttggagaattgtgaatgtatgtactgtattgtcatcaaggatactgtcccttatttgaaggcatctaaagagaaactgttttcagatccaagtgctcagatctaaagcctctgcaacaagtcaggtggtggtcatgtttcccttctagttttggctgacaggaagctcagttcagtaccataactacagaacctgtcatctgtattttttgttctcaccccgtttttgttattttgtttctggttttttatattgaggtatgttttagatatagtttacaaaaataaaacgcacagatcttaaaaaaaaaaaaaaaaaaaaaaaaaaaaaaaaagatttgccgcgtgccggcactaaaggccaatgtaactcggccctgctcctcggccggtttgccggcaccaggtgtatcttcgctcaccaccgctcactccagcgctatcctcccgccacgagggatcggccgggtgctttatgtcggc

SEQ ID NO: 5864 - DNA, 798 bp, Homo sapiens
agctttattctccagtcaagatgttgtgatagggaggggaggaagaaaaggccaaaaaattccatagttagcgaatatacctttcttacttaaaattctttttccaatgtgagccttctaaagagttactgagaaattaggtgagctcacctcatttaatgcagtagatatgtttctgaaaaataagcaatacataggacattggccaattaagaattttgatgaagaagaattttcacatccgaaagagtaaaaatgaaaaacggtacaaatgtagtggcttttaaatttcaaaacaaattattttgataagataaatattcctctcataaagtgaaaatggaagagactgcttgctgggtgttcgcaaaatggagttagatggtctgtcccagactcccctgttgttagttctgagaacagaagtaatggtgcttcttcaggactggctcatagaaacctgccgtgttcagcccccacaatcctctcccttctgctggctggaaacaaatgacaacgaagcctcacgtcttggagaaaccacactgctgaggaactcaagtcctagaagaaccatttgaagagacccatctcactaaagaaaatcacacaagcaagaagtaaacttcattgtatctatgtatttaattgtcataacagtctaccttaactgatacagcaaaaattcgctccttttctggacacccagtttcaaaatctcagtgtcattttttacttctctcttttcaggttgtttaatataataaaatttatgtgtgtgaaaaaaaaaaaaaaaaa

SEQ ID NO: 5865 - DNA, 687 bp, Homo sapiens
ttttttttttttttttttgaaaaatactttaattccatattaatattctataaaaatagtcaatggaaaccaaaagaatttctacaagtcactaagtaaaatagattggattcattactacattaattccagaaatatttattggtcactttctgtgtgctagaaacattttttatacgatgataaatgaacaagactgacaatttcttgcccattaagggttacattctaataagcgataaagacaacaataataccagggagctgagtaatctaatacaaagcaagacaaagccagggtcactggaagcagcagtggtctttctgaggaagttgcagctgatcaccaacctgaatgaagtgatgtaatggaaaatagaagtgtttgaaggaagattgctttagtaactgaggaggagagaggaaagaggagaaactgcacaagtgggtagagatgggaaagtccatggcctatggggaaggtgaggaagttgacttttattttcaatgtgccgtgaggctgttgagatcactcagaattgggaaagaaacagaccatgtgttccaatagaataccattagctgttgttataataattcactgttatttattgagcagttatattttgtcaggcactattggtgctgctggttttacatatcttattattaattcttcataacaac

SEQ ID NO: 5866 - DNA, 1305 bp, Homo sapiens
aggactggagatgtctgaggctcattctgccctcgagcccaccgggaacgaaagagaagctctatctcccctccaggagcccagctatgaactccttctccacaagcgccttcggtccagttgccttctccctggggctgctcctggtgttgcctgctgccttccctgccccagtacccccaggagaagattccaaagatgtagccgccccacacagacagccactcacctcttcagaacgaattgacaaacaaattcggtacatcctcgacggcatctcagccctgagaaaggagacatgtaacaagagtaacatgtgtgaaagcagcaaagaggcactggcagaaaacaacctgaaccttccaaagatggctgaaaaagatggatgcttccaatctggattcaatgaggagacttgcctggtgaaaatcatcactggtcttttggagtttgaggtatacctagagtacctccagaacagatttgagagtagtgaggaacaagccagagctgtgcagatgagtacaaaagtcctgatccagttcctgcagaaaaaggcaaagaatctagatgcaataaccacccctgacccaaccacaaatgccagcctgctgacgaagctgcaggcacagaaccagtggctgcaggacatgacaactcatctcattctgcgcagctttaaggagttcctgcagtccagcctgagggctcttcggcaaatgtagcatgggcacctcagattgttgttgttaatgggcattccttcttctggtcagaaacctgtccactgggcacagaacttatgttgttctctatggagaactaaaagtatgagcgttaggacactattttaattatttttaatttattaatatttaaatatgtgaagctgagttaatttatgtaagtcatatttatatttttaagaagtaccacttgaaacattttatgtattagttttgaaataataatggaaagtggctatgcagtttgaatatcctttgtttcagagccagatcatttcttggaaagtgtaggcttacctcaaataaatggctaacttatacatatttttaaagaaatatttatattgtatttatataatgtataaatggtttttataccaataaatggcattttaaaaaattcagcaaaaaaaaaaaaaaaaaaattctggggccaaggttaccgtccggtttttgggaaggcctaagggggattaagaggggggggttaaggtggggggaaagtctggcttggagacgtcttgggggatggacacgaaaccggaattagtttggacgc

SEQ ID NO: 5867 - DNA, 1610 bp, Homo sapiens
  misc_feature (5)..(5): n is a, c, g, or t
tactnaaagacatatttagctttaatttctatttatgctaaacatatttataagtagtctgtcaatataataccaactatttttatttttacataattcaattatttcatttgacatgtcacgcgtccgaagacattaagtaaaaaattggaactatgatttttctttgtcattttttaaaaaagaattattttattaacctgctggcatataatctggagttcttttcacaaccttactttttctgatttgctttattgaatgattgaatactcatttctttctaaaaatatgttgtaaattctcccttggcaagatttctccctatgagggtagttattatttgagtctgccaagtggttaccatggggcaaggtgccatgatgtattcttgggtgcattggttttttgcgcattgtaaatttaagacacttatagtaagtggactcattcatagatgagtttcagaaccttttacgttctcggtagaggcttctgtcggacaggcagaagagtgtattcctcacttttttttttgtcttcaaattccagtaaggcatagcacttttaagaaattagaatttttctatcatctatgcaaatgatatttatgttaatattaaatatcttatgttacactgggagtaatttgaggtgcaattatttttattactactttgaatagaggaccattatccttctttcttcagaaaactaagaagtaagtgtaacttttaaagtaagtatatatcagtgagagtaggcttgttttacaactatttctagccagtgagttgtgttttcatgtctcatcaaaagacaataccacattgcatcattttacaaaatatgttgtcattttcatttcagttgtaacataggaaaatagatatttcctagatgatttctgagtttcttactgcaaagaacagttataaattggtatacatgtgtctctgtaatagggataatattgatatatctgttgctacatatttaagaatcattctatcttatgttgtcttgaggccaagatttaccacgtttgcccagtgtattgaattggtggtagaaggtagttccatgttccatttgtagatctttaagattttatctttgataactttaatagaatgtggctcagttctggtccttcaagcctgtatggtttggattttcagtaggggacagttgatgtggagtcaatctctttggtacacaggaagctttataaaatttcattcacgaatctcttattttgggaagctgttttgcatatgagaagaacactgttgaaataaggaactaaagctttatatattgatcaaggtgattctgaaagttttaatttttaatgttgtaatgttatgttattgttaattgtactttattatgtattcaatagaaaatcatgatttattaataaaagcttaaattctcatctaaaaaaaaaaaaaaaaaaaaaaaattttgggggcccggcccggaaagttttacaccatcttgggggcggcccgatagaaatgtccacgttcccagaaccggccaaagtgtgcgtcccccaaaaccgggggcggcttaaaccagggtgggctgtcaagcaacacccg

SEQ ID NO: 5868 - DNA, 2428 bp, Homo sapiens
  misc_feature (2417)..(2417): n is a, c, g, or t
  misc_feature (2423)..(2423): n is a, c, g, or t
tttttttttatatatagacataggtataatacatttcatataactgagaatttatacaaagcgtattctgagtttactcactttctccacaatgtttccttttctccttgcaataggaaaaaaaaaaagaagatgggttttttaagtccaatatatgttattttcttcttttttggagtcaaagtacattgccaatatgaaacttatcagtgggatgaagactatgaccaagagccagatgatgattaccaaacaggattcccatttcgtcaaaatgtagactacggagttccttttcatcagtatactttaggctgtgtcagtgaatgcttctgtccaactaactttccatcatcaatgtactgtgataatcgcaaactcaagactatcccaaatattccgatgcacattcagcaactctaccttcagttcaatgaaattgaggctgtgactgcaaattcattcatcaatgcaactcatcttaaagaaattaacctcagccacaacaaaattaaatctcaaaagattgattatggtgtgtttgctaagcttccaaatctactacaacttcatctagagcataataatttagaaggatttccatttcctcttcctaaatctctggaaagactccttcttggttacaatgaaatctccaaactgcagacaaatgctatggatgggctagtaaacttgaccatgcttgatctctgttataattatcttcatgattctctgctaaaagacaaaatctttgccaaaatggaaaaactaatgcagctcaacctctgcagtaacagattagaatcaatgcctcctggtttgccttcttcacttatgtatctgtctttagaaaataattcaatttcttctatacccgaaaaatacttcgacaaacttccaaaacttcatactctaagaatgtcacacaacaaactacaagacatcccatataatatttttaatcttcccaacattgtagaactcagtgttggacacaacaaattgaagcaagcattctatattccaagaaatttggaacacctatacctacaaaataatgaaatagaaaagatgaatcttacagtgatgtgtccttctattgacccactacattaccaccatttaacatacattcgtgtggaccaaaataaactaaaagaaccaataagctcatacatcttcttctgcttccctcatatacacactatttattatggtgaacaacgaagcactaatggtcaaacaatacaactaaagacacaagttttcaggagatttccagatgatgatgatgaaagtgaagatcacgatgatcctgacaatgctcatgagagcccagaacaagaaggagcagaagggcactttgaccttcattattatgaaaatcaagaatagcaagaaactatataggtatacacttacgacttcacaaaacctatacttaatatagtaaatctaagtaaacatgtattactcaaagtaatatatttagaattatgtattagtataagatcagaattgaatttaagttgttggtgacatctgcatcatttcataggattagaacttactcaaaataatgtaaatctttaaaaatataaattagaatgacaagtgggaatcataaattaaacgttaatggtttcttatgctctttttaaatatagaaatatcatgttaaagaaagtgagtgtatcatttctattaacagtaatttttctaaaaatgaggaaggaagtagcattagcagtaaagacccacaggccatgacctttttgatcactctgaggacaatatttaaatgacaggaaggtatattaatgtaacaagcattcatttaaggaatagaccattttctctgacctcttcttcaggaaagctttcacactggtatttgtgatctcaccattatgacatccatccccctagctcaccacatagcacatagaatgatatttttgatttgtaagaggccatccaggtactaaggacccaaggcatacagattcacaaaattaactaatctttttgcctcagaataccaaaacaacaaaattataaagctgtatttggacaactaaaaaacaccaaactatctcattgcaatttgtattttagcagatttcagcaactatcctaaacaatgttattgtgttccattttaactgggataaatgtttttgtaaaaatacaaccatagaaaggcctctttgttacaaaatgatttgcaaagaaataactgctttgtttgcaagattaaattagtgttggcaaaataaagttctaaagataatactaaacaaaaaaagcttatcagcccatatctacataagctaaaattgaatccagttcctttataattggatgacagggtttaacatcttctttaaaaccttaaaaatcactttttcgtnatggantattt

SEQ ID NO: 5869 - DNA, 4370 bp, Homo sapiens
  misc_feature (1930)..(1944): n is a, c, g, or t
  misc_feature (4359)..(4359): n is a, c, g, or t
  misc_feature (4367)..(4367): n is a, c, g, or t
aaaccaataaggttaggacaagagaatagctgtggtttgcgttgcaaaaaccaaaaaaaaaaaaaaaaaaaaaaagaaagccccgaggctccatgggcagacctacaaggctgcgcaaacaaatcgagggatgagattctgctgtttctttgtctagggttctcagatgctatctgccgctgctgtttggtggggaaggagcgctgggcgcaaagctgttaccaaacagaacggtgggagctgatggctccgagtttggggcgaggtagaaactctccagtgccacttccgactttaagccttcctgttgccgtccactgtggcgggtttcttcctggggaacacgttttcgctcagtcgctcggcagcccgagcctgcggcagcggccaggcgcctgccccctgcgccgagctttcccctgcagaggcgctccactcccagaagcgccgcggctgcaccagagcgcctgagagcccccgcgcgtacccatccaggagcaaaactatgtcaggaatggaggtttgctaacccagaaaattcgaaggaacacattaaactggtggatgcagcagatgtaagcgctgtgcaaacatctcaagccagttcagatgttgctgtttcctcaagttgcaggtctatggaaatgcaggatctaaccagcccgcatagccgtctgagtggtagtagtgaatcccccagtggccccaaactcggtaactctcatataaatagtaattccatgactcccaatggcaccgaagttaaaacagagccaatgagcagcagtgaaacagcttcaacgacagccgacgggtctttaaacaatttctcaggttcagcaattgggagcagtagtttcagcccacgaccaactcaccagttctctccaccacagatttacccttccaacagaccatacccacatattctccctaccccttcctcacaaactatggctgcatatgggcaaacacagtttaccacaggaatgcaacaagctacagcctatgccacgtacccacagccaggacagccgtacggcatttcctcatatggtgcattgtgggcaggcatcaagactgaaggtggattgtcacagtctcagtcacctggacagacaggatttctcagctatggcacaagcttcagtacccctcaacctggacaggcaccatacagctaccagatgcaaggtagcagttttacaacatcatcaggaatatatacaggaaataattcactcacaaattcctctggatttaatagttcacagcaggactatccgtcttatcccagttttggccagggtcagtacgcacagtattataacagctcaccgtatccagcacattatatgaccagcagcaacaccagcccaacgacaccatccaccaatgccacttaccagcttcaagaaccgccatctggcatcaccagccaagcagttacagatcccacagcagagtacagcacaatccacagcccatcaacacccattaaagattcagattctgatcgattgcgtcgaggttcagatgggaaatcacgtggacggggccgaagaaacaataatccttcacctcccccagattctgatcttgagagagtgttcatctgggacttggatgagacaatcattgttttccactccttgcttactgggtcctacgccaacagatatgggagggatccacccacttcagtttcccttggactgcgaatggaagaaatgattttcaacttggcagacacacatttattttttaatgacttagaagaatgtgaccaagtccatatagatgatgtttcttcagatgataacggacaggacctaagcacatataactttggaacagatggctttcctgctgcagcaaccagtgctaacttatgtttggcaactggtgtacggggcggtgtggactggannnnnnnnnnnnnnntccgctacagacgggtaaaagagatttacaacacctacaaaaataatgttggaggtctgcttggtccagctaagagggaagcctggctgcagttgagggccgaaattgaagccctgaccgactcctggttgacactggccctgaaagcactctcgctcattcactcccggacaaactgtgtgaatattttagtaacaactactcagctcatcccagcattggcgaaagtcctgctgtatgggttaggaattgtatttccaatagaaaatatttacagtgcaactaaaataggaaaagaaagctgttttgagagaataattcaaaggtttggaagaaaagtggtgtatgttgttataggagatggtgtagaagaagaacaaggagcaaaaaagcacgcgatgcccttctggaggatctccagccactcggacctcatggccctgcaccatgccttggaactggagtacctgtaacagcgctcggcactttgacagcgcacagctgctctgtgaccagggacagatccagcaggccccagtctcgcatcagcgccggcctccagaacttagcaatttccgcctggtgatgcgcagttgctgtcagtcttgacctctgcctttgtggtgaatggaggaccacgtctatttcatcagaacagctgttgactctagtactgtgaatccagtgaaaataagccatgagaatgttttagcacagcgttatgtgtctgccacattaactacacggttcaaacctgtgaagaaaggacctgcaaacgcttcagttgttagcattttcaatgtgatataaacagcttctccaatacagcaaacctaattgcacaacagagactgaaatgtgtttcctgaataccagtggaggaattttcttgtaaagaaggtttactttttggtgtctcatacccagggtaatctgtacatctctacttatttatgaacagactttttttaaaaagataaaaaaacagctttattgaggtataattcacccaccagacttttttaaacatcaaataattgaagagacaatagcattagaaataagtgattaaaggcctctgcctcacaacatggcaagtacagtactttgaattttagcacattgcataatagttttaagtatgtctaatttaaacgtataatatgtacatcactgagacaatcatgtacagaaagaatttttggtgtaaatttgtaataatggataattcttttacatattgtttagggaaatgatattgaaaggtagcaatgcctggatagtgaagcatgaggcagcacgtgcacaaattcatgtgccgtgccttatctgagttttcggtataaatatgtagataatggatttttttttagataatgttgtcaagaccaaaagcatggatgtcaagtgtcagtaaggattttgttttctaaaattttttcctgcatcagttcttctgagggccttgatgaaataacacagcagtttcttaaacaatttgaaacaaaatgagctctcctaccacctcactttttcatttccacactaatgtattatatgtaactacttggaaaaaataattattcaaatgcttcttcccacaaagaatatagatgatagtagatatattttattaataaaatggttcatgaatcggagactaacaaagttttcatgtgctcagaattattaattatcgtgtctgcattttctttcgataaaggaagacacacgatgctaatccggaaatcagcaaactttgcattactccctatgtgcgtattttctctttcttcctgtcaccctgaggaaggttcattgccattgtcatcaccatggaaacaacgttcctctccacctgcattatgtactacatgacaggcatcaatctggggaaataataaaattatcacctttgtcagaccataagagtttctccaaaagtggtcagtttggctgggcaatattttctctcatctaacaaacacaatccattgtcatgaaattacccttaggatgagtcttctttaatcaatcatatattgggcggaaaaaacaccagctttgacccgaagtagttgaagagctacttcattcttttctgaagttgtgtgttgctgctagaaatagtcatttgtgaattatccaaattgtttaaattcacaattgaattagttttttcttccttttggcttgaagcaaacagttgaccatttttaaccttttcattttatgtttttgtactctgcagactgaaaagacaaagtttatcttggccttactgtataaaggtatgctgtgtccaccgttgtgtacagaatttttcttcattaattttgtgtttaagttaataaaatttatttgtgatgtactgtaaaaaaaaaaaaaaaaaacctcgaggggggggggcccggntacccaantcc

SEQ ID NO: 5870 - DNA, 1883 bp, Homo sapiens
  misc_feature (1816)..(1816): n is a, c, g, or t
gttggccagactggtcttgactcctgaccacgtgatttgcccttcttggtctcccaaagtgctaggattacaggcgtgagccaccacacccggctggtgattagaaaattttctaattggtacttggaaagtttcagacactaggaagtaaatgttaagaaggtgaaatacaatgttgtgttaggaggggattaggaagaccgttttgtcattgtggtcaggaggagatgacatttgagttgaaaccttaatgataaccaggtggacatgtgaaaatgtatccacgtgtaaggacgagccacaacacaggaactgaaagaccaaatgacaggggcttggtgagcaagcgggagcacgaaggaaggaaaattcaaagaggttagaccctaggtcatgtcacgatcttaaaggccatgctaacagtttggaattgtacaataagaatgatgggaaagcattggagagtttgaaggtgagtagtggcagaatcccacctgtttctgacagaagtccccctggcactggatgaggaatagattataggggctgtgaatgagagcagagattattaataaggaaacagtgattcccttccacaaagtagattctgttaattggtagagagtattcatcagaacacgtagcagggttgggaaaggaggcaaaataagtagaaataaggagtttatggtctagttgagatgaaatattttcagaacattgcaaatgagaaagataatgtcatgaagctaaaccaagtgacatatttatatactttaaaggttagcctgaaaccaaagccaattagactccatgtgtataatgaggactttaatatcacatgctttgaaatattacgtatttttcataacctgtccttcagaagcaatcacatggtatcattcgatcaaatttaaagtgatgtccttggatttttggcagtaggaaacttttgacattttaagtggagatgtttaaaattattatcatttttctggatctcatgttttaggaatgtacagtgtaaaatatcttgtcatagaagtcacattaaagtgatgttaatgtgaaatttaaatctggaaaagcccccaagtggtttatctgtacttgaagttacttgtttttctgttcttttcctctccaatacatgcaggaaaatacatacttttttgacattcatatagattgttcttattacaatcatccattcatccgtttgcccaacaaacatttattgaccacctacattgtatcttttttgtttttctttaaataacatactactattagttgaaagtatgtgagcatttgtctacgggagtgttttgactttaccagagtaccttttcaatttctgtctttgttgtatcttcattttactgttaattctgcaggggttctcgtttatctttgaattgtaattcttattgaaagtaaaataaaaaaattatgcataagtatataatttgaccacttttccaaatttctataatatgggcttttatagctttttaaaaaagcaggaatagtttctttttaaaaaaaaaatacattgcattttcaaagtggctgtagtttgaacaattttgagagtagagcagaaaattggaaaccaagtcatttaatctttaatgggtaaataactctattgtaatcctcttaacgtgttgtatgaattatgatgacttaaatttgcatagactattctctcctgagtctaagagattatgtccattgagttgtaaggtacttttgaaggtatgtcattggataacgaaatgtgtggcacttctttaaattccccagtgatctntcactgggaagggcatcccacccacccccacttccccaagggacgatgtaatcatagagatggtaac

SEQ ID NO: 5871 - DNA, 443 bp, Homo sapiens
tttttttttttttttttcgggagtaactatacggctgcgagaagacgacagaagggcaacagtacaggaagttgggtagatgtggggacaacagagagactgtggcagaggcaggactgcagatctatggaaattgcctggaagagtcagctgtaagggatgagaatcctgagggtaaaagagaaaagggaaagactcctctttgatcttatgaagctgaaataacaagatcttaaacatgagtgagaatctgttgccccaacctaaggtgactttaaatccaaggtaaaaaacacggcatgggtattagtttgaatagggaaaatgagaactctctttgagctcaaaaaaaaaaaaaaaaaaaaaaaaaaagtagtatcgatgtcgatccctgattgatcatgcacaatgatccagagtgtaaggatgggagaaagaataaa

SEQ ID NO: 5872 - DNA, 3567 bp, Homo sapiens
cgcagaggtgtcctcagtgcccggagaggttggcagtgtcggccccgagggaagcgtggagcggacggccgacaggggatttctgcccaaacttcatcaccaactctttctgagagcaaaaacatggggccgagtccggcagctgcacgcataatccaactctctggcagctctcggcaccgacgagctccagatcccgcgttcgcatcccggcgctttgcgcgcagagctaagccttcggacccgtggactgcagcccccgcgcgtcgcggtaaagcgggtcgcgtctccagcccccgaggcgcagcgacggtgggagccggctcggcgttgggggcgggggcggggccggcgaaaggggagggctgcgcggcggaagggaagagccgcggcgacagacggcggcgcgcaccaaccgggcgccggctggcaggaaccgcgcagaagctggtccgagcgcgttgcgggcgcccggcgtaaggggagtcgggtagcagcatcctcctgggcgccgctttcgcgcggcggcggcggctgcggcggggtctttctttgcttaaatacctcgttggccagaagcgctggtaccgggggcgggttgggtcgggtcgggcagtgctgcacacctgggtttccttgcctagagctgtgtgttcggggtcctttggtccagtcggaggctgcggagcggcgggggttgcctgcgctgtccgcccgggcatcctcccggtgatggaagcagccgccgccgccgctgcggggtcgcgctgtgccccatccaccgctgccagagaggtgggaaaattcgccgcacggaggccgaaagcgagaggggctgcgccgctatgccgggagctgagtcccatataagccgcccccagccatcgcccccagccggcttcgttcccctgagcgagacaggaagctgcggtcccgagaaagcggaggagacgtcgctggagccgggaggcgccgggttcggcggagcgcggagcggggctctgggccgcgtgaaagtttttcttcccgagccgcagggcgcccgctgcccggaaactgcccagggataagtcggccgactccccagacccctcgaaggtgcggggacccccagcggaagcgagagggagcgaaatcgaggaacgagtgacagccggacagtccgccgggcggtgatccggggccgctcccgggcgcgccctcggctccaggtcctacccggagccgctgccatgggagagccagccttgggcgctggggaccagccgccgcgcccgcctcggagtcgcggcccgagtcccggcgccagcagccagcccgctgcgtccccttcccgggctgcagggctgcctccgccgcgccgccggcccggattgtgcctgtgatgagccgcagcccgcagcgagctctgcccccgggcgcgctccctcggctgctccaggctgcgcctgcagccgcgccgcgtgccctgctcccgcagtggccccggcgcccaggacgccgctggcccgcgtcccctctcggaatgaaggtgttccgtaggaaggcgctggtgttgtgcgcgggctatgcactgctgctggtgctcactatgctcaacctcctggactacaagtggcacaaggagccgctgcagcagtgcaaccccgatgggccgctgggtgccgcagcgggggcagccggaggcaagctgggggcgcccagggccgcctccggccgggccgccccgtgctcatgcccgtttggacctccgcactccttaccgccctcccgctgccgccgtcggggcggctcctgcagccgcggcagggatggcgggggttgcggcccctccaggcaatggcactcggggcaccgggggcgtcggggacaagcggcagctggtgtacgtgttcaccacgtggcgctctggctcgtcgttcttcggcgagctattcaaccagaatcccgaggtgttctttctctacgagccagtgtggcatgtatggcaaaaactgtatccgggggacgccgtttccctgcagggggcagcgcgggacatgctgagcgctctttaccgctgcgacctctctgtcttccagttgtatagccccgcgggcagcggggggcgcaacctcaccacgctgggcatcttcggcgcagccaccaacaaggtggtgtgctcgtcaccactctgccccgcctaccgcaaggaggtcgtggggttggtggacgaccgcgtgtgcaagaagtgcccgccacagcgcctggcgcgtttcgaggaggagtgccgcaagtaccgcacactagtcataaagggtgtgcgcgtcttcgacgtggcggtcttggcgccactgctgcgagacccggccctggacctcaaggtcatccacttggtgcgtgatccccgcgcggtggcgagttcacggatccgctcgcgccacggcctcatccgtgagagcctacaggtggtgcgcagccgagacccgcgagctcaccgcatgcccttcttggaggccgcgggccacaagcttggcgccaagaaggagggcgtgggcggccccgcagactaccacgctctgggcgctatggaggtcatctgcaatagtatggctaagacgctgcagacagccctgcagccccctgactggctgcagggccactacctggtggtgcggtacgaggacctggtgggagaccccgtcaagacactacggagagtgtacgattttgtgggactgttggtgagccccgaaatggagcagtttgccctgaacatgaccagtggctcgggctcctcctccaagcctttcgtggtatctgcacgcaatgccacgcaggccgcccaatgcctggcggaccgccctcaccttccagcagatcaaacaggtggaggagttttgctaccagcccatggccgtcctgggctatgagcgggtcaacagccctgaggaggtcaaagacctcagcaagaccctgcttcggaagccccgtctctaaaaggggttcccaggagacctgattccctgtggtgatacctataaagaggatcgtagtgtgtttaaataaacacagtccagactcaaacggaggaagcccacatattctattatagatatataaataatcacacacacacttgctgtcaatgttttgagtcagtgcatttcaaggaacagccacaaaatacacacccctaagaaaaggcaagacttgaacgttctgaccaggtgcccctcttcttctttgccttctcttgtcctctttctcctatttcttaccctgtcctccacctgccttccattttgaagtgggatgttaatgaaatcaagttccagtaacccaaatcttgtttacaaaatattcgtggtatctgtgaacatgttaagagtaatttggatgtgggggtgggggtggagaaaggggaagtggtccagaaacaaaaagccccattgggcatgataagccgaggaggcattcttctaaagcagacttttgtgtaaaaagcaaaggttacatgtgagtattaataaagaagataataaataatattctttttaaaaaacaaaaaaaaaaaaaaaaaaaaaa

SEQ ID NO: 5873 - DNA, 716 bp, Homo sapiens
ctcttctgggaacttgctttttgttttttgtttgtttgtttttttgtttttgagacaaggtctcaaaaaaaagaaaggcatggattgctagtatttttgaaaggctttatacactacatacggcttttaataaacctttttgcagcaagagggaggaaaagagttttgtttgctttaggaggtagggaaatgtggtaggtgtttcatgcggcctaggaggaggatatgaatgaatggatactatggaatgccagtgatctcgataaggtgggaaccatcctgttcatgttcttttaaggctggttttaagcactatgggtagctgaattttctggctttaagaaaatcatttccattagccaaatatattggccatactataggccttttataattttgttagcaagattatcaggactcaggcaatcaactgtatttcatttctagcttggacagtctggtaattaaatgttgattggacatcagctttgtcaagacacttttacaaagaagtacagtgcatatcctccatcccatagggcttttgggttccaactgcgaagacaacactcttattggccacataggtaggacagtgtaagtaggggtcatgtttatatttcagacagccaaagagaaaagatactgagaacttgggcctctgagaatcatttacctgtgggtggttttgtttcaccttggccctccggctcttt

SEQ ID NO: 5874 - DNA, 3650 bp, Homo sapiens
  misc_feature (29)..(29): n is a, c, g, or t
  misc_feature (2144)..(2156): n is a, c, g, or t
ccccaagggtgaaaggggatcctgaagantcccgcctgaatgttccccttactggatcaagaaacagggacccttcctaacgaaaacagcccagagttcccttgaaatcaggcaggaagttcctttaggagacaggaagcccagagctaattgataatatcccgaacgacagaggaaggaatttccttattagaaattctaaaataaaacaagtggggatttggttggatacccttagaagctacatttttctctcatccctaagatagatatctcaagtgtatatctgacacctcttggctttgacacggctctgcttctcaagtgaccatttgttttaagtctgttgtctagaattctttgtgggggctggacctctgaaaaagattctcactgcagaggctttaaatctgtgtttttttccactccctccgtcctgggatgtattcggtaggacatttcatttatatcaggatattggctgattcagctctctttcatcgttattattcaggcctccctccaccaccttgttctttattgcctaagtattgccctccccaattcttcatcgtaatagctctaaatttagtttgacccaaattaatttttgttccaacagatatattttaagacagagaagcctctctcaggagccagatgatctgaagatgatgctaatccccaaatacgaagttcctccagctaactctcctctgagctccctcttcttagctttgggattggggatggtctcatccttgccaggaatccctttgttgctcccagtgtctctgatgagcttctcctccctcccagagacaatgcaggggtggttttcagcagaatgtgccacctgcacttctgattgttctgagacccagcccagaggggtggagaaggcgcacaaaccctattccaataaactgcctgcagagaaccacagcctgctaatagtcgttgaggtctcagccccctaaggtctccaagctcatttgaccagcgcagctgcgacttcggctgtctgcctctggcaggtgccaatatcagcatcttgtcccactgccatggggagttaatttttgctccagggcagctgccaagcccagcaccggcatcaatagaaggttttctctgattttcttctcttcctctcaggctgggctttcttaccaatccccaattttcttttgtagggcgccaggagactggccagagatctttagactcttacttagtttgaacatctcttgctgctcacacccaggcttcttcagcagaaagcatgacccatagtaggtactcagaaactggttgaatgaaaagccttgacatttaagggctttattctgtcatacggtagcaagaactggcctattggcatcgtattcctggcattgagctgtattgaccctgaatgtgtcctcctgaggtttttgagggtgacctgggagaaagggtctgaaaaagcattgggatccaagtgactttaaatctgcccgtggcatttcctgctgagaggcgagaaactagcatctctcccaacaggctcacatccgccaggaaggacagagcccaaaacgggggtagactttgtgggaaattcgccagttagtccgctgagattttaatctgcctcaagcacaggatgctgacaagaaaggtagaccactcccccgatcccagacaaaccccaggggtgacaacttctccatcagtatcctgagaagcaacatcaaatgcttaccaagtcagcacgtttactgagtgagtactctgacggaataaaccagcatttggagctgaacttgagaacacagggccctctgacagcagcttagggaaacacccatcccttccagattggcagaatccttccatttcatgtccttcggagacgctgtattctctttacaaatcattcatgaaactgaagctcagtctcccaggggtaagtcctgggccacgtgcaaacaatggcaaatccagctcttccatgatagagaaggcaaacacacccaccttcatcctgagcctaaaaggccacctctgagcacttgggcagccactcctctgggcctcagagggccatgagcttggccaggtaggcacagcgtgacttccccgccgctggtcgcacggcnnnnnnnnnnnnngtgggaataggagatgccagagctgctttagctgaggaaagcaaacagtcagcagtgctcaaaggagcaaaacttcgaatgtgcacattgacccctgacacctgcaagcataacacagatcctaagactagagtgaagtaggaagaagaattagaaaatccagtggatgtcctgagtatagggaaccagggccgttgaaaatcagtaaaggttgattacctggggcgagaccgggtgactgtggcagtgcaggtgaaggtaccctggaccttctcagttcgctggcacataaggctccgccaataaagcgtggttctctctgtcatacacacacacacacacacacacacacacacacacacacacacacaatgattggagggctatatgatccagcattagcttcctggtgtgccaagcatgcttgatcgggaatttttttttattattattattttttagctgtagctgaaggcatttctcggatgtggagaggagaatggaaatcgcagaaccaaatcagtttgccctgccatatttggctgtggtctgtcattgggcatttctgatgtgcttttctggattcaggaagagctgattgtcctccgagggttgaaaaaaaaaaaacagtttcagaaacctgaatccagggccttatagttctcctcattatctatcttcttctcccttccctcgcccaagggagtgggggaaacacttttcactgcagagtttgctttaaagttttcccatcttgcgtgcattatcccttgatattaaaattattttctcagtttaatccaactcctgctgagaagctgtgtgagatttaggctgtggggtttttttcttgtactcttttggatggtgttgcatttttcactcttaacccgagggtgtgtttcagcttatgttcgttctgtttcatgcaggtttatagcacggtagagtagaaggcggcttctgatttttagggtatttttagaattcattcctgagtgaggggttcagacacccagtctcctcggaacaggggtgaggggtcgactgagctttgttgagaagcctccagttaggcttcgggcgggtctccatgttatattgtgtgtttactgagcttcccactggtagaagatgacacatttgtccatcgtcctgtgtatctgctttccagaggacaccggagcattctcctggggtcactcccacatggctgcctcacatagctgttttgcaacagcctttattgccaacacccttggaagaacatctcctgtagaagtacaagttttgcaatatggactttggaagtggttttgtgatgttcgaattttctgttagcctattgctcaagcactacagaatgtacatagtccctttggccatcctctcaccccagaatatcctaataaacattgttttcttttttaaaaaaaaaaaaaaaaaaaaaaaaaaaaaaaaaaaaaaaaaaaaaaaaactagaggggggggaaa

SEQ ID NO: 5875 - DNA, 2029 bp, Homo sapiens
aatgctttttttttttttttttttttttttttttttttttttttttttttttactttttaattttttttatttttccatctaaaatggcaaagagaacatttacttttgatcacttaacaaggacacacccaggaaatttgattttctcaacattaggaggatgaggggagtacagatggaaaaacaaaagataaaacacaaaaggagtacataaaacattgtttagtacaaataatgaaaaatgacttcatgacattttccaataaaagttatttttacagattttgcaatgctgtaaaaaccaggtatattgaaaggggttatttataggttaaaaataaagccattgatgagtgataatcagttttaacagagttcacgcaattatcttagctggaaagctactgtcccaagtgacaaaatttatgtcctgacacatgattacatattaaatcattttgtaaaagaaatgattctgtatgtgggactgacagctcttgagaaagtgctatacaaacaaggttatagaaatgttgaagtgattgataatcttaaaataccatacaaaaatgtgtaaacaaaaggatggtttagagttgcagggcattataaaatatgtaattttagttaagactaataataatatttttgtgcactttaaaaatggttagtgtaatcttgtaagttcaaagctgggttctcagtgagcagcaaaaggtgttagatgcatcaccacacttcacaggacctcctgaatgactgcagatgtgctgtgtaccttcttaaggggctttggctgaccttatgagagcaggagctcaccatgcttatgggtgactatatcaaaaagatctgcaataaggctcacctgggagatgctctagcattcaaattcctatactcctcttttatctacgctgtcagatgaaaactgcttactgcttttaaaagatataataaacaatataaattctgatagtaaagcactataaaaattaggtatgatatttttggcacaaagcactttttaaacccaagctcattttgcaaaatatatgtctagagtttatcatttgaaaataaaaacatatacacaatatgtaaatggttttataagtgaattaattagaatgtacattttcttaaatactgcacataccttcagcttactccagtaccagacatctgcatgcacaccccacattctacattacacagatattgcacaagtttcaatgccaaaatactaatgcagtctggcaagatttaggcctcgtgccgaattcggcacgaggtgtcgggccccaacggagacctggggatgccggtggaggcgggagcggaaggcgaggaggacggcttcggggaagcagaaagaatacgctgccatcaactccatgctggaccagatcaactcctgtctggaccacctggaggagaagaatgaccacctccacgcccgcctccaggagctgctggagtccaaccggcagacacgcctggagttccagcagcagctcggggaggcccccagtgatgccagcccctaggctccaagagcccccaaccgggacccaaccctgcctccctgggctaggctctggcctgggcactcaccccctggcttagacaccttctcaagggctggccttcagggacccctggtgggtctgcctgcctgggccacccttcctgcctgggcctccccttggcctacctgggccagcccccaccacctggcatgccctcctggggccaagagtgggcctgcaacccacccacttgcctgcccacccaactcctgggcgctccccactctgcccaggccttgagtgtccacattaaatgggtctcccacaaaaaaaaaaaaacctcgtgccacaaacatcacgactaaagaataaaaaaagaggaggcggatcataaatctcaccggggggcgccacgataccgccaccacatcgtgagacaggggggcccagaaggaggatataaaagagaggcggccgcgtaaacaagaggggaaca

SEQ ID NO: 5876 - DNA, 2810 bp, Homo sapiens
tttgaataccagttgccatgttaggaaggtcagctgcacagccaagagtgtaagagtgtaaagaaatccctttttttttttttgagttggagttttgctcttgtcgcccaggctggagtgcagtggcgcgatctcggctcactgcaacctctgccccctgggttcaagcgattctcctgcctcagcctccctagtagctgggactacagcacccaccaccacacccagctaatttttgtatttttagtagagacaggggtttcaccacgttggccaggctggtctcgaactcctgaccttaggtgatccgcccgcctcagcctcccaaagtgttgggattacaggcatgagccactgcgcctggccagcaaatgctttttgtgcagaatacacttctttcaggcattgtcaggtgctgttttgtttaagctctaactcacccctggaatacaggggaatgatgacaaccagcccagccaggcctgactcatcatggtcacatccagcccccacccccggccaactaaccactgcaggctcctcttccagactcaccagggggcctcgaggccccggcatctcccttggccctgggtgtgggttttacaagactgtgtctttcatgacatcatagcccaaccatgtgagaagaaggagaaggcccccctttcttcattaatctgaaaaaaaggaaagtgagaataggctgatttttaaaagttaaggggcaagcagcattgcattctgggggaacgatcctggccacagccgccaaacaaacattcactaggcctcttctgttttcatacccttgtaagtgggttatgtggtgggtatggtcagttttttcttttttcttttcttttcttttttttgagacagagtttcgcttttgttgcccgggctggaatgcaatggcgcgattcagctcactgcaatctccgcctcccgggttcaagtgattctcctgccttagcctcctgaaaagctgggattacagggccctgccaccaagcccagctaattgtatttttagtagagacaggatttcaccatgttggccaggccagtctcaaactcctgacctcaggtgatccacctgcctcagcctcccagactgttgggattacaggcatgagccaccacgcctggccagtttcttcattttacatatggtcacattggcgcctagaacagttaggtcgctcgtcacataggcagttaagtggagaaccaggtttcaaaatcaggtaagaaaaccatcatcattaactgagcaccagctgtgctaagcctgccacgggcgtatccttgcagcctcacaacagtgggaggtctgtatcctgaatgtcctcattttacagatgaggacattgaggagaagagacttacccaggctcacacagcagctcagcctgttccaggcgctggtcagtgcgtgttctttgccaccagcctgtcactccagtggcagctccagaaacggaggctgttgcttttatccctaaactgcatccacagagaagccccaagaaggaggttggggccagctcataaaaagcctgaatgccaagccaaggagtggatgcctccagtcatatttagaacaaagtcaagtataaatttacagagaaaaaattctaagacagttggatgttgtcctgttggtgaggaagggaaaggtttttcttgtagggaactggaaccagcccacaactgcacgcttgtgagctgtcatggaaacctgatccccaacagcttttgaggttgtttgtttgtttgtttgtttacctgtcttgggctttgttgcttttggcaaaaggtacttcaaacaagggagggcctggactgagggggaccaggtcttcttgctgacctcgtctacaaaggcaaaggaaggcaaaggaagctgtctcgggtgtttctgaacaacgtgactcatgaggggctttggctacctcttgcgttccccctagagatgtccaggccttacatttaatcggctttctctgcggtggggtagagaatggagctcccgccttgcgggcagtgctaaaggtggagctgggggattttcctgggaatgatttgagggctcttgaaagcccatgtgttccaaagcgtctttaactctgggatagcattggaagccgctgtcatgacaggacatggcactggatggctggcagagagccctggctgggagttagggagccctgggttggaatccagccccacctcttttatgccacaggtttggtcaagttctctcccgctcagggtagggctgtgaactccctcttacagctaagaacatgcagcttagtgaggacaagacccttctagagctttacccctaatccccccccaggagccccgaggccggcattattcctccccattacaggtgatgagcctcaaattcagagagcttaagcaacctgctcagggtcacgtctccaacaggcagtagagtcaaggtataaaccaggtctgttttgtacccagagtcccagactaactgttggtaggaatcttgtaaccagtcatgttttcttccttgttttggccgctgggaagctcaaagtcaaattcgagacccttttttttccaattgtgctgagtctcctactagactcgcttcattctagctttctgcttttacctttaccctaatctttttatttttatgctattgtactttatttttgtaagttgctgagatatctgttttgcaacaagatgggctatatctaaataaagacatgatcaaaggtttgatttaaaaaaaaaaaaaaaaaaaaaaaaaa

SEQ ID NO: 5877 - DNA, 757 bp, Homo sapiens
tttttttttttttagtgactcagttttttattgaataaaatggcctacagcctgatgacagtaatatggcccttgggttttgaggaaaatatcatgttgtaggttggccaaaaaggagatagcagtccagctgaaatttgttttcttatactggctttaaggcagtgattagaaaaggcctaagaggtgggttctgtaagggattgctggaaggaaagtaggaatatggaaagtcatgagacatatactgtcatctcttcttgcttcctctcaagtcacatgcaaattcagggagagttagtatgaaacacacaatggaaatttgggctctaacatatgcaatctgattcttcatggacttcatttggccatatcagttccaacaatttcagccaatgtttaaaaatcttataagcagataacattttaatgtttcaacaagccatttcctatctttcattctgaaaatccattttaagtcatttttttaacagcataggggtacaaattcagcttctgtccaatgaaatacagaaaaggatatcacttttgtattagttcaggctgctatgccaaagaaccatagataagcagcttatagacaacaggacttaatttctcatacttctataggttcgaaatttgagatcaggttgtcagcacggttgagctctggtgatgactcgcttctgaatttcagactgcagacttcaagttttaccatcattttgcagaaggaggaagagagccctctgcg

SEQ ID NO: 5878 - DNA, 4415 bp, Homo sapiens
  misc_feature (287)..(309): n is a, c, g, or t
  misc_feature (716)..(730): n is a, c, g, or t
  misc_feature (3309)..(3330): n is a, c, g, or t
gagcaggaaaatatataccctaaacagaaactcttacttgttttatgagcaagtctgagtgagtcctaaaatggctggcgaagagctaccaatactgactgacaggtcaccttaaagcctctaggtgtgccaagtttgatttatcttagggactagaacctagtcttctaaatgtgattttgccttgctgtttcgtcctgatgtgaaggtaaccacacagagagattgggctgcatcagtaatgatatgcatacctttcgtgcatcagtgagcttcttccctgttannnnnnnnnnnnnnnnnnnnnnntggagtaaataaatatgcgacagaaatcctggaacaagatggtgaaattgcttaagaatcgagacttcagggctcaatgacctctgagcatgtttcccaaagtgtgacccacatgaccatctgtctctcagtctcctggtccctccgtagagcttctgaaactgaatctttgtggggtgggggtagcgttcaagaatcaaaagttgaaccaagctctttgggtgatacttatgtatactgaggttcaggaactgctggagagatgactgggcaccaagaggatgacagtgactcagctggcatcccttagctggttcatggcagagctgagtgggcactcctgtctctgaccccagcttcagtgctctttatctcctccatgcctcctcagtcgtgctgctctaagnnnnnnnnnnnnnnntccttcatgtcctgggcacagagcagttcttttggtagcagatttgagtccacttcccccgtgcacagatcactgctcaggacccagagaggagcagctctgctccagcagggttttccattgcatcacacacccaaacggtaggatccaacagtcacacttgaaagcaaccataattgtgaggtttctgatgctgtagacttccttacatttctcacaacctagttagagagtcacatgggggtgaagtgtggctcgcgacctgccccaacaagtgcgtgcagaagccaggaaacaaaggagtaaattcacttcaaatgggatgcacatggtgtccgtgatgaagagacacattcagaattgcccaaggacaggaaaatgaccagagagagccagagctgagctggtaataaagagactccgagactgagtggagttaatgagggaagcatgcaacgagtggggcaatttcagttggtttctctcattgctttaagcgaaatgaactatacggacaggagaacagcctgcttgccccagtctctccttggccgccctctgttgtccctgtcaactcaggtgcccacggtgctcagaggaggtgctggcaaagcccctggagccttatgtaggccatgggggctcctaaaaggaacctgaatgaatcatttacagcaggtctctcttgtaaagcccagccacagtaactcgtacactgactgtttcaaaagacagcctttcttaatcatttaattgtttcatattcaaatatatctcctaattgtttttattttttcctgatctagaagatatgacaacagggtagaacttgggaagagggaataggaagctcgcccttcctccttccctcctcccctctctactttccttccttccttggtcatcaggtaccttctttgtgcctgctgttgtaggctacaccctatgtttggtggaaggcaaaaagaaaaatcagtaggatacaactcagtagggaagacagagatattcaagccccttgtcctcccagtgtgataagtgtggtggttgaggtgtgaacaaggggctctgtgaacagagaggacgaaagaggagctcctcctgaggctgttgggaaaagcatcactgaagagtgactttcagaagaagagaagaaaaagaggagaacatgcgtgattttataatgaaatagattagataaggggaaaaaaggcatttaaacaaggcaaaaagaacaggagaatagagaagagatgtggaggagaaggagcactgtagtaaacacgcagaaggacaggaacacttagacatgcaacccactcccaccctccgtcttgggggaggaaagcacactactgtcccaaagaactaatactgaaccagtgctgccttgtggagagaggcatggccaaggcgttcagagacctgggcctggtcccaccgctgcccacagcactcagcctctgagcacagcctggggtcatctgtgtgccctctggccaaggctgatggtagttctctgagtaattgagagtcattgcctgtctgtgcagtattgtgaaaacaagtcaccttttaactttaaaactactttaaaaaactttaaagttttaaaaaaacttctttaaaaactactcatgagatgacagtttctctgaccctcagaggaaggctgggctgcgcatacgtgaggaatttttacatgaacatcccaggacttgctgttcgcaggtgataaactgcacctccccaggactcccgctgcactcacatgcagctccctggacttctggtatctgacccggcccatttctgtgtttcaggggagaatttggcttgcgggagtactcagaagttaagacggtgacagtaaagatcccccagaagaactcctaagaaggccaagaaggaggatgaagcccagcctgcacgtctgtccctctctgctttctctgtagggcccagctctcaggaatacaaagttgagccacggtccttacttaaagattgaaaagataacatgtaggccaggcaggtcactgcacaactaaagcaaaccagctgggtacagtttcttggcactctgtaaggggccaccttaatcataccaaatattggggaaagtgggataaagggaggaggaggagctagcagacacatccagtatctccttctggagcacaggatgaaataagggagctgtattatttcatgtctttgtcacaaagaactttcctctcaaggaaaggtgacctttctcctgtcttcattttcctccttccaggccctcctcgctcacccacccctccctctcttccaaggagatgtcagctgagctcattctggggcagatgtttgggccgggaacaatttttcaaggttgtaaagccaaattatcatttcatgttatccatttcttcaaagcaaaacatgaaatggttttagctagagtcagaccagaatgaaaatgccaggagctggtacactagagatgtagtaagaacctgggatattcctgacccaatctggttttcttttacccataaataacatgaatgaaaaaagattgggacaatagnnnnnnnnnnnnnnnnnnnnnngttcaccgcttctgagcttgctgcagttttggggtgtgtgtgtattagattccttctcagttattctggaataaggcaaggagtgggttgtttttcatagctagataagatcttttccaaagtttttcttagaaccaaccaaaaaacaatccgagtaggcccgagaatttgataatgctggatgccttgcagacatcattcagtttctaatattgggcaacaattattattaaatgaattatttctgtagttggaatctgtaccttctgaacctctacaccaataactgctgcaggtgtgattttggtctgtcacactgtacatctatcataatgtgccctgtatctattggcagtgaccttggaaaatctggccaagcctaggggtttccttttccatttgccaagttccattgtgccaggactgccgtgctccactgagctcctctgtcacaccccattcttgcccctcactgggcaggccatggcctacagcttgcagggagtaaagcaggcccgcctccctttcttcccatccacatactcctcttctgctttccagtgactccaccagtttgatgtgggaagtgttagcttcctttccttcttccatcccttcttccatctttccagctgtcaaatccaatccagtctctaacctaaatgcagatcatttatttaaaagtaccaaacataacccagagtatgtggaatatgggcaacatatatatagccttctgtatttaacgatcttctgcttcttaaccgtaccagttttctatttataactcttatctatccatgatgttttaaagtctccacttgctgttatttacaaacgacagtgcattcagcagcccagtgccgtgagccctgacagatgccgtatttctgagtgcttccatgtgaatgctgccctcctgtagcatgtgtccaagtggacatagccactaaccaactagttacctttggactgcaacaaaaaatgtgaaaatgaagatttatttcttttaatttacttaaaaagaaacctctgtgctagcaataaagcatttatattgtgtaaaaaaaaaaaaaaaaaaaaac

SEQ ID NO: 5879 - DNA, 920 bp, Homo sapiens
tttttttttttttttttgaaatgaattgaggtaaaataaccgtttcaggtccatcccttacatggcaaagtaaaaagctggagtcagtacacagtgttggggtgggggcagcgtttgggggcgacgagttttgtgcaccgcgctggagtaccctgcacataaggtccgctcatgggcttctcagtacggactcgccggcgggaacaattaattgagcaaagcgcccctttctgggctggagcaaggttcgcggctgcagatatctcaagctgaaggcaagagcccaggcaaggcgcaggcaggccacgtggctgttccctgctgagactcgcagctttggtcttggaaacctcagggtgtggagctgcttgggccgactgaagggttcagctttttgggagaagtgagggcgagtgttatttctccagcgaggtgtaaacaagactgtgctttcatgggagggacaaattgcagagttgatcccttaccatttttacagaaatactcagaaagtgactacagcttgtcaactggcctgtttagtgagccgctgccttactgtaaaattgtctgaaaatcagattcgacttgacctccacttaatttcagtagcactctagcagttctcaaaacagtcacccctgcacccttgcgtttgcatcttccgctacaggattttatctcttggaagcgcttagagaatgcggcagaaattctgccccactctccaccaagtgttctttttgtaaatctgaatttacagtattctgcaattcttatttagaacgtggctgcagaaatctcgaaaccttttccacttcagctatttttttaaagataaatcttatttttgttttgttctttttttctcttttctcaaaaataaataaagagatcgaaaaaaaaaaaaaaaaaaaaaa

SEQ ID NO: 5880 - DNA, 1178 bp, Homo sapiens
cccactctcctctttccggtacctgtgagtcagctaggggagggcagctctcacccaggctgatagttcggtgacctggctttatctactggatgagttccgctgggagatggaacatagcacgtttctctctggcctggtactggctacccttctctcgcaagtgagccccttcaagatacctatagaggaacttgaggacagagtgtttgtgaattgcaataccagcatcacatgggtagagggaacggtgggaacactgctctcagacattacaagactggacctgggaaaacgcatcctggacccacgaggaatatataggtgtaatgggacagatatatacaaggacaaagaatctaccgtgcaagttcattatcgaatgtgccagagctgtgtggagctggatccagccaccgtggctggcatcattgtcactgatgtcattgccactctgctccttgctttgggagtcttctgctttgctggacatgagactggaaggctgtctggggctgccgacacacaagctctgttgaggaatgaccaggtctatcagcccctccgagatcgagatgatgctcagtacagccaccttggaggaaactgggctcggaacaagtgaacctgagactggtggcttctagaagcagccattaccaactgtaccttcccttcttgctcagccaataaatatatcctctttcactcaaaaaaaaaaaaaggcttcttaaggctcctgggcaaggcgtgggagttgtcctgacttgcttgggatctcgccctcctacctacctgtttcttccttcatctcctcccacctcagcttttcaagtaagctctggcactacagacatgtgccactatgcctgaatatttttattttttgggtagacacgggatctcactatgttgcctaggctggtccttggactcctgtactggaagcgatcctcccaccttggacctccccaagtgctggggactataggtggggagccccttgtacccacggtaatataatggtattaaaaattttttaaaatttcccaatggtttattactagggttttaaaaatccctttaatttttttgaaaatttaacccaaaccaaaaagccaaaactggctaaccctcccttattaaattcaaggaaactttttggtaaaaccgtttgg

SEQ ID NO: 5881 - DNA, 3844 bp, Homo sapiens
  misc_feature (1560)..(1560): n is a, c, g, or t
  misc_feature (1566)..(1596): n is a, c, g, or t
ggtccggattagcggcttcttgtaagagagtgctaggcacatagccccctcctattcctaatcctcccaccaaagaaagaggcacagagttcattacttagtgggggccagctgtgatcggccaactgccagctgccttaaaaaggaagaccagtgatgctaggatggagtgaaacccaagaggaagtgccatcatgaggaatcaatgagagatctgtgaagagagagggctgggtgggagcccagaaggatagaacctggaagatcaatatctcccgtgagggaaataacaatggagccaggttctaagtcagtgtctaggtcagactggcaacctgaaccacaccagaggcctataaccccgctagagcctgggccagaaaagacacccatagcccagccagaatcgaagactctgcagggatccaatacccaacagaagcctgcttcaaaccaaagacccctcacccagcaggagacccctgcacaacatgatgctgaatcccagaaggaacctagagcccaacaaaaatctgcttcacaagaggaatttcttgccccacagaagcccgcaccacagcaatcaccttacatccaaagggtgctgctcactcaacaggaagctgcctcccagcagggacctgggctaggaaaagaatctataactcaacaggagccagcattgagacaaagacatgtagcccagccagggcctgggccaggagagccacctccagctcaacaagaagctgaatcaacacctgcggcccaggctaaacctggagccaaaagggagccatctgccccgactgaatctacgtcccaagagacacctgaacagtcagacaagcaaacaacgccagtccagggagcaaatccaagcaggggattctttgacagagctgggatttctaacaaaacttcaggaactatccatacagcgatcagccctagagtggaaggcactttctgagtgggtcacagattctgagtcagaatcagatgtgggatcatcttcagacacagattctccagccacgatgggtggaatggtggcccagggagtgaagctaggcttcaaaggaaaatctggttataaagtgatgtcaggatacagtgggacgtcgccacatgagaaaaccagtgctcggaatcacagacactaccaggatacagcctcaaggctcatccacaacatggacctgcgcacaatgacacagtcgctggtgactctggcggaggacaacatagccttcttctcgagccagggtcctggggaaacggcccagcggctgtcaggcgtttttgccggtgtacgggagcaggcgctggggctggagccggccctgggccgcctgctgggtgtggcgcacctctttgacctggacccagagacaccggccaacgggtaccgcagcctagtgcacacagcccgctgctgcctggcgcacctcctgcacaaatcccgctatgtggcctccaaccgccgcagcatcttcttccgcaccagccacaacctggccgagctggaggcctacctggctgcccttcaccaagtcngcgctnnnnnnnnnnnnnnnnnnnnnnnnnnnnnnnccaatcggccgggggtactcttctttgagggcgacgaggggctcaccgccgacttcctccgggagtatgtcacgctgcataagggatgcttctatggccgctgcctgggcttccagttcacgcctgccatccggccattcctgcagaccatctccattgggctggtgtccttcggggagcactacaaacgcaacgagacaggcctcagtgtggccgccagctctctcttcaccagcggccgctttgccatcgaccccgagctgcgtggggctgagtttgagcggatcacacagaacctggacgtgcacttctggaaagccttctggaacatcaccgagatggaagtgctatcgtctctggccaacatggcatcggccaccgtgagggtaagccgcctgctcagcctgccacccgaagcctttgagatgccactgactgccgaccccacgctcacggtcaccatctcacccccactggcccacacaggccctgggcccgtcctcgtcaggctcatctcctatgacctgcgtgaaggacaggacagtgaggagctcagcagcctgataaagtccaacggccaacggagcctggagctgtggccgcgcccccagcaggcaccccgctcgcggtccctgatagtgcacttccacggcggtggctttgtggcccagacctccagatcccacgagccctacctcaagagctgggcccaggagctgggcgcccccatcatctccatcgactactccctggcccctgaggcccccttcccccgtgcgctggaggagtgcttcttcgcctactgctgggccatcaagcactgcgccctccttggctcaacaggggaacgaatctgccttgcgggggacagtgcaggcgggaacctctgcttcaccgtggctcttcgggcagcagcctacggggtgcgggtgccagatggcatcatggcagcctacccggccacaatgctgcagcctgccgcctctccctcccgcctgctgagcctcatggaccccttgctgcccctcagtgtgctctccaagtgtgtcagcgcctatgctggtgcaaagacggaggaccactccaactcagaccagaaagccctcggcatgatggggctggtgcggcgggacacagccctgctcctccgagacttccgcctgggtgcctcctcatggctcaactccttcctggagttaagtgggcgcaagtcccagaagatgtcggagcccatagcagagccgatgcgccgcagtgtgtctgaagcagcactggcccagccccagggcccactgggcacggattccctcaagaacctgaccctgagggacttgagcctgaggggaaactccgagacgtcgtcggacacccccgagatgtcgctgtcagctgagacacttagcccctccacaccctccgatgtcaacttcttattaccacctgaggatgcaggggaagaggctgaggccaaaaatgagctgagccccatggacagaggcctgggcgtccgtgccgccttccccgagggtttccacccccgacgctccagccagggtgccacacagatgcccctctactcctcacccatagtcaagaaccccttcatgtcgccgctgctggcacccgacagcatgctcaagagcctgccacctgtgcacatcgtggcgtgcgcgctggaccccatgctggacgactcggtcatgctcgcgcggcgactgcgcaacctgggccagccggtgacgctgcgcgtggtggaggacctgccgcacggcttcctgaccctagcggcgctgtgccgcgagacgcgccaggccgcagagctgtgcgtggagcgcatccgcctcgtcctcactcctcccgccggagccgggccgagcggggagacgggggctgcgggggtagacgggggctgcggggggcgacactaaaagcctgttgttcccatctgcgccggcctccgtcatgaatgccttccgggccgggcggaaggggacgcgggctgtgccttacttaagtcgggggtggcaagggggcggggcgggggcccgaaagctgagaccctcgccacggggagggggacgcgcacacacaccggtcaccgagacggctggacctgcacgccaccgctgccttttgctgctgctgctgcggcgaccgccgcagggacggggactggccctcccttgcaggtcggtttggtttgttgtaaataaaagtatttaattaaaaaaaaaaaaaaaaaatgtgt

SEQ ID NO: 5882 - DNA, 1868 bp, Homo sapiens
gtgatgcatacatgggaacaaatgcatagaaaaacttgtcaatgacacggcaaagtaaaacccaaatgaagcgaggtgaaagaatgggctgcagcgcaggcaaaactgcaccacgttacagactgctcgcctgggatggaacggtggggaggtgcgcagacggatggacaagcgcctggcaaaatggatttcttttcctagactgctaatgctactaacagttccctcctcacagggtcgctataacgaggtaacatacagcacttagaagacggcctgacccagaataacactaatgttcacatggctgcgagtctcagaccaaaatcaatagccggtatctactgaaactgcagcaaggcgaaaccacgggaatggcgctccgttgagtagagcaacgcacagcacatcacatcgcatcctccgtagcgggaggctctggcctcaccgcagcggcacttcccggaagagcccaggatattcggggacccgcaccggacaggcggcccaggccccctggcgcccagctggccgccctgttgcagctctcatgccaagacctgcgcctaacggcagggattccggcggtcatcatttattcttggcgctaagctgccgcttctcttttttatcaccacagagtaacgcagaccccaccgtttccttccattctgagccaaccactccagcagccaccggggcgccaggttatgctggggctgcaccacccggcccgaggcttttgaagccacgcctgagcgcggaggatgggcaggatttgccccgtgaactcccgcgcacgcaggctccgcgcgaggcccgggcgcccgagcggcgattccctcccctatcaccagctccagggtggtgccccccggctgtggagcccagaccccggccgtccagcagcgtatagacgagcccatgtctgcgatgtaactgcaccgcgctggggatccacctcccgccagggtgagggcgccgtcctccagcgtatgctaggcaggcgcgccccgccctcctggtcacgtgaccacgcctacagccgaagaggatgggaaaatgcggccctgttcctgaacaggaagcggaagcaggaaggaactgagaacaccagcatctgctgccgccctgaatcagcgttagcatgtggaggcaacctcagcccccagtttttgaagaaggtgattcagattcagacacaggaattatggtgacggtagaaatggactggaaggttcgttccccttgcccaccaagactccagagcaggtgggttcttgatgtctactctgcatgaagccctgggctttccggccctccctacttttcctccgaattcacagcacagcggagccaaaatgtattcctgccaaaacgggcatttcccaaaagaaaatattgttttagattcaaaaaaaaaaaaaaaaaaaaaaaaattgttcatttgaagcaatttttttttttattattatactttaagttttagggtacatgtgcacagtgtgcaggttagttacatatgtatacatgtgccatgctggtgcgctgcacccactaactcgtcatctagcattaggtatttctcccaatgctatcccgtccccgctccccccatcccaccaatcagtccccagagtgtgatgttccccttcctgtgtccaatgtgttctcaatggtatcagattcccatgctatgagtgagaactatgcggtgtagggattttgtgttctagcagatagatttactgagcaactgatgatttccaatttcactccactgtccctacaaaggacatgaacctcatcgatttattatggctggtatagatcccatgggtgtatatgtgccacatatcttaatccaa

SEQ ID NO: 5883 - DNA, 1955 bp, Homo sapiens
agccctcccagtttccgcgcgcctctttggcagctggtcacatggcatgagggtgggggtgagggggcctctctagcttgcggcctgtgtctatggtcgggccctctgcgtccagctgctccggaccgagctcgggtgtatggggccgtaggaaccggctccggggccccgataacgggccgcccccacagcaccccgggctggcgtgagggtctcccttgatctgagaatggctacctctcgatatgagccagtggctgaaattggtgtcggtgcctatgggacagtgtacaaggcccgtgatccccacagtggccactttgtggccctcaagagtgtgagagtccccaatggaggaggaggtggaggaggccttcccatcagcacagttcgtgaggtggctttactgaggcgactggaggcttttgagcatcccaatgttgtccggctgatggacgtctgtgccacatcccgaactgaccgggagatcaagagatgtttcgtcgaaagcctctcttctgtggaaactctgaagccgaccagttgggcaaaatctttgacctgattgggctgcctccagaggatgactggcctcgagatgtatccctgccccgtggagcctttccccccagagggccccgcccagtgcagtcggtggtacctgagatggaggagtcgggagcacagctgctgctggaaatgctgacttttaacccacacaagcgaatctctgcctttcgagctctgcagcactcttatctacataaggatgaaggtaatccggagtgagcaatggagtggctgccatggaaggaagaaaagctgccatttcccttctggacactgagagggcaatctttgcctttatctctgaggctatggagggtcctcctccatctttctacagagattactttgctgccttaatgacattcccctcccacctctccttttgaggcttctccttctccttcccatttctctacactaaggggtatgttccctcttgtccctttccctacctttatatttggggtccttttttatacaggaaaaacaaaacaaagaaataaaaaaaaaaaaaaaaaaaaaaaaaaaaaaaaaaaaaaaaaaaaaaaaaaaaacaacacaaccaacacacaacgcagcggggggccgacgcaacacaagagcctccaccaagacagggcggcccacaacgataaaagcagcccgcagcaacaaatcagtgcgacccaagcggggcgcaccatatgcgagccttgagacaacaatccaacgccgatcagcctgggcacgcagcagatcacaaagaaacgcggcggcagacacgcgggaacgaaacaggaggacaacaaagagaggcaacacaggagagaggtaagagacaacacacaaagcccgcgcagggcgagcgaacaaaggggggcgcccaggacacacccgcacagacacgaaggagcgcagacgacacgccacgcgggcaaacaaccccacgcggaccaacagaaccacagacgtaacaagaaagagcaacgacaccacgccaggacgacacacacaatagcggagagcgacgcagaagacgccacacccggaggaacacgcacggagccgccaggaaccacaccaatcgcgacagcaagcacgccaagaaccccaagagacgaggaggcggcccgagcgcgcgcaccccgcgggagcggcgccaccgcgcacccggccacggccgcgaagcccgaccaaggcaccgggaggagcccgagtacgacgcgacagaagggcacgcgcggggcgaagacccgacacggcgcggcacgcaccacgaccgagagcggagaccgagcacgcaccgccgcgacgcgcacgcgacacgcggacgccgcccagacccggacgagacgacgccaccgagccgcaaaagcgcaggcgccgcagcacccgccgacgcaccg

SEQ ID NO: 5884 - DNA, 4845 bp, Homo sapiens
  misc_feature (3995)..(4039): n is a, c, g, or t
  misc_feature (4514)..(4615): n is a, c, g, or t
cggaggaccagggaccggctccggaccgcgcagttagcgccgcctggcctgggccggacccggtcagggttctcaagctgtcgtccctatggggctgtgttttccttgtcccggggagtccgcgcctcccacgccggacctggaagagaaaagagcaaagcttgcagaggctgcagagagaagacaaaaagaggctgcatctcggggaattttagatgttcaatctgtgcaagaaaagagaaagaaaaaggaaaaaatagaaaaacaaattgctacatccgggcccccaccagaaggtggacttaggtggacagtttcataaagcataacatgagtagaagaatctactgccaataactgtttattatctgcaatcaagtgggcctagtgtcgacttgttcttctctttgagtaaatgaagattcagactttgtaatattattgcccttaagtgcaatgctaaaaaaacgttgattttcaagcttagagaatggctagacttttcattaaatactgattttcctacatttgctcttctgcagttagtgggtgatttgctatttttcttagtagttaaaaaatggaactaaatagtgaatatacatacactgcatgtaaacattctgcatatacctctaagattaaaattcgcagttgtcttttcatcctttataaaatgatctaactacttatatttgtgctgcatcgcgttacatctgtttttatttcactatgaagatgtttgattaaacttatggacttagtgcctttaaactgatcatcagggagaatcttgaaaaaatcatttgaagggctgatgtgaaggagcactgtaaatttttataacttagtaatgagtattcttaggcagatgtaaaattttttccaatttatttttatttatgtagcttataaaattaacataccctgttttactttatgataaaggattttttgtttgctgaatttaaaattatatattagtgataccatcagagggcagtgatgttctattgtatattaaattcagctctgtaaggatctttgtagtaattgaatgagttaaactaataatctggatgggttataatgagtagtaatatatttgtccatatttcataagtagtgttaatcttgtgtacttattagagaacgatcataagatttatacagatgtgaaactgcgaaggcaagtatgaatgtatgaaaaaaacatgtaggtactgtacttacaaaaggtctacttcagatataaaaatattaggtaattctatacaatgcatagtcataaaccttaacatttttgttcattagaaacatgaattttatagcattttttgtttctcctatataatacactgaaataaaagaatttgtgttagctattaaggctgatagctcttttaaatggcaaggccacatgttgagccctaaattaaaatttgcagatattaagtgctaatagaaattttaagttaaatcgaccaagttcacttgctttacacaaaggaaactgagccactatcttcatctacccctccaacaaaaattatattatactgcagtgtattgtacatgttaatttttaaaagtttgaactattatataatacaggtctcttgacttctcatggaaaaattattttttctattatggtgtgaaatattgtgtgaatatctaggcaaaacataacaatttggctcaattttcttctttagaggattcgtgctgtttttgttcataaagggtagtgaaatcattgaactatattttagaatgaaaatttttgattttattaaaatgattttttcaaggcagaaagtaaaaggaatgattgatagcggagtgcatatagagctagagcatatcatccttgaactctgcaaatcctttcttccattttaatatagcaagaacaattttgtctttactacatcttaaagaattagaacttgggttggtgtaagtgacttacttccagggaatcatgccctatttctaccagcaggtcatacccaaatgtcacactatctattgttaaccatgaatgatattcagatctattacttttcgtgaaaagtggaacatgttacttccaaccatggcctgtcaccgtgagtgtgatcagctttctccaaaaccacatgggtcgcaggagctaaggggtggtacccaaatgttaggaacagtgttaggaaagggcaagggaaaagaagtgactggatgtcttatgagaaaccggtaaatgactaaaaaaaaaagcaaatgactaaaaacatgactaaaaaattatatatatatataatatatatattatatatgtgtgtatatatatacacataatatctgcaaattctaatttatatatgtgtgtgtatatacacacacacacatgcacatacacacatacgtccagacatctccctcataaaataaccatcagtttctatgaaaaccttaagtggaagccaatttcccatagtaaataatttaggagaaaattataatgcttaaaatgttgctcaaacccctgacctattactaaactataattggaacagtaaaatgcatatatgtaactatcatatcatgatttaaaattgcttaaaccattgctgcttaatactaatcaaacttaacggctgctaacaaaagttgtgaattattacacggcctctttgtaacgtgctgcatgttttttaaaacatctctgtgtttctgtttgttccactgctggtatttggaatgtaatttaacagttctcacacatggtttggttataaattctgtattgccttttagggatataaatatacatttttttctatgtaaaaattagctttagctgtctctttaacaaaattttatctttactacatcctaaatacttagaacctgagttggtggttagggaaacctcaggaacattttaatcacattgggattcagaagagcaacagaaccaaaggttgtttggtgtgttcatacaatccctggatttataggtggattttctataaaggaaaaatgatgtaattagtatcctgttttttcctaaagaaataatactatcataaaaattctgtctatcctttgtaccccaggaaaatggacatgaactttgaattttccctttctccaaatgtttgactttttattttcactgataagcattatgctatgttcttagaagacaaaagcagctcttgccagttttgaataatttctgcatgaatagaccagtaagaggtaagtagccatgactgcctatatgtgttgagacataaggtatatttctttaacatctccaagcaagcatttcaaattctcttaactactaaacatgctctaagctaattcaaatatagtattgtggcttttttcttcaattttctcaaaagctatagacacaaggcatttgtatgtataacagactttgatgaagttttggttccagtaactcaaaacactaagtttcccatttgatatggctttttattgttctagtctccctcttctagttatgcttcatcttgcaaatattgactttgaatgtgataactattgcctacaaattaagtattcatacattactcctgtggatatcatacttttttgttattatatcctgaattgcattggctttttttggttttgttttgttttttgagatggagtttcactcttgttgcccaggttggagtgcaatggcacaatctcagctcaccgcaacctctgcctcccaggttcaagtgattctcctgcctcagcctccctagtagctgggatttcaggcatgtgccaccacgcctgactaattttgtgtttttagtagagacagggtttctccacgttggtcaggctggtctcgaactcctgacctcaggtgatccctgccgccttggcctcccaaagtgctgggattacaggcatgagccaccgcgcccggcctgcattggctatatttataataccaaatttgtgttgagttttgnnnnnnnnnnnnnnnnnnnnnnnnnnnnnnnnnnnnnnnnnnnnncaagtacctctaacttatctcaagtggaactaattagttttgcacacagattggtgctctctaggctatttccctgaaatttatcttgttacataagtcagatatcaaggagttatgctaaactccttttcctatcaaactcctaaaatgcccttttctctgtctatatttcttagacatagttacattataaatgtaacagatatatttaaagtaggttaataccaagtgtctcaggtagaaaattctcagaggttccacaaaaacttctggaactaataaatgactttagtaatcttgcagaatgaaaagtatatgaaagtcaattctatgtttatatgcaagcaatgaaaaatctgtaattgaaagtgggaaaatttaaattacaatatcaacaaataaaatatttaggaaaaataaaactgtagacattaaaaatgacaaaacattgccaataaattaagatctaaatgannnnnnnnnnnnnnnnnnnnnnnnnnnnnnnnnnnnnnnnnnnnnnnnnnnnnnnnnnnnnnnnnnnnnnnnnnnnnnnnnnnnnnnnnnnnnnnnnnnnnnggggggcgcccccaaaaaaatcccccgagggggcccaattttacgggcccccctttttttttgaaaaaaggggccccttataggggggcgcttttaaaaactgagccctgggccccctttttttcaacccccggggggggggaaaaacggctccttttgggaaatttgtgggaggacaccttctttctgggggggggacaattttgggaaaaaccccctccccgaatttt

SEQ ID NO: 5885 - DNA, 2250 bp, Homo sapiens
cccacgcgtccgagcgctgcaaggacaaccggctggggtccttgcgcgccgcggctcagggaggagcaccgactgcgccgcgtaagtgccgcctgccctgcgtgggtcgtgccaggacaaccggctggggtccttgcgcgccgcggctcagggaggagcaccgactgcgccgcaccctgagagatggttggtgccatgtggaaggtgattgtttcgctggtcctgttgatgcctggcccctgtgatgggctgtttcgctccctatacagaagtgtttccatgccacctaagggagactcaggacagccattatttctcaccccttacattgaagctgggaagatccaaaaaggaagagaattgagtttggtcggccctttcccaggactgaacatgaagagttatgccggcttcctcaccgtgaataagacttacaacagcaacctcttcttctggttcttcccagctcagatacagccagaagatgccccagtagttctctggctacagggtgggccgggaggttcatccatgtttggactctttgtggaacatgggccttatgttgtcacaagtaacatgaccttgcgtgacagagacttcccctggaccacaacgctctccatgctttacattgacaatccagtgggcacaggcttcagttttactgatgatacccacggatatgcagtcaatgaggacgatgtagcacgggatttatacagtgcactaattcagtttttccagatatttcctgaatataaaaataatgacttttatgtcactggggagtcttatgcagggaaatatgtgccagccattgcacacctcatccattccctcaaccctgtgagagaggtgaagatcaacctgaacggaattgctattggagatggatattctgatcccgaatcaattatagggggctatgcagaattcctgtaccaaattggcttgttggatgagaagcaaaaaaagtacttccagaagcagtgccatgaatgcatagaacacatcaggaagcagaactggtttgaggcctttgaaatactggataaactactagatggcgacttaacaagtgatccttcttacttccagaatgttacaggatgtagtaattactataactttttgcggtgcacggaacctgaggatcagctttactatgtgaaatttttgtcactcccagaggtgagacaagccatccacgtggggaatcagacttttaatgatggaactatagttgaaaagtacttgcgagaagatacagtacagtcagttaagccatggttaactgaaatcatgaataattataaggttctgatctacaatggccaactggacatcatcgtggcagctgccctgacagagcgctccttgatgggcatggactggaaaggatcccaggaatacaagaaggcagaaaaaaaagtttggaagatctttaaatctgacagtgaagtggctggttacatccggcaagcgggtgacttccatcaggtaattattcgaggtggaggacatattttaccctatgaccagcctctgagagcttttgacatgattaatcgattcatttatggaaaaggatgggatccttatgttggataaactaccttcccaaaagagaacatcagaggtttcattgctgaaaagaaaaatcgtaaaaacagaaaatgtcataggaataaaaaaattatcttttcatatctgcaagatttttttcatcaataaaaattatccttgaaaaaaaaaaaaaaaaaaaaaaaaaaaaaaaaaaaaaaaacaaaattaacatgagtacatgagtaagaattacattatttaacttaaaggatgaaaggtatggatgatgtgacactgagacaagatgtataaatgaaattttagggtcttgaataggaagttttaatttcttctaagagtaagtgaaaagtgcagttgtaacaaacaaagctgtaacatctttttctgccaataacagaagtttggcatgccgtgaaggtgtttggaaatattattggataagaatagctcaattatcccaaataaatggatgaagctataatagtttaggggaaaagattctcaaatgtataaagtcttagaacaaaagaattctttgaacatacaacatattatatatgacaagtcaaacaacacacatacatagactatgaccgaaaaccaatcttgtgttggccgaccttcggccccccgaaaaaaccgtttgttctgcaccctccg

SEQ ID NO: 5886 - DNA, 2771 bp, Homo sapiens
  misc_feature (803)..(817): n is a, c, g, or t
tgtgaatctgtgagatgaacacaacacacatcgtggaagatgaggggccaagaactgcgcagcatccgactacagggcattaaaccctcccatgtgatgtctccttctcgtctgaaccttaactcattctggcgattcctttcctacttgcttaaaaatccccaattaggaaaaaaatgccaacctcctcccaggcttggggttatcttgatctttcatttcaacgttgaggtctagtgcacacagaacttgaaacaccgcactctgtcaacagcaataatccactcagtactgtgggatggatgggttaatggatgagaaaacggcaccaagactgactttgggtatttggtatatttaccgtggttacactctggactggttgattcttctgcatgtgatatagaaaaaagtgctgcatgcggtgaacctgtcagcctgggactgggggtgagttgttgttatgagtttggggtggtgtgaggaaagtgaatgctgcttagctcatctgtagctcattgcaatgaattcagtaagaatggagtacagggattatctgtgtagcataggcatgcaatgtttgaccaagctcttaccctcgcactgtaatgtgttgaaatgtctttgtagacctgaaggtgcacttaacaaaactgcctattaagggatgactattttttggtttacttattcatatttattttagcagcctttttacctcttcttccccttcctaggcatggagctgtaacagctcatgtcctgactatgtgttttctccagaaggagaagacttctgatgnnnnnnnnnnnnnnnttcctctcttccagtctattggggccctagttcaatagggtggcaatagaagagttggtcacaccagggctgttagccatcccagaatctctgaagtggttaactcacctgaagtgatctgaatcagagagaccaaaaacattcatttcctctgtcctcagatttctagaagacaaattctagccaggaaaactttctgtttttgcatctcccttttcccatttgtgcccaactccccttgcactccctggagacttgagttctgattttcagttatatcagctcattgggagtgtgttcgtgggtgagccttgcagaatcagataaaccaatagcaagtccttctccaggattctggccagtgggcagtcatttccctgaaatgaattgtagggcaggtttagattccactatggtggacgtgaagcacaggtggtgtcacaatcttgatttgcttgagaattaaaaaaatacatgtaaatggtaaatgaggaatacatttttttaaagtagaaatttggtttagcctataaaaggccttcttcacattgtgtatagttacacgtttttcaaattaggtaccatctaaaagtcaataaaaatagtttcctagccctctcatttaatataggagacctcaaaacacatgctttttaacaattttacattttaattcttagtttggtagattggattgaaagaaaggagaaagaacattagcagaaggcactttcccattttcttccaggaatgacttattcctggggtggtgagaattggtgggtggtaaccatccatagtataaaattgttagaaagaatataaactgccaaacaagcatgttatcttcaggcttttccaagcaagaatgaagtcttttgatgtttatgttcattttaagaagacaaacaaactaaaattttaagaccagacacaacccaagttgaattgtgatctcaggaggtgaactctcattcaccatgtggcatattactacctgtatttatatcatggaatttcagggtatatgtgaacatgtctagtatgactcaggtaaacctttaaagaatgtatgttacttaccatttttgtaaagaagcaaacaggagctgaattgttaaccaaaactgttccattaccttgggtcactgtgcaaactaattcagggtacagatataaagtttagaagccttgggattaaatgccagcctctttgctcaggcaaaatgaccctgggctttcttgggaagtccagcatgtatgtaaggggtgaggccctgctgacctcagggcttttcgctttaaggagattaaccctagtcacagtgattttcatttaggagctaactaggagtttactctttatgacgtgaaacttcaaagagtatagaaaacttttgtaccacaatcaaagaagaagaaatggtgtatggaaagaaaacaaaacaaaacaagaaatctcttgtaaaatattccaggtcaaagttgtctcctctccaaaccttgcagaagcacctttcttctcttcagcgcactgttttgggactgtttatgcagcagatgtaagtagacaacatggactccatgtgacatgcctctaatagtaaagataaagtattactgaggttaaaaataaaaattgagtagtattaatttaaagtgcaccatcaggacaacaaaccatttaagctgaaaaaacgctattttatttcttgagtttgccagttgcttccaccttgagttaaggacgtgtctcatcttcacctactgcgcattctcccttctctaactgtgtaatatgtcaggtcaaggacattgaatgttatgaattgagaacctaattgatgcgcatagttttcatctatgcaattttacttgcttctgtcactttacgatctgttcatatttggcatcaattaaagatactttttaaggatcttaaaaaaaaaaaaaa

SEQ ID NO: 5887 - DNA, 5613 bp, Homo sapiens
  misc_feature (9)..(68): n is a, c, g, or t
ggacaaggnnnnnnnnnnnnnnnnnnnnnnnnnnnnnnnnnnnnnnnnnnnnnnnnnnnnnnnnnnnnatgccaaacggacaaagggtcaaagggatgcagagagagtcggagagaacgacggttacatggaaccatatgatgcacagcaaatgataacagaaattagacgacggggttccaaagatcccctggtgaaggctctccagctgcttgacagtccctgtgaacccgcagacggtggcctgaaatcagagaccttggccaaaagacggagttccaaggacctcctggggaagccgccacagctatacgacactccctacgagcctgcagaaggggggcccagggcagaggggaaggcgcggcccccagacagccggctgcccgagaacgacgagaggcccgcggcagagtacgagcagccatgggagtggaagaaggagcagatcgtgcgggctctgtcagtccagtttgaaggagctgagcgaccttccttcagggaggagacagtgaggcagcaccaccggcagaagagctggacccagaagatcctgaagccagccctctcggaccacagtgagggagagaaagtggacccgggcctgcccctggagaagcagccctggtatcatggtgccatcagccgtgctgaggctgagagtcgactacagccctgcaaagaagctggttacctggttcgaaatagtgagtcagggaacagcaggtactccattgccctaaagactagtcaaggatgtgtccacatcatagtggctcagaccaaagacaacaaatacacactgaatcagacaagcgctgtgtttgacagcatccctgaagtggtacactattattccaatgaaaagttgcctttcaaaggggcagaacacatgactttactctacccagtgcacagcaagcttcactaagattcagccactgcaagccctgggcctctggcaccttcaagggcatcatcagcgcacaaccagcatctcagaggacaaggctggactagcaactgctagaaaatgggagtcttccttgaaaagtcagagagtgatttgttttgttttgtttgagacgaagtctcgctgtgttgcccaggctggagtgcaatggcgcagtcttggctcactgcaacatctgactcctgggttcaagcagttcttccccatcagcctcccaagtaggtgggactataggttcgcaccaccactcccagctaattttttttttgtatttttagtagagatggggtttcgccgtcttcgtcaggctggtctcaaactcctgacctcaaatgatccacccacctcagtctccccgagtgcctggattacaggcatgagccactgcacccggccaagtctttggtcttaaagtgattccatgacactttgtttgtggcctgtcccttgtttccttgcaagtagttctacaataagaaatcatgatttagctgttgcctccagctctggggtagggtgttctttttatggtgtgaccctcaggaaggttaagtcaggagttcaggagcatcagagttctctagaaatgtgcctacttgttacctggaatacctggtctctaaacaaaccagcaaaaaatccacgtggcttttccacatgatggtgcagactggaagaggatgttatattggactcgttattggggaaatgaatgagcgggagaaaatgtgaatgacgggcaagaaggtggtctttctccctcagaagtcctaattcagctctggagttcatggaaatccgcaacttcagagtgtggcctaaggattattttgttggtcagcctttccaagaaagtgtgtgttctctcaatctctgtggattttctcattttttagcaaatcagtgagataagcataaataggaaggaagataccccaggtttaagaatcaccaatatcattaggcattggcatcattattagaattctgaattatagaataaaaggtacaacaaaaatttcatttctgaattttaaaattctggaaatttgcaaagctccacaactgtttttttactgaattaattacatagaacttcgatgtcttttgtttcatcatcattgggcattttagttgctatggaataatttttaatttttgtctctaaaattagatttgctttgtagtaaattttttaaaaatgcaaccctaagatctgattatatgaactgggtctctaaagcctacaaagattctctcgttctgtaccaagcagactgccttgtactatacagaagtgtttgaaaagacctagaggttttctcttaaataccattacttaagattcatagtattaggatctttatgatttatcatgagcttatatcaccagtttatttactgtgaaaaaaaccatgggaatggcatactgtgagaagagtactatggtgaatggctccagaattaaaattcagcagatgtgtctgtattctggggttggtcatttgggtctcaaaactgccccatatgcaaatgtactgactgtcatcaatgaaaagttaacctttgtagcttataaatacacacaaaatgttgatttggttaattttttaggaaagtatacctttgtagttactagttacatttgactgtaagatttagaggttagtaaatttttgcttctttattcagataagatctcagccaaaaggttgtgtgatctttgattttaaaaatttaagaggaacttttcctcactggaacacaatgattttattaataaagaatgtaggctgggtgcggtggctcatgcacgtaatcccaacaatttgggaggctgaggcaggcagatcacgtgaggtcaggagtttgggaccggcctggccaacatggtgaaaccctgtctctagtaaaaatacaaaaattagctgggcacggtggcgggcacctgtagttccagctgcttgggaggctgaggcacgagaatcacttgagcccaggaggtggaggttgcagtgagccaagattgtgtcactgcactccatcctgggtgacaagagcgaaactccatctcaaaaaaaaaaaaaaaaaaaaagcctggcctggtggtggatgcctgtggttccagctattcgggaggctgaggtaggtggatcacctctgctcaggtcaaggctgcagcgagccatgatcgcaccattgcactccagcctgagtgacagagtgagaccctgtctcaacaagcaagcaaacaaaaaaccaaaaggaatgtttttttcagatactgatagaatgttttcagtgtgtattggttcatttactatatctttagtgtaagattttaaaaggttttttcagcatccattcaacaaatatttattatctttatacaaattattcattgtgttaaacttatttttagtttaacattctagaaatgaaacgtttttacttaaccttattctacaaagggaatacagcagttattctaattttaataaatgctaaaagctttatacaatttttctttgtgcactaaatgatttttggcccatacccagcaactgtgatgaatgtataatgaaataacatcttgaaaacaggccagatacattaagtatttattgagcttctgtcatatgcccagtattatgcttcttctatactgtttctctgtgacaagtcatactatattctttatagaattaaaagtagaggagaggcagagtttacatattgtccagttgctttacagttgtacaggaggttataagaagaaatatagtaaattagtgggaagtcagaggtgggggcgttagtgagctattttcttcttgaggttgtgacacaagctgacaaaagccagggagttcacagctgtgtggtggcacaaagttccatatgttctaaaaacaattaggcccagcagggtgtccctaatggcttccttgttaaacctccatggccagctgatctgaagctctgtgacatgttctctgagctctgaatgctctggctttttgtcattttgtcttgagacaagtattttcctgtagtcctcattccttcgagttattccatctcccaggatattctctggtgagaagaatgtctttcagtgaatttgcccttgaatttagcatccatagagctgtgtcagtgttcttcttgatcacaccttctttaaaaaaaatacttgcttgcgatgactggacaagttcagttggttagtttcaggcctataagaagagagagtaaaggaccttgctatttactttgataccatagttgtatctcaggatggcctgcaaaccactggccttgtgtgtatttaagctaggaataaaataatggagaagtgttaatatgtatacaaaaaggtaaatattgatatatctactctctgttgggggcagaagtgtcattttaagttattcaaagcactttcttaagcattttagaaagcctttattctttgctgttggaagtctccgtactttgcagaattggtatttgtgtactagcctctgccgcaggatggggaggtgggcaggtagctgataggggcagccaggagtttttgaggcaggtggtgggaaattgtcctaatttgttaattggattatgtaactctgttactagtctgttattggctgttgttactggatgcatcttgatattcagaagaataactgtgaggcattcttcagttgcgggttaagtggggttagtttctgttctgtcagatgcccttttttcagtcaaaggttagccccttgtttctccctccttccagggtttagggagtgcagtgatgtcgatttcatttcccttccccgcaccccttgacactcagcaggattgcactgaaacccttcacaatctctcgttcactagttgtctcctatttttccataactagcactagtttggccttatgacctggttagaatcactcttctgtattctcatttccaatttttgtgccccactaacgtggactagagaaacttggcctgctgtgcagtgggccttctgttcaacttaccctccaccgctgaccctgtgtgaagagagatggtgcgttactgccatctaatgggaaaagagaaaactgcagttgggaaaagcagctgtgcatttaagggtagggctttctgaaggatttctgatacagtccagaaaagggaaaatgatgacacagcagttgccatcttgaaaaatgccctttcctgcggaaagggtgttttgaagtctaatacaactatcatcacaaggtccctggactaaggctggatcgtgtaatttagaatctcaaattgtattttaattaatatgctggcaacagaatcattgaaacaggcatctcattttgtcaagttcttagccgttcagtttgtcaggggctttaatattttagatatcaactaatacatagtttcaacttttaaaaatgtttgaagattgtatgtaatataggtgcctatctatagtgccttagtaatttaaatcagaaatattttataaaacttctggttgttttgcagtagccaatataggcttcatgccctcctgaagatagtttcctctgaaatgtaactttaaataaacattattccaagaaaaaaaaaaaaaaaaaa

SEQ ID NO: 5888 - DNA, 2892 bp, Homo sapiens
  misc_feature (261)..(315): n is a, c, g, or t
aatgcggaaaaaaaaaaaaaaaaaaaggaaaatccttagcaggttctagcatgcaagagttcagtaaatggttatcgtcattattatctttggtatagtaaagattggcatgttaacatacactgaggatttagtaaatgtggtgtaagtatggtgcatgctctttgttttgtttggcgtaacagctttattgagctatacaacttacccatttaaactgtacagttcagtaggctttagtgtattcccagggttgtacannnnnnnnnnnnnnnnnnnnnnnnnnnnnnnnnnnnnnnnnnnnnnnnnnnnnnngcatcaggaagagcttcccaggaggtcacattaagtggatgttggcagacaggacttagaacagtggggaggagggtggtgtcccaggcagaagcaaaggcttggaactgggaagtacccttgacacagataaagcctggcctggaggggtgtggggcacctgcctccccaattcctcctcctagcctgtatcccaggacacagagttcgaaatattgataataatgaccatccactaagtacttgctgtggccagatcctgtctgaacttttttttttttttgagtcggagtcttgctctgttgcccaggctggagtacagtggcgtgatcttggctcactgcaacctccgccttctgggttcaagcgattctcatgcctcagcctcccgagtagctgggactacagacgcctgccaccacgcctggctaatttttatacatctttagtagagacaatgtttcaccacgtcggctaggctggtctcgaactcctgacctcaggtgatccacccgccttggcttcccaaagtactgggattacaggcgtgagccaccacaccggccactgtctgaactcttgatatgtttgaatcctcacaaccttttttattttcccttttttccagaaaggtacaacttgctggggtaaagcagagctgaaattcaaacccaagtgaccctgacccccaagtccaatcctgagtttcggctgttaccaacctggaggaccctgggcaggttccttccttctgaggcctcggtttccctagctatataccatgagggggttggactttaagatgcagccgatttcccaggacgctgtcgtctgtgagggtggctggctctaggcaacgggtgccctttcccagaacacaggcacatatgcacccataacccagatacgctcctccagctcctccaccggctgcttcccccttggtctcaagctggcagctgagtgtatgtgagtcatgggctggctcagaactgggtcccgcagtgggcacaggcccagaccttgagtcctcagggacactgtgttgctgagcagggcagctctggagtggccgtggaggggagggagtgatggtttctagtggagaccagggaaggcttcttggaggaggcattttgagctggtccttgaagggctgttgtggttgaggcattctaggttgcagggatagttgagcaatggcggagaggctggaaagtcagaggcttcattcattcactcactcagtcattcaacaaatgcttatcgcaaaactgtgagggcaccagggagccagcagcgaacacaggaccgttcatctttcatggggaaacataacagcactcagataagcacagcagtcaatcctggagagaaggtcgtggagggctgaggagggctaggggctcagcatagaggcctgatccagtctggggcattgggtgggctcccggtggtgacatccatactgagacttgaaggatgagtgggactcatccaggaggagagaagggaaggaagatgggaggaccctgcaccttccaggcagagacagcagcatgttcaaagggcctgaggtaggtaaaggcaggtgtgagagaggaaaggaagaggcagggaggcagggctagctaggaggcaggggctggagactccgctgggtgttttatcctgagggagccacagaagggctggcgaacagggcccatctggggacagaggccttgaatgcccaactcaggaatgtgggctctggccactaagcagctgctgcaggaagtgcagagacttggcatctggcaggacttcccatgtaggacactggctcgccaccctatgaccaccctaaccctagaaaaaaggatgcagtactaaagtgtcattcattcaaagccactcctcttttggtattccacccattttccagacggtgacactgaggctcaggaagcagtagggacttgcacaaagccctttgggaagcaggctgggaaacagtggagggagggtgtccattagccccaaggagacacaggatctgggctctgtctttcgccttcctcccagaatacgctgccatcaactccatgctggaccagatcaactcctgtctggaccacctggaggagaagaatgaccacctccacgcccgcctccaggagctgctggagtccaaccggcagacacgcctggagttccagcagcagctcggggaggcccccagtgatgccagcccctaggctccaagagcccccaaccgggacccaaccctgcctccctgggctaggctctggcctgggcactcaccccctggcttagacaccttctcaagggctggccttcagggacccctggtgggtctgcctgcctgggccacccttcctgcctgggcctccccttggcctacctgggccagcccccaccacctggcatgccctcctggggccaagagtgggcctgcaacccacccacttgcctgcccacccaactcctgggcgctccccactctgcccaggccttgagtgtccacattaaatgggtctcccacaaaaaaaaaaaaaaaaaaaaaaaacgcgg

SEQ ID NO: 5889 - DNA, 2468 bp, Homo sapiens
actggggggtgtgaggaacaggggggaccatggacttcatcagcattcagcagttggtaagtggagaaagagttgaagggaaagtgttgggatttggacatggagttcctgaccctggagcctggcctagtgactggaggaggggcccccaagaggctgtggcccgggagaagctgaaattggaagaagagaagaagaagaaacttgaaagatttaacagtaccagatttaatctggataacctggctgacttggaaaacttggttcaaagacggaaaaagcgactgagacacagagtcccccccaggaaacctgagcccctggttaagctccaccgcaccgccttgcactgggcctgtctgaagggtcatagccagctggtgaacaagctgctggtggcaggtgccacagtggacgcgcgagacttgctggacaggacacctgtgttctgggcctgccgcggaggacatctggtcatcctcaaacagctgcttaaccagggagcccgggtcaatgcccgggacaagatcgggagcacccccctgcacgtggcagtgcgcacccggcaccccgactgcctggagcacctcatcgagtgtggcgcccacctgaacgcacaggataaggaaggggacacggctctgcacgaggccgtgcggcacggcagctacaaagccatgaagctactgctgctctatggggccgagctgggggtgcggaacgcggcctccttgaccccggtgcagctggctcgagactggcagcgcggcatccgggaggccctgcaggcccacgtggcgcatccccgcacccggtgctgaccgcagcaccgccccccgccgcgcctttcgcactgccaccattccatcctgtgccccgcccccgcgtctgcacctctgtggttcctgccctcagccctggttcctccctctctggcctgtgccgcctcagcagccctggcagaactgaagagcggcaccgggcccagcaggcaaagagagaggcctccctggcttcgagtgtcaggggagccgcgttccctcccagggctggagcagaggaccacaaggcagcagaaagcgcgggtccagatgagggccaggaaggggaggagagtgagggccaagaacgagccttaagggagcagtcccaagctggagccacccagggctgggtctgggagtcctcagtgtccacttgtcccaggttagggggcttgccttgctctctccagggccagtctgtgtgtgtggggactcagcccgtggccggcagatgccatccaggatgtacaaggtgcagccaaggcaggccatgcaggggccgggcctgtctgcagctggtggatgcctgtgggcatggctttctctggggaccccattcctgtcagtagcaaccctggcagtgtccggagcggctctagacaactttggtcataggaactctggaggtgggttctggtcatctgaggtggctactcaacaggtttgaggccccacagcaacagaagtccaggacccactaggttgcctcagaagccctaagactgatgagctggagcgcgcatttgagagaagcctcgcacccactgtgtactggccccgctcaggccggcctggcacaccgttgcctgctggcggctctcatggggaagcgcctgggcactggggattgcttgtggcccactcaactcttggggcagtggcccgtaaccctagtttgcctgaggcccttatgtccccttatgttcctggtactggagcttgagctcttgcctggaacgctgcagctgcacccaccctgcttgatcccacctgggaggccaggacactgaggagctctgaacccagcccacagggaagcagaggaaggtgagcccccgccgccccccagcccttcccatcccttccctgctccctggtggtctaaggacccaagctccctagacttcctcttccaccgtctgtacgtttcaaattacactggtgtaggcctgtactgctggtggggctgggcccctaaacgccagaaagtgaatcttaagaagctctgccctaaactgagaaccacatgctgagggaagggctgaaaggtgaaggctcagcctccctcacatgggtcctgggttacattaggtaccgggctgattgataggcatttggccatggttccttttcgtctacctttgggggccttctcaggcccagaacaaggctgttgttactatgtggaaaagctgaccagtgctgcacactaggggcacacacctttccatgagcagctcctgccctgtggcgacagccagcgtgcacccagacgctggtgccatggcgaagcaggcgttcaagaccatggagaagacaactcctcatctagaaaatgaggacacctcagtgacaaacacacctttttataccaatcagtatcctctgttcattaaaactggctatccattacaaaaaaaaaaa

SEQ ID NO: 5890 - DNA, 1039 bp, Homo sapiens
agcgggagttcccctggctctgaccgcgctggcctgggcccgagagcccaggaggcgtgtctcagagaaaagatataagcggccccggacgctaaagcggtgccagcggcggagtctccaactgggagagctgcagctgccgagaggaggagaacgctgaggtcggtcggaccaacggacgcgctgaccgctgccaactgcagctcgcgctgcctcctgctcgcgccgtgccactaaggtcactcccgcctccgagagcccagagccgagatggaaacggtccaggagctgatccccctggccaaggagatgatggcccagaagcgcaaggggaagatggtgaagctgtacgtgctgggcagcgtgctggccctcttcggcgtggtgctcggcctgatggagactgtgtgcagccccttcacggccgccagacgtctgcgggaccaggaggcagccgtggcggagctgcaggccgccctggagcgacaggctctccagaagcaagccctgcaggagaaaggcaagcagcaggacacggtcctcggcggccgggccctgtccaaccggcagcacgcctcctaggaactgtgggagaccagcggagtgggagggagacgcagtagacagagacagaccgagaaggaagggagagacagagggggcgcgcgcacaggagcctgactccgctgggagagtgcaggagcacgtgctgttttttatttggacttaacttcagagaaaccgctgacatctagaactgacctaccacaagcatccaccaaaggagtttgggattgagttttgctgctgtgcagcactgcattgtcatgacatttccaacactgtgtgaattatctaaatgcgtctaccattttgcactagggaggaaggataaatgctttttatgttattattattaattattacaatgaccaccattttgcattttgaaataaaaaactttttataccataccgctgaagggcgagggatagaaaagcggcctgccaactccctacaaggagggcgcggccgcgcc

SEQ ID NO: 5891 - DNA, 2967 bp, Homo sapiens
tagtttggttcttgggggctagacaagtttcttccccggtggggcggctgaacactcttcccaagtacctgctttgggtccaagtttcctacctatgtctctagtctgtagggatttcttgatttctaactcactattttcaccaatcctggggaaaatatgtatcgacctaaggttaaattccacctggcccaggagcctcctttggaaaccaggaagccgggaatctcgttgcaaaggaatcctgggcctcagaggagtcgttgcctctgcctcatagcataccccgacactgtctctgttttgggatgcagggttctgtttctgtctttttgagaagttcctggtttaattcactctcccatgataaactgttgtgtctggtatgtgttacgcagctgcctttcagttagctcttgcccgggagtgcatcaagatgagagtgacccagtgaaaccagaaactgtcattgagtagcaggatgggaaagcaatgtctagggaccaggatccctttgtcagtttttcctttttcctctcctccggcccctcccaggccttctctgagggagaagaggaagggctatgcaaatgagcacccttttcttatataggggcctatcccagtccccccagtgcctttggtcgcgggacgggaagaacacaatggatctggtgctaaaaagatgccttcttcatttggctgtgataggtgctttgctggctgtgggggctacaaaagtacccagaaaccaggactggcttggtgtctcaaggcaactcagaaccaaagcctggaacaggcagctgtatccagagtggacagaagcccagagacttgactgctggagaggtggtcaagtgtccctcaaggtcagtaatgatgggcctacactgattggtgcaaatgcctccttctctattgccttgaacttccctggaagccaaaaggtattgccagatgggcaggttatctgggtcaacaataccatcatcaatgggagccaggtgtggggaggacagccagtgtatccccaggaaactgacgatgcctgcatcttccctgatggtggaccttgcccatctggctcttggtctcagaagagaagctttgtttatgtctggaagacctggggccaatactggcaagttctagggggcccagtgtctgggctgagcattgggacaggcagggcaatgctgggcacacacaccatggaagtgactgtctaccatcgccggggatcccggagctatgtgcctcttgctcattccagctcagccttcaccattactgaccaggtgcctttctccgtgagcgtgtcccagttgcgggccttggatggagggaacaagcacttcctgagaaatcagcctctgacctttgccctccagctccatgaccccagtggctatctggctgaagctgacctctcctacacctgggactttggagacagtagtggaaccctgatctctcgggcacttgtggtcactcatacttacctggagcctggcccagtcactgcccaggtggtcctgcaggctgccattcctctcacctcctgtggctcctccccagttccaggcaccacagatgggcacaggccaactgcagaggcccctaacaccacagctggccaagtgcctactacagaagttgtgggtactacacctggtcaggcgccaactgcagagccctctggaaccacatctgtgcaggtgccaaccactgaagtcataagcactgcacctgtgcagatgccaactgcagagagcacaggtatgacacctgagaaggtgccagtttcagaggtcatgggtaccacactggcagagatgtcaactccagaggctacaggtatgacacctgcagaggtatcaattgtggtgctttctggaaccacagctgcacaggtaacaactacagagtgggtggagaccacagctagagagctacctatccctgagcctgaaggtccagatgccagctcaatcatgtctacggaaagtattacaggttccctgggccccctgctggatggtacagccaccttaaggctggtgaagagacaagtccccctggattgtgttctgtatcgatatggttccttttccgtcaccctggacattgtccagggtattgaaagtgccgagatcctgcaggctgtgccgtccggtgagggggatgcatttgagctgactgtgtcctgccaaggcgggctgcccaaggaagcctgcatggagatctcatcgccagggtgccagccccctgcccagcggctgtgccagcctgtgctacccagcccagcctgccagctggttctgcaccagatactgaagggtggctcggggacatactgcctcaatgtgtctctggctgataccaacagcctggcagtggtcagcacccagcttatcatgcctggtcaagaagcaggccttgggcaggttccgctgatcgtgggcatcttgctggtgttgatggctgtggtccttgcatctctgatatataggcgcagacttatgaagcaagacttctccgtaccccagttgccacatagcagcagtcactggctgcgtctaccccgcatcttctgctcttgtcccattggtgagaatagccccctcctcagtgggcagcaggtctgagtactctcatatgatgctgtgattttcctggagttgacagaaacacctatatttcccccagtcttccctgggagactactattaactgaaataaatactcagagcctgaaaaaaaaaaaaaaaaaaaaaaaaaaactccggagcgcatactatggtgccgggtggcgggaaaaaagagggttatgtggaaaatgggcgaccattggcccatgagctgtttttcctgacccccgttttcttgctcccacgggtgaaacttgcacggtctccccataagggaagccgaataaattcgaataacgcgggttacctgtaa

SEQ ID NO: 5892 - DNA, 6177 bp, Homo sapiens
  misc_feature (629)..(655): n is a, c, g, or t
  misc_feature (1915)..(1944): n is a, c, g, or t
  misc_feature (4358)..(4372): n is a, c, g, or t
tcaggccggcagcggggagccgagtggaggctaattttacttgctgggagcgaggagagtaatcctcctgccccccactcctgccccgccccctggctggctcagcagggcagctcagccgacagcctcagccagcctagtccccaaggcgggggcattggggacacagggaagggaaagcactggggtgggggagcaggagaaagccagattcccagggaagccatggagccatcctcaccccaggatgaaggcctgaggaagaaacagcccaagaagccagttcctgagattctgccaaggccaccccgggctttgttctgcctgaccctggagaaccccctgaggaaggcctgcatcagcattgtagaatggaagcccttcgagacgatcatcttgctcaccatctttgccaattgtgtggccctggccgtgtacctgcccatgccggaagatgacaacaactctctgaacctcggcctggagaagctggagtatttcttcctcattgtcttctcgattgaagccgccatgaagatcattgcctacggcttcttattccaccaggacgcttacctgcgcagtggctggaatgtgctggacttcaccattgtcttcctgggggtctnnnnnnnnnnnnnnnnnnnnnnnnnnntcatccaaagccacacagccccaatgagcagcaaaggagccggcttggatgtcaaggccctcagagccttccgagtgctcagacccctccggctggtgtcgggggtgcctagcctgcaggtggtcctgaactccatcttcaaggccatgctccccctctttcacatcgccctgctggtcctctttatggtcatcatctatgccatcatcgggctggagctcttcaagggcaagatgcacaagacctgctacttcattggtacagatatcgtggccacggtggagaatgaagagccatcgccctgcgccaggacgggctcagggcgccggtgcaccatcaatggcagtgagtgccggggcggctgcccagggcccaaccatggcatcacccacttcgacaacttcggcttctccatgctcaccgtgtaccagtgcattaccatggagggatggactgacgtcctttactgggtcaatgatgccatcgggaatgagtggccctggatctattttgtcaccctcattttgctgggatccttcttcatcctcaacctggtgctgggtgtcctgagtggggaattcaccaaggagcgggagaaggccaagtccaggggaaccttccagaagctccgggagaagcagcaactagatgaggaccttcggggctacatgagctggatcacgcagggcgaggtcatggatgttgaggacttcagagaaggaaaactgtctttggatgaaggtggctctgacacagagagcctgtatgaaattgcaggcttgaacaaaatcatccagttcatccgacattggaggcagtggaaccgcatctttcgctggaagtgccatgacatcgtgaagtccaaggtcttctattggctggtgattctcatcgttgccctcaacaccctgtctatcgcctcagagcaccacaaccagccgcactggctgacccgtttgcaagacattgccaaccgggtgctgctgtccctcttcaccactgagatgctgatgaagatgtacgggctgggcctgcgccagtacttcatgtctatcttcaaccgcttcgactgcttcgtggtgtgcagcggtatcctggagatcctgctggtggagtcgggcgccatgacacccctgggcatctccgtgctccgctgcatccgcctcctgaggatcttcaagatcaccaaatattggacgtcgctgagcaacctggtggcatccctgctcaactccatccgctccatcgcctccctgctgnnnnnnnnnnnnnnnnnnnnnnnnnnnnnncgcctcctgggcatgcagctctttggggggaggtatgactttgaagacacagaagtacggcgcagcaactttgacaactttccccaagccctcatcagcgtcttccaggtactgacaggggaagactggacctcaatgatgtacaatgggatcatggcctcgagcgggccgtcctaccctggcatgcttgtgtgcatttacttcatcatccttttcgtctgtggcaactacatcctgctcaatgtcttcctggccattgccgtggacaacctggccgaggcggagagcctgacttctgcccagaaggccaaggctgaggagaaaaaacgcaggaagatgtccaagggtctcccagacaagtcagaagaggagaagtcaacgatggccaagaagctggagcagaaacccaagggtgagggcatccccaccactgccaagctgaaaatcgatgagtttgaatctaatgtcaatgaggtgaaggatccctacccctcagccgacttcccaggggatgacgaggaagatgagcctgagatcccgctgagcccccgaccacgtcccctggctgagctgcagctgaaagagaaggccgtgcccattccagaagccagctccttcttcatcttcagccccaccaataagatccgtgtcctgtgtcaccgcatcgtcaatgccacctggttcaccaacttcatcctgctcttcatcctgctcagcagcgctgcactggctgcggaagaccccatccgggctgattccatgagaaatcagatccttaaacactttgacatcgggttcacctctgtcttcactgtggagattgtcctcaagatgacgacctacggagccttcctgcacaagggttccttctgccgcaattacttcaacatgctggacctgctggtggtggccgtgtccctcatctccatgggacttgagtccagtgccatctccgtggtgaagatcctgagggtgctgagggtgctccgaccactcagagccatcaacagagccaaggggttgaagcacgtggctaggtgcatgttcgtggccatcagcaccatcgggaacatcgtgctggtcactaccctcctacagttcatgtttgcctgcatcggcgtccagctcttcaaggggaagttcttcaggtgcaccgacttgtccaagatgacagaggaggagtgcaggggctactactacgtgtacaaggacggggaccccatgcagatagagctgcgtcaccgcgagtgggtacacagcgacttccacttcgacaatgtgctctcagccatgatgtccctcttcacggtctccaccttcgagggatggcctcagctgctgtacaaggccatagactccaatgcggaggacgtgggtcccatctacaacaaccgtgtggagatggccatcttcttcatcatctacatcatcctcattgccttcttcatgatgaacatctttgtgggcttcgtcattgtcaccttccaggagcagggagagactgagtacaagaactgtgagctggacaagaaccagcgccaatgtgtacagtatgccctgaaggcccgcccactgaggtgctacattcccaaaaacccataccagtaccaggtgtggtacattgtcacctcctcctactttgaatacctgatgtttgccctcatcatgctcaacaccatctgcctcggcatgcagcactacaaccagtcggagcagatgaaccacatctcagacatcctcaatgtggccttcactatcatcttcaccctggagatgatcctcaagctcatggccttcaaggccaggggctactttggaaacccctggaatgtgtttgacttcctgattgtcattggcagcatcattgatgtcatcctcagtgagatcgacactttcctggcctccagcgggggactgtattgcctgggtggaggctgcgggaacgttgacccagatgagagtgcccgcatctccagcgccttcttccgcctgttccgtgtcatgaggctgatcaagctgctgagccgggcagaaggagtgcgaaccctcctgtggacgttcatcaagtccttccaggccctaccctacgtggctctgctcatcgtcatgctcttcttcatctacgctgtcatcggcatgcagatgtttgggaagatcgccttggtggatgggacccaaataaaccggaacaacaacttccagaccttcccacaagctgtgctactgctcttcaggtgtgcaacaggtgaggcctggcaggagatcctactggcctgcagctatgggaagctgtgtgacccagagtcggactatgccccaggggaggagtacacatgtggcaccaactttgcatactactacttcatcagcttctacatgctctgtgccttcctggtcatcaacctctttgtggnnnnnnnnnnnnnnnattttgactacctcacccgggactggtccatcctgggccctcatcacctggatgagttcaaggccatctgggcagagtatgacccagaggctaaggggaggatcaaacacctggacgtggtgaccctgctgagaaggattcagccccctctgggctttgggaagttctgcccacatcgggtagcttgtaagcggctggtgggcatgaacatgcccctgaacagcgacggcacagtcaccttcaatgccacactctttgccctggtccgcacggcactcaagatcaagacggaaggtaactttgagcaggccaacgaggagctgagggccatcatcaagaagatctggaagagaaccagcatgaagctcttggaccaggtcatccctccaataggagatgatgaggtgacagtggggaagttctacgccacattcctcatccaggagcacttccggaagttcatgaaacgccaagaggagtattatggctatcggcccaagaaggacattgtacagatccaggcagggctgcggaccattgaggaagaggcagcccccgagatctgtcgcacggtctcaggagacctggctgctgaggaggagctggagagagccatggtggaggctgcgatggaggaggggatattccggaggactggaggcctgtttggccaggtggacaacttcctggaaaggaccaactccctgccccctgtcatggccaatcagagacccctccagtttgctgagatagagatggaagagatggagtcacctgtcttcttggaggacttcccacaagatccacgcaccaaccccctggctcgtgccaataccaacaatgccaacgccaatgtcgcctatgcgaacagcaaccatagcaacagccatgtgttttccagtgtccactatgaaagggagttcccagaagagacagagacgcctgctaccagaggacgagcccttggccaaccctgcaggtccctgggaccccacagcaaaccctgtgtggagatgctgaagggactgctgacccagagggcaatgcccagaggccaggcacctcctgccccctgccagtgccccagggtggagtcctccatgcctgaggacagaaagagctccacaccagggtctcttcatgaggagacaccccacagcaggagcaccagggagaatacttccaggtgctcagcaccagctacagccctgctgatccaaaaggctctggttcgagggggcctgggcaccttggcagctgatgcaaacttcatcatggcaacaggccaggccctcggagatgcctgccaaatggaaccagaggaagtggagatcatggcaacagagctactgaaaggacgagaggccccagacggcatggccagctccctgggatgcctgaacctcgggtcctccctgggcagcctcgaccaacaccagggctcccaggagacccttattcctccaaggctgtgatgcccacacagcatcagcatgggcttagagctggcatgaccaatgggggtggggaagttgctggggtggagaagggctagcccaccgcagcagcctccctccctctcagcagctagatgcatgcctgaggcagggtggtcaggaaccacctcaaaaagtgcggaggaagtagctggacaggccctgcccctcaccagcaagaggcatgattggatggagcttctaatgtcattcaaaaaggcctggtcagtgcctgtccctagggccactcccacctgcaggacattaaaatctccaggcctgtgacactggcaaaaaaaaaaaaaaaaa

SEQ ID NO: 5893 - DNA, 1898 bp, Homo sapiens
  misc_feature (179)..(200): n is a, c, g, or t
ttcgtctacgactgtagcaagtttagacacaccctcaaagccgaactaaatcgaaccccaagagcaggaaaagctaaaggaacccatcaaggcaagaatcgaaactaaaaaaaaaaaaaatccaattaagaaagaaaacccctggagaatattcaccacaccagcgaacagaatatccnnnnnnnnnnnnnnnnnnnnnncaccagcacgaagaaaactctattttcttaaccgattaattcagaagccaccgtccactttgccttgtctaaataaacaaacccgtaaactgttttatacagagacagcaaaatcttggtttattaaaggacagtgttactccagataacacgtaagtttcttcttgcttttcagagacctgctttcccctcctcccgtctcccctctcttgccttcttccttgcctctcacctgtaagatattattttatcctatgttgaagggagggggaaagtccccgtttatgaaagtcgctttctttttattcatggacttgttttaaaatgtaaattgcaacatagtaatttatttttaatttgtagttggatgtcgtggaccaaacgccagaaagtgttcccaaaacctgacgttaaattgcctgaaactttaaattgtgctttttttctcattataaaaagggaaactgtattaatcttattctatcctcttttctttctttttgttgaacatattcattgtttgtttattaataaattaccattcagtttgaatgagacctatatgtctggatactttaatagagctttaattattacgaaaaaagatttcagagataaaacactagaagttacctattctccacctaaatctctgaaaaatggagaaaccctctgactagtccatgtcaaattttactaaaagtctttttgtttagatttattttcctgcagcatcttctgcaaaatgtactatatagtcagcttgctttgaggctagtaaaaagatatttttctaaacagattggagttggcatataaacaaatacgttttctcactaatgacagtccatgattcggaaattttaagcccatgaatcagccgcggtcttaccacggtgatgcctgtgtgccgagagatgggactgtgcggccagatatgcacagataaatatttggcttgtgtattccatataaaattgcagtgcatattatacatccctgtgagccagatgctgaatagattttttcctattatttcagtcctttataaaaggaaaaataaaccagtttttaaatgtatgtatataattctcccccatttacaatccttcatgtattacatagaaggattgcttttttaaaaatatactgcgggttggaaagggatatttaatctttgagaaactattttagaaaatatgtttgtagaacaattatttttgaaaaagatttaaagcaataacaagaaggaaggcgagaggagcagaacattttggtctagggtggtttctttttaaaccattttttcttgttaatttacagttaaacctaggggacaatccggattggccctcccccttttgtaaataacccaggaaatgtaataaattcattatcttagggtgatctgccctgccaatcagactttggggagatggcgatttgattacagacgttcgggggggtggggggcttgcagtttgttttggagataatacagtttcctgctatctgccgctcctatctagaggcaacacttaagcagtaattgctgttgcttgttgtcaaaatttgatcattgttaaaggattgctgcaaataaatacactttaatttcagtcaaaaaaaaaaaaaaaaaaaaaaaaaataaaaaaaaaaaaaaaaaaaaaaaaaaaaaaaaaaacaaaaacaaaactc

SEQ ID NO: 5894 - DNA, 1430 bp, Homo sapiens
agttttttttttttttttttatttcaaatagctttttattcacataggactagaggaaaatctaattcagtagaaaacacaaaacaaaaggggttattttattctattcaaaggagagtcatgacattaacaacaccaacaataatttggaacacaccattgcattttcaaatacaaaaaaaggaatcagaagaaggtggacattccatgagcatgttcaacaatggtattgttattagatattaatcctttattagattattatttttcacatctgggaaaataccactggcagcacaattttaagaaaagtttggcaacatgtatttttctcagcagctctggatgacagatcttggtgatgctagccaaaaaaaatttaagggccaaaaccactggtgcacagaggacaacaaactgatcttattacagaaacggatatcagaccacaatagaaaagacatttttattttacactaagccaaaaattctaggctattggcatacatatcaacaagcctggtctagaatgtttaatcacaaaagtactaaatattggtttcctgcctgccctgctcaccttatttaaaaatatcaggatatttgctttcaaatgacacagattgctgaggctgtaacctacaaaatggtcactcatttttaacggcttgtttgttatacctagaaaccactgaaaggacaatttcctatatcatagttactgtggaggtagacactgacgttgcttccccagaaagaatttgagactattaaagtgtaggaagaacaaatcgggagttttatctaaaaacaacccttacatacccaaggaagtgccattccacttcagattttgcaattcttctctgttttttgttttttttttttattactccatttctgttgaattttaagttaataaaaccaatagccaaatattgctgcaagatctctatgaattgtcacaaaatgccaactccaagaaggggcatcacaatgaaggattaaggacatgaccacaatgtcccaggaaacagtgaactctccctattatatttaatattgcaacatttgcttctattgtgcctaaggcccaaacaaaaaaataaaacgattccaattttgctttaaaaagtctggaaatctcttcctttcaaaacatactgatttaaagtttctccttttccagttttctttcaggtgagagttcatgcttgtgggtttgactcaaagacatctcccaaaggacaaggaaatgtatgtacaattttctttccacaataactagtacaacatgattaggtagtagccagatgatggcaaactatgtttgaaacaaaaagaataattctgcattagtaaaacaaactgccaagtccaaaattgtagaccaaaatacaataactaaatctatcttttaagaatatttg

SEQ ID NO: 5895 - DNA, 2397 bp, Homo sapiens
gtgagctcactcccgcctccatgttcccggagtcgcctggaagcgtccgcccaaggtcgcgggccgcttggggagtcagcagcgcgccaggccccttcgggccccacacgcattaggtgccttcttgatgggtacggagtgaacgcgggcggcggcgggaccgaggcagcgcccagtttgtaaccgccgcgccgcccgtgcccgcgcgcgccacaccccagcgcgcttccggccgggccacgtgaccgcgcgtgcacgtgttccggcctctccgcttcgccgctccgaacctcctcctggtcgtcccggcattcgtccacgcggagccggcttgggcggggcccgggaggcggcggccggagaagccgcggagacgcgagcgccgagcgtcgcgagggagcaggcccgggcaggcaagcggcggcctccgccatgaaccccaggggcctgttccaggacttcaaccccagtaagtttctcatctacacctgcctgctgctcttctcggtgctgctgcccctccgcctggacggcatcatccaatggagctactgggccgtctttgcccccatatggctgtggaagcttctagtcgtcgcaggcgcctccgtgggcgcgggcgtttgggcccgcaaccctcgctaccgcaccgagggagaggcctgtgtggagttcaaagccatgctgatcgctgtgggcatccacctgctgctgctcatgttcgaagtcctggtctgcgacagggtggagaggggcacccacttctggctgctggtcttcatgcctctcttcttcgtgtcccccgtgtccgtggctgcctgcgtctggggctttcgacacgataggtcgctggagctggagatcctgtgctcggtcaacatcctgcagttcatcttcatcgccctaaagctggacaggattattcactggccgtggctggtggtgtttgtgcccctgtggatcctcatgtcgttcctttgcctggtcgtcctctattacatcgtctggtccctcctgttcctgcggtccctggatgtggttgccgagcagcggagaacacacgtgaccatggctatcagttggataacgattgtcgtgcctctgctcacttttgaggtcctgctggttcacagattggatggccacaatacattctcctacgtctccatatttgtccccctttggctttccttactaactttaatggccacaacatttaggcgaaaggggggcaatcattggtggtttggcattcgcagagacttctgtcagtttctgcttgaaattttcccatttttaagagaatatgggaacatttcatatgatctccatcacgaagatagtgaagatgctgaagaaacatcagttccagaagctccgaaaattgctccaatatttggaaagaaggccagagtagttataacccagagccctgggaaatacgttcccccccctcccaagttaaatattgatatgccagattaaactcctagagaggacccaggcacacacagactccacttggccttcgcctcttgttcattcatcccaaacctggaaatggaaacaggcttcaaacactcgtctcacgccgtgtttgagatcaccgcctcatcagtatgcatcatagatggaggtggtttcagtatgtgggtgtgtgtgatgtgtacctgggtaagagacttgctttccaggttcgcactttcaggtgtagctgggggcagtaagtcgaattgttttagtaggtcctcaaaaggaataaccacacagctgtttgtttaaatgctactgtacctatcaaaactattgtttaaaaagtatttttatacactgctaatctaaaattgtatttcagattgtgcctgtcataacaatagcaaatgtaaaaagttctctttcccaccacttgtttataaacctcatagttgatatttttagtgttcctactgttaaaatactctctccttgggctttgctgatactggtctttaatattctgataggtgaatttttctaatggaatgaacccatgcatatatagtatttatatgaatattttagcagtgtaatatgttgaattctagttctctgcattaccattattacgttaaagtattttttaaagcttagggttgaagatagtgtgttctaatggaagatcgttcttgaaaactggataaaacagtatgtgccttggtgtggatcttaccaagtactaggcatgaatgtaggggctggcaaatcccatgggtcttaatatttagggggttaggtaacccaaggcccctgggtagtaccgtagtaaagaagagcctggccttgggaattgtgacgggctagggggccagccaagcgcacgttttcaactgatttccccaggtaccggtgggaagaccc

SEQ ID NO: 5896 - DNA, 4422 bp, Homo sapiens
  misc_feature (455)..(501): n is a, c, g, or t
  misc_feature (1260)..(1260): n is a, c, g, or t
  misc_feature (1265)..(1265): n is a, c, g, or t
  misc_feature (1268)..(1268): n is a, c, g, or t
  misc_feature (2079)..(2114): n is a, c, g, or t
  misc_feature (2683)..(2702): n is a, c, g, or t
  misc_feature (2782)..(2797): n is a, c, g, or t
ggccggggtctagtgggtgtgtcaggaagtaaaaaaggagaacaaatcattgtaaatgtggtaagtgctttgatagggatagtccctgtaagaggagttagtttagatggcattcaaagaagggggccaaggaaggaatatttaagcaaaggcatgaaggctgaggagttagccatgtactgactggtgagtaactttccagttattcaagctgaatccagcttctgatatttaaggagcccttttggaaaaaaggaaaataatcctctataaaagcaacaaaaaatatctatttaaagtctattatatttaagtcattatgtgagccctttcaagacatagtgagaaatcatgattatattctttgaccaaactcttattataatacaactccaaatacctgcattttcaaatgtgaattattcatgttttacaaacacatataatgcttatannnnnnnnnnnnnnnnnnnnnnnnnnnnnnnnnnnnnnnnnnnnnnntgtgcagaaaccaaggcacaaagaagcttcataagcaggattcaagccatgtagtctgtctcccaaattgcttttaactcctgttctttgttacttctccatttaaaaattctgttaatgagaaggcactgactcattgtaccaggttattttaagtttaactttaaattccaaattcattcacttgacctgcagagggaaatgcttcagggctccagtgtggtatggacgtgagtatcaaatgctgacggtgactttttttgtttgtttcaaaggattattgggactttgcagaactctgcagagttttcagaagcctttcactgccgcaagaattcatacatgaatccagaaaagaagtgccgggtttggtgatcttcaaaagaagcattgcagcccttggctagacttgccaacaccacagaaatggggaattctctaatcgaaagaaaatgggccctaggggtcactgtactgacttgagggtgattaacagagagggcaccatcacaatacagataacattaggttgtcctagaaagggtgtggagggaggaagggggtctaaggtctatcaagtcaatcatttctcactgtgtacataatgcttaatttctaaagataatattactgtttatttctgtttctcatatggtctaccagtttgctgatgtccctagaaaacaatgcaaaacctttgaggtagaccaggatttctaatcaaaagggaaaagaagatgttgaagaatacagtaggcnccagnagnacagtaggtgacactcatagtttaaaacacattgcctaactactagtttgtacttttatttgcaacatttacagtccttcaaaatccttccaaagaattcttatacacattggggccttggagcttacatagttttaaactcatttttgccatacatcagttattcattctgtgatcatttattttaagcactcttaaagcaaaaaatgaatgtctaaaattgttttttgttgtacctgctttgactgatgctgagattcttcaggcttcctgcaattttctaagcaatttcttgctctatctctcaaaacttggtatttttcagagatttatataaatgtaaaaataataatttttatatttaattattaactacatttatgagtaactattattataggtaatcaatgaatattgaagtttcagcttaaaataaacagttgtgaaccaagatctataaagcgatatacagatgaaaatttgagactatttaaacttataaatcatattgatgaaaagatttaagcacaaactttagggtaaaaattgccattggacagttgtctagagatatatatacttgtggttttcaaattggactttcaaaattaaatctgtccctgagagtgtctctgataaaagggcaaatctgcacctatgtagctctgcatctcctgtcttttcaggtttgtcatcagatggaaatattttgataataaattgaaattgtgaactcattgctccctaagactgtgacaactgtctaactttagaagtgcatttctgaatagaaatgggaggcctctgatgnnnnnnnnnnnnnnnnnnnnnnnnnnnnnnnnnnnntggaaaagaaccgtttactgcttgataggaattcatcttttgaggcttctgttcctctcttttcctgttgtattgactattttcgttcattacttgattaagattttacaaaagaggagcacttccaaaattcttatttttcctaacaaaagatgaaagcagggaatttctatctaaatgatgagtattagttccctgtctcttgaaaaatgcccatttgcctttaaaaaaaaaggttacagaaatactataacatatgtacataaattgcataaagcataagtatacagttcaataaacttaactttaactgaacaatggccctgtagccagcacctgtaagaaacagagcagtaccagcgctctaaaagcacctccttgtcactttattactcccagaacaacaactatcctgacttctaatatcattcactagctttgcctggttttgtcttttatgtagatagaatcaatcagtatgtattcttttgtgcctggcttctttctctcagccttacatttgtgagattcctctgtattgtgctgattgtggatcttttcattctcannnnnnnnnnnnnnnnnnnngtgggacttattacaatttgttcatcctattgttgatgggcacttgagaactttccattttggcgctattacaaatagtnnnnnnnnnnnnnnnntgcatgttaccatcttacttgagcctttaatggacttatttcttcaaatccttccaaaaattattataagcattgaaattatagtttcaagccaactgtggatacccttaccctttcctcctttatcacaaccaccgttacaagtatacttatatttccctaaaatacatttaaaacttacctaagtgacatttgtagttggagtaataggagcttccagctctaataaaacagctgtctctaacttattttatttccatcatgtcagagcaggtgaagagccagaagtgaagagtgactagtacaaattataaaaagccactagactcttcactgttagctttttaaaacattaggctcccatccctatggaggaacaactctccagtgcctggatcccctctgtctacaaatataagattttctgggcctaaaggatagatcaaagtcaaaaatagcaatgcctccctatccctcacacatccagacatcatgaattttacatggtactcttgttgagttctatagagccttctgatgtctctaaagcactaccgattctttggagttgtcacatcagataagacatatctctaattccatccataaatccagttctactatggctgagttctggtcaaagaaagaaagtttagaagctgagacacaaagggttgggagctgatgaaactcacaaatgatggtaggaagaagctctcgacaatacccgttggcaaggagtctgcctccatgctgcagtgttcgagtggattgtaggtgcaagatggaaaggattgtaggtgcaagctgtccagagaaaagagtccttgttccagccctattctgccactcctgacagggtgaccttgggtatttgcaatattcctttgggcctctgcttctctcacctaaaaaaagagaattagattatattggtggttctcagcaagagaaggagtatgtgtccaatgctgccttcccatgaatctgtctcccagttatgaatcagtgggcaggataaactgaaaactcccatttaagtgtctgaatcgagtgagacaaaattttagtccaaataacaagtaccaaagttttatcaagtttgggtctgtgctgctgttactgttaaccatttaagtggggcaaaaccttgctaattttctcaaaagcatttatcattcttgttgccacagctggagctctcaaactaaaagacatttgttattttggaaagaagaaagactctattctcaaagtttcctaatcagaaatttttatcagtttccagtctcaaaaatacaaaataaaaacaaacgtttttaatactaaaaaaaaaaaaaaaaaacaactctgttccaaactgccaactcctgtgtaaatctctaccccatttatttcttgaaaaatattaagattaaatggagcttttatctctgtagtcttgcatttcccactagcttcaaattgaatttttagaaaatgaatgatataagctttgtatccattatgtccttgttttccccaccctttttcaaagatcaccatgactttctgattggattttttttcaaaagtgaaatggccatcaaatgttatatggagtcactagcataatcagatgactt

SEQ ID NO: 5897 - DNA, 5438 bp, Homo sapiens
  misc_feature (810)..(869): n is a, c, g, or t
  misc_feature (1572)..(1592): n is a, c, g, or t
cctcttgcggccacaggcgcggcgtcctcggcggcgggcggcagctagcgggagccgggacgccggtgcagccgcagcgcgcggaggaacccgggtgtgccgggagctgggcggccacgtccggacgggaccgagacccctcgtagcgcattgcggcgacctcgccttccccggccgcgagcgcgccgctgcttgaaaagccgcggaacccaaggacttttctccggtccgagctcggggcgccccgcaggcgcacggtacccgtgctgcagtcgggcacgccgcggcgccgggggcctccgcagggcgatggagccggtctgcaaggaaagtgaggcgccgccgctgcgttctggaggaggggggcacaaggtctggagaccccgggtggcggacgggagccctccccccgccccgcctccggggcaccagctccggctccattgttcccgcccgggctggaggcgccgagcaccgagcgccgccgggagtcgagcgccggccgcggagctcttgcgaccccgccaggacccgaacagagcccgggggcggcgggccggagccggggacgcgggcacacgcccgctcgcacaagccacggcggactctcccgaggcggaacctccacgccgagcgagggtcagtttgaaaaggaggatcgagctcactgtggagtatccatggagatgtggagccttgtcaccaacctctaactgcagaactgggatgtggagctggaagtgcctcctcttctgggctgtgctggtcacagccacactctgcaccgctaggccgtccccgaccttgccnnnnnnnnnnnnnnnnnnnnnnnnnnnnnnnnnnnnnnnnnnnnnnnnnnnnnnnnnnnnctcttcagaggagaaagaaacagataacaccaaaccaaacccccgtagctccatattggacatccccagaaaagatggaaaagaaattgcatgcagtgccggctgccaagacagtgaagttcaaatgcccttccagtgggaccccaaaccccacactgcgctggttgaaaaatggcaaagaattcaaacctgaccacagaattggaggctacaaggtccgttatgccacctggagcatcataatggactctgtggtgccctctgacaagggcaactacacctgcattgtggagaatgagtacggcagcatcaaccacacataccagctggatgtcgtggagcggtcccctcaccggcccatcctgcaagcagggttgcccgccaacaaaacagtggccctgggtagcaacgtggagttcatgtgtaaggtgtacagtgacccgcagccgcacatccagtggctaaagcacatcgaggtgaatgggagcaagattggcccagacaacctgccttatgtccagatcttgaagactgctggagttaataccaccgacaaagagatggaggtgcttcacttaagaaatgtctcctttgaggacgcaggggagtatacgtgcttggcgggtaactctatcggactctcccatcactctgcatggttgaccgttctggaagccctggaagagaggccggcagtgatgannnnnnnnnnnnnnnnnnnnnatcatcatctattgcacaggggccttcctcatctcctgcatggtggggtcggtcatcgtctacaagatgaagagtggtaccaagaagagtgacttccacagccagatggctgtgcacaagctggccaagagcatccctctgcgcagacaggtaacagtgtctgctgactccagtgcatccatgaactctggggttcttctggttcggccatcacggctctcctccagtgggactcccatgctagcaggggtctctgagtatgagcttcccgaagaccctcgctgggagctgcctcgggacagactggtcttaggcaaacccctgggagagggctgctttgggcaggtggtgttggcagaggctatcgggctggacaaggacaaacccaaccgtgtgaccaaagtggctgtgaagatgttgaagtcggacgcaacagagaaagacttgtcagacctgatctcagaaatggagatgatgaagatgatcgggaagcataagaatatcatcaacctgctgggggcctgcacgcaggatggtcccttgtatgtcatcgtggagtatgcctccaagggcaacctgcgggagtacctgcaggcccggaggcccccagggctggaatactgctacaaccccagccacaacccagaggagcagctctcctccaaggacctggtgtcctgcgcctaccaggtggcccgaggcatggagtatctggcctccaagaagtgcatacaccgagacctggcagccaggaatgtcctggtgacagaggacaatgtgatgaagatagcagactttggcctcgcacgggacattcaccacatcgactactataaaaagacaaccaacggccgactgcctgtgaagtggatggcacccgaggcattatttgaccggatctacacccaccagagtgatgtgtggtctttcggggtgctcctgtgggagatcttcactctgggcggctccccataccccggtgtgcctgtggaggaacttttcaagctgctgaaggagggtcaccgcatggacaagcccagtaactgcaccaacgagctgtacatgatgatgcgggactgctggcatgcagtgccctcacagagacccaccttcaagcagctggtggaagacctggaccgcatcgtggccttgacctccaaccaggagtacctggacctgtccatgcccctggaccagtactcccccagctttcccgacacccggagctctacgtgctcctcaggggaggattccgtcttctctcatgagccgctgcccgaggagccctgcctgccccgacacccagcccagcttgccaatggcggactcaaacgccgctgactgccacccacacgccctccccagactccaccgtcagctgtaaccctcacccacagcccctgctgggcccaccacctgtccgtccctgtcccctttcctgctggcaggagccggctgcctaccaggggccttcctgtgtggcctgccttcaccccactcagctcacctctccctccacctcctctccacctgctggtgagaggtgcaaagaggcagatctttgctgccagccacttcatcccctcccagatgttggaccaacacccctccctgccaccaggcactgcctggagggcagggagtgggagccaatgaacaggcatgcaagtgagagcttcctgagctttctcctgtcggtttggtctgttttgccttcacccataagcccctcgcactctggtggcaggtgccttgtcctcagggctacagcagtagggaggtcagtgcttcgtgcctcgattgaaggtgacctctgccccagataggtggtgccagtggcttattaattccgatactagtttgctttgctgaccaaatgcctggtaccagaggatggtgaggcgaaggccaggttgggggcagtgttgtggccctggggcccagccccaaactgggggctctgtatatagctatgaagaaaacacaaagtgtataaatctgagtatatatttacatgtctttttaaaagggtcgttaccagagatttacccatcgggtaagatgctcctggtggctgggaggcatcagttgctatatattaaaaacaaaaaagaaaaaaaaggaaaatgtttttaaaaaggtcatatattttttgctacttttgctgttttatttttttaaattatgttctaaacctattttcagtttaggtccctcaataaaaattgctgctgcttcaaaaaacaaagggctgtatgaaaagggtgggaatgtccactggaaagaagggacacccacgggccctggggctaggtctgtcccgagggcaccgcatgctcccggcgcaggttccttgtaacctcttcttcctaggtcctgcacccagacctcacgacgcacctcctgcctctccgctgcttttggaaagtcagaaaaagaagatgtctgcttcgagggcaggaaccccatccatggcagttaggaggcgctggggcagagagtcaaggcccagcagccatcgaccatgggatggtttcctccaagggaaaccggtggggttgggttggggaggggggcacctacctagggattagccacggggtagagctacagtgatataagaggaaagcaagggcgcggttgctcacgcctgtaatcccagcactttgggacaccgaaggtgggcagatcacttcaggtcaggagtttgagaccagcctggccaacttagtgaaaccccatctctactaaaaatgcaaaaattatccaggcatggtggcacacgcctgtaatcccagctccacaggaggctgaggcagaatcccttgaagctgggaggcggaggttgcagtgagccgagattgcgccattgcactccagcctgggcaacagagaaaacaaaaaggaaaacaaatgatgaaggtctgcagaaactgaaacccagacatgtgtctgccccctctatgtgggcatggttttgccagtgcttctaagtgcaggagaacatgtcacctgaggctagttttgcattcaggtccctggcttcgtttcttgttggtatgcctccccagatcgtccttcctgtatccatgtgaccagactgtatttgttgggactgtcgcagatcttggcttcttacagttcttcctgtccaaactccatcctgtccctcaggaacggggggaaaattctccgaatgtttttggttttttggctgcttggaatttacttctgccacctgctggtcatcactgtcctcactaagtggattctggctcccccgtacctcatggctcaaactaccactcctcagtcgctatattaaagcttatattttgctggattactgctaaatacaaaagaaagttcaaaatgttttcatttctgtagggaaaatgggattgctgctttaaatttctgagctagggattttttggcagctgcagtgttggcgactattgtaaaattctctttgtttctctctgtaaatagcacctgctaacattacaatttgtatttatgtttaaagaaggcatcatttggtgaacagaactaggaaatgaatttttagctcttaaaagcatttgctttgagaccgcacaggagtgtctttccttgtaaaacagtgatgataatttctgccttggccctaccttgaagcaatgttgtgtgaagggatgaagaatctaaaagtcttcataagtccttgggagaggtgctaggaaaatataaggcactatcataattacagtgatgtccttgctgttactactcaaatcacccacaaatttccccaaagactgcgctagctgtcaaataaaagacagtgaaatatgaacctgaggg

SEQ ID NO: 5898 - DNA, 1489 bp, Homo sapiens
  misc_feature (1473)..(1473): n is a, c, g, or t
  misc_feature (1480)..(1480): n is a, c, g, or t
taagagtggggccctagtctgataggactggtgtccttacaagaagagggagagtcctcagagagtcctctctctcggcatggacacaaaagaaaagccatgtgaggacacagagagaaggtggctgtctacgagctaggaagaaaggcctcaccggaaaccaaccctcacagcagctccatcttggacttccagcctccggaactgtgagaaaataaatgtttgcaattcaggctcagagccactcagacattgggaagcaagtttgtcaagatgacagagaaccgaggtaatggattcgagtgatgaaacaggaagttcattcatgagtttttggccacacctccaaagtgaccgacttagccagaaatgggataactgggtttccctacttctcttttatcatcctcaattgagagtgacccaaatattagagcttagatggaacctttagttgaaaatcttggcttactcgtcccgtcccaccagcctgccacccatttcaagtttgaagagacaaagacacatggaccttatgtaattactggggattaccccaggagtctgtggcaaaagtcagcttcttccctccctgcttccccgccctgtctctggtgctttctaccaacactgggctgtttctgtgatcacacttaagcgtacctaacctgcgaatgctgtatagaaggtgctaatgaacatgatttagctttaacactcagttttctaaagggacacgtgggggcagcaaatgtttaggcaaaaacaattccagttctagcctctactgtctacatatgtgtatacatttggggaaacgtttgggaaaggggatatttgagagcttctttttcttttttgtggtttagttatttgatgatattgagattgtttctgagccatgtgcttcaacatcgggattggggatttcagaaaaagttttagtcactgtgattccgatttagcttccaaatgtgtctctgctaagagacttaaaagcactcataaatagcacgtgtgtcttctttgcagtgtttgctaattttgagtcacatctttttagaaaatcatgagatttggtgtcacagagactggaataaatatagtcaaacttattggtgaagatttcctttagctgttttcataatccatttccattgttatgattattgatgaataaaacattttctttaggtagatacttcttttttccccccaccttgatttaatgtttccactcttattgtcaagtttcttattactccctaataactctcaataaaataatgattcctgggagattattcctgctttcctactatcaccagttgatttgaaaagacagaacaataccgtagaagcttcactaatacattgaaagataaaatgataatactaaatactaaaatatgaaaagtgatactaaaagtggagtcctggcactagtattttttttttgagtctttaaatttnatttatntatttttga

SEQ ID NO: 5899 - DNA, 1537 bp, Homo sapiens
ttttttttttttacaaacggcgcatttcccttggagtggaacagaaaggaaaccatttaatggcgcccttcttttcaagcatgaatacattttaatgaaactattttattgtatttgaggaaatggagagttgaacattccaaccaatcaatagccaattaattgctataaagctaaaaagaaaataaataaatcctgagtctattttaaacactgcaaaaagttcagagcctcagaatctggccttcccctccataaggtgcacgagcatgtaaacacacacacacacacacacacacacacacacacactcactcactcccctacacctcagacatacttgaaactcagaaacagcactgagtctccccatgccaattcttgcctgctgtcttcgacttgggtcagagaaggtgagcagacccggcagcagcctgtcccggggctcaggaagaggcaggcccatcccctggccccaagcacccagcacaacagagggtggcgggcagtgagggcctggcgttgcctgggccccacttctcagccccagctgctgggcctccaaggttgggctgaggatggagttttggctctgggtttgccctgactcctgctggaagacgctgccctggtttttcaccctctagtggccttggacattgagtatttgtagaaatgcagattacattgcaaatggaaacctttgccaggaagacacatgcattttgcttttaattctttgagacatttgattttgtcttagggactgacctttcagcatcaaagaaatacatatctactgtatccgccaaagtttgtgatgcctgcatagacgcttacttgtaaaaaaaaaaaaaaatacaaaaaaatacaaaaaaaccaacaacaaaaaccacaattgaattgcctttgaaagtgggagatgatctgtctccaacggattgaaaaaaaaaaatgcttcttaaaaaatgtgtatgttttgtattctttttttctagtagaaaataactgacttgaaatattggtggttttttttcttagtgacgtgtgttgcttttgtgtgtaataatatttgaatgtaattacagcagtgccaatttgccaaagatgttggacatatttttcttttttggggaggagggcagggctaggggtgggacttgggagaaaacaggggtgggcttttggtttaattttttttttacttttttttccttgtcaaacctgaaatttgtggcttccttttaagttaaatggttgactgcaacacctttattttagattagttggagaaacatgcaataagattggcgtagtttcaatatctgtgtgtcttttcatgagtggctgttacttgtgaagaattgattttatgtaacctttatgtgagataattatttgtaaatatttgccataattttattggcttccaaaaataaaaagaaatttttttagctctgtcacagcacaacctataactaattaaaaagggcggacccttttaaaaaaatcccctcgaggggcccaacctttaccg

SEQ ID NO: 5900 - DNA, 5065 bp, Homo sapiens
  misc_feature (520)..(614): n is a, c, g, or t
  misc_feature (4376)..(4392): n is a, c, g, or t
gcggccgctctccgggggggaggctgagagcaggcccgcctcgcccccccgcgggcccgccgcccctccctccctgtcctcagcccggcagcggcggcggcggcggcagtggcagtcgccggagaagcatcatgccgaggaggaagcagcaggcgccccggcgcgcagcagcctatgtttccgaagagttaaaggctgctgccctggtggacgaaggtttagacccagaggagcatacggcagatggagagccctcggccaagtacatgtgcccggagaaggagctcgccagggcctgccccagctaccagaactccccggccgccgagttttcctgccatgaaatggacagcgagtcacacatcagtgagaccagtgaccgaatggctgactttgaaagcggctccatcaagaacgaagaggagaccaaggaggtcacggtcccactggaagacacgactgtgtcggatagcctggagcagatgaaggccgtgtacaacaacttcctctccaactcctnnnnnnnnnnnnnnnnnnnnnnnnnnnnnnnnnnnnnnnnnnnnnnnnnnnnnnnnnnnnnnnnnnnnnnnnnnnnnnnnnnnnnnnnnnnnnnnagcgggagcttcgactggcaccagagcgccatggctaagacgctgcagcaggtgtcacagagccgcatgctcccggagcccagcctcttcagcaccgtgcagctgtaccggcagagcagcaagctctatggctccatcttcacgggggccagcaagttccgctgtaaggactgcagcgctgcctacgacaccctggtggagttgacagtgcacatgaacgagacggggcattaccgcgacgacaaccatgagaccgataacaacaaccccaagcgctggtccaagcctcgcaaacgctccttgctggaaatggaagggaaggaagacgcccagaaggtgctgaagtgcatgtactgtggccactcctttgagtccctgcaggatttgagtgtccatatgatcaaaacaaaacactaccaaaaagtgcctctgaaggaacccgtcactcctgtcgccgccaaaatcatccctgccactcggaagaaagcttccctggagctggagctccccagctccccagattccacaggtggaacccccaaagccaccatctcagacaccaacgatgcacttcagaagaactccaacccttacatcacgccaaataatcggtacggccaccagaatggggccagctatgcatggcactttgaggcccggaactcgcagatcctgaagtgccatggagtgtgggagctcgcatgacaccctgcaggagctcacctgcccacatgatggtcactggccacttcatcaaggtcaccaactctgctatgaaaaaggggaagcccattgtggagacgcctgtcacacctaccatcacaaccctgctggatgagaaggtccagtccgtgcccctggcagccaccaccttcacgtccccctccaatacacctgccagcatctccccaaaactgaatgtggaggtcaagaaggaagtcgacaaggagaaagcggtcactgacgagaaacctaagcaaaaagacaagcctggcgaagaagaggagaagtgtgacatctcttccaaataccattacttgactgaaaatgacttagaagagagtcccaagggggggcttgatatcctcaaatccttggaaaacacagtgacatccgcaatcaacaaggcccagaacggcactcctagctgggggggctatcccagcatccatgccgcctaccaacttcccaacatgatgaagttgtccctgggctcgtcggggaagagcacgcccctgaaacccatgtttggcaacagtgagattgtctccccgacgaaaaaccagaccctggtctctccacccagcagccagacgtcccccatgcccaagacaaactttcatgccatggaggagctggtgaaaaaggtcactgagaaagttgccaaagtggaggagaagatgaaggagccggatgggaagctttccccgcccaagcgggccactccctccccatgtagcagcgaagtcggggaacccatcaagatggaggcatccagcgatgggggcttccgcagccaggagaacagccccagccccccgcgggatgggtgcaaggatgggagccccctcgctgagccggtggagaatggcaaggagctggtgaagcccctagccagcagtttgagtggcagcacggccatcatcaccgaccacccgcctgaacagccttttgttaaccctttgagcgccctgcagtcagtcatgaacatttcacctggggcaaggccgccaagccctccctgcctgccctggaccccatgagcatgcttttcaagatgagcaacagcctggcggagaaggctgctgtggccaccccgccgcccctgcagtccaagaaggcagaccacctcgaccgctatttctaccacgtcaacaacgaccagcccatagacttgacaaaagggaagagtgacaaaggctgctccttgggttcagtgcttctgtcacccacgtccacagccccggcaacctcctcatccacggtgacaacggcaaagacatctgccgtcgtatcattcatgtcaaactcgccgctacgcgagaatgccttgtcagatatatccgatatgctgaagaacttgacagagagccacacgtcaaaatcctccactccttccagcatctccgagaagtctgacattgacggggccactctggaggaggctgaggagtcgacgcccgcccagaagaggaagggccgccagtcaaactggaacccccagcacctcctgatcctccaggcccagtttgccgccagcctccggcagacctcagaagggaagtacatcatgtcagacctgagcccccaggagcggatgcatatctccaggttcaccgggctgtccatgaccaccatcagccactggctggccaacgtgaaataccagcttcgaaggacaggtggaacaaagttcctcaaaaacttggacactggccaccccgtcttcttttgtaacgattgtgcgtcccaaatcaggactccttccacgtacatcagtcacctagagtcacacttaggcttccggctacgggacttatccaaactgtccaccgaacagattaacagtcagatagcacaaaccaagtcaccgtcagaaaaaatggtgacgtcctcccccgaggaagacctggggacttcctatcagtgcaaactttgcaatcggacctttgccagcaagcacgctgttaaacttcaccttagcaaaacacacgggaaatctccggaagaccaccttctgtatgtctctgagttagagaagcagtagcatttgcttttgatagaaaggactgcagtttgctttgagggaaactgtggaaggcaccttcaggccccctctgacttgttgttcttggcacatgttcttattttaactgcagagaatcactctgggctggactgttttgtataactgtacagtgtttaatagaggtgcataatcagctgttgttactggtaaaatatgaaggttaaaatgcagtggtaagtgtttggaactttgtgtaaacgggatttagttgtgagcatcctcccgatgcttcaagctgcatgcattaacagacagtttaattaagcatttataacggaatcaggcacaccttttccacgagactcgagtgtgctggcatttctcaccctttcatctttagccctctgagtactttgaagcacttttgcattaatttggttaaaaaataaaataaaataataataatgtatgaagctctgttttttaaactccttaccagcttagttataatgaataatatgaacctccatttatgcaggtctgcaggggtataacacgccttgaaatttaaaagaatattattttcacattgaaacatagatgtatatattgtatagatttcagactctcttatgaaaaaaaatgtgattgtggttaaatgacctttttcttgcatttatagcaacagtgttttatgcacctgctatgctctgggcataagctgtgcctatgtatagtgtatatttctttttttcttttttttaaggtctatgggttttgttttttacatgcaaacattgtaaattatacagaagataccacagatagcatttataaagtatacagaaacattatctgaaagcaaagtatgatagtttgttttgctatacagtacatctatattgatagaggttcatgtttaaattatacatatttattagcatcatattgtcatttgttttgagcagtctgaataaacgagaccgggaaagacatccctggcaggcatcagnnnnnnnnnnnnnnnnntttttaaaggtatttattagaaatcaaagaacactcaaaataaactcagtgctcaaagggttaagtctatttgaaaaggttaaaaaaaagaacaaaaaaaaaaaaagaacttgtactgtatttcctaaacattgataaagcctttaaaatgtttgtactgtaatactttgcttaaaagtcatgaggcattctgtgatccaacctctttcacttatttataagccctcttggttgctattccatattgtaggatgcctttctatttcaattggtaactttctgttttgttcttcctaattattctcccaagatcccacactgcagctttatctttaggcttatgaaaggtaacccgtggttaccggctctccaagtgattctgttcttctccatttttggcagttaatttgcagaagtaactgacagctgacaccatatgagaacctttgtataaaatattggcatgtaaacagcacagacaccgtaacacactctgtgccctgtttggttgttgacaatgaagcaccattatgtgactcttcatataacccttttttctacggcagcattaaaattgtctttttgctataaaaaaaaaaaaaaaaaaaaaaaaaaaaaaaaaaaaaaaaaaaaaaaaaaaaaaaaaaaaaaaaaaaaaaaaaaaaaaaaaaaa

SEQ ID NO: 5901 - DNA, 898 bp, Homo sapiens
ctgagggtctgtgtgaccttccccgagatgcagagctgagccaaactaggtggccacctacaaaagggccaaggccaggcaagttgaggccctaaataaaaggctccaaggcaagtgtgtagaactccaggcctcgctgccggtcagctgctcggcacttctgcgtcaagaggcactggggatgcagcaggctggcaggtggctggccctgctaatgcaagactgctcaggccatttcagcagcagccaggtgtcaccttggtgagctggggaaggtgggaaggcacaaagccagggtttctacaaccacactctcagcccgactgacttgctgcgagtgctggtggagctcacagacggcggctggtggatggtggactgtgaacctcactttccctatgttcagcagcacaaagggaagaagccaccacatcagcccaggagccctgagcagcacaggcagtagggccactcactttggccatccgcacccaaatgcaatcaatcaacccagcttcggaagctaccctaggatctcgtcaataaactgctaagaagccatcaactggcctaaagaaagagttcactgaagaacgcaattgctttaaagaaagaaaaattagtttcctatttaagtcttaaaaaaaagcaaaccatgtcctgagatgtctgtgttaatagtgcagagagaacctagggtttgaggttgctgtagcaatggcattggagaactttaacttgaacattctcatcgatacttcctggacatattttgtgtttttaacttacttagtatttatttgccttgttcatatgttcaattttctgaaatttcaattaaactattggtgtttcactttttacccaaaaaaaaaaaaaggaaactgagtgggagggt

SEQ ID NO: 5902 - DNA, 2357 bp, Homo sapiens
  misc_feature (1855)..(1881): n is a, c, g, or t
  misc_feature (2328)..(2329): n is a, c, g, or t
  misc_feature (2339)..(2340): n is a, c, g, or t
gattactcacacagtcttgaagatgcaatgtcagctatttaggacagaaacatccaaggccgtgtcagaactcaattacgactacatatgcattaaggcaggaactggcaggcctcagggtacgccaactataggactcgtgcttctcgtacgctgggctataatctatgaaactgagctccagagccagccaatcacttagctcctcataacaagtctaactggctctggaaagctgaaagggctgcactggaacaacacagatgagatattctacacattaatctacttatctggaatcactttgcctctaaaggccagagaaaaatcacagcttccttgtcggaggggaaaaggacaggtgatctggggaaaacgcagctacacctggagcaaggtctcttcccggcttggcaatctcagctgtgccggcgctacgggacccgagccgtcccagaaaccaaagggcaggcacggcagcaaacgcctgagtgctgctgccttcggtgactatatgagaatggaaacttctaaggaagccaggttgttagaattgttaccccctttactcagagataacatagattatccaggctgagatggaaaacaagccctttattgaattttcaacacagactccctgcttctcatctccttaataaaatttcattaaaatccccttgaactcccatgttcaaatctccatttgttgacagacaaagccaacaatactctaaactgaggcctgcaagtcatttcatttgtatttttgtccagaaatttcccataggaagacttcacctcctacaactccgaagaaaacccttactgtccaagaccgtcaccagcaaccatccgcagtcattcaagtggaagctttcacagcttttgtacattctctgtgtcaatatacaactgagttacagactgtcccctggctccctgacccttacaaacactaaaagttttgtttgactcaacttcaagctgctcatctgttagtaagtgatgttcactccagaacacattcatgatgagaactttctaaaagaccagcactgctcttcccctcctataatcataataatcatgataacctgaaacatgttactgggactcgacatttttctggggattgaaatctttagtccttggagctgtcacatagcaggggcaacctcacactgaaacaaaggaagtgatgtcccattattatccaccctgagccaccataatatgctgtttacatttattttcttcagcctgtgcaaaacaaagcaatggaaaaggaaactaaaaaatatacatactagtaccattatcttcttttgcctaaaattactaatgcaccacgtcagtctgcttccttcaggcatcattctcaattcatcaggacttgtattagcaggttctggctagagagactatctcctgtcatcacgatcaattaatgttttctggtgatcacatcaggccctatctaagaagctcatggtatacaagggtcacccaaatagctgagtgcagtccttgctcatatttccttcatcttaaccccgcaaacaagaattaagatgatcccaataaaagaaaaattgctcaggaaactgaacctttttctgaaccaagcactgtcagcaaatctcaggtattagagcaactatggttgattgaaaagtgtctcaaaatctgggccaagaatgattgctaggtccataagctaatttgtctggccttgccatttacgtaagccaaagaaagtcactcatgagtaaactatagaaaacgttcagacccatcctgttagtatgtcaaatcaactaagactggcagggtattaactccattccaggtnnnnnnnnnnnnnnnnnnnnnnnnnnncacagtgccagcctctacctaaggaaaccctagaccttggaaccagtttcctggtagggaactgctgacagtttcaatgctgacagttggagccaatgcctcatagtgtaaactgaaagaaaaatagttgctttttaaaatgtcagcaagaaggcctgcctcatcttaacaaagcaaaaaaaaatgctttaattcaaattaaaaatcatgatactaaaaaaaaaaaactgtggtcactataaagataaagttcatgttcttggttcagataacaaaacactttatctggataaatggacctcaaaatttgctcttggcacatgggggaaattttttgttgtattttgttgttgttgttgttcttgttgttattgtttaaattaatcttcctaaggccatgaatatgaaatcatactaataatgcatgtgacaaaattctaaaatatnntacacttaanngtagcataaaaaaaaaa

SEQ ID NO: 5903 - DNA, 5197 bp, Homo sapiens
  misc_feature (758)..(789): n is a, c, g, or t
  misc_feature (3544)..(3572): n is a, c, g, or t
ggagttgaagtgaagttgtacagattttagactggagtcagcaatcacgggtgtttagtctgcagccgagcagctaaagggagaaagaatcgctcaggaaagacacactgcagactccaccggcaccctgcaatagatggattccgactacacaagggagaaaacgcggaggtgacactctcctgcctggaaagaggacgaacgaccaaacaaacgcaaggactggactccatgccgaaggtatctggaagtcgtgacacggtgtgtataaaacaaaagtttgcgagctgttaattgctgtgctgtgttattaagagacgctttcaagtttcaagtaccaaatgtagctttacgttgccaaaggaagttgaggcaattgctttgctgttttaacttgctctgtgagggaaatctcataaactgaccaatgcaccaaatgaatgctaaaatgcactttaggtttgtttttgcacttctgatagtatctttcaaccacgatgtactgggcaagaatttgaaatacaggatttatgaggaacagagggttggatcagtaattgcaagactatcagaggatgtggctgatgttttattgaagcttcctaatccttctactgttcgatttcgagccatgcagaggggaaattctcctctacttgtagtaaacgaggataatggggaaatcagcataggggctacaattgaccgtgaacaactgtgccagaaaaacttgaactgttccatagagtttgatgtgnnnnnnnnnnnnnnnnnnnnnnnnnnnnnnnnccatattgaagttgaagtgctggatattaatgacaattctccccagttttcaagatctctcatacctattgagatatctgagagtgcagcagttgggactcgcattcccctggacagtgcatttgatccagatgttggggaaaattccctccacacatactcgctctctgccaatgatttttttaatatcgaggttcggaccaggactgatggagccaagtatgcagaactcatagtggtcagagagttagatcgggagctgaagtcaagctacgagcttcagctcactgcctcagacatgggagtacctcagaggtctggctcatccatactaaaaataagcatttcagactccaatgacaacagccctgcttttgagcagcaatcttatataatacaactcttagaaaactccccggttggcactttgctcttagatctgaatgccacggatccagatgagggcgctaatgggaaaattgtatattccttcagcagtcatgtgtctcccaaaattatggagacttttaaaattgattctgaaagaggacatttgactcttttcaagcaagtggattatgaaatcaccaaatcctatgagattgatgttcaggctcaagatttgggtccaaattcaatcccagcccattgcaaaattataattaaggttgtggatgttaatgacaataaacctgaaattaacatcaacctcatgtcccctggaaaagaagaaatatcttatatttttgaaggggatcctattgatacatttgttgctttggtcagagttcaggacaaggattctgggctgaatggagaaatagtttgtaagcttcatggacatggtcactttaaacttcagaagacatatgaaaacaattatttaatcttaactaatgccacactggatagagaaaagagatctgagtatagtttgactgtaatcgctgaggacagggggacacccagtctctctacagtgaaacattttacagttcaaatcaatgatatcaatgacaatccaccccacttccagagaagccgatatgaatttgtaatttcagaaaataactcaccaggggcatatatcaccactgttacagccacagatcctgatcttggagaaaatgggcaagtgacatacaccatcttggagagttttattctaggaagttccataactacatatgtaaccattgacccatctaatggagccatctatgccctcagaatctttgatcatgaagaagtgagtcagatcacttttgtggtagaagcaagagatggaggaagcccgaagcaactggtaagcaataccacagttgtgctcaccatcattgacgaaaatgacaacgttcctgtggttatagggcctgcattgcgtaataatacggcagaaatcaccattcccaaaggggctgaaagtggctttcatgtcacaagaataagggcaattgacagagactctggtgtgaatgctgaactcagctgcgccatagtagcaggtaatgaggagaatatcttcataattgatccacgatcatgtgacatccataccaacgttagcatggattctgttccctacacagaatgggagctgtcagttatcattcaggacaaaggcaatcctcagctacataccaaagtccttctgaagtgcatgatctttgaatatgcagagtcggtgacaagtacagcaatgacttcagtaagccaggcatccttggatgtctccatgataataattatttccttaggagcaatttgtgcagtgttgctggttattatggtgctatttgcaactaggtgtaaccgcgagaagaaagacactagatcctataactgcagggtggccgaatcaacttaccagcaccacccaaaaaggccatcccggcagattcacaaaggggacatcacattggtgcctaccataaatggcactctgcccatcagatctcatcacagatcgtctccatcttcatctcctaccttagaaagagggcagatgggcagccggcagagtcacaacagtcaccagtcactcaacagtttggtgacaatctcatcaaaccacgtgccagagaatttctcattagaactcacccacgccactcctgctgttgagcaggtctctcagcttctttcaatgcttcaccaggggcaatatcagccaagaccaagttttcgaggaaacaaatattccaggagctacagatatgcccttcaagacatggacaaatttagcttgaaagacagtggccgtggtgacagtgaggcaggagacagtgattatgatttggggcgagattctccaatagataggctgttgggtgaaggattcagcgactggtttctcacagatggaagaattccagcagctatgagactctgcacggaggagtgcagggtcctgggacactctgaccagtgctggatgccaccactgccctcaccgtcttctgattataggagtaacatgttcattccaggggaagaattcccaacgcaaccccagcagcagcatccacatcagagtcttgaggatgacgctcagcctgcagattccggtgaaaagaagaagagtttttccacctttggaaaggactccccaaacgatgaggacactggggataccagcacatcatctctgctctcggaaatgagcagtgtgttccagcgtctcttaccgccttccctggacacctattctgaatgcagtgaggtggatcggtccaactccctggagcgcaggaannnnnnnnnnnnnnnnnnnnnnnnnnnnnacccacagggggtagcggcatgggcagccagtacgcattttcaaaatcccaccaccaactgtgggccgccacttggaactcactccagtgtgcagccttcttcaaaatggctgccagccatggaggagatccctgaaaattatgaggaagatgattttgacaatgtgctcaaccacctcaatgatgggaaacacgaactcatggatgccagtgaactggtggcagagattaacaaactgcttcaagatgtccgccagagctaggagattttagcgaagcatttttgtttccatgtatatggaaatagggaacaacaacaacaacaaaaaaccctgaaagaactggcattgccaaatagttgcatttatcataaatgtgtctgtgtatattgaatattaaatactgtattttcgtatgtacacaatgcaagtgtgattattttaatctgtattttaaaaatacatttgtaccttatatttatgtgtaatttaacaaacaaattttatttttttactcccatgacagacatgtttttcctagtcgtgtagaaactagccactgttcaaatctgatacactattcaaccacaaagtgtaaaggcactgcttagattagttttgttggggaagaattattatgttgtatgaacaaccccactgaagcattatacaattcttaattccattaagtgatcccactttttttcaataactttttagaaattaagaatcattaaaattgttaagctattttattgttattttctctactttctactagccccaatagttgaactcttataggaaaatcgaaagataaagtgaaagtttatttcaggactgagaaatatcttgaaggttatttattagatgactatctcaaatgaactttttatagacaatgatgaaaacagaattaaagtcaatgtttcctgactcccaggcccctactattccaggccatcacactggcctgttccggagaatatttctctcacaatattattatctacttataattatggtaaacaataaattttattccatccttgtagtatgaaacatgctccaaggaaatggaatctgtcctttaaatggataacagtatgtgttctaatggcataaaatattactggataaaaacagttgtgtcagtgtctctcctaaggtagtaaatataattgacttattctgaacccattctattttgaatctcccctttcctctcacaatacttgaacattttaatcttttggaatattgtctttctttgttataactattcatttttagcttttgtctccagtgcatgatctcatattttttgcttttatttttagtataagaacatttataaaatcatatttttgttactgcaattgttttatttgttgtgtggcaaatgagaaatcctttatttattgtgctgtgatctctctgtgtggaatgccttggtgagagagatgcttattatgactattatcatttctgaccaagcttctattaatgttatttctaataatacactatcttgattgtactctccagaaaatttttctgtcagtgaaaataaaagaaaaattaaagtaaagctaaggaactgtctataagtccaaaaaaaaaaaa

SEQ ID NO: 5904 - DNA, 6244 bp, Homo sapiens
  misc_feature (2560)..(2589): n is a, c, g, or t
  misc_feature (4570)..(4589): n is a, c, g, or t
gccggaaagcagaaggagattaaggacctgcaaatagccatagatagcctggattccaaagacccaaaacattcccatatgaaggctcaaaagagcggtaaagaacaacagcttgacattatgaacaagcagtaccaacaacttgaaagtcgtttggatgagatactttctagaattgctaaggaaacggaagagattaaggaccttgaagaacagcttactgaaggccagatagcagcaaatgaagccctgaagaaggatttagaaggtgttatcagtgggttgcaagaatacctggggaccattaaaggccaggcaactcaggcccagaatgagtgcaggaagctgcgggatgagaaagagacattgttgcagagattgacagaagtcgagcaggagagagaccagctggaaatagttgccatggatgcagaaaatatgaggaaggagcttgcagagctagaaagtgccctccaagagcagcatgaggtgaatgcatctttgcagcagacccagggagatctcagtgcctatgaagctgagctagaggctcggctaaacctaagggatgctgaagccaaccagctcaaggaagagttggaaaaagtaacaagacttacccagttagaacaatcagcccttcaagcagaacttgagaaggaaaggcaagccctcaagaatgcccttggaaaagcccagttctcagaagaaaaggagcaagagaacagtgagctccatgcaaaacttaaacacttgcaggatgacaataatctgttaaaacagcaacttaaagatttccagaatcaccttaaccatgtggttgatggtttggttcgtccagaagaagtggcagctcgtgtggatgagctaagaagaaaactgaaattaggaactggggaaatgaacatccatagtccttcagatgtcttagggaaaagtcttgctgatttacagaaacaattcagtgaaattcttgcacgctccaagtgggaaagagatgaagcacaagttagagagagaaaactccaagaagaaatggctctgcagcaagagaaactggcaactggacaagaagagttcaggcaggcctgtgagagagccctggaagcaagaatgaattttgataagaggcaacatgaagcaagaatccagcaaatggagaatgaaattcactatttgcaagaaaatctaaaaagtatggaggaaatccaaggccttacagatctccaacttcaggaagctgatgaagagaaggagagaattctggcccaactccgagagttagagaaaaagaagaaacttgaagatgccaaatctcaggagcaagtttttggtttagataaagaactgaagaaactaaagaaagccgtggccacctctgataagctagccacagctgagctcaccattgccaaagaccagctgaagtcccttcatggaactgttatgaaaattaaccaggagcgagcagaggagttgcaggaagcagagaggttcagcagaaaggcagcacaagcagccagagatctcacccgagcagaagctgagatcgaactcctgcagaatctcctcaggcagaagggggagcagtttcgacttgagatggagaaaacaggtgtaggtactggagcaaactcacaggtcctagaaattgagaaactgaatgagacaatggaacgacaaaggacagagattgcaaggctgcagaatgtactagacctcactggaagtgacaacaaaggaggctttgaaaatgttttagaagaaattgctgaacttcgacgtgaagtttcttatcagaatgattacataagcagcatggcagatcctttcaaaagacgaggctattggtactttatgccaccaccaccatcatcaaaagtttccagccatagttcccaggccaccaaggactctggtgttggccttaagtactcagcctcaactcctgttagaaaaccacgccctgggcagcaggatgggaaggaaggcagtcaacctccccctgcctcaggatactgggtttattctcccatcaggagtgggttacataaactgtttccaagtagagatgcagacagtggaggagatagtcaggaagagagtgagctggatgaccaagaagaacccccatttgtgcctcctcctggatacatgatgtatactgtgcttcctgatggttctcctgtaccccagggcatggccctgtatgcaccacctcctcccttgccaaacaatagccgacctctcacccctggcactgttgtttatggcccacctcctgctggggcccccccccccaacttctccatccccttcatccctatgggtgtgctgcattgcaacgtccctgaacaccataacttagagaatgaagtttctagattagaagacataatgcagcatttaaaatcaaagaagcgggaagaaaggtggatgagagcatccaagcggcagtcggagaaagaaatggaagaactgcatcataatattgatgatcttttgcaagagaagaaaagcttagagtgtgaagtagaagaattacatagaactgtccagnnnnnnnnnnnnnnnnnnnnnnnnnnnnnnggaaatgtagagagtcttatgactgaactagaaatagaaaaatcactcaaacatcatgaagatattgtagatgaaattgagtgcattgagaagactcttctgaaacgtcgctcagagctcagggaagctgaccgactcctggcagaggctgagagtgaactttcatgcactaaagaaaagacaaaaaatgctgttgaaaagttcactgatgccaagagaagtttattgcaaactgagtcagatgctgaggaattagaaaggagagctcaggaaactgctgttaacctcgtcaaagctgatcagcagctaagatcgctccaggctgatgcaaaggatttggagcagcacaaaatcaagcaagaagaaatcttgaaagaaataaacaaaattgtagcagcaaaagactcagacttccaatgtttaagcaagaagaaggaaaaactgacagaagagcttcagaaactacagaaagacatagagatggcagaacgcaatgaggatcaccacctgcaggtccttaaagaatctgaggtgcttcttcaggccaaaagagccgagctggaaaagctgaaaagccaggtgacaagtcagcagcaggagatggctgtcttggacaggcagttagggcataaaaaggaggagctgcatctactccaaggaagcatggtccaggcaaaagctgacctccaggaagctctgagactgggagagactgaagtaactgagaagtgcaatcacattagggaagtaaaatctcttctggaagaactgagttttcagaaaggagaactaaatgttcagattagtgaaagaaaaactcaacttacacttataaagcaggaaattgaaaaagaggaagaaaatcttcaggttgttttaaggcagatgtctaaacataaaaccgaactaaagaatattctggacatgttgcagcttgaaaaccatgagctacaaggtttgaagctacaacatgaccaaagggtatctgaattagagaagactcaggtggcagtgctagaggagaaactggagttagagaatttgcagcagatatcccagcagcagaaaggggaaatagagtggcagaagcagctccttgagagggataaacgagaaatagaacgaatgactgctgagtcccgagctttacaatcgtgtgttgagtgtttgagcaaagaaaaggaagatctccaagagaaatgtgacatttgggaaaaaaagttggcacaaaccaaaagggttttagcagcagcagaagaaaatagcaaaatggagcaatcaaacttagaaaagttggaattgaatgtcagaaaactgcagcaggaactagaccaactaaacagagacaagttgtcactgcataacgacatttcagcaatgcaacagcagctccaagaaaaacgagaagcagtaaactcactgcaggaggaactagctaatgtccaagaccatttgaacctagcaaaacaggacctgcttcacaccaccaagcatcaggatgtgttgctcagtgagcagacccgactccagaaggacatcagtgaatgggcaaataggtttgaagactgtcagaaagaagaggagacaaaacaacaacaacttcaagtgcttcagaatgagattgaagaaaacaagctcaaactagtccaacaagaaatgatgtttcagagactccagaaagagagagaaagtgaagaaagcaaattagaaaccagtaaagtgacactgaaggagcaacagcaccagctggaaaaggaattaacagaccagaaaagcaaactggaccaagtgctctcaaaggtgctggcagctgaagagcgtgttaggactctgcaggaagaggagaggtggtgtgagagcctggagaagacactctcccaaactaaacggcagctttcagaaagggagcagcaattggtggagaaatcaggtgagctgttggccctccagaaagaggcagattctatgagggcagacttcnnnnnnnnnnnnnnnnnnnncttgacagaaagaaagaaagctgagaagcaggtggccagcctgaaggaagcacttaagatccagcggagccagctggagaaaaaccttcttgagcaaaaacaggagaacagctgcatacaaaaggaaatggcaacaattgaactggtagcccaggacaaccatgagcgggccaggcgcctgatgaaggagctcaaccagatgcagtatgagtacacggagctcaagaaacagatggcaaaccaaaaagatttggagagaagacaaatggaaatcagtgatgcaatgaggacacttaaatctgaggtgaaggatgaaatcagaaccagcttgaagaatcttaatcagtttcttccagaactaccagcagatctagaagctattttggaaagaaacgaaaacctagaaggagaattggaaagcttgaaagagaaccttccatttaccatgaatgagggaccttttgaagaaaaactgaacttttcccaagttcacataatggatgaacactggcgtggagaagcactccgggagaaactgcgtcaccgggaagaccgactcaaggcccaactccgacactgtatgtccaagcaagcagaagtattaattaaaggaaagcggcagacagagggcactttacacagtttgaggagacaagtagatgctttaggggaattggtcaccagcacctctgcagattcagcgtcatcacccagtctgtctcagctggagtcttccctcacagaggactctcaacttggacaaaatcaggaaaagaatgcctcagccagatgaggaatactgtcttgtgtaaatatattcaaggaaaacacctccactacctcactgacttcataattggaatgtcacatggtttttttaatcaagatgcagtgaactgagattctgaaactccactgtagtttactttgcctgtaccattaatgccaatgtttttataaatcacttgtacatagtacatatgggaatagttgcatatgggaatttaaaccaacatgtggctgagcctttttttttttaatcttcgtaacatgtttaaaaaaaaacagtgattttaactgcatatttgaacctacaaactggtaaatcttattaacaaaaagaatgtacttaaggccctctttatttatagtgtcgagttatttttgaattttgcttaaaatctatttttcatatgaaaataaaagataacaatcaaaaaaaaaaaaaaaaaaaaaaaaaaaaaaaaaaaaaaaaaaaaggaacacaaacaaaaaaaacgaaaaaaggcacaccaaaggaaggggggggcccaaaaaacccccagcgggagccacacaacaagagacacccaccgatgttgtgaaaaaaggagacccacataaagagagagatcaaaaaaaaaagaagcagacgggcgccacagaaaaagacaggccgcgacgaaggaacaaaaagacgcgccacaccagagaaacttgggaagaggaacacaccactcgggggggggggcaacaacaggcgacacaacacccccgcagagaagaatgaggagcgcccgaggatataacaccacgatagggagatgaagggacgaacacacgactgtaagagccgcgcacgaaagaatagcgcgagggaatacgggaggcaatga

SEQ ID NO: 5905 - DNA, 677 bp, Homo sapiens
  misc_feature (61)..(62): n is a, c, g, or t
cctccacagcaacttccttgatccctgccacgcacgactgaacacagacagcagccgcctnngcatgaagctgctgatggtcctcatgctggcggccctcctcctgcactgctatgcaaattctgcctgcaaactcctggaggacatggttgaaaagaccatcaattccgacatatctatacctgaatacaaagagcttcttcaagagttcatagacagtgatgccgctgcagaggctatggggaaattcaagcagtgtttcctcaaccagtcacatagaactctgaaaaactttggactgatgatgcatacagtgtacgacagcatttggtgtaatatgaagagtaattaactttacccaaggcgtttggctcagagggctacagactatggccagaactcatctgttgattgctagaaaccacttttctttcttgtgttgtctttttatgtggaaactgctagacaactgttgaaacctcaaattcatttccatttcaataactaactgcaaatcactaaaaaaaaaaaaaaaaaaactcgaggggggggcccggtaccccaattcgccgcctatagtgagtcgtattacaaatcacttgtcccgccgttttaccacggcctggactgggaaaaaaccttgcggttcaccaacataaatcggccttggaggacaa

SEQ ID NO: 5906 - DNA, 2434 bp, Homo sapiens
  misc_feature (2196)..(2212): n is a, c, g, or t
cccgagttttttttttttttttttttttttttttttttttttttttttttttttttttttttttttttttttttgtccaaaataatttatttaccagccttacaaaaaacatgtcggcaagagaagaatcagtcccgtaggagcaggcaaacctctccttccttccggtggctcccctaggacctgccggagagtggagagtccggtgggggggtccccaagcccagggtggacgaggaaaaggtcaggaaatagaggattgtcctgagccctcctggccatgggggccgacccagtgggcactgaggcacttgtgggcaaaggctggaggcccatgcccctttgtggggggcgagagctgtcctgggagggccaggtggggagggagggggtgctgagggctgcttagggagaaaccagccactcagttggtctctgaggcaaggctcctggggcggggctgaggggggatagctgggggagtggggaccccactgatagcctcaggggctcctccctctgctgtggcagcccccaggtccacctgtgcagggttactcaaagagactgggctgggggaggctggacctggggaggccgggctgggggaggctggtgaacgccggctttggcgccgggcaggctgagggggtgtggggggtaacgggggtggcactgtgggggctcggaggctgctgccaaccagacgtcggggcagggcttggggggtcccagggctgccagagccagggggcaagggcggggctggaggggaggagcgggagccggagacctgggggggcggcatggtgggccgggctggcgccgggcgcttggtcctccgagccatgtcctccactggggcagctgtctccgggggactcctggtgaccttgggggaggctggtctgggaggcacctcagactctgtcctttccttggtagctgctgaagccaaggctggggccggagctggagctggagccggagccggagccggggtggtggctggggtgggcacggcagtggacggaagttcctcagaggccagcctgtcactgactgtgtcctggagggtaacagctgagaagaggcctgacacgttgaagttgatgtctccagggaagagggtgtctgcgctctggatcagcgcctcgacgacgcccaccacctggatggaagacacggaggctgcatccagctgggcctggtccccttctttctcaggtggccacagcaagttgggtcccaggactatggcgatgttgctgggtgtcatcttgttcacctcctgctcctcggccagccgtgccaggaacttcatcaggtacctgaggttgctgaggttctcggggggtaggcggctgcacacctcttggagggcctgcagccgggcccctggctccttcaggctggctgccctcatccagtcatcatagaggtcgaaggtcatcagaggctctggcagctcccgcagataggacttgagggcacctgccacagcgtgcgggtcggagcagaactcctccaggctgtgggggtccgaggccattgtctgcttgagacgcttcagcaccgaggccccagcagccagacggaagagaccctcttccttcatgccctcagaaagcagcatcatgacgcaggcctcgatgggcagggcaatctcccggcccagctcttgcaggtgggttgccagcgacaccccatacaccctggggaagtgggtggctgtcatcgaaggggagtggtctgcttggccgtggttctccctcagctcagccagggctgtgtccagcgagctcagtgacctgcgatggtaatcggcctgaatctccaggagacgaatgaagtagttggcataggagtcctccttggtaacaaagtggtacaggtcagccaagtactcgtccctgcattgctccactttcctcttcagctcctcctcctcctccttcagcgtctccaccttgttggccatggtcgtatggctgtgactacccgggctgcctcctaggccttgactgctgcctgaattcttggttgcctgactgagcctgctcttgagtgtgttccagtcggacacgagcttctggaggcttttcttgtgtttgaggatggctggcagctcctcctcactcagcctgctgagtggctgcaggacgtccctctccagggtcatctcaaactcggccnnnnnnnnnnnnnnnnnattctggatggcacagctcatctccaaggccttccccatgctggaatcagggtccagctccttgaagctctcagccatcgtggtggacagagccatgaggggaagcttcttcacccgcttgtccatgtctgccccgctctggccctgcagacaggcctgcagccgcttgtggatgttgtgggctgcccgcttggccggctccagccgctgttctacctgcag

SEQ ID NO: 5907 - DNA, 1304 bp, Homo sapiens
aaaggctttagaaattacaacatatcaggttcccctactactgaagtagccttccgtgagaacacaccacatgttaggactagaagaaaatgcacaatttgtaggggtttggatgaagcagctgtaactgccctagtgtagtttgaccaggacattgtcgtgctccttccaattgtgtaagattagttagcacatcatctcctactttagccatccggtgttggatttaagaggacggtgcttctttctattaaagtgctccatcccctaccatctacacattagcattgtctctagagctaagacagaaattaaccccgttcagtcacaaagcagggaatggttcatttactcttaatctttatgccctggagaagacctacttgaacagggcatattttttagacttctgaacatcagtatgttcgagggtactatgatattttggtttggaattgccctgcccaagtcactgtcttttaacttttaaactgaatattaaaatgtatctgtctttcctagtatgtttttatcttctcatgtattatccatggttttctctgtttgtgacagattagtaaaatttaatgagccctctttcttgtggccgtttctccatagttttaggttttgatatgtgtttactagcttgcctgtgtctggtacatctcatgacctcaattccctcacctgaaataggaaatgagaatgtttcattgtagccccaagcggtcatgtcaacctagtgcctagtcataattaattgactttttctgtattacttctttttttaagtataaccaatggatcctttggtagtcaagaactcttagcgaacattgcctttttggacatgtaaaatatttacggatttgaccacaccatgggctatgaaaatgccagtagtttttctccgcgttgactcaccttgttcccttcgtgccctgtctgaatccggtccgtttgccttctggtattgacgcgcgcatgctgttttggcttccggtttgaccaagctgtttacgttgccggggcggtccccttgtggtccggttattttcccattttgagacccgattaatctgggaccatcgttggtgcaacccccgttgtggtaaaccttggtgcaatctccaaattttcccagcaaggtcgggggaaacagttctctcacataggaagcccgcatcagaaagagtcccctcaaaaaaagttatcatacgacgcaaaaaacatcgtgttatcaaacacagcgaggggagaatgatgtcatagcacgcagtcatcaactttcatatcacggc

SEQ ID NO: 5908 - DNA, 1538 bp, Homo sapiens
ccgtgcaccgtgtgtgcgcgcggcgttgaaatgccctgcacgtcggggcagcgggacagatcccagggtgcccagggagtctccaagtgcctcactcctcccgccgcaaacatgacagagaactccgacaaagttcccattgccctggtgggacctgatgacgtggaattctgcagccccccggcgtacgctacgctgacggtgaagccctccagccccgcgcggctgctcaaggtgggagccgtggtcctcatttcgggagctgtgctgctgctctttggggccatcggggccttctacttctggaaggggagcgacagtcacatttacaatgtccattacaccatgagtatcaatgggaaactacaagatgggtcaatggaaatagacgctgggaacaacttggagacctttaaaatgggaagtggagctgaagaagcaattgcagttaatgatttccagaatggcatcacaggaattcgttttgctggaggagagaagtgctacattaaagcgcaagtgaaggctcgtattcctgaggtgggcgccgtgaccaaacagagcatctcctccaaactggaaggcaagatcatgccagtcaaatatgaagaaaattctcttatctgggtggctgtagatcagcctgtgaaggacaacagcttcttgagttctaaggtgttagaactctgcggtgaccttcctattttctggcttaaaccaacctatccaaaagaaatccagagggaaagaagagaagtggtaagaaaaattgttccaactaccacaaaaagaccacacagtggaccacggagcaacccaggcgctggaagactgaataatgaaaccagacccagtgttcaagaggactcacaagccttcaatcctgataatccttatcatcagcaggaaggggaaagcatgacattcgaccctagactggatcacgaaggaatctgttgtatagaatgtaggcggagctacacccactgccagaagatctgtgaacccctggggggctattacccatggccttataattatcaaggctgccgttcggcctgcagagtcatcatgccatgtagctggtgggtggcccgtatcttgggcatggtgtgaaatcacttcatatatcatgtgctgtaaaataagaactagctgaagagacaaccaaagaagcattaaggcaggttgatgctgatgggaccataaaatatttttacactcaacctgagcggttattcttgacactcttaacagaattttttcaattgttttccagaactttagtatatgcaaatgtactgaaagggtagttcaagtctaaaatgccataacccctttattatttgttattttttatttgcattgctttgccataagtcttcccttgcttgtatcttccaaagctatttcgaaataaacacgaaaatttacagtttgccaaaaaaaaaaaaaaaaaaaaaaaaaaaaaaaaaaaaaaaaaaaaaaaaaaaaaaaaaaaaaaaaaaaaaaaaaaaaaaaaaaaaaaaaaaaaaaaa

SEQ ID NO: 5909 - DNA, 1436 bp, Homo sapiens
caagtattttcagccccagccggccacacagctcggatctcctcctgtggatccccccagctctgcgatgatggcagaagagcacacagatctcgaggcccagatcgtcaaggatatccactgcaaggagattgacctggtgaaccgagaccccaagaacattaacgaggacatagtcaaggtggattttgaagacgtgatcgcagagcctgtgggcacctacagctttgacggcgtgtggaaggtgagctacaccaccttcactgtctccaagtactggtgctaccgtctgttgtccacgctgctgggcgtcccactggccctgctctggggcttcctgttcgcctgcatctccttctgccacatctgggcggtggtgccatgcattaagagctacctgatcgagatccagtgcatcagccacatctactcactctgcatccgcaccttctgcaacccactcttcgcggccctgggccaggtctgcagcagcatcaaggtggtgctgcggaaggaggtctaaagccaggtggggcaacagcggtggcagggcagggggtggtgggccagactggtccccgggggacttcttcacaggggctgctggcgagctctttctctttagggactgctccataccccatgatggagcacacggtgtagggaagccagaaagaaaagacggcccagccacagaagcacaatggcccttcgctctcccccagccccaccatgatgcccccatgcctgggcgtgggggaagatcatttgccaagaggcagctactgcaagtctttgcgttcacttgtactgtaacaacataaaccagcacgcggttcccacccggggccaacctctccacgcgcactcaggaaagtgaccagtgaccactggcgttaggaaggtggctccagtaaagggttttggctgcatttggggaatgctgcattttgttcgtgcctgtaagattggtttgtgtcctgaccagctccaaaaatatacttcactgccctgaaaaacagacacagggagagttggttgtctcttcacttggccaaatgtaagtgaagaacagagtctttttcttcttcggattctattgtttgctggaaccgtacacgttccttggaagatcatgtttaagtgactcctgttgcctgagcacaaaaatgggcaccaatggaggaaaatgacccttgggctggcaggggcagtgacccttccagggtaccactgagggaagggcctgggttcaagcctcccggaacctcccctttggctaaccgagcccctgaaatgcccagtactgccatttgacatgagggtaccttcgccctcaggagatgtgacgaaggaacaaggtctaatttgtgcgtgtgtggactcactatggaaataaaatgcagtagaaagagcatgtaaaaaaaaaaaaaaaa

SEQ ID NO: 5910 - DNA, 2681 bp, Homo sapiens
  misc_feature (707)..(720): n is a, c, g, or t
ctttatctataggttgatatttagcttaaaaaaaaagaataaacctagaactcaaaggaaacctgttgcaaatagcttagatcaacagtgtatctcttccctaagaatgatagtatcttagtaagacaccttctatgcatggtatggaagcatgatttttgcttgtgggaaaacctaatattttatcagacccctcggacttctcaatccctccctctccacacagtagtacttaatgaaaatgttttgctttagagagcaaaatgctactttcagaagacactgaaatagtatatgtatttgcttaccatttgcaagctaaaatcaaggtgggatggggtcattattttcacatagaatgtatttattttgtgcaggctgttaaacacatctggcacctagtttttccattaagagcattgctattttccctttttataaagtagcttctgctgtcaaggttaacaattctatatgctttaggaagctaagttctaatttccttttgtgagtttcatttcttttataaccagtatgttaccacagacatcagttgcaaagctacgatgatagtgtgattcttagccgaaaaaaaagcgtgtgctcttaaagtatgttcagtttttctgtctacatatgctttgtgtgagttaaaaagggggtgggtggtgtagatattcctttagctgctttgcatatttaacccnnnnnnnnnnnnnnataaatgacttcaatattttatatatcttggttttcaagtatcatttcacattctctatacatgactttgttattgtggaatacaagcctgcaatggatgtatatatacagaacattaataattcttagaaggatggaagccaaatggctgcatgatggaaattagaagaaaaaaaagcagaaacttgaatttgctaagcatgtttggggggaaatagaatccttaactcagtgcctctgtctgcgatatggaaaccttcaactttgttcaccaaaattgtattatacctgtgtatatatatatatatatatataaatataaatatagtatagtgaatcagacaccatcagttttaagtctctggtagccaaacttaaataaataatccatagaatatcacatacgttcactccatcttcatctctgaagttagtggagaccatcaaaatgactgtacatttcataactctgggaagatttcaaatgtgaagtgcccctgtgcattttcttggccatagcacggcattcttgctttagctgtgctttcctgggatgagaagatcttggtgtatttaacacataagctttgttagaaatcacctctgaagatcatttcattttctcactttgggttgttgcaagacaaagcaaaggaaaaggaacacaatgaaggaggccgtgacatttttagttgccaccgttgtaactcaaacaatatgggtttgttggtgaactgatttatcaaggcttctgttacggttttgcatctgtgtgtgaggaaaattttaatttatttggaagtatttattagccatgttgttggtcctgaaaataaatctctaagtagcacagttgtgggtatattatgcagacacttaccacaatacctgcaaaagtaactgtggttttctttcaagacactgtaataaacagtgaactaagagaatagattctgatacatctcgataaatcattctctgcaaaagtttcagggctaatgtatttatgtgtatttttaaattctactttctttggcatctcttcatggctcagcgacaacaaagtaataggtcattggctggcttacgtcgataggaattttactcttaagaagggccagtgtatagctgactctacatataatgtgtaatcagataatccaatagagaggaattgtccaaatagttttagtacctttctgatcatctgactcagtaggctaggagacaatctgtcatctgagccatagttcttgagatttaaaaagtctgtccagtgactgcaatctgattatgaataaactattttaactattcattcttgctgaaactgaagtgtacacaatagcacactgttggcatgctgaggcaaaacattgggttcttttgtgttctaccttcaaaacaatctgtttgcatttgaaatataagtgtttaagctttttaggagttagtgtaataagagaatgtgaatatgttgggaaattttcagatgccattaataattgtaattttgttgttaaattaacaaggactttaggataagcctctcgatgtttttgctttaaattgaaagcatgtctgtcaaattgcaagtctcccttcagtttctatatatcacccaggagagggtctctgagttggtgttgtacctgtaccactcacatgtagctcaagtgtaatttgtagtgtttacattcaagctgggatcttgattggttaaattaatccacataccactgccactgctgaaggaccaggtgttggaatacacagcattacagactataagcaaagcaaacaaaagttgatccttacatatgccatccttctgtgtcattttgtggctgttctgtgtttttcttcctagttatttattattgttaataacttactttttcttacattctgttgtaaataaaatacaaagcaatcttcaaaaaaaaaaaaaaaaaaaaaaa

SEQ ID NO: 5911 - DNA, 5827 bp, Homo sapiens
  misc_feature (5586)..(5586): n is a, c, g, or t
acggctgcgagaagacgacagaaggggagacggggcgggcggcgtcagggtcgcagcgtctacagctgctcgggggcggtttcttggcggaggcttggccggctcctctctcccggctccgcggcggctgcgaaggcggcggctcctgccctctcgctttccctctcgcgtctctggctgcagaaagaagcttccggttctgaggtcctggaggtgccatttccctctctgttgaagcaaaggccggggcagacctcctagtgaaaggaaagcaagccaggatggatatttacgacactcaaaccttgggggttgtggtctttggaggattcatggttgtttctgccattggcatcttcctggtgtcgactttctccatgaaggaaacgtcatatgaagaagccctagccaaccagcgcaaggagatggcgaaaactcaccaccagaaagtcgagaagaaaaagaaggagaaaacagtggagaagaaaggaaagaccaagaaaaaggaagagaaacctaatgggaagatacctgatcatgatccagcccccaatgtgactgtcctccttcgagaaccagtgcgggctcctgctgtggctgtggctccaaccccagtgcagccccccattatcgttgctcctgtcgccacagttccagccatgccccaggagaagctggcctcctcccccaaggacaaaaagaagaaggagaaaaaagtggcaaaagtggaaccagctgtcagctctgtagtgaattccatccaggttctcacttcgaaggctgccatcttggaaactgctcccaaggaggtgccgatggtggtggtgcccccagtgggtgccaagggcaacacaccagccactggcactactcagggcaaaaaggcggaggggactcagaatcaaagcaaaaaggctgaaggagccccaaaccagggcagaaaggcagagggaaccccaaaccagggcaaaaagacagagggaaccccaaaccaagggaaaaaggcagagggaaccccaaaccaaggcaaaaaggcagaaggaaccccaaaccaaggcaaaaaggcggagggggcccagaaccagggtaaaaaggtagatacaaccccaaaccaggggaaaaaggtggagggggccccaacccagggcagaaaggccgagggggctcagaaccaggccaaaaaggtagaaggggcccagaaccagggcaaaaaggcagagggggcccagaatcagggcaaaaagggagagggggcccagaaccagggcaagaaggccgagggggcccagaatcagggcaagaaggccgagggggcccagaatcagggcaagaaggccgagggggcccagaatcagggcaagaaggccgagggggcccagaatcagggcaagaaggctgagggggctcagaaccagggcaaaaaggccgagggggctcagaaccagggcaaaaaagtagagggggcccagaaccagggcaagaaggatgagggtgcccagacccagggcaaaaaggccgagggggcccagaatcagggcaaaaaggccgagggggcccagaaccagggcaagaaggcagagggggcccagaaccagggcaagaaggccgagggggcccagaaccagggcaagaaggccgagggggcccagaaccagggcaggaaggccgagggggcccagaaccagggcaggaaggccgatggggcccagaaccagggcaagaaggccgagggggcccagaaccagggcaagaaggccgagggggcccagaaccagggcaagaaggccgagggggcccagaaccagggcaagaaggccgagggggcccagaaccagggcaagaaggccgagggggcccagaaccagggcaagaaggccgagggggcccagaaccagggcaagaaggccgagggggcccagaaccagggcaagaaggccgagggggcccagaaccagggcaagaaggccgagggggcccagaaccagggcaagaaggccgagggggcccagaaccagggcaagaaggccgagggggcccagaaccagggcaagaaggccgagggggcccagaaccagggcaagaaggccgagggggcccagaaccagggcaagaaggccgagggtgctcagaaccagggcaaaaaagtagaaggggcccagaaccagggcaagaaggctgagggggcccagaaccagggcaagaaggccgagggggctcagaaccagggcaaaaaggccgagggagcccagaaccagggccaaaaaggagagggagcccagaatcagggtaaaaagacagaaggggctcagggcaaaaaggcagaaaggagtcccaaccaaggcaaaaaaggagagggagctcccatccagggcaaaaaggcagattcggttgctaatcagggcacaaaggtagagggtattacaaaccaggggaaaaaagcagaagggtcccccagtgaaggcaaaaaggcagaagggtcccccaaccaaggcaaaaaggcagacgcagctgccaatcagggtaaaaagacagagtcagcttctgtccagggcagaaatacagatgtggcccagagcccagaggcaccaaagcaagaggctcctgccaagaagaagtctggttcaaagaaaaaaggtgagcctgggcccccagatgccgacggccctctctacctcccctacaagacgctggtctccacggttgggagcatggtgttcaacgagggcgaggcccagcggctcatcgagatcctgtctgagaaggctggcatcattcaggacacctggcacaaggccactcagaagggtgaccctgtggcgattctgaaacgccagctggaagagaaggaaaaactgctggccacagaacaggaagatgcggctgtcgccaagagcaaactgagggagctcaacaaggagatggcagcagaaaaggccaaagcagcagccggggaggccaaagtgaaaaagcagctggtggcccgggagcaggagatcacggctgtgcaggcacgcatgcaggccagctaccgggagcacgtgaaggaggtgcagcagctgcagggcaagatccggactcttcaggagcagctggagaatggccccaacacgcagctggcccgcctgcagcaggagaactccatcctgcgggatgccttgaaccaggcacgagccaggtggagagccaagcagagacgcagagctgggcaacgccttcgggcaggagctcagcaaggtcagcaaagagctggtggagaagtcagaggctgtgcggcaagatgagcagcagcggaaagctctggaagccaaggcagctgccttcgagaagcaggtcctgcagctgcaggcgtcccacagggagagtgaggaggccctgcagaagcgcctggacgaggtcagccgggagctgtgccacacgcagagcagccacgccagcctccgggcggatgccgagaaggcccaggagcaacagcagcagatggccgagctgcacagcaagttacagtcctccgaggcggaggtgcgcagcaaatgcgaggagctgagtggcctccacgggcagctccaggaggccagggcggagaactcccagctcacagagagaatccgttccattgaggccctgctggaggcgggccaggcgcgggatgcccaggacgtccaggccagccaggcggaggctgaccagcagcagactcgcctcaaggagctggagtcccaggtgtcgggtctggagaaggaggccatcgagctcagggaggccgtcgagcagcagaaagtgaagaacaatgacctccgggagaagaactggaaggccatggaggcactggccacggccgagcaggcctgcaaggagaagctgcactccctgacccaggccaaggaggaatcggagaagcagctctgtctgattgaggcgcagaccatggaggccctgctggctctgctcccagaactctctgtcttggcacaacagaattacaccgagtggctgcaggatctcaaagagaaaggccccacgctgctgaagcacccgccagctcccgcggagccctcctcggacctggcctccaagttgagggaggccgaggagacgcagagcacactgcaggccgagtgtgaccagtaccgcagcatcctggcggagacggagggcatgctcagagacctgcagaagagcgtggaggaggaggagcaggtgtggagggccaaggtgggcgccgcagaggaggagctccagaagtcccgggtcacagtgaagcatctcgaagagattgtagagaagctaaaaggagaacttgaaagttcggaccaggtgagggagcacacgttgcatttggaggcagagctggaaaagcacatggcggccgccagcgccgagtgccagaactacgccaaggaggtggcagggctgaggcaacttctcctagaatctcaatctcagctcgatgccgccaagagcgaagcccagaaacagagcgatgagcttgccctggtcaggcagcagttgagtgaaatgaagagccacgtagaggatggtgacatagctggggccccagcttcctccccagaggcgcccccagccgagcaggaccccgttcagctgaagacgcagctggagtggacagaagccatcctggaggatgagcagacacagcggcagaagctcacggccgagtttgaggaggctcagacctcggcatgtcggttacaagaagaattggagaagctccgcacagccggccccctagagtcttcagaaacagaggaggcctcacagctgaaggagagactagaaaaagagaagaagttaacaaagacctggggcgcgccgccacgagactgcaggagctttctgaagacgacccaggagcagctggcaagggagaaggacacggtgaagaagctgcaggaacagctggaaaaggcagaggacggcagcagctcaaaggagggcacctctgtctgagtttcctctttggaaaaagaagttactgttcaacttaccaaaatgccttacacattccttacaaataaaccaaccaacctacacagcgttatccaggcccaacttccggtactccgagagaagccatgagagacaagtctcttagagccacagaagtagaccttccagagccccagtttgtaaatgaacctgtgtcacatttgataaacactatcctgggcgcagccccgggccaccgccgagtgacgccaaagccctggttgactctgacagccccgtgggtgtgtgggaggccgggcgctctggggtctgtctgtcagtgcaatcgtttagtgttttttcagtggggcggggcgggaagcgggtgggaccgggcagccagttctcaaaggctgtggggccgactggaggccacagcccctcacccctagacgttgccaaccagaactgacgtgtgacctcctgggtgttgatgccattaaaaccaacgttggtgcccggtaaaaaaaaaaaaaaaaaaaaaaaaaaaaaaaaaaggggcagaccgaagaaaagataccccaggaaggggcccaagtaaaagagtgacacagtgtcgtggaacaaagtgggcacaanaaggagggcacataagcacgtaaagagactgggccactgatattaacaacgtatgggatgggggacgaaaatgtttctgatggcaactatgtgcgagggacacctcatattagtgggtggaacaattattgggagaactctttacaagaatatgaggacttaggggcactataacgtgaaggggtataggggtatacacagcagacatagtatagaggtgacactgcttcagatattaatc

SEQ ID NO: 5912 - DNA, 1770 bp, Homo sapiens
agcggatggggccagcaccgcctcgcgccggtggtggaagcacgtgctgggggcgggagcagcaatcgcagccatggcgtcgttactgtggggaggcgacgcaggggcggcggagagcgagcggctgaacagccacttttcaaacctcagccaaccccggaagaacctttggggtattaagagtactgcagtccgaaacatagatggttctattaataacatcaatgaagatgatgaagaagatgtagtggatttggcagctaattcactcttaaacaagttaatccatcaatccttagtagaatccagtcaccgtgtggaagttttacagaaggatcccagctctccactttactcagtaaagacatttgaagagctgcggctaaaggaagagttactaaaaggaatctatgcaatgggatttaataggccatctaaaatccaagagatggctctccctatgatgctggcacatccaccccagaacctcatagcacagagccagtctggaacaggaaagacagcggcatttgtgttggcaatgttaagcagagttaatgccttggaattgttcccacagtgcctctgcctagctcctacttatgaattggctctgcaaactggccgtgtggttgagcagatgggaaaattctgtgtggatgttcaagtgatgtatgccattcgagggaatcgaattcccagaggcaccgacatcactaaacagattataattggcactcctgggactgtcctagattggtgttttaaactaaaattgattgatttgactaagattcgtgtgtttgtcctggatgaagcagatgtgatgattgacactcaaggattctcagatcatagtattcgtattcaaagagctctaccctccgaatgccaaatgctcctcttttcagcaacctttgaggactctgtgtggcactttgctgagcgaatcatccctgaccctaatgttatcaagttacgcaaagaggagctcacactgaaacatccgggcaatattacgtgctgtgtgagcacaggaaagacaaataccaagctctgtgcaacatttatggcagcatcaccattggtcaggccatcatcttctgccagactcgtcgaaacgctaagtggttgaccgtggagatgatacaggatggccaccaggtgtctttgttaagcggggagctgaccgtggagcagcgagcttccatcattcagaggtttcgggatgggaaagagaaggttctcataacaactaatgtttgcgcccgagggattgatgtgaagcaggtcacaattgttgtgaactttgatctccctgtaaaacaaggagaggagccggactatgagacctacctccaccgcatagggcggacggggcgctttgggaaaaaaggccttgccttcaacatgattgaagtagatgagctgccctcgctcatgaaaatccaggaccactttaacagcagtattaagcaactcaacgctgaagacatggatgaaattgaaaagattgactattgaagaaagaactttattgtttgtgcagtatcctagtttatgtgagaatgtctcagtgggttttgaaggtaatttttttatgttgaggctttttcgacgtgaaactgtcacagatggcaaaataaatgtcacggtacttagttttaagacatgaggtctttttgaagccaaattgatgtgaagcttgtgatccttttgaataaaaaaaaggcaagattatttcttattctaaaaaaaaaaaaaaaaaaa

SEQ ID NO: 5913 - DNA, 6143 bp, Homo sapiens
  misc_feature (1331)..(1348): n is a, c, g, or t
  misc_feature (4779)..(4808): n is a, c, g, or t
ttttcctttgtggattcttttttaaaactaccaagtttgagaatatgaatatatttgtttttcatattgttctgcaatgaatataaagtcacttataatcagaaagcaattaaatgtaaataacagtaaagaatgagaactatagaaaatagatatgaaaatgcaagcccacagagatgagaatagatcatgtggaacataaacactaaagagctgcttttataaaacttcaattttttctttgagttccctagcagccaaagtaacaagggagactgaaagtaaaacaattcaaatttgatagtatttttatatgaggaacaacactttcaggaaatgtttaaccctagtttttcatgaggccaccttaacaactgaattctctttctctctcactctgtgtataagtattttagataagtaaaagaacaatgttataatgttaagtcaaacatagacacaataatttaaatttgatgttaatcgagaaatacaatgccatttccatatatatttagtttcaatatgacttataatctgaatattccataaataagcacgttggaaatatttgggggaagaaacccaaaacacgtgaaattctgtggtggtaaatgcagtgcacagtactcacagttttaggcgcaaggtgtcgctctttacttggtggaaagttcatttaaaggttggtctgaacagtgaggcactcccatacaaaggaactccatcataccggatgccaccgtttaaggatcctttgaaacttcttaagaattcaacgagatttttaacctgaaactgaagaatctggtactgtaagtgtaaagaagcttattttggaagccaatttcgtatgcgatgtttggttttcagagaaggggattgggcaccccacgactacagctctggcttctcctcctcgaattctgggaggtggggagcggccagctccactactccgtctcggaggaggccaaacacggcaccttcgtgggccgcatcgcgcaggacctggggctggagctggcggagctggtgcagcgcctgttccgggtggcgtccaaaacacatggggaccttctggaggtaaatctgcagaatggcattttgtttgtgaattctcggatcgaccgcgaggagctgtgcgggcagagcgcggagtgcagcatccacctggaggtgatcgtggacaggccgctgcaggttttccatgtgaacgtggaggtgaaggacattaacgacaacccgccggtgttctcgctcagagaacaaaagctgctgattgcggaatctaagcaatcggactcgcgttttccactagagggagcttnnnnnnnnnnnnnnnnnnaagagaatgctctattgacctacaggctaagtaaaaatgagtatttttctttagattcaccaacaaatggtaagcagattaaaagactgtcacttattttaaagaagtctctggatagagagaaaactccggaacttaatttgctgctaacagctacagacgggggaaaaccagagcttactggcaccgttcggctgttagtccaagtcttggatgtcaacgacaatgatccagagtttgataaatcagaatataaggtgagccttatggaaaatgctgctaaagaaactcttgtgctcaaactaaacgccacagaccgagacgaaggagtcaatggagaggtaacatactccttaatgtcaattaagcccaatggaagacacttatttacactagatcaaaataatggagaagtgagggtcaatggaactttagattatgaagaaaacaagttttataaaattgaagtacaggctacagataaggggactcccccaatggcaggtcactgtacagtctgggtggaaatcttggacaccaacgataactctcctgaagtcgccgtgacttccttgtccctcccagtacgagaggacgctcagcccagcacggtcattgccctgatcagcgtgtctgaccgtgactcaggtgtcaacggacaggtgacctgctcgctgacgccccacgttcccttcaagctggtgtccaccttcaagaattactactcgttggtgctggacagcgccctggaccgcgagaacgtgtgggcctatgaactggtggtgactgcgcgggatgggggttcgccttctctgtgggccacggccagggtatccgtggaggtggccgacgtgaacgacaatgcgcctgcgttcgcacagcccgagtacaccgtgttcgtgaaggagaacaacccaccaggctgccacatcttcacagtgtcggcgcgggacgcggacgcgcaggagaacgcgctggtgtcctactcgctggtggagcggcggttgggcgaccgcgcgctgtcgagctacgtgtcggtgcacgcggagagcggcaaggtgtacgcgctgcagccgttggaccacgaggagctggagctgctacagttccaggtgagcgcgcgcgatgcgggcgtgccgcctctgagcagcaacgtgacgctgcaggtgttcgtgctggacgagaacgacaacgcgccggcactgctggcgactcaggctggcagcgcgggaggcgcagttaacaagctagtaccgcggtcggtgggtgcgggccacgtggtggcgaaggtgcgcgcagtggatgcggactcaggctacaacgcgtggctttcatatgaattgcagccggcggcgggcggctcgcgcatcccgttccgcgtggggctgtacacgggcgagataagcacaacgcgtgccctggacgaggcagactcgccgcgccaccgacttctagtactggtgaaggatcacggtgagccggcgctgacggccacggccaccgtgctggtgtcgttggtggagagcggacaggcgccaaaggcctcttcccggactttggcgggcgccgcgagcccagaggctgcgctggtggatgtcaacgtgtacctgatcatcgccatctgcgtggtgtccagcctcctggtactcacgctgctgctgtatacggcgctgtggtggtcggcaacgcccactgagggcgcgtgcgcgccggggaagcccacgctggtgtgctcccgcgcggtggggagctggtcatactcgcagcagaggcggcagagggtgtgctctgaggagggcccacctaagacggacctcatggccttcagccccagtcttcctctaggtctgaataaagaggaggaaggggaaagacaggagccagggtcaaatcaccccggacagccacgacagcccaaccctgactggcgttactctgcctccctgagagcaggcatgcacagctctgtgcacctagaggaggctggcattctacgggctggtccaggagggcctgatcagcagtggccaacagtatccagtgcaacaccagaaccagaggcaggagaagtgtcccctccagtcggtgcgggtgtcaacagcaacagctggacctttaaatacggaccaggcaaccccaaacaatccggtcccggtgagttgcccgacaaattcattatcccaggatctcctgcaatcatctccatccggcaggagcctactaacagccaaattgacaaaagtgacttcataaccttcggcaaaaaggaggagaccaagaaaaagaagaaaaagaagaagggtaacaagacccaggagaaaaaagagaaagggaacagcacgactgacaacagtgaccagtgaggtcctcaaatggaaacaagccacttagccagtttttgtaataatggcaaatctctcccatgtagcaattccctgctcctttttcctatctacatgagccctcttagagacctcagaaatctgcagaaagttccctgtgtctgtctagaacgcatttaacaggttttgtcgtaaaagctttactaagtctggtgttaactctttctctccactctggcttgttttcagaacctaaaaagcagacccaagtttcctttctcctccgccgcaaaggagaggcttcccagccccgccagtgagaggttggactctctgccctgtgctccggggatcctgtcttgatgacacttgcagggcaggctgaaaagttttgagattgagcagcttgggagtttgtggccactgggtatgtgtggctaccgcgggtatgcgagtgccagatattggctgagacgagccagcttagactaattggtacaaggaaggcaagaaaacaaagacaaataaacagcggaagttatcagtatggaggggaagtgtaaacttaaagggaccagactttctaaatcttacaactcaagaggtggcagccaccctctaggagacaaaactacccccactgacaaggctttaggagaccctaaagtctgttggctgtgacgtcattatacctaaaatctgcatcatacctgcaagccaacagttcagtgttttaacagagaaccaccctgggaaacagaagcagatctgatgtgtttcctatacatgtcctgtgctcactttattaaaaattcttttgcacacaatgtttatgaaaaggccagatccttttccaatacttatgcaaaagcaaaagaaaaccccgacacctcacctttcgctgtttgttgtttcatagatttatttaaaaaaagagaaagtctatagctataaatctttaaagagaaatatgaatacaattcccctaaactctcctcaaaagagaattcagtctacagccatttaaatgatcattgctgctacagaagtgctttaagagaattgcctgaaacatctgtattatatcgnnnnnnnnnnnnnnnnnnnnnnnnnnnnnnagggtcactctgggggctgcctcttgcatgtattactaaataaaatgatctctctttctctctctctctctcttttctaagaaacaattatgtgcactttgatacacaaccttctctaaccaactatatatcaagacccaaaaattgaagaaaaatattgttttctcatacagtgagcagatttttcaatctactaattctgtgacttgtcttggtgtgctagcctacaccttctctttggtttagttttccttttctataacactctgaattgctaatcttactaacacctatgatgttacctgaaatcaatctcccatatgtatgctgtatgctatgctaagactcctgaaatatacttactctgtgcttgtgtatgtgaatgttaatgcaactattacctagagtgaactttaagctttattgttgaatgtaattccattatatttccttttgtacacctgtgaaaaagtggagtagtgtttttttaaccattgttaatcagcttttgtgtatgaaagacacagtaaaatttctttcttaaatcaagatactggtgattcaaggaattttatttatggtccagccaagagccatctcgtgccaagacttctgctggcaagggaatggataaagctgttttgttctagtaacaattttggaatgaatactgacaatattccatgagggtgtgcaagcacaaattttaccaatctgacctctttgaagttgcagaatgctttgaaattctaatggtatctgaaatatcagctcatagaaagtaacaaaatttgctgtcaccttaaataagacattttaattttgttataatgtacaatttagaagtttgattaattatattatctatttaggcattaatataaaagaggtaggagtctgttatttaaaaaaagcattaaatttaaaaaaaaactgtcttgtctacttttagcttcattctcccatattttgaagggtgtgtaacttcagctctgcaggattgcatggggtaaaacttgttaccaacacatgtgaaccattgctacattgtaggttgtgatcattttgccccactgaagcccatgtatctgaccttacgtgccttttgaactaggagaatcgggctaatttattaatgatgataattataatgtatctgtacagcactttttacatttgcgaagtgctttccaatccatgttagttactagttattacagctgtaaggataaaacacgtcatgtggattcattttgaattggtgctattggtatttcctctgttattgctaataaatgaaaatggtggtatgaaaaaaaaaaaaaaaaaaaaaaa

SEQ ID NO: 5914 - DNA, 5491 bp, Homo sapiens
  misc_feature (2127)..(2178): n is a, c, g, or t
  misc_feature (3102)..(3118): n is a, c, g, or t
cttccagtctctgctgatgtgatttcagatgggcgcggctccagaccatcccctgcaatggccagttacgcagcctctccgagccactgcctctctgtggaaggagggcctgaggctgacggggagcagccgcctcgcttggccactctgggacctggggtgatggagggtgcagcggagactgaccaggaggctctgtgtgcaggggagactggggcccagaagccacctggagatcggatgctgtgtccagggaggatggatggtgcagctctgggggaacagccaactgggcagaagggagcctcggcaagggggttctggggaccaagagagaccaaggcgttgggtgtgtgcaaagagtctgggagcgagcctgcggaggacagcagcagggcccacagccgatcagaggaaggtgtctgggaggagaacacgccccccttgggccccctgggttttcccgagacttccagctctccggcggacagcaccaccagcagctgcctccagggcctcccggacaacccagacacccagggtggagtccaggggcctgaaggccccactcctgatgcctctggctccagtgccaaggatcctccaagcttgtttgatgatgaggtctctttctcccagctcttccctccaggcggtcgcttgactagaaagaggaacccgcgtgtctacgggaagcgctgtgagaagccggtgctcccgctgccaacccagcccagctttgaggagggcggtgaccccacgctgggcccagcccgcctgcccacggacctcagcgactccagctccctctgcctctgccatgaggacccgtgggaggacgaggatcccgcaggtctgcccgagtccttcctcctggatgggttcctcaatagcagggtgcctggcattgacccctgggcccccggcctcagcctgtgggccctggagcccagcagggaagctggtgcagagaagctgccctcccactgccccgaggacgatcggccggaggccattcctgagctgcacatggtcccagcggcttggcgaggcctggagatgccggcccctgccgatgactcctcctcttctctcggagatgtgagccccgagccccccagcctggagagagaacgctgtgacggtgggcttcccgggaacacccacctgctgccgctccgtgccacggactttgaggtgctcagcaccaagtttgagatgcaagacctgtgctttctgggaccctttgaagaccccgtgggtctccccggccccagcttcttagacttcgagggcacggcgagctcacaggggccacagagccgaaggacagaggaggctgcaggggcagggagggcccaaggcagaggccggccggccaagggcaggcgggcctcctacaagtgcaaagtgtgcttccagcgcttccgcagcctgggcgagctggacctgcacaagctggcccacacgcccgcgccgccgcccacctgctacatgtgcgtggagcgcaggtttggctcgcgggagctgctgcgggggcacctgcaggagaggcacgcgcagagcaaggccgggccctgggcgtgcggcatgtgcctgaaggaggtggccgacgtctggatgtacaacgagcacctgcgtgagcacgcggtccgcttcgcccgcaggggggcaggcgcggaggtccttgggggacctgcccggaggcctggagggcagcagcgctgtcgcccaccttctgaacagcatcacggaacccgcgcccaaacaccacaggggcaagcgctccgccggcaaggccgccgggagcccgggagacccgtgggggcaagagggagaagccaagaaagacagcccgggcgagagggcgaaaccccgggcacgcagcacccccagcaacccagacggggccgcgaccccagacagcgcctctgccaccgccctggctgacgccggcagcccgggcccccccaggacgacccccagcccgtcccccgacccctgggccggcggggagcccctcctgcaagccaccccggtgcacgaggcctgcaaggacccctcccgcgactgccaccactgcgggaagcgcttccccaagcccttcaagctgcagcgccacctggnnnnnnnnnnnnnnnnnnnnnnnnnnnnnnnnnnnnnnnnnnnnnnnnnnnnccccgagcacggggagctgctggcacacctgggcggggcgcacgggctgctggagcggccggagctgcagcacacgccgctgtatgcctgcgagctctgcgccacggttatgcgcatcatcaagaagtccttcgcctgcagctcctgcaactacaccttcgccaagaaggagcagttcgaccgccacatgaacaagcacctcaggggggggcggcagcccttcgcgttccgcggcgtgcggaggccgggagcgccgggacagaaggcccgggccctcgagggcacactgcccagcaaacggcgcagggtggccatgcccggcagtgcccctgggcccggcgaggacaggcctcctccccggggaagcagccccatcctgagtgagggctctctcccggccctgctccacctgtgttcggaggtggctcccagcaccaccaagggatggcccgagaccctagagaggcctgtagaccccgtgacccacccgatcagaggttgtgagctgccatccaaccaccaggagtgtcccccgccgtctctgtctcccttcccagctgccttggctgatggcagaggagactgcgcgctggacggagccctggagaggccagagaacgaggcttccccaggcagccccgggcctcttctccagcaagctctccctctgggggcatctctgccgcggccgggagccagaggccaagatgcggagggaaagagggctcctctcgtgttctcagggaaacgcagggccccgggtgcccgtggcaggtgtgcccctgaccatttccaggaagaccacctacttcagaaagagaaggaggtgtcctcaagccacatggtgtctgagggggggccccgaggcgccttccacaagggcagcgccaccaagcctgcgggctgccagagctcatcaaaggnnnnnnnnnnnnnnnnnacccccagcaaagcactcaagttcccagtgcacccaaggaaggcggtggggagcctggcacccggggagctggcccgtggcacagagaatgggatgaagcccgccacccccaaagccaaacccggccccagctcccagggcagtggaagccctcgccccggcaccaagacaggaggtggcagccagccccagccagccagcgggcagctccagagcgagacagccaccaccccagccaagcccagcttccccagccggagccctgcaccagagaggctccccgctcgagcccaagccaagagctgcaccaaggggccaagggaagctggtgagcaggggccccacgggagcctaggtcccaaggagaagggagagagcagtacgaagaggaaaaagggccaggtcccagggccagccaggagtgaaagtgtggggagcttcgggagagccccctcagcccctgacaagcccccccggacccctcggaagcaggcaactcccagccgcgtgctcccgaccaagcccaagcccaacagccagaacaaacccaggccgccaccatcagagcagcggaaggcagagccgggccacacacagaggaaggacagactgggcaaggccttcccccaggggagacccctgctcaggccccccaagaggggcacagctgtccacggtgctgaacctgccgagccgcacacccaccggacggccgaggcccagagtgacctcctcagccagctcttcgggcagagactaactggcttcaaaatccctttaaagaaagatgcttctgagtaatttctagaagcaagagcctgggaccggagctgggcgttcctgtctcggcctgcctccttggccagctccggctccctgagatggtccactctgtggccacttgacttcttgtgcaactgctcaggccttgatgtcagagctgaggtggtgatgctttgaacagggcccaggtgggcagcattccctttcttgctggaaggctgggggtgaaagacggggccactgcagcccttttgagaccacacagctgttttcttggtaccaagtactttgaagagacagcagcccatcccctcagcccacacccctgcgccctgtgggcaccgacaccacagaagccaatgtttggagatttgcacaacctcccgttcccccacatggagaagggaagtaagttgaggcagccgtgggatggtggtaggttccctcttagtcttgctgctgttgctggaattccaaagtgaccttagaaaccacgtgggggaaggcagtgctcactacttagaagggttgcttctgagccgcctggtcccccaagagcacaacaggcctcctccctctgaccacagggtcatgcctcctccctctgaccacagggtcatgcctcctccctctgaccacagggtcatgccagcctccatttgcgctgcgggagaaaagcccatctctagcacaccttgaccccaggaaccgggttcccgtatggaactgggaagaaaccgcccctgtgccagctcccgcgggccctcctcgttccctcccagcctccatggccgccctctagagcctccctgctgtacggagctctgggctccacctatttgcaatgttactctgaagtttctggtgctatttttgtgttgtaatgtgaatacaggcttccttgattttttttttaatgggggtattgggtgggacagacggggtcagggaggccccaccatggcttgtcgagggcacgggcacctgcatggcggcgctctccctgcctcccctgccgggctgcaagcctgaggtctgtgctgccggacggggatgctcagggctggggctgcagagccgctgccctggccagggcaccctcatgcaccgacccaacccaggcctgggacgcacgtgtcctctcacagcgtcgtgcctgtgaaggtgggtcaaagggtgagagggcttccttctcacccttctctccataagtatcttgaagatccatggtttgttttgctctattgtttagtttttacttgggtgcaatgtgtacgtcaaaagtttttattttgatatttgaaagagaccaaatcaggcccagaccgcctctctggaaggtgttgtaggccattcaaaacgcctccggagtgtcgcaaaccaagtgcggaggggccctgaggttgtactgtaaacatcatagtgacttgtcttttcaaatatattcccactattttcgcagaaaaaaaaaaacaaaaaagaacgaaaaaaaaaaaaaaaaaaacaaacaaaacaacaaacaaaaaaaagcaacaaacaagaagaaagaaagaaaaaaacaacacaaagaggggggcagtaaaaaaacca

SEQ ID NO: 5915 - DNA, 1078 bp, Homo sapiens
cgccacccccgcgaggcaacccatacgaccctccacacaaagacacggggcctggggggcgaattccccacgaggggactccgaagaggaataaatgaggaggaggaggaagaggagaccactgacgatcctgaatatgatcctggctacaaggtgaagcagcgccttggcgtgggcctgtggtgggccatccccgcggggccctccgtgcagcccagcccccggcccagccttgccagctctgtggccgctcaccccttggggaggccccaccgggaaccccaccctgccggctttgctgccctgctacagccccccaggaagcaccagcccctgaaggcagggccctcggggaggaagaggaggaaccacctcgggctggggagggccgaccagctgggcgggaggaggaggaggaagaggaggaggagggaacctaccactgtacggaatgtgaggattccttcgacaacctgggggagctgcacgggcacttcatgctgcatgcccggggtgaggtgtaggcagagcccccatacggggagcttggcagaaggggtggggtgggaggagggggctgaggaaattggggttgtgacagtggtcatgggggatggggtactgccggtctgtgttgtcttagaagtagatgtgtgatggccagaataaaagccaaaatctgtaaaaaactactgcagcgccccccactccgaaggcaattccatattgttccccgggtggccggcaacaaaaaacacgggaacaggacaaaatgggcaaacagtggggacaataaggcttgtttttccaccaggaaaaccaaagactttttctcttggacaccaacaacggggggtacgaaattcttagcgcgggtgtttcacccccaaataacgaaatagccgataaacataaaattttcccaatcgacccccacaccgctgaaacccgtttccatttaacaagcaatactgggcgttggaggagacgcccgagagaaaatctaaacccccccccgtaataggaggaccagacatattatatcgctcgtcgcagccccaaaaaaaacatgctctta

SEQ ID NO: 5916 - DNA, 1207 bp, Homo sapiens
cctcacagggctactcagcctcaggtagctggtgccagaataacacagactcagctgccagagcctgctcttaactgctgtgtttacttttgccacgatcttacaggtgaacaaggtgatgtccatcttgttttatgtgatatttctcgcttatctccgtggcatccaaggtaacaacatggatcaaaggagtttgccagaagactcgctcaattccctcattattaagctgatccaggcagatattttgaaaaacaagctctccaagcagatggtggacgttaaggaaaattaccagagcaccctgcccaaagctgaggctccccgagagccggagcggggagggcccgccaagtcagcattccagccggtgattgcaatggacaccgaactgctgcgacaacagagacgctacaactcaccgcgggtcctgctgagcgacagcacccccttggagcccccgcccttgtatctcatggaggattacgtgggcagccccgtggtggcgaacagaacatcacggcggaaacggtacgcggagcataagagtcaccgaggggagtactcggtatgtgacagtgagagtctgtgggtgaccgacaagtcatcggccatcgacattcggggacaccaggtcacggtgctgggggagatcaaaacgggcaactctcccgtcaaacaatatttttatgaaacgcgatgtaaggaagccaggccggtcaaaaacggttgcaggggtattgatgataaacactggaactctcagtgcaaaacatcccaaacctacgtccgagcactgacttcagagaacaataaactcgtgggctggcggtggatacggatagacacgtcctgtgtgtgtgccttgtcgagaaaaatcggaagaacatgaattggcatctctccccatatataaattattactttaaattatatgatatgcatgtagcatataaatgtttatattgtttttatatattataagttgacctttatttattaaacttcagcaaccctacagtatataagcttttttctcaataaaatcagtgtgcttgccttccctcaggcctctcccatctgttaaaacttgttttgtgatccggctctcaggagtcactctgtaaaatctgtgtacaccagtattttgcattcagtattgtcaaggccatgactgttgttttagtaaacttgttaaaatcaaaaa

SEQ ID NO: 5917 - DNA, 1887 bp, Homo sapiens
ctttccgtccccttgcttcgtcttcgcttttctttctacttattcttatctgtgtctttcgctttgtttgcctctccgtctgttttccctcagggcccccttctttcctcgaccttttcaaatcgcaaatatggcgccggagcggctgcggagccgggcgccctccgccttcaagttgcggggcttgctgctccgtggtgaagctattaagtacctcacagaagctcttcagtctatcagtgaattagagcttgaagataaactggaaaagataattaatgcagttgagaagcaacccttgtcatcaaacatgattgaacgatctgtggtggaagcagcagtccaggaatgcagtcagtctgttgatgaaactatagagcacgttttcaatatcataggagcatttgatattccacgctttgtgtacaattcagaaagaaaaaaatttcttcctctgttaatgaccaaccaccctgcaccaaatttatttggaacaccaagagataaagcagagatgtttcgtgagcgatataccattttgcaccagaggacccacaggcatgaattatttactcctccggtgataggttctcaccctgatgaaagcggaagcaaattccagcttaaaacaatagaaaccttattgggtagtacaaccaaaatcggagatgcgatttcttggaattgaataaacgcagttaaaagagggaaaattttttctggaagatcctactggaacagtccaactagaccttagtaaagctcagttccatagtggtttatacacagaggcatgctttgtcttagcagaaggttggtttgaagatcaagtgtttcatgtcaatgcctttggatttccacccactgagccctctagtactactagggcatactatggaaatattaatttttttggaggtccttctaatacatctgtgaagacttctgcaaaactaaaacagctagaagaggagaataaagatgctatgtttgtgtttttatctgatgtttggttggaccaggtggaagtattggaaaaacttcgcataatgtttgctggttattcaccagcacctccaacctgctttattctgtgtggtaatttttcatctgcaccatatggaaaaaatcaagttcaagctttgaaagattccctaaaaactttggcagatataatatgtgaatacccagatattcaccaaagtcgttttgtgtttgtacctggtccagaggatcctggatttggttccatcttaccaaggccaccacttgctgaaagcatcactaatgaattcagacaaagggtaccattttcagtttttactactaatccttgcagaattcagtactgtacacaggaaattactgtcttccgtgaagacttagtaaataaaatgtgcagaaactgcgtccgttttcctagcagcaatttggctattcctaatcactttgtaaagactatcttatcccaaggacatctgactcccctacctctttatgtctgcccagtgtattgggcatatgactatgctttgagagtgtatcctgtgcccgatctacttgtcattgcagacaaatatgatcctttcactacgacaaataccgaatgcctctgcataaaccctggctcttttccaagaagtggattttcattcaaagttttttatccttctaataagacagtagaagatagcaaacttcaaggcttttgagattcttaaagatcatctgaagaaaattcatcagttttctgcttaactctatatcttatgtgattctgatattacaataaaattatggtaaactttggcctcaaaaaaaaagctctacagccgatattttttttatattacaataaaattatggtaaactttaaaaaaaaaaaaa

SEQ ID NO: 5918 - DNA, 1582 bp, Homo sapiens
agagcaaggggaggaagaggccgggagaagagggctagagcaaagaccgagagccggagaaaggcgaaaggcgcggtgagcaatcgccgacgtagagagggcagccctccgcgctgcaatattgagaaggcacccgcgggacgcatgcgcacggcggacggaggcgagccggccggggcttcctccccggccggcagggtggacggtgggctctctcactgttagaaaccaggaagatcagaggcccacaatagcttcccacgaactcagagcagatcttccaacctgggaagaaagccctgctcctactctggaagaagtcaacgcctgggctcagtcatttgacaaattaatggtcactccagcaggaaggaatgcattccgtgaattcctccgtacagaattcagtgaggaaaatatgctcttctggatggcctgtgaggaactgaaaaaggaagctaataaaaacattattgaagagaaagcaaggataatctatgaagactacatttctatactttctcctaaggaggtgagcttagactcccgggtgagagaagtgatcaacagaaacatggtggagccatcccaacacatattcgatgatgctcaacttcagatttacaccctgatgcacagagactcatatcctcgattcatgaactctgctgtctataaggacttgcttcagtccttatcggagaaatctattgaagcataggatttttcaaatatatttattattaataaaataataaaagaattcatgggctacaactagcacagggaatttagaggttgtagcatcttctgctggagtaatactcaggctattctaataacagatgattccttcaacagactgctatatattcaccatgtaaactgcagccacctttagtgatacttttgaaaaaaaaaaataaagggatatggctgttgtagaaagatagcgtatttgcatttacaataacagtagcatgttgtcagtggccaaggctacacagaaggctccctgctgcccggagcaggtacatccaccagagcaaagggaaccacttttattttgcatgagtttggtaactgattactctcccctcaaagaaaagacattcaggtgtttctcaacgacatcttctgtccagcaagctcggtttgaatacgtcacttaccagtgccattgcaggacccaaattcacagttcataaaagatgtgaccactacatgtaaaaatagcattctacttgatcttacagtatgtatgtatgtatgtatggagacatatgtgtgcgtgtggatgtctacatggttaatggaaagcactgtgctctgaagtggatcagtctcaagtgtctggttacagcagcagtgcttagaaaattcttttgttgaaaagagttactgttattatcagaatttgccaacctaaagaatgaatttttaaattcataacttggtcatgttcacaacaaaactgtcaaataagcatatttccatttttattactgaaagaaatatgggcattttcattctttaaagaaataaagcacaagaattttatctcaaaaaaaaaaaaaaaaaa

SEQ ID NO: 5919 - DNA, 8143 bp, Homo sapiens
  misc_feature (2516)..(2570): n is a, c, g, or t
agaattcggcacgaggggactagttacaaaaagaaaacaaaatcatccaaactagatgacatcaagtgaaagagaagaaaaggagaaagtcaaaaaaaaagagaagaaacaggaagaagaagaaacgatgcagcaagcgacatgggtaaaatacacatttccagttaagcatcaggtttggaaacaaaaaggtgaagagtacagagtgacaggatatggtggttggagctggattagtaaaactcatgtttataggtttgttcctaaattgccaggcaatactaatgtgaattacagaaagtcgttagaaggaaccaaaaataatatggatgaaaatatggatgagtcagataaaagaaaatgttcacgaagtccaaaaaaaataaaaatagagcctgattctgaaaaagatgaggtaaaaggttcagatgctgcaaaaggagcagaccaaaatgaaatggatatctcaaagattactgagaagaaggaccaagatgtgaaggagctcttagattctgacagtgataaaccctgcaaggaagaaccaatggaagtagacgatgacatgaaaacagagtcacatgtaaattgtcaggagagttctcaagtagatgtggtcaatgttagtgagggttttcatctaaggactagttacaaaaagaaaacaaaatcatccaaactagatggacttcttgaaaggagaattaaacagtttacactggaagaaaaacagcgactcgaaaaaatcaagttggagggtggaattaagggtataggaaagacttctacaaattcttcaaaaaatctctctgaatcaccagtaataacgaaagcaaaagaagggtgtcagagtgactcgatgagacaagaacagagcccaaatgcaaataatgatcaacctgaggacttgattcagggatgttcagaaagtgattcctcagttcttagaatgagtgatcctagtcataccacaaacaaactttatccaaaagatcgagtgttagatgatgtctccattcggagcccagaaacaaaatgtccgaaacaaaattccattgaaaatgacatagaagaacaaagtctctgaccttgccagtagaggccaggaacccagtaagaggtaaaacaaaagggaaatgattttttcatcgatgactctaaactagccagtgcagatgatattggaactttgattctgtaagaacaaaaaaccgctcatacaggaggaaagtgacaccattgtttcttcttccaagagtgctttacattcatcagtgcctaaaagtaccaatgacagagatgccacacctctgtcaagagcaatggactttgaaggaaaactgggatgtgactctgaatctaatagcactttggaaaatagttctgataccgtgtctattcaggatagcagtgaagaagatatgattgttcagaatagcaatgaaagcatttctgaacagttcagaactcgagaacaagatgttgaagtcttggagccgttaaagtgtgagttggtttctggtgagtccactggaaactgtgaggacaggctgccggtcaaggggactgaagcaaatggtaaaaaaccaagtcagcagaagaaattagaggagagaccagttaataaatgtagtgatcaaataaagctaaaaaataccactgacaaaaagaataatgaaaatcgagagtccgaaaagaaaggacagagaacaagtacatttcaaataaatggaaaagataataaacccaaaatatatttgaaaggtgaatgcttgaaagaaatttctgagagtagagtagtaagtggtaatgttgaaccaaaggttaataatataaataaaataatccctgagaatgatattaaatcattgactgttaaagaatctgctataaggccattcattaatggtgatgtcatcatggaagattttaatgaaagaaacagctccgaaacaaaatcgcatttgctgagttcttcagatgctgaaggtaactaccgagatagccttgagaccctgccatcaaccaaagagtctgacagtacacagacgaccacaccctcagcatcttgtccagaaagcaattcagttaatcaggtagaagatatggaaatagaaacctcagaagttaagaaagttacttcatcacctattacttctgaagaggaatctaatctcagtaatgactttattgatgaaaatggtctgcccatcaacaaaaatgaaaatgtcaatggagaatctaaaagaaaaaccgtcatcacagaagtcaccacgatgacctccacagtggccacagaatcaaaaactgtgatcaaggtagaaaaaggcgataagcaaactgtggtttcttccacagaaaattgtgcaaaatccactgtcacaaccaccactacaacagtgaccaagctttccacaccctccacaggcggcagtgtggacatcatctctgtaaaggagcagagcaaaaccgtggtcaccacgacagtgacagactccctgaccattccacgggannnnnnnnnnnnnnnnnnnnnnnnnnnnnnnnnnnnnnnnnnnnnnnnnnnnnnntccacacgagacaaagtgaaactgatgaaattttcaagaccaaagaagactcgttcaggtacagctctgccatcctatagaaaatttgttaccaagagcagcaagaagagcatttttgttttgcctaatgatgacttaaaaaagttggcccgaaaaggaggaatccgagaggtcccttattttaattacaatgcaaaacctgctttggatatatggccatatccttctcctagaccgacctttggcatcacttggaggtatagacttcagacagtaaagtccttagctggagtgagcctgatgttacggttactgtgggcaagtttgagatgggatgatatggcggtcaaggcttctccagtgtggagactacacggacagaaacatccgaaactgaaatcacaacaacagaaataattaagaggagagatgttggtccttatggcattcgatctgaatattgtatcaggaaaatcatttgtcccattggagttccagaaacaccaaaagaaacgcctacacctcagaggaaaggccttcgatcaagtgcactgcggccaaagagaccagaaacgcccaagcaaactggccctgttattattgaaacctgggtagcagaagaagaactggaattgtgggagatcagggcatttgctgagagagtggagaaagaaaaggcacaagcagttgagcaacaggctaagaaacgactggagcagcagaagccgacagtgattgcaacttccactacttccccgacaagcagtacaaccagcaccatctctccagcacagaaggttatggtggcccccataagtggctcagttacaactggaaccaaaatggtactaactactaaagttggatctccagctacagtaacattccaacaaaacaagagctttcatcaaacctttgctacatgggttaagcaaggccagtcaaattcaggcgttgttcaagtacagcagaaagtcctgggtatcattccatcaagtacaggtaccagtcagcaaacctttacttcattccagcccaggacagcaacagtcacaattaggcccaatacctcaggctctggaggaaccacaagcaattcacaagtaatcacagggcctcagattcgccctggtatgaccgtgattagaacaccactccaacagtcaacactaggaaaggcaattattcgaacacctgtgatggtacagccaggtgctcctcagcaagtgatgactcaaatcatcagggggcagcctgtctccactgcagtctccgcccctaacacggtttcctcaacacctgggcagaaaagcttaacttcagcaacgtccacttcaaatatacagtcttcagcctcacaaccccctcgcccccaacaaggacaagtgaagctcaccatggctcaacttactcagttaacacagggccacggtggcaatcaaggtttgacagtagtaattcaaggacaaggtcaaactactggacagttgcagttgatacctcaaggggtgactgtactcccaggcccaggccagcagctaatgcaagctgcaatgccaaatggtactgttcagcgattcctctttaccccattggcaacaacagccaccacagccagcaccaccaccaccactgtttccacgacagcagcaggtacaggtgaacaaaggcagagtaaactgtcaccccagatgcaggtacatcaagacaaaaccctgccaccagctcagtcatcaagtgtgggtccagcagaagcccagccacagactgctcagccttcagctcagccccagccccaaacccagccccagtccccagctcagcctgaagttcagactcagcctgaagttcagacccaaacaactgtttcatcccatgtcccttctgaagcacaacccacccacgcacagtcatccaagccccaagttgcagcacagtctcagcctcaaagtaatgtccaaggacagtctcctgttcgtgtccaaagtccatcacagactcgaatacgtccatcaactccatcccaactgtctcctggacaacaatcccaggttcagactacaacctcacaaccgattccaattcaaccacatacatctcttcagataccttcccaaggccagccacagtcacaaccccaggtggtgatgaagcataatgctgtaatagaacatttaaaacagaaaaagagcatgactccagctgaaagagaagagaatcaaagaatgattgtctgtaaccaggtgatgaagtatattttggataagatagataaagaagaaaaacaggcagcaaaaaaacggaagcgtgaagagagtgtggagcagaaacgtagcaagcagaatgccactaagctgtcagctctgctcttcaagcacaaagagcagctcagagccgagatcctgaagaagagagcactcctggacaaggatctgcaaattgaagtgcaggaagagctgaagagagacctgaaaattaagaaagaaaaagacctgatgcagttggctcaggccacagcagtagctgcaccctgccccccagtgacaccagctcctccagcccctccagcccctccaccttcacctccccctccacctgctgtgcaacacacaggccttctgtccacgcccaccttacctgctgcttcccagaagaggaagcgggaagaggaaaaagactccagctcaaagtccaagaaaaagaaaatgatctctactacctcaaaggaaactaagaaggacacaaagctttactgtatctgtaaaacgccttatgatgaatctaagttctatattggctgtgatctttgtactaactggtatcatggagaatgtgttggcatcacagaaaaggaggctaagaaaatggatgtgtacatctgtaatgattgtaaacgggcacaagagggcagcagtgaggaattgtactgtatctgcagaacaccttatgatgagtcacaattttatattggctgtgatcggtgtcagaattggtaccatgggcgctgcgttggcatcttgcaaagtgaggcagagctcattgatgagtatgtctgtccacagtgccagtcaacagaggatgccatgacagtgctcacgccactaacagagaaggattatgaggggttgaagagggtgctccgttccttacaggcccataagatggcctggcctttccttgaaccagtagaccctaatgatgcaccagattattatggtgttattaaggaacctatggaccttgccaccatggaagaaagagtacaaagacgatattatgaaaagctgacggaatttgtggcagatatgaccaaaatttttgataactgtcgttactacaatccaagtgactccccattttaccagtgtgcagaagttctcgaatcattctttgtacagaaattgaaaggcttcaaagctagcaggtctcataacaacaaactgcagtctacagcttcttaaagttcagcgtgttaacctaacataaaacacagcaagaatctggttgtctgaactattttaaattaaggagccagatgtttttagtcaggctatcctgacaagacttgacctaaacttcgtttttattggtcataacagtccaattatattcttggccaattttgtccaacggacaagaaaaaagcaaagtcaacgacaccattatcttgtcaagatcagatggttttactattgtggcagaagcgagaaaactttgtttattgaaaaaaaaagaaaaagaaagcaagaaaaaaagatactatggggtcaagtgtaactccatggaaatgccacgtctgctcttcagtgaagaagctggtttagagtctcacagaaaacttttgactgtatttatttattgttgcaaaaaagacgcttttttattgctgccctcatttgtcagctaagtattttttcttataaaatccagccccggttacatataatcatctgtatcttatcatgattcctgtaggtaaaagtacaagacgacctctagatgtcttttctttctatgaaaggagctgctatgtacacatgtgcacacacacacaactgggaatcaacaatgagtttattgttcatggtagattaaaattaagcttgcataaaggttgggctaagtggtcctggactacagactctgttgccttgaatataacagtacaatttgtcaattactctgcaccaggctaaagtgagtaaaatctatttgaaggtatcttgtttgtaaacatttgtcagattctaatttttttcttttgtattaaaattcaactatggatgtatatgaaacaaaataaatggagataatttttctcccacagacagaggtgtctttgaatgtgcgctaatgattatctgtaagcctttgtggggagggaggcctgcaaggtcatgaaaggcagaagagtctaattgtgcctggatttctccaggacagcagtggcccctcgttttatcattcccagtccattgtcatcacgtcagagaaaaatcttcaggggtgctaatcctgttgcatcagttgatcatactaacgagaacggtaatgcgacaagatacacattgccttcatctgtacattctgtgataccaggcaaattaccaattacacacagctacttatattttatgaagggcattttttagatgacctcatcctctgtgttatttgttgattgggtttgttttctgtttgttggtttgtttgtttcttccacgtaaggaaaagtagtgtaaacagtagcgagaaaatggaaaccacagaggaagatgtattttgcatgtttttcctttcagtgttcttacacgttgtatcactgcattgtggtaatagcttctataaaatctgccatagttggattatgcagctttgcaaaaatttttactagattttgcactaactcatattagctttgtcctaccaacttctggaatttatctaattattgtttttcaaagtttctttccttttaatgtttccctgctatgcaaaacctttcccagacctcagtttcttaaaagaaagatgttgctacagttcccgattctttcttattacaggctcaggtgtacaggttattctgggttaattttatctaatgaagcccattcctttttgtacataaagatgtcacttaaacttatgcttacaaactaaagactaatcgctcaatatgaaaacatgaaaaaatttttgcttaaagtattaagatggaagtagttaaatatgggttattttgtccttttacttttttaaaaaatgttacatattgtatgcactgtgctgatgcaagaattctacattttaatgaattataaaattattctgcatctcatcacatcacagtatttctgtactatttattcatatatataaatatatatgggcttaatcatttaaaatttgttgcagcaagaactttcctacctgtaggcaatagattgctatgtttttaacaaattgtggcaaattctaaacagcaattcttttgtacgtaataggacatttcatcctagaaaaataaagtaatgtttttgacattgcaaaagaaaaaaaaaaaaaaaaaa

SEQ ID NO: 5920 - DNA, 969 bp, Homo sapiens
ccagagaggggcaggctggtcccctgacaggttgaagcaagtagacgcccaggagccccgggagggggctgcagtttccttccttccttctcggcagcgctccgcgcccccatcgcccctcctgcgctagcggaggtgatcgccgcggcgatgccggaggagggttcgggctgctcggtgcggcgcaggccctatgggtgcgtcctgcgggctgctttggtcccattggtcgcgggcttggtgatctgcctcgtggtgtgcatccagcgcttcgcacaggctcagcagcagctgccgctcgagtcacttgggtgggacgtagctgagctgcagctgaatcacacaggacctcagcaggaccccaggctatactggcaggggggcccagcactgggccgctccttcctgcatggaccagagctggacaaggggcagctacgtatccatcgtgatggcatctacatggtacacatccaggtgacgctggccatctgctcctccacgacggcctccaggcaccaccccaccaccctggccgtgggaatctgctctcccgcctcccgtagcatcagcctgctgcgtctcagcttccaccaaggttgtaccattgcctcccagcgcctgacgcccctggcccgaggggacacactctgcaccaacctcactgggacacttttgccttcccgaaacactgatgagaccttctttggagtgcagtgggtgcgcccctgaccactgctgctgattagggttttttaaattttattttattttatttaagttcaagagaaaaagtgtacacacaggggccacccggggttggggtgggagtgtggtggggggtagtggtggcaggacaagagaaggcattgagctttttctttcattttcctattaaaaaatacaaaaatcaaaaaaaaaaaaaaaaaaaaaaaaaaaaaaaaaaaaaaaaaaaaaaaaaaaaaaaaa

SEQ ID NO: 5921 - DNA, 714 bp, Homo sapiens
tttttttttttttttttttttcagttttgccaattctattttattttttaaagataatatacaattctatatggaaaattccaaaataatgtaaaaacaaattataacagaaactttagcaaacgaatgaatacagatatatttaataattgtatcattatataccagtaactgttgatagaaaatgtaataaaaagataccacttgaagtattaacaaaaataaggaactataagagatgtgttacatctaaatgtagcactttataaaactgtgttggaagatatcaaacacctaaataaattgatccatatgctgtattaatgaatagaacgtcccagttacataaagatgccaatcatttacgaatcaataatttcaataccctttcattcaaaatcccatttagggtagagaggaatggaacatgtgaaagtgcacactaagaataagacactttgaaggagaagagtaaaatggtgaggcttgtcctactatatttcaaaaggttattataaagcaatataaataataaaataccagtgggtgtgaaccagccaattgaagccaagaggctgatatagtatagaattctaacatgtgtgagggcaagtagaagatcactggggaaaacgtgaacctagccagcacaacaggtctgtgggaaaggataaattacttaatcaatgatgctggaactttggtttaaatttt

SEQ ID NO: 5922 - DNA, 3615 bp, Homo sapiens; identical to SEQ ID NO: 5523

SEQ ID NO: 5923 - DNA, 3874 bp, Homo sapiens; identical to SEQ ID NO: 5398
  misc_feature (231)..(247): n is a, c, g, or t
  misc_feature (2480)..(2490): n is a, c, g, or t

SEQ ID NO: 5924 - DNA, 1007 bp, Homo sapiens
tcggtcttaaagcaaagaattccccggtcccagccatgtccaacgtcccccacaagtcctcgctgcccgagggcatccgccctggcacggtgctgagaattcgcggcttggttcctcccaatgccagcaggttccatgtaaacctgctgtgcggggaggagcagggctccgatgccgccctgcatttcaacccccggctggacacgtcggaggtggtcttcaacagcaaggagcaaggctcctggggccgcgaggagcgcgggccgggcgttcctttccagcgcgggcagcccttcgaggtgctcatcatcgcgtcagacgacggcttcaaggccgtggttggggacgcccagtaccaccacttccgccaccgcctgccgctggcgcgcgtgcgcctggtggaggtgggcggggacgtgcagctggactccgtgaggatcttctgagcagaagcccaggcgggcccggggccttggctggcaaataaagcgttagcccgcagcgcaaaaaaaaaaaaacaaacaacaacaaaaacacaaacaaaaaaaaaaaaaaaacaaaaaaacaaacaacaaaaaaaacgaaaagagaaaacaaaacaacaagacacaagacagaggacaagagagcacaaaggcacagaacaacacaagaataagaggaagggcggacgacacgatcaacagcaacagcagaccgaagaacacgaaggacgagaaagagaaatgaggagggggaggtgtgggactaggaggaggagagggagagcacaaaggcgcagggacgccggtgaaaccaccacacgcgcaccggaggagcagagagagagacgacctacgtgggcggagagaccgcgaacggaaacggagggcaagagaaataacacggtgggcgggggcggcggaccgcacgacgaggcgagccgaacggagaagcacacagcaatgcgccagtacgaaaagcaagcagagaaagacagggaaacatgcggggagaccccaccaggt

SEQ ID NO: 5925 - DNA, 2409 bp, Homo sapiens
aacagcatcaccatgtctgttcgatacagctcaagcaagcactactcttcctcccgcagtggaggaggaggaggaggaggaggatgtggaggaggaggaggagtgtcatccctaagaatttctagcagcaaaggctcccttggtggaggatttagctcaggggggttcagtggtggctcttttagccgtgggagctctggtgggggctgctttgggggctcatcaggtggctatggaggattaggaggttttggtggaggtagctttcgtggaagctatggaagtagcagctttggtgggagttatggaggcagctttggagggggcagtttcggaggtggcagctttggtgggggcagctttggtggaggcggctttggtggaggcggctttggaggaggctttggtggtggatttggaggagatggtggccttctctctggaaatgaaaaagtaaccatgcagaatctgaatgaccgcctggcttcctacttggacaaagttcgggctctggaagaatcaaactatgagctggaaggcaaaatcaaggagtggtatgaaaagcatggcaactcacatcagggggagcctcgtgactacagcaaatactacaaaaccatcgatgaccttaaaaatcagattctcaacctaacaactgataatgccaacatcctgcttcagatcgacaatgccaggctggcagctgatgacttcaggctgaagtatgagaatgaggtagctctgcgccagagcgtggaggctgacatcaacggcctgcgtagggtgctggatgagctgaccctgaccaaggctgacctggagatgcaaattgagagcctgactgaagagctggcctatctgaagaagaaccacgaggaggaaatgaaagaccttcgaaatgtgtccactggtgatgtgaatgtggaaatgaatgctgccccgggtgttgatctgactcaacttctgaataacatgagaagccaatatgaacaacttgctgaacaaaaccgcaaagatgctgaagcctggttcaatgaaaagagcaaggaactgactacagaaattgataataacattgaacagatatccagctataaatctgagattactgaattgagacgtaatgtacaagctctggagatagaactacagtcccaactggccttgaaacaatccctggaagcctccttggcagaaacagaaggtcgctactgtgtgcagctctcacagattcaggcccagatatccgctctggaagaacagttgcaacagattcgagctgaaaccgagtgccagaatactgaataccaacaactcctggatattaagatccgactggagaatgaaattcaaacctaccgcagcctgctagaaggagagggaagttccggaggcggcggacgcggcggcggaagtttcggcggcggctacggcggcggaagctccggcggcggaagctccggcggcggctacggcggcggccacggcggcagttccggcggcggctacggaggcggaagctccggcggcggaagctccggcggcggctacgggggcggaagctccagcggcggccacggcggcagttccagcggcggctacggtggtggcagttccggcggcggcggcggcggctacgggggcggcagctccggcggcggcagcagctccggcggcggatacggcggcggcagctccagcggaggccacaagtcctcctcttccgggtccgtgggcgagtcttcatctaagggaccaagatactaacaaaaccagagtaatcaagacaattattgaagaggtggcgcccgacggtagagttctttcatctatggttgaatcagaaaccaagaaacactactattaaactgcatcaagaggaaagagtctcccttcacacagaccattatttacagatgcatggaaaacaaagtctccaagaaaacacttctgtcttgatggtctatggaaatagaccttgaaaataaggtgtctacaaggtgttttgtggtttctgtatttcttcttttcactttaccagaaagtgttctttaatggaaagaaaaacaactttctgttctcatttactaatgaatttcaataaactttcttactgatgcaaactaaaaaaaaaaaaaaaaaaaaaaaatgtacaacgtctggagatagaactcaccacaggcgggggcccccccacagaaggaagcccaccaggaggccccacagagacaaaggcgcaccccccgcgcgagaggggaacaaaagagggggccccaagaagcggaggcgagaaacaaaacgcgcaggcggcacgtcagccgcgcgacaaacacacacgcggcaccagggggaaacaagaaggtgtcaagagggaaaacgttagagcgcgaccacaccacacgacggggg

SEQ ID NO: 5926 - DNA, 3305 bp, Homo sapiens
ctgagacaccgcagcttccctgagcgccgagtccctccggggacagcagcagggagcgcccgcgcagccaccgagcctctgcccagccaagccgccgtcgccgcgccgggggaccgccagccatggccgcgccgggggatccgcaggacgagctgctgccgctggccggccccgggtcccagtggctcaggcaccgaggggagggggagaacgaagcggtgacgccgaaaggggccacgccggcgccgcaggctggggagcccagcccggggttgggcgccagggcccgggaagcggcgtcgcgggaagccggctcgggccccgcccggcagtcgcccgttgccatggaaactgcatccacaggtgtggcaggtgtttccagtgccatggaccacaccttctcaacaacatcaaaagatggggaaggatcgtgttacacatctctcatttctgacatctgctatccacctcaggaggattctacatattttactggaattcttcagaaggaaaatggccacgtcaccatttcagagagccctgaggagctgggtacacccggcccctccttaccagatgtgcctgggatagagtctcgtggcttatttagttctgattctggaatagagatgactcctgcagagtccacggaagtgaacaagatcttagcagaccctctggaccagatgaaagcagaggcctataaatacattgacataaccagacccgaggaggtgaagcaccaagaacaacatcaccccgagctggaagataaagacttggactttaagaataaagacactgacatctcaattaaacctgaaggagtccgtgaacctgacaaaccagctcctgtggagggaaaaatcatcaaggaccatttattggaagaatccacatttgctccatacatagatgatctctctgaagaacagcgcagggctcctcagatcaccacccctgtcaaaatcacactgacggaaatagaaccttctgttgaaaccactacccaagagaagacccctgagaagcaagatatatgtctaaagccaagtcctgacacagtccccactgtcactgtctcggagcctgaagacgacagcccaggatctatcacccctccatcttctggaacagaaccatctgctgcagaatcccaggggaaaggcagcatctccgaggatgagctgatcaccgccatcaaagaagcaaagggattatcgtatgaaaccgccgagaacccacggccggtgggccagctggccgacaggcccgaggtcaaggccaggtccggaccgccaaccatccccagccccctggaccacgaggccagcagcgcggagtcgggggactcagagatcgagctggtgtccgaggaccccatggccgcggaggacgcgctgccctcaggctatgtgagctttggccacgtgggcggcccgccgccctccgcctcgccatccatccagtacagcatcgtgagggaggagcgctgaggcctgagcgtggacagcgagctcatcatcgagtcgtgcgacgcctcctcggcctcggaggagagccccaagcgggagcaggactcacccccgatgaagcccagcgccctggatgccatccgggaggagactggcgtccgggccgaggagcgtgcgccaagccggcggggcctggccgagccgggttccttcctcgactacccctcaactgagccccagcctggccccgagctgccccctggagacggagccctggagcctgagacgcccatgttgccacggaagcctgaagaagactcgagttccaaccaaagtcctgcggccacaaagggccctgggcctctaggtcctggcgccccgcccccactgctgtttctcaataagcaaaaagctattgacctgttgtattggcgggacatcaagcagacgggcatcgtgtttgggagtttcctgctgctgctcttctccctgacccagttcagcgtggtgagcgtcgtggcctacctggccctggccgcactctcagccaccatcagtttccgcatctacaagtctgttttacaagcagtgcagaaaaccgacgaaggccaccctttcaaggcctacttggagcttgagatcaccctttctcaggagcagattcagaagtacacggactgcctgcagttctacgtgaacagcacacttaaggaactgaggaggctcttccttgtccaggacctggtggattccttaaaatttgcagtcctgatgtggctcctgacctacgttggcgctctcttcaatggcctgaccctgctgctcatggctgtggtttcaatgtttactctacctgtagtgtatgttaagcaccaggcacagattgaccaatatctgggacttgtgaggactcacataaatgctgttgtggcaaagattcaggctaaaatcccaggcgctaagaggcacgctgagtaaactgatttcccaccggggactggacacaaacaggaatgtctggagtggtaacagctctcttcttactcattactgcaaattgattgtctttcccccctccctccagtaccataatcttagagacaaaccttaaaacagctgtttttaggctgttccttgtactcttaggatatttgagtcacttgtgtcaaccactaaagtatagagaaaagtgtattagatgtggtttttaattttgtgttgctaaaaaaagtgcatgatggtgagagcccaagttatctttccctcttcggtgttcttcttctcttctctgcaatgcttctgtagcttctaatgttccccgtggctaggcctttcctgccgagtgctctgatgcaatagtggaaatcgcttatatgtccttgggttgctggttggattaatctttaataacaatatatagaattgtagactgatgttttagcatttttccaacacacacaacgtaaaaataaaagcagtcgaccgcacttatggtaatcagttttgtataacttaaaataattaaataaatgaataaatccaaaacaaacatgcagtacttttgttgtatgggattggtgggctgatttacatgtatggttactaaaaagtaccagcatgttaactttattacaatttgtattactttctctgtagttcctaatggattcaattacggactctggatatttgcacttatgtacttgatactgaatgcataaataaatgttactaaatgtaaaaaaaaaaaaaaaaaacctactacccacaataactacacaaaaaaactcgcggggggcccggtcccaattcgccctaagtgaggcgatt

SEQ ID NO: 5927 - DNA, 911 bp, Homo sapiens
  misc_feature (783)..(806): n is a, c, g, or t
ggggaccacttctctgggacacattgccttctgttttctccagcatgcgcttgctccagctcctgttcagggccagccctgccaccctgctcctggttctctgcctgcagttgggggccaacaaagctcaggacaacactcggaagatcataataaagaattttgacattcccaagtcagtacgtccaaatgacgaagtcactgcagtgcttgcagttcaaacagaattgaaagaatgcatggtggttaaaacttacctcattagcagcatccctctacaaggtgcatttaactataagtatactgcctgcctatgtgacgacaatccaaaaaccttctactgggacttttacaccaacagaactgtgcaaattgcagccgtcgttgatgttattcgggaattaggcatctgccctgatgatgctgctgtaatccccatcaaaaacaaccggttttatactattgaaatcctaaaggtagaataatggaagccctgtctgtttgccacacccaggtgatttcctctaaagaaacttggctggaatttctgctgtggtctataaaataaacttcttaacatgcttctacaaaaaaaaaaaaaaaaaaaaaaaaaaaaaaaatcggtccgcctcggcccctcgaaaagctttctaaacccttcccttgggcgcgccgggcccagaaggtaaattgaacatggtcctaacctgtttccaaggaaaatcctggccatgaactaatgctttggattctccccaaaaaaaaaccgcccggggcggcaannnnnnnnnnnnnnnnnnnnnnnnccaaatcggacttcctcgacgggtacttaaaggtggactctaattcaaccggggggctttcccgcgggaagcctttttattattcccacatttttcccccccccc

SEQ ID NO: 5928 - DNA, 902 bp, Homo sapiens
ttttttttttttttttttaaaaagcataaaagatattctttttattcctgtaattttataaaacactacataaaagctggcgagttttaaagagggaaaaactgcattgaaaagtataaagtctcacaagggcaaagtccatctggggcaacagttccaacatcacggacctctcaggaggagaactggtctcatgagatgctccgtacacccctacccacatacccttcctgtcaaaacttagaccaagcatgccacatctgacaagtcaacttcaaacaattcgtggtgcttttctttcaggctagaaatcatctgtagctattagaaccattcagcaaagcaatatggctttaatgggtacctatgctttgtgaagatatatttatacacacacacacaccgtgtgcttggggccaatcctgagaccatatacctgaggatcactgtctagcagtggctaatctttaagcggtgttaggacagacactctgggaaacacgcaggacattctggactcagtcctgtggtcaatggggggcagctttcattgcatcagacttgagacaccttgggacacatccttcaaagagttggggggctgtaaaggtgacctctgtgagaaggtgaccagacccatgtgggtcaaggttttgtgccctcacaccatacagtgccccaacacaggaggatcaaaccatccgtgctcagctagaactacggctcaaccataagggaggctgtgcctcatttccacaagagggcaaataagaaaagtaaaagaagtaagaaaaaattaaaaggaatatgaaaaaaaaaggaaaataagaaaaaaaaagaaatcagaaaagtcaaagaaataagaggaaaagaatgaggaaaaacggagaagaaataaaagt

SEQ ID NO: 5929 - DNA, 2985 bp, Homo sapiens
cgctctctcagccgcccctcttcgtgtggctgcttcgctcgaaccgccgtgtgtctgactactcgtcgctgcggccgcctaccgtggcggtttgctgcgggggcgccccccccctttcttctcgtctttcttgtgtcgcgtttctgtcgtccttgttcgtctgcctttctgtgtgttttgttctagtgtttggtcttttttttttttttttttttttttttttttttttttttttttttttggatctattgaaacatgtttaaaacggggttggtcacaacaggatgggcacaaatgggagcgggggaggggagtggggccgcaccagcccctgccagtgcctgaggctgcagcctggcgagtgcttttgcttctgcttctccacgctggtggttcgagatggtcccaagccccactggggcaggccctgccttgccctgcagaggcagggtggctccacttccccatctcctcccccatgggctgcaggggcatttatgatgcccaacaggtggcactgtcgcgctccttcctccctgtctccgtggctcagaaacaggttaagggtagaggtagatggggagacgtgggggccacacagtctccggtggcagtgagggagcttgggaccctgaggggggcatgctgactccttgctggagaaaaggcacctagataggggagctgggcttgggggcctcccagggggtcctggggtgaggtggggagggaggctgaacgaagcaggaagcagggtggtgggcagaccccaatcctggtttccaaaccctcaccggctgcgggagaaggaagaaggaaggagtcctggagcagagccctgccctggtcccctacgcctgagcaagcctcatccccttcccacctggcccccacgcaagcccagctcgacctccttcccaccttccccctgccggctccaggccttccgcagagggggtggaaggttacagaggcctcaggccgtcttggtgccggggtccacctccttgtgggcccagagctccttgtgctgcttgcggccaaacccctcgtcgtagttgcctttgctcttaaacagctgctggaagtggggtttgcagtagaactccccgtgcagcgcggcgtagctgcccaggctgagcttggtgtgacagtgcttgcagcagaagcaagagttgtggaaaatgagcttgtcggccaccagccgctccatggggtacacggtcttctggcaggcggcgcaggtctccttcacctgggcccgcaggctgaaggactgtgcgggaagctcagccaggtgctgccccagtgctcatcccgctccctcacacccctcctcccgcacacccggccccaggcccctaccttggagcgctgcaccgtgctgctgccgccgcctttggcgtcatgagagggggtggcctgggcggctcctgcagcctggaacatggctcgttggaggtggaagcctcgggtggagaagcggcacccgctgggttctgcaaggggaagtcagtcgggagggccccgccagcccggccccagcctgcagggtggggggtgttgacaggcaggggctggggggattgcggttgggactttccctaagtcatttcctgttgctcttggtcttgccacttccgcccctcacccacctcccccacccctgctccccaggggccggggtcccgagtggcaccgtccctcggaagaacaaagttagcgggagcggaggggccgggggctcccgcgcagccgccgtgtgcgtcccgcgggctgggaccgcttggggtgaggggaggtcggggccggcggggccgcgatgagaagccgctgccccgacctgaccccggccctcgctgccctgcgccgcgcccgggcgtccaggcctaggctgcgcagcccctggacagcgcccgaggtccccgcccgccccgcccctcggcccccgacctggccccgcgaggaccggaccccagaccccgacgccgcgagccccgccagcgggtctcggctccgcccagccgggggccggccctgaaacgaggactcgagcctgtgcgccccgggcgagagcggctcgcagactcgccgggaccccacgggcggccctcaccccacacccctcggcgcctctcccggttccggagccggacgcggcccctcccccccgcggctctcaccaggcccggcctgggccgcggggcgggatcggtctccgggggcgcacgggtacgaggagggcgcgggcgcgagctgctgccgctaccagtggtccccgagccaccgccgccgccaccgccttatcgctgcaccgcccccgccggcccccgccccgcgcccgcccattggctccgccgcgcccggagccgccttcggggccccggcgccgccgccgacccccctccgcgctttgtcttcccctcgccgccgtccccgcctttgtctgtcccccgccccggctccgcgctcccggctccgcagcgccccgcgggcctcgcgctcgcatgcctcgggtaccggccgcgccgtctgcccatcccgacggcggcccggcgtgggcaaacaccccggtcgggacacgctggaaaggccgcgcttcgcgtcctaccggggaggggacgactttgaggctcgcgtgccctgcggccccttgttgccttgggtgtcccccggcacggggcgccgggcaatcttcccacacaaacccggggggcattcgaactcgcgtttagaaggccccgtgccgtggccgctcccttctttccgcgccgcgcctctcgtcaactaacacgaccataaacaaagaataccaaacggtagattttgctgctactttttcgctcctttctggtcagtcgcggtcccctctcgcgcccaccaccctccttaatcgattattgcagcacgtccggattctcttgactagtagcggtggttgtcgaggcagacaaaggttgtatagatcgcgagagaccaccctag

SEQ ID NO: 5930 - DNA, 2741 bp, Homo sapiens
gcccagcgggggcgggactggaacggagccgtgcggccccgcgcgctcgcagtctgtctcccgccgtccccacgcacgcgtcccggctcacgcgtccgcccgcccgcccccgcttgtgccgcccctaccagagacccccaggagcaggatgtccttccagggcaagaaaagcatcccccggatcacgagtgaccgccttctgatcagaggtgggaggatcgtgaatgacgaccagtccttttacgctgatgtgcacgtggaagatggcttgataaaacaaatcggagaaaacctcatcgtccctgggggcatcaagaccattgacgcccacggcctgatggtccttcctggtggcgttgacgtccacacaaggctgcagatgcctgtcctgggcatgacaccggctgacgacttctgtcagggcaccaaggcagcgctagcaggaggaaccaccatgatcttggaccacgtcttccccgacacgggtgtgagcctgctggcggcctacgagcagtggcgggagcgggcggacagcgcggcctgctgcgactactccctgcacgtggacatcacccgatggcatgagagcatcaaggaggagctggaggccctggtcaaggagaagggtgtgaactccttcctggtcttcatggcatacaaggaccggtgccagtgcagcgacagccagatgtacgagatcttcagcatcatccgggacctgggggccttggcccaggtgcacgctgagaacggggacatcgtggaggaggagcagaagcggttgctggagctcggcatcactggccccgagggccacgtgctcagccaccccgaggaggtggaggctgaggcggtgtaccgagctgtcaccatcgccaagcaggcaaactgcccgctgtacgtcaccaaggtgatgagcaagggggcggccgacgccatcgctcaggccaagcgcagaggggtggtcgtgtttggggagcccatcaccgccagcctgggcaccgacggttcacactactggagcaagaactgggccaaggccgcagccttcgtcacatcaccccctgtcaacccagaccccaccacggcagaccacctcacctgcttgctgtccagcggggacctccaggtgacaggcagcgcccactgcaccttcaccactgcccagaaggctgtgggcaaggacaacttcgcgctgatccccgagggcaccaacggcattgaggagcgcatgtcgatggtctgggagaaatgtgtggcctctgggaagatggacgagaatgagttcgtcgcggtgaccagtacaaatgctgccaaaatcttcaatttttacccaaggaaggggcgagtggctgtgggctctgacgctgacctggtcatatggaaccccaaggccaccaagatcatctctgccaagacccacaatctgaacgtggagtacaacatcttcgagggagtggagtgccggggagcgcctgccgtggtcataagtcagggccgagtggcgctggaggacgggaagatgtttgtcaccccgggggcgggccgcttcgtccctcggaaaacattcccggactttgtctacaagaggatcaaagctcgcaacaggctggcggagatccacggtgtgccccgtgggctgtatgacgggcccgtccacgaggtgatggtgcctgccaagccagggagtggcgctccggcccgcgcgtcctgcccaggcaagatctccgtgcctcctgtgcgcaacctacatcagtcggggttcagcctatctgggtctcaggctgatgaccacatcgcccgacgcacagcacagaagatcatggcaccacctggcggccgctccaacatcacctctctctcctagacgcccaggaccggccctgtgagccgtgctggccccacccgaggccgcgggggccccagggcactcgcccccctccttagcattttcttttgtagaagtttctcgaaggtgcttggcggtcttgccttccccctccccacaggctctccttgtggggtcccaggtcctgctgccaagagcccctcaagagaagggctgaacctggggagatgtcactgccagggtgaggtggagccacatggcagggacaatgccggcagcctgagcccaggcaccccagtgcccgctgggcccagcctggggacagggaacctgccgggctcacagtgtgggagcagctggacaccaggcttcttggtgaaccggcgaggggccgagtcccgcctggtgggcatttgctgccgcctccccaccaccagtcactgcctcgcagagccctacactcccgcagccgctcctcagaggcctgtgcccatcgcaggcctgggaggaaagtgggcgcagagccctcctgctcacacagctgctgagacttcagggacccatcagaacttggtgcagcacagccccgcccgtggagggtcccttttacgcaccccaaggcccacacctaagcttccatgtagccctcatccagggaagttttgcgatcctttaggaagacactgtcctcttattacagattgtgtatttccgtaggcttcttagtagcagctttgtacactgaggacactgtagccaggaacctgtgcatgccacccaccgcctggacaggcagtcatcctgcctctgatgtgaatcaggcccattaaagacgtctgggtttgaagccaggcctcgtgcctggaaaaaaaaaaaaaaaaaaaaggacgcg

SEQ ID NO: 5931 - DNA, 1456 bp, Homo sapiens
gctggtaccggtcggagtgtagggattagcgacggccgtagggcacgaggctcctccccgccgccgccctcgccatggccgcgccggccccgggcctcatctcggtgttctcgagttcccaggagctgggtgcggcgctagcgcagctggtggcccagcgcgcagcatgctgcctggcaggggcccgcgcccgtttcgcgctcggcctgtcgggcgggagcctcgtctcgatgctagcccgcgagctacccgccgccgtcgcccctgccgggccagctagcttagcgcgctggacgctgggcttctgcgacgagcgcctcgtgcccttcgatcacgccgagagcacgtacggcctctaccggacgcatcttctctccagactgccgatcccagaaagccaggtgatcaccattaaccccgagctgcctgtggaggaggcggctgaggactacgccaagaagctgagacaggcattccaaggggactccatcccggttttcgacctgctgatcctgggggtgggccccgatggtcacacctgctcactcttcccagaccaccccctcctacaggagcgggagaagattgtggctcccatcagtgactccccgaagccaccgccacagcgtgtgaccctcacgctacctgtcctgaatgcagcacgaactgtcatctttgtggcaactggagaaggcaaggcagctgttctgaagcgcattttggaggaccaggaggaaaacccgctgcccgccgccctggtccagccccacaccgggaaactgtgctggttcttggacgaggcggccgcccgcctcctgaccgtgcccttcgagaagcattccactttgtagctggccagagggacgccgcagctgggaccaggcacgcggcccatggggctgggcccctgctggccgccactctccgggctctcctttcaaaaagccacgtcgtgctgctgctggaagccaacagcctccggccagcagccctacccggggctcaacacacaggctgtggctggggggcctcctgggactccccggtatttgctggaaaaaaaaaaaaaaaaaaaaaaaaaaaactccggggctttaatgccggggtgccccgaactaagcgacttcaagcgccccacgacaaaaaagatgacctcgaaacccgcctgtgcctcaaaagagacggcaactttgcccgggcgccccttactaaagggttggagcacccttctgcccacggcccggcgatagcacacagactgtgaactataggtgccgcgagaaccctgcaccccgccacgcaacccgatcgtagcgctgccgcgccgtcgcctgctgggccctagccgcatgcacacggagttccccatatcctatccaatcatatgaacctcacctcggggagagtagagtagagagcgctcggtcacgacgcacgagtggcgcagatgaacacc

SEQ ID NO: 5932 - DNA, 667 bp, Homo sapiens
  misc_feature (40)..(40): n is a, c, g, or t
  misc_feature (77)..(77): n is a, c, g, or t
  misc_feature (93)..(93): n is a, c, g, or t
  misc_feature (519)..(520): n is a, c, g, or t
taacaatagtccttacactgaattcatttatcccggaccnccattccatttttcttgaaaatggccggaaatagccngctgccgaccattaantctatggtacataccaagcaattcaactttttcttgtaatgtcagacttttctcttcttcttgggagcacttccagtatcactagtgctagtggcatcactttatacgagtcttatggtattattcaaagtttacagtattgcattaaacacgatgaaaaatacatgagaaccacaagagattaccttttactgtggtaggcaatttactacagagacaaactgctgaaacagaggtgatcagtgccgattaaaatgcgtggcattttaagtggatacttgcagcacctgaactcactgcaatagcaataggaggtggctatgaaattattagagaagtatagtatataccacagtaactttttgccactctcacttaatacggcatccttacatttggtttctcgtgccgaattcggggagattnncacaaggaaagaatgggaacgcaaggcgcacctgggaaccacctggtgtaccctggagcaaagggggaacgaggagagccgggtgacctgaagtctcaagccatggtgagatcagtggcgcgtcaagtatgccgacaactcatccga

SEQ ID NO: 5933 - DNA, 2455 bp, Homo sapiens
  misc_feature (2244)..(2244): n is a, c, g, or t
  misc_feature (2334)..(2350): n is a, c, g, or t
  misc_feature (2383)..(2383): n is a, c, g, or t
  misc_feature (2402)..(2402): n is a, c, g, or t
caaagagcttcaaatcccagctctttctactagagataatgaaaatcaatgtgactataggacccagaatgtgttgggtttgcaaaagcagatcaccaatatgtaccccgttcagcaaaacgaatcaaaagttaataagaagcttaggcagaaagtaaatcggaagacagaaataatttctgaagtgaatcatttagataatgacaaaagtatagaatacacagttaaaagtcactcactctttttaacgcaaaaagataaggaaatcatccccggaaacctagaagacccaagtgagtttgaaacacctgctctttctaccaaagatagtggaaacctgtatgattctgagattcaaaatgttttgggggtgaaacatggccatgatatgcaacctgcttgtcaaaatgattcaaaaataggtaagaagcctagactaaatgtatgtcaaaagtcagaaataattcctgaaaccaaccaaatatatgagaatgataacaaaggtgtacatgacctagaaaaagataacttcttctctctaaccccaaaggataaagaaacaatttctgaaaatctacaagtcacaaatgaatttcaaacagttgatcttctcatcaaagataatggaaatttatgtgattatgacacccagaatatattggagttgaaaaagtatgttactgataggaaatctgctgagcaaaatgaatcaaaaataaataagctcaggaataaagtgaattggaagacagaaataatttctgaaatgaaccagatatatgaggataatgataaagatgcacatgtccaagaaagctatacaaaagatcttgattttaaagtaaataaatctaaacaaaaacttgaatgccaagacattatcaataaacactatatggaagtcaacagtaatgaaaaggaaagttgtgatcaaattttagattcctacaaagtagttaaaaaacgtaagaaagaatcatcatgcaaggcaaagaacattttgacaaaagctaagaacaaacttgcttcacagttaacagaatcttcacagacatctatctccttagaatctgatttaaaacatattactagtgaagcagattctgatccaggaaacccagttgaactatgtaagactcagaagcaaagcactaccactttgaataaaaaagatctcccttttgtggaagaaataaaagaaggagagtgtcaggttaaaaaggtaaataaaatgacatctaagtcaaagaaaaggaagacctccatagatccttctccagagagccatgaagtaatggaaagaatacttgacagcgttcagggaaagtctactgtatctgaacaagctgataaggaaaacaatttggagaatgagaaaatggtcaaaaataagccagacttttacacaaaggcatttagatctttgtctgagatacattcacctaacatacaagattcttcctttgacagtgttcgtgaaggtttagtacctttgagcgtttcttctggtaaaaatgtgataataaaagaaaattttgccttggagtgctccccagcctttcaagtaagtgatgatgagcatgagaagatgaacaagatgaaatttaaagtcaaccggagaacccaaaaatcaggaataggtgatagaccattacaggacttgtcaaatacccagttttgtttcaaataacactgctgaatctgaaaataagtcagaagatctatcttcagaacggacaagcagaagaagaaggtgtactcctttctattttaaagagccaagcctcagagacaagatgagaagatgaagtgaatttatggattctggtttttctgaattttcaaagcataaggaatcaaaacagaaatatagtatcaagaagatgaaatgcttaatgaaaaggttttttttttgtttctttggcctttcatggagtgttgatttgtccattcttaatgtttattaataggtatatgtgcataaaatagctattttgtaacattaaactttttgagtcattttggtcatcatataacttaccttcctgtttatttaagcttctttttacctagtagcctttaaccaaacaataaccttttaaccaaataaaatgtgttaataaatacctttgcattggttatcttgtatactaaaatggcttggtttgctgtctggttttaacccattcaatatatggggacatccaaaaggggttaaaagccacctcctgccctggcccggtntctctcccttcattcttctggtttagaaatacatgttgaatggcagcttctggattatttctattatatggaatctgatgacttaaaggnnnnnnnnnnnnnnnnnggctctttgaatttgggttttataatttgggtntaaagatcacttactctgncaagaataaggagtaataaatcctggtcatatctgagatcaaaaaaaaaaaaa

SEQ ID NO: 5934 - DNA, 5798 bp, Homo sapiens
  misc_feature (577)..(591): n is a, c, g, or t
  misc_feature (1005)..(1026): n is a, c, g, or t
  misc_feature (5171)..(5174): n is a, c, g, or t
  misc_feature (5176)..(5176): n is a, c, g, or t
  misc_feature (5183)..(5183): n is a, c, g, or t
  misc_feature (5188)..(5189): n is a, c, g, or t
  misc_feature (5200)..(5202): n is a, c, g, or t
  misc_feature (5226)..(5227): n is a, c, g, or t
  misc_feature (5243)..(5245): n is a, c, g, or t
  misc_feature (5251)..(5255): n is a, c, g, or t
  misc_feature (5257)..(5257): n is a, c, g, or t
  misc_feature (5276)..(5278): n is a, c, g, or t
  misc_feature (5294)..(5294): n is a, c, g, or t
  misc_feature (5307)..(5307): n is a, c, g, or t
  misc_feature (5571)..(5586): n is a, c, g, or t
gggggtaggaaaactcggcctcaagttgcgccctctaggtagcacttgaaaacatgacaagggcccgtagttgtttggataagagaactccagcatagagccttatagcaactgacttcccagttaagtcccagtgtaagggttggtctttggttggcagaactgaacatggtggtttgcacttgggttctggtggcgcaggcgcaggagcagccagctgtggcagcgcattagttttggcgcaagcgagcctatgctgcagggtcacttttggctggtcagagaaggaataatgatatcaccttcttccccccctccccccaatcttttttttttccctttacaaattttcccctttccctttacctcctttccctcccatcttctttcattaacccctcctaaggcatgttatttgaaagcaattgagacgcaaccgaactttgcagtagcttggagtaatcttggctgtgttttcaatgcacaaggggaaatttggcttgcaattcatcactttgaaaaggctgtcacccttgacccaaactttctggatgcttatatcaatttaggaaatgtnnnnnnnnnnnnnnncatttttgacagagctgtggcagcttatcttcgtgccctaagtttgagtccaaatcacgcagtggtgcacggcaacctggcttgtgtatactatgagcaaggcctgatagatctggcaatagacacctacaggcgggctatcgaactacaaccacatttccctgatgcttactgcaacctagccaatgctctcaaagagaagggcagtgttgctgaagcagaagattgttataatacagctctccgtctgtgtcccacccatgcagactctctgaataacctagccaatatcaaacgagaacagggaaacattgaagaggcagttcgcttgtatcgtaaagcattagaagtcttcccagagtttgctgctgcccattcaaatttagcaagtgtactgcagcagcagggaaaacnnnnnnnnnnnnnnnnnnnnnnataaggaggctattcgaatcagtcctacctttgctgatgcctactctaatatgggaaacactctaaaggagatgcaggatgttcagggagccttgcagtgttatacgcgtgccatccaaattaatcctgcatttgcagatgcacatagcaatctggcttccattcataaggattcagggaatattccagaagccatagcttcttaccgcacggctctgaaacttaagcctgattttcctgatgcttattgtaacttggctcattgcctgcagattgtctgtgattggacagactatgatgagcgaatgaagaagttggtcagtattgtggctgaccagttagagaagaataggttgccttctgtgcatcctcatcatagtatgctatatcctctttctcatggcttcaggaaggctattgctgagaggcacggcaacctgtgcttagataagattaatgttcttcataaaccaccatatgaacatccaaaagacttgaagctcagtgatggtcggctgcgtgtaggatatgtgagttccgactttgggaatcatcctacttctcaccttatgcagtctattccaggcatgcacaatcctgataaatttgaggtgttctgttatgccctgagcccagacgatggcacaaacttccgagtgaaggtgatggcagaagccaatcatttcattgatctttctcagattccatgcaatggaaaagcagctgatcgcatccatcaggatggaattcatatccttgtaaatatgaatggctatactaagggcgctcgaaatgagctttttgctctcaggccagctcctattcaggcaatgtggctgggataccctgggacgagtggtgcgcttttcatggattatattatcactgatcaggaaacttcgccagctgaagttgctgagcagtattccgagaaattggcttatatgccccacactttttttattggtgatcatgctaatatgttccctcacctgaagaaaaaagcagtcatcgattttaagtccaatgggcacatttatgacaatcggatagttctgaatggcatcgacctcaaagcatttcttgatagtctaccagatgtgaaaattgtcaagatgaagtgtcctgatggaggagacaatgcagatagcagtaacacagctcttaatatgcctgttattcctatgaatactattgcagaagcagttattgaaatgattaaccgaggacagattcaaataacaattaatggattcagtattagcaatggactggcaactactcagatcaacaataaggctgcaactggagaggaggttccccgtaccattattgtaaccacccgttctcagtacgggttaccagaagatgccatcgtatactgtaactttaatcagttgtataaaattgacccttctactttgcagatgtgggcaaacattctaaagcgtatacccaatagtgtactctggctgttgcgttttccagcagtaggagaacctaatattcaacagtatgcacaaaacatgggcctgccccagaaccgtatcattttttcacctgttgctcctaaagaggaacacgtcaggagaggccagctggctgatgtctgcttggacactccactctgtaatgggcacaccacagggatggatgtcctctgggcagggacccccatggtgactatgccaggagagactcttgcttctcgagttgcagcatcccagctcacttgcttaggttgtcttgagcttattgctaaaaacagacaagaatatgaagacatagctgtgaagctgggaactgatctagaatacctgaagaaagttcgtggcaaagtctggaagcaaagaatatctagccctctgttcaacaccaaacaatacacaatggaactagagcggctctatctacagatgtgggagcattatgcagctggcaacaaacctgaccacatgattaagcctgttgaagtcactgagtcagcataaataaagactgcacaggagaattacccctaaaaaaaaaaaaaaaaaagggcggccgagggaactagataacatacttcttacttgtctgtacagtaccttgttgcagatgggtgatatataatggtaatagaatagcacagccagacttgcttcctgcatggtagggagagacacaaaagatgggaaactgcttttccacaaggaatctccgtagaattttgcggcgaccagatggtgcataggtctggaaggtctgatctcccttggtcttccatgggatggttagtgtggaggggagatatagattgtccggccgctttgtgattccatggattgattcagtcttctggatttttttttctttatattttgggtactggagcttttaaaaatgtttggtttcaggtatttttattcatgtgaagtgtatatgattctcttgagataaggttttaagctaaaatgttactccctgttttagtttctgaactctgacagattgacagggactttgctggtgtagtctttttataggttttataaaccacttgagcctatatcagtcgttttagtgtctgacctaatatttggagctatcagtgctttgttgatttagatgatgactcaagattttttctggtccatttcccatttccttttcttccctgacccccataccctcacccttaaaattctcctgtaactcaactaacaaaatcaagcctgattcaaaacatcctagggtgttttaaacacaccatctggtgccaaatgaagatttttaggagtgattactaattatcaagggcacagttgtggtactgtcattgataataatatagttttttttttttttcctaattttgacctgtttcaccagtgttttacccttgactgccccttctatgctgcttccaaaagtgatagtgtgtgtaagatttttaccttcctttctaaagtttttttttttttttttaagtgagtcctgttcttcctatttctttcagcagaaatgaaatcccaggtaagtataagtattcaagtatttgatcagtaagtcacagttatctccagtgcattaaataaccttcatcaagaaataggttataggtaaaatctctgaaggatcatctatgtattcaagtaattattttttagataataactgtcttctggacttggtcttgaagtctgtacagattcagcctcagtagtagcgaactgcactgctgtttggtttggagtacaaattagacttatagtcctcctggaacttgagttattaaaatcataggaataaaattatgggatctcaacaaagggtcgagggtttgaggcttaaacaagccaacatatgaatatatgttttgtctcgctatactgcacttacgctatccagttgcaggtaattttttgtctgctagtagtgttctagattatgtctttccaaagcgctgaggctgtgcacctattctgtagttgcagctgatgcctgaatgtatcctagctgacaaattattgattaataagaacttgaatttctggaagattcttactgttaaccaaattttgagcaaggagtctcaaaggtaattctgaaccagaattacatgttaatgaacagtgtaccttttaacagtgtaaatcacggaatatccgtgaagggatttcttaatttattttttaccggttgattgaaatatcagttaaaggttgccagcatggttgcagataaactgatgtttgaaattcgctgaaatacttaatgtggaataggataatatacttccaatgccctcaaggctgtgaccttacagccattttacatagcacatcattcctcctatagggatgaactttttcctggcacgaaaagtagccgctctggttgaagctttgcttattgtaacaggcttttatttccaggtaatatgtcttggaagacttaattctgattagagatatagatattactggaaactaattgttttttttctattgtactctgctttatcaaagaagtaaaacatttaaatcgtactacagaaattaagatgttgtcttgcgatccttaataaatgaatgatttccctttaaaaaaaaaaaaaaaaaaaaaaaaaaaaaaaaaaaaaaaaaaaaaaaaaaaaaaaaaannnnanaaaaaanaaaannaaaaaaaaaannnaaaaaaaaaaaaaaaaaaaaaaannaaaaaaaaaaaaaaannnaaaaannnnnanaaaaaaaaaaaaaaaaaannnaaaaaaaaaaaaaaanaaaaggcgggggncacaaatatatttcctccccgggggggggcggcttttttggcgaccccctctttttttgtgggaagaggggccccccccattggggcgggcgttcaaataaaaacacgcccgcggcgcccgccgttctttaacaaccgcgggcgggacaggaaacagacacgcccccgcggtcgcttgatggagaaaacagacctctacatctttgtggggggggcgactgttctggagaccccacaccccctccccgacggagatcgtacggnnnnnnnnnnnnnnnnaaaatatttctcttttttccggagagagaggatggggaccacaaccacgaatgatatccccgctcgccgccgaagagagagacttcgttctcactcggcgagagtatggtttatgaaactaattacatatcccgcgccggcgcgggggcgagcccttctttttttgaggtgggagtcattagacgcgcgacacacccgagccggtggtgctt

SEQ ID NO: 5935 - DNA, 1248 bp, Homo sapiens
ttcggcacttgggagaagatgtttgaaaaaactgactctgctaatgagcctggactcagagctcaagtctgaactctacctccagacagaatgaagttcatctcgacatctctgcttctcatgctgctggtcagcagcctctctccagtccaaggtgttctggaggtctattacacaagcttgaggtgtagatgtgtccaagagagctcagtctttatccctagacgcttcattgatcgaattcaaatcttgccccgtgggaatggttgtccaagaaaagaaatcatagtctggaagaagaacaagtcaattgtgtgtgtggaccctcaagctgaatggatacaaagaatgatggaagtattgagaaaaagaagttcttcaactctaccagttccagtgtttaagagaaagattccctgatgctgatatttccactaagaacacctgcattcttcccttatccctgctctggattttagttttgtgcttagttaaatcttttccagggagaaagaacttccccatacaaataaggcatgaggactatgtaaaaataaccttgcaggagctgatggggcaaactcaagcttcttcactcacagcaccctatatacacttggagtttgcattcttattcatcagggaggaaagtttctttgaaaatagttattcagttataagtaatacaggattattttgattatatacttgttgtttaatgtttaaaatttcttagaaaacaatggaatgagaatttaagcctcaaatttgaacatgtggcttgaattaagaagaaaattatggcatatattaaaagcaggcttctatgaaagactcaaaaagctgcctgggaggcagatggaacttgagcctgtcaagaggcaaaggaatccatgtagtagatatcctctgcttaaaaactcactacggaggagaattaagtcctacttttaaagaatttctttataaaatttactgtctaagattaatagcattcgaagatccccagacttcatagaatactcagggaaagcatttaaagggtgatgtacacatgtatcctttcacacatttgccttgacaaacttctttcactcacatctttttcactgactttttttgtggggggcggggccggggggactctggtatctaatctttaatgatcctataaatctaatgacattcaataaagttgagcaaacattttacttaaaaaaaaaaaaaaaaaaaaaaaaaaaaaaaaaa

SEQ ID NO: 5936 - DNA, 1835 bp, Homo sapiens
ccgaccttaccccaggcggccttgacgttggtcttgtcggcaggagacagcaccatggtgggttctctctgagcactcggagcccgagcccgagccgcagccgccgcctggggcgcttgggtcggcctcgaggacaccggagaggggcgccacgccgccgtggccgcagaaatgaccatggttgacacagagatgccattctggcccaccaactttgggatcagctccgtggatctctccgtaatggaagaccactcccactcctttgatatcaagcccttcactactgttgacttctccagcatttctactccacattacgaagacattccattcacaagaacagatccagtggttgcagattacaagtatgacctgaaacttcaagagtaccaaagtgcaatcaaagtggagcctgcatctccaccttattattctgagaagactcagctctacaataagcctcatgaagagccttccaactccctcatggcaattgaatgtcgtgtctgtggagataaagcttctggatttcactatggagttcatgcttgtgaaggatgcaagggtttcttccggagaacaatcagattgaagcttatctatgacagatgtgatcttaactgtcggatccacaaaaaaagtagaaataaatgtcagtactgtcggtttcagaaatgccttgcagtggggatgtctcataatgccatcaggtttgggcggatgccacaggccgagaaggagaagctgttggcggagatctccagtgatatcgaccagctgaatccagagtccgctgacctccgggccctggcaaaacatttgtatgactcatacataaagtccttcccgctgaccaaagcaaaggcgagggcgatcttgacaggaaagacaacagacaaatcaccattcgttatctatgacatgaattccttaatgatgggagaagataaaatcaagttcaaacacatcacccccctgcaggagcagagcaaagaggtggccatccgcatctttcagggctgccagtttcgctccgtggaggctgtgcaggagatcacagagtatgccaaaagcattcctggttttgtaaatcttgacttgaacgaccaagtaactctcctcaaatatggagtccacgagatcatttacacaatgctggcctccttgatgaataaagatggggttctcatatccgagggccaaggcttcatgacaagggagtttctaaagagcctgcgaaagccttttggtgactttatggagcccaagtttgagtttgctgtgaagttcaatgcactggaattagatgacagcgacttggcaatatttattgctgtcattattctcagtggagaccgcccaggtttgctgaatgtgaagcccattgaagacattcaagacaacctgctacaagccctggagctccagctgaagctgaaccaccctgagtcctcacagctgtttgccaagctgctccagaaaatgacagacctcagacagattgtcacggaacacgtgcagctactgcaggtgatcaagaagacggagacagacatgagtcttcacccgctcctgcaggagatctacaaggacttgtactagcagagagtcctgagccactgccaacatttcccttcttccagttgcactattctgagggaaaatctgacacctaagaaatttactgtgaaaaagcattttaaaaagaaaaggttttagaatatgatctattttatgcatattgtttataaagacacatttacaatttacttttaatattaaaaattaccatattatgaaattgcaaaaaaaaaaaaaaaaaaaaaaaaaaa

SEQ ID NO: 5937 - DNA, 4868 bp, Homo sapiens
  misc_feature (66)..(66): n is a, c, g, or t
aggcagcggcggcggctgcgggcgtcgggccggagccgacgcggcggcgggcaccggggcaccgcnacgccgctgccccaggggcgccccggccggccgcgcgcacgggccccgcgggacgggccacgcgggggtgggaggggcccgggccacgcgcgccgccgcagccgcccacgcgcaaacctcgggggcccggccgcgacgcacctttgtccgggggggggggcccccgcttcaggccgccgcccccacccaagcgcagcgtgcacggaagcaccaaaaaagggtttcaaagcataaggtgcacgcactggcaccaaaaaaataaacaaacagaaaaggatggcgcatgtaggaaaaaaaaaagaactaaataaaataataaaattaaacataatgttcaaaatacataaaaaaaacgggaagggccggcccgcctccctggccggggcgcagttcggaggttcaggtcttgaggaccggcccagctcaggctcctggggcacgaggaccagagcagctcctcctttgaccccagccggaccttcagcgagggcacccacttcactgagtcgcacagcagcctctcttcatccacattcctgggaccgggactcggaggcaagagcggtgagcggggcgcctatgcctccttcgggagagacgcaggcgtgggcggcctgactcaggctggcttcctgtcaggcgagctggccctcaacagccccgggcccctgtccccttcgggcatgaaggggacctcccagtactacccctcctactccggcagctcccggcggagagcggcagacggcagcctagacacgcagcccaagaaggtccggaaggtcccgccgggtcttccatcctcggtgtacccacccagctcaggtgaggactacggcagggatgccaccgcctacccgtccgccaagacccccagcagcacctatcccgcccccttctacgtggcagatggcagcctgcacccctcagccgagctctggagtcccccgggccaggcgggcttcgggcccatgctgggtgggggctcatccccgctgcccctcccgcccggtagcggcccggtgggcagcagtggaagcagcagcacgtttggtggcctgcaccagcacgagcgtatgggctaccagctgcatggagcagaggtgaacggtgggctcccatctgcatcctccttctcctcagcccccggagccacgtacggcggcgtctccagccacacgccgcctgtcagcggggccgacagcctcctgggctcccgagggaccacagctggcagctccggggatgccctcggcaaagcactggcctcgatctactccccggatcactcaagcaataacttctcgtccagcccttctacccccgtgggctccccccagggcctggcaggaacgtcacagtggcctcgagcaggagcccccggtgccttatcgcccagctacgacgggggtctccacggcctgcagagtaagatagaagaccacctggacgaggccatccacgtgctccgcagccacgccgtgggcacagccggcgacatgcacacgctgctgcctggccacggggcgctggcctcaggtttcaccggccccatgtcgctgggcgggcggcacgcaggcctggttggaggcagccaccccgaggacggcctcgcaggcagcaccagcctcatgcacaaccacgcggccctccccagccagccaggcaccctccctgacctgtctcggcctcccgactcctacagtgggctagggcgagcaggtgccacggcggccgccagcgagatcaagcgggaggagaaggaggacgaggagaacacgtcagcggctgaccactcggaggaggagaagaaggagctgaaggccccccgggcccggaccagcagtacggacgaggtgctgtccctggaggagaaagacctgagggaccgggagaggcgcatggccaataacgcgcgggagcgggtgcgcgtgcgggatattaacgaggccttccgggagctggggcgcatgtgccagatgcacctcaagtcggacaaagcgcagaccaagctgctcatcctgcagcaggccgtgcaggtcatcctggggctggagcagcaggtgcgagagcggaacctgaatcccaaagcagcctgtttgaaacggcgagaagaggaaaaggtgtcaggtgtggttggagacccccagatggtgctttcagctccccacccaggcctgagcgaagcccacaaccccgccgggcacatgtgaaagtatgcctaacgtgggacgagccacccgctttcagccctgtgctctggccccagaacggccactcgagaccccgggcttcatccacatccacacctcacacacctgttgtcagcatcgagccaacaccaacctgacaaggttcggagtgatgggggcggccaaggtgacactgggtccaggagctccctggggccctggcctaccactcactggcctcgctccccctgtccccgaatctcagccaccgtgtcactctgtgacctgtcccatggatcctgaaactgcatcttggccctgttgcctgggctgacaggagcattttttttttttccagtaaacaaaacctgaaagcaagcaacaaaacatacactttgtcagagaagaaaaaaatgccttaactataaaaagcggagaaatggaaacatatcactcaagggggatgctgtggaaacctggcttattcttctaaagccaccagcaaattgtgcctaagcgaaatattttttttaaggaaaataaaaacattagttacaagattttttttttcttaatgtagatgaaaattagcaaggatgctgcctttggtctctggtttttttaagctttttttgcatatgttttgtaagcaacaaatttttttgtataaaagtcccgtgtctctcgctatttctgctgctgttcctagactgagcattgcatttcttgatcaaccagatgattaaacgttgtattaaaaagaccccgtgtaaacctgagcccccccgtcccccccccccccccggaagccactgcacacagacagaacggggacaggcggcgggtcttttgtttttttgatgttgggggttcgtgttggttttgtcatgtggaaagtgatgcgtgggcgttccctgataaaggcaccttggggcttccctgccgcatcctctcccctcaggaaggggactgacctgggcttgggggaagggacgtcagcaaggtggctctgaccctcccaggtgactctgccaagcagctgtggcccccagggctaccctacacaacgccctccccaggcccccctaagctgctctcccttggaacctgcacagctctctgaaatggggcattttgttgggaccagtgacccctggcatggggaccacaccctggagcccggtgctggggacctcctggacaccctgtccttcactcctttgccccagggacccaggctcatgctctgaactctggctgagaggatgctgctcaggagccagcacaggacaccccccaccccaccccaccatgtccccattacaccagagggccatcgtgacgtagacaggatgccaggggcctggccagcctcccccaatgctggggagcatccctgggcctggggccacacctgctgccctccctctgtgtggtccaagggcaagagtggctggagccgggggactgtgctggtctgagccccacgaaggccttgggctgtgcgtccgaccctgctgcagaaccagcagggtgtcccctcgggcccatctgtgtcccatgtcccagcacccaggcctctctccaggtctccttttctggtcttttgccatgagggtaaccagctcttcccagctggctggggactgtcttgggtttaaaactgcaagtctcctaccctgggatcccatccagttccacacgaactagggcagtggtcactgtggcacccaggtgtgggcctggctagctgggggccttcatgtgcccttcatgcccctccctgcattgaggccttgtggacccctgggctggctgtgttcatccccgctgcaggtcgggcgtctccccccgtgccactcctgagactcccaccgttacccccaggagatcctggactgcctgactcccctccccagactggcttgggagcctgggccccatggtagatgcaagggaaacctcaaggccagctcaatgcctggtatctgcccccagtccaggccaggcggaggggaggggctgtccggctgcctctcccttctcggtggcttcccctacgccctgggagtttgatctcttaagggaacttgcctctccctcttgttttgctcctggccctgcccctaggtctgggtgggcagtggccccatagcctctggaactgtgcgttctgcatagaattcaaacgagattcacccagcgcgaggaggaagaaacagcagttcctgggaaccacaaattatggggggtggggggtgtgatctgagtgcctcaagatggttttcaaaaaaatttttttaaagaaaataattgtatacgtgtcaacacagctggctggatgattgggactttaaaacgaccctctttcaggtggattcagagacctgtcctgtatataacagcactgtagcaataaacgtgacattttataacgaaaaaaaaaaaaaaaaaaaaaacctccccggcattccttttgtccggatgcgcgaaaaaaaaagtaccgggaaatggccacatggggccaaaacctggtttccctagacaccccttttttttggtacaacagggggaaacaccttgcgcggacctcccccaaaacggcaaccc

SEQ ID NO: 5938 - DNA, 519 bp, Homo sapiens
  misc_feature (60)..(74): n is a, c, g, or t
tttttttttttggcaagattttaacaggctcaattttccagggatgcaagtactttggtnnnnnnnnnnnnnnnagtgtttggaaaattatgtcactgatggaaataccacaacccgtagcatttgcgttgccgaataacacacctatatcaatctgcacatatagttctcacattcatgagttctatatacgagtgccagcatcatttaactacttctagtgtagtcatggtcaaacagttacatatcattgaaaatattagtttattatatattacttttattttttctattcaactaggacaacatgttgactttaaaattatagatgtactctatcatctatgaacttcatttcaggatccaaaaaagctcctagacttgttgagatctcacagcattatatgggagttgtaattcttgaggggttttctttattttcctctgaagtcttctgtccacttcttttccaaattcagacacttaatgaggaagcttaaactctggttgattaaatct

SEQ ID NO: 5939 - DNA, 8107 bp, Homo sapiens
  misc_feature (2632)..(2647): n is a, c, g, or t
  misc_feature (3947)..(3975): n is a, c, g, or t
ccacaccgagcaccagcttctccgacgccgggaagccgctgtcgccgccgctacctctccctgttgccgccgcctcagatctcttcatgccgctgtaagctcggaggccaaggatgcggagtaggcttcccccagcgcttgccgccctgggcgcggccctgctcctgtcttccattgaggcagaagggatggagtgtctcaccagagctgaggcagacattgtgttgctggtggatggatcatggagcatcggccgggcaaattttagaaccgtgaggagtttcatttctcgtattgtggaagtctttgacattggccccaaaagagtacaaattgctcttgctcagtatagtggggatcccagaacagagtggcagttaaatgcacacagagacaagaagagcttgttgcaagctgtggcaaacttgccgtacaaaggaggcaatactctcacaggcatggctttgaatttcattcgccaacagaacttcaggacccaagctggcatgagacctcgagctcgaaaaattggtgtgctcattactgatggaaaatcacaagacgatgttgaagcaccttcaaagaaactcaaggatgagggagtggagctgtttgctattggtattaaaaatgctgatgaagtcgaattaaagatgattgcaactgatcctgatgatacccatgcatacaatgtggcagattttgagtcactctccaggatagtggatgatctcaccattaatttgtgtaacagtgtcaaaggtccaggtgatttggaagcaccttctaacttagttatttctgagcgaacccatcgttcttttagagtgagctggacaccaccttctgacagtgtggatcgatataaggtggaatactatccagtttctggagggaaacgtcaagaattttatgtgagtcgaatggaaactagcacagtgctgaaagatctgaaacctgaaactgaatatgttgtcaatgtgtattctgtggtagaagatgaatatagtgagcctctgaaggggacagaaaaaaccttgccagtgcctgtagtcagcctgaatatttatgatgttggccctaccaccatgcatgtgcagtggcagcctgtgggaggagctactggctacatcttgtcatacaaacctgttaaggacacagagccaacaagacccaaagaggtgcgtttggggccaacagtgaatgacatgcagctgactgaccttgttcccaacacggagtatgcagtcacagtccaggctgtcctgcacgacctcactagtgaacctgtcactgttcgggaagtcaccttgcctttacccagacctcaggatctgaaactcagagatgtgactcacagcactatgaatgtcttttgggaacctgtgcctggaaaagtgcgtaaatatattgttcgatacaaaacaccagaagaggatgtcaaagaggtagaggtggacagatcagagaccagcacttccctcaaagacctcttctcacagaccttgtacacagtcagcgtttctgcagtacatgacgagggggagtctcctccagtgactgctcaagaaactacccgacccgtgccagccccaacaaacttaaagattactgaagtaacatcagagggtttcagagggacttgggatcatggagcttcagatgtgtctctctacagaataacttgggcaccttttggaagctcagataagatggagaccatcttaaatggagatgaaaacactttggtgttcgaaaacctgaaccccaacaccatctatgaagtttccattactgccatctatcctgatgagtcagaaagtgatgacctgattggcagtgagcgcactctgcctatcttaacaacacaagctcccaaaagtggcccacgaaaccttcaagtgtacaatgcaacatctaacagcctgactgttaagtgggatcctgctagtggtcgtgtgcagaaatataggatcacttatcagccttccacaggggaaggcaatgagcaaacgaccacaataggaggacggcagaacagtgtggtcctgcagaaactgaagccagacactccttacactatcaccgtatcctctctgtatcctgatggtgaaggaggtcggatgacgggaagaggcaagaccaaacctctaaacactgtaaggaacctgagagtgtatgacccttctaccagcaccttgaatgtccgctgggaccatgcagagggaaatcctcgtcagtacaagctcttctatgcaccagcagcaggtggtccagaggaactggtaccaatccccgggaataccaattatgccattcttaggaatctgcagccagatacctcatacactgtgactgtagttcccgtttatactgaaggtgatgggggacgcacatcagatactggaaggacattgatgagaggactggcaagaaatgtccaagtatacaatcctacacctaacagcctcgatgttcgctgggaccctgctccaggacctgtgctgcaatatcgcgttgtgtattctcctgtggatggcacaagaccctcagaatctatagtagtgccaggaaacacgcgcatggtgcatctggagcggctgattccggacacactctattccgtgaaccnnnnnnnnnnnnnnnnggatggagagggaaatcccagccctgcccagggccgaacgctaccacgcagtggaccaaggaacctgagagtctttggtgaaacaaccaatagcctctcggtagcctgggatcatgctgatgggccagttcagcagtacaggatcatctattctcccactgttggtgatccaattgatgaatataccacagtcccaggcagaagaaacaatgtaatactgcagcccctgcaacctgacactccatataaaattactgttattgctgtttatgaagatggagatggtggccatctaacaggaaatggaagaactgtgggactccttcctcctcagaacatacacatctctgacgaatggtatacaagattcagggtgtcctgggatccttcaccttctccagttcttggatataaaatagtatataagccagtgggttccaatgagcccatggaagcctttgttggagaaatgacatcatataccttacacaatctcaatcccagcaccacctacgatgtgaatgtttatgctcaatatgattctggactcagtgtccccttgacagatcaaggcactacattatatttaaatgtaacagatctgaaaacttaccagattgggtgggatacattctgtgtcaaatggtcacctcaccgggcagccacctcctacaggctaaaactaagccctgcagatggaacaaggggacaagaaattacagtgcgtggatcagaaaccagtcactgcttcactggcctttcaccagacactgattatggtgtcactgtttttgtgcagacaccaaatctcgagggaccaggagtctctgttaaagaacataccactgtgaaaccaacagaagcccctacagagccacccacacctcctccccctcccaccattccaccagcccgggatgtatgcaaaggggccaaggcagatattgtgttcttgactgatgcctcctggagcattggggacgataattttaacaaagttgtaaaattcatcttcaatactgtgggaggctttgatgaaatcagtcctgctgggattcaggtttcatttgtgcaatacagcgatgaggtcaagtctgagttcaagctgaacacgtacaatgacaaggccctagcccttggggccctccagaatattaggtacagaggaggaaacacaagaacaggcaaggccctcacgtttatcaaggagaaagtcttgacttgggagagcggcatgaggaagaatgtccctaaggtgttggttgtggtcacggacggtcggtcccaggatgaggtcaannnnnnnnnnnnnnnnnnnnnnnnnnnnnggttcagtgtctttgtagttggtgtggctgatgtcgactacaatgagcttgccaacattgccagcaaaccaagtgaacggcacgtgttcattgtggacgactttgaatcttttgagaagatcgaagacaatcttattacatttgtttgtgaaactgccacttcaagttgtcctctcatttatttggatggctacacctcaccaggttttaaaatgcttgaagcatacaacctgacagaaaagaattttgcttctgtacaaggagtatctttggagtcagggtctttccccagctactcagcatacaggattcagaagaatgcgtttgtgaatcagcctacagcagacctacacccaaatggactccctccttcatacacgattatattattattcagacttctcccagaaactcccagtgacccttttgcaatttggcaaatcacagacagagactacaaaccacaagttggagtgattgcagatccttctagcaagacgttatcattctttaacaaggatacaagaggcgaggtgcaaactgttacatttgacacagaagaagtaaagacattattttatggaagttttcacaaggttcatattgtagtgacctcaaaaagtgttaagatttacattgactgctatgaaattatagaaaaagacatcaaggaagctggaaatataacaactgatggttatgaaattcttggaaaactccttaaaggggaaaggaaatcagccgcattccaaatccagagttttgacattgtctgcagtccagtgtggaccagtagagacagatgctgtgatattccctctaggagagatgagggaaaatgccctgcttttccaaattcttgcacatgtacacaggacagcgttggacctccaggacctccaggccctgcaggaggacctggtgctaaaggtcccagaggtgaaagaggtatcagtggggcaattgggccccctggtcctcgtggagacataggtcctcgcgtgcgccccagggtcctccaggccctcagggacccaatggactctctattccgggagagcaaggtcgccaagggatgaaaggtgatgctggagagccaggacttccaggccgaacaggaaccccaggattacctggcccaccaggaccaatgggacctccaggagacagaggcttcactggaaaagacggtgcaatgggacccaggggcccaccagggccgccgggaagcccaggctccccaggagtcacaggaccaagtgggaagccaggaaaacctggagatcatggcagaccaggtccatctgggttgaaaggagaaaaaggtgataggggagacattgcttcccagaacatgatgcgagcagttgcaagacaagtctgtgaacaattgataagtggtcagatgaacagattcaatcagatgctgaatcagattccaaatgattaccagtccagtcgcaaccagccaggcccgccgggtccaccgggacctcctggtagcgcaggagccagaggagaacctgggcctggggggcggccaggcttcccgggcacaccagggatgcagggaccccctggggaacgaggtttgccaggagagaaaggtgaaaggggtactggatcttcaggacctcgggggctgcctggccccccaggtccacaaggagaatccagaacaggtccaccagggtccacaggttcaagaggtccccctggcccccctggccgtcctggaaactcaggtatccgaggacccccaggtcctcctggatactgtgattcttctcagtgtgccagcatcccatacaacgggcaaagctatccaggttccggctaacacattttctaagtcgccagtgctgcttacagtttgaatacatgaaaatcctgtttctgagatgtttgcgcacgtgcttattaggaaatgagtctgtatggaaatctcaccacagataatggttaacgaaccgggtcgacatcacaaaggagggtggagactctttttactaacttgaatgagacaaaagcagtggtgtcagtttataatcctgatgcatttcagtaataatgtagaaaaacattattttaaaaaagttccaacacacagccatgaggagcctcagttttgaaagaggtgcataataaaactactaaccagaggagtctatgccattttaagaaaaacaattaacctggttaaagagaaatgtcttatgtaaataataaactaattgtggcttgtaaatgatttgtatgtgatcctgtcgactaaaatcacttaacaattctacaataagcttctgcatcaaagcctgccgcttgctctatgccggaataacaccaaatggaatctcctcatctcttgcttgttagcgatgtgtctgattcagggcatctgtctttttgttacttttttgtccgtgtcctctcatttgggttttgtaactgcaattttcaaaccaaagtttaaaatcaccttttcttcctgttttgctgtagtcactggtgttcctcacccaccagctgtaactcagtttgtgtgaggtacagccacagaagatgtcatgtactgtatattacctggtgatagttgcttttcaccccccgagttcagtttctaggagccaatgaaacttcccctcacctcctcatctttccaagttgttctttgaattgaggagtttgaaggcataaacagttacttggggatttgcgaaaatcctacttagttactgcgtttacagttctttggcccagtctctgacccttcccaagtatttgtgcaatgattgtgtttactgctggatttttgaaggtttttttttttaagaaagtgccatttcattatttgattatcaccaaattatctggaaataattgggacattgtaacttatctatttatagttatgagattaagactggagtgccatcaccgcgggtgatgatttagcttttgctgtgtgtgtgtgtgtgtgtgtgccttccaaatcatgccataattgtaatgttgaatcggacagagccttacgtgcccgagggcggggcctacctgcctgagcgcgagcccttcatcgtgccggtggagcccgagcggacagcggaatacgaggactacggcgcagacgagcctgcagaggagcctcctgagccccaccggcgctggcggcgcgccctgccccacggacccgggcagtgaaccagagatcacgcgccgcgccgcgaggcttgggggaggtgttgaaattctcatttacaggtcagatagagcagtgtacgtcttttctgaggtgtttcttccagcgttgctcatccaggagtaccctttctgattgtagagaaccttgtttctgcaggaagcctagctccaagcacgcagtctgtagacatttttgcctttgcccttgaaatgcttgcaaaatactttgttaacaaaagctgcaaagagagaacatgccgtgtgcctttagttagcacagcgggcagcctcagtgaaactcttaggttaagcagttaagtcctggaacccagagctgctgtgtatttcgagcgggcagtttatcttttgctatacttattttcaattcaattacaccacgattcaaataattcccctcctaaaaccaaaaaggagggaaacgtcaactccattgcaattacttatcttcctcttctatctctgttatacgccggggcatagaatgctcgtatacatctctttaacaaccacaaaccttaagccatgtagatgaagttagtgcatcaacgggatacagttccatattgccttaaacctccttgttttagacacactaacatttataccaaattgcagattattctgcagagagggaattgcatgtttgtgttgtatatttagtatgaacttttttcagaatataatatttcttagttatcaaaagtagttggaaaacatttgcaagactatgaacatagaattgctgcttttatattttaactgcagattgtgaatttcactgccttatattatttatttctgaaacaaaagaggcatttttcaataaaactactgaaaatttgaaaaaaaaaaaaaaaggaataatctgcaatttggtataaatgttagtgtgtctaaaacaaggtcgacg

SEQ ID NO: 5940 - DNA, 2840 bp, Homo sapiens
  misc_feature (909)..(940): n is a, c, g, or t
agcggctgatgataccaccaccaagaaatcatcaccattaatattttggcttttttgttttcagattttttccattatgaaattgttgatatttgatccttttgacctataaaaatgttaatatcatatagcttactcgaacatatccaaataatgtcatatatattattttatgtaccaaaaagcatactaaacagattgttttatagcttacttttctcatttttaacattataatttaagcatttgttcataatattaaaactttttgaaaacattattatgaatgactatttcaatatgtggatgtaccacaacttacctaatgatttacctactggtaatcattgagttggactggttggacatgagttgtttctaatttgtcgctattacaaataatgctctgataaatatgtataattaatttgtgtttcagattatttttatttctagaaatgagattcttggttataggctaaatatattttcttgttttttttttttttgttcatttgtttgtttgagatggagtctctctgtcacccagactggaatgcagtggcatgatcttggttcactgaaacctctgcctttctggttcaagcaattctcatgtttcagcctcccaggcaacgtgttggaccttccggagcttctcagaagacagagggttttcttttgaggtaaatttgatagtacattttgatagtacaggaggcgatacggcatggtgacagaaaagcgccggcttggttagcgggaccacctggcagggctgcaggctgtgccacttaccaggcaggggaccttgggcaagctgcttggcctcactcaccctgtttcctcagctgcaattgggatgaacagactgcctgcttcggggttgcctaaaactcacattgcttnnnnnnnnnnnnnnnnnnnnnnnnnnnnnnnnggcatagagagaattctcattagatgatacctcagctgggctttaggagctacagaagaagctgcatctccatgagctcagcgtgtttctagctttcctttttgttttctattcaacctttcacccaactcagcttctcaatccctaaatgacaaaggtttgggaaggaagacttggaccgatgcttgcatttgtttctgagaattaaacgttatgttatcttcaatccaaataggtttgcttgtacagccttgttcaatggttttttttttttttttctccatgataaatgactctcaacttcttttccctcatttaattgcttatctacatacaatgcctggaaggaaataaatgtaatggcccgtagcagttggccttcaggtatcaagtttaagtccctttaagcagaacagcaaattgagcacagaatgaactggtttcatggtagcgtactgcaattagatgcaagaatagggaaagcagggtgcttcaattggtgacacaattagtatagcactgggggacttctctttccacttcttcaactccgcctgcattccgctggctgaagagttgatgacatccctgaaaaatcttccctctcttgtttctctgatgccacctctgtgttctccgcctcactggccacacttcctttacctcccaaacttttaactctgagtgtcccaaacttgtctcatcacctacccctgctgcccagctccccagcctgttccccttctgacacgggcactctccttctgctgtcttgggagagaaacaatgaaggcctagttggcacttttatttctattcaaggaaccagactgtgaacaagtttaccatttagtcctttggactgtgtcttgaattcatccctcttctccattctcaccagcaccatcatcatgatggctaatatttcctgagcacctttcatccaggcatgatgccaggtgcaccaacttacttaatcctcatagccaccacctgagcaagctcctgttttataaatggaccagttcttgttgctattgtacaagttattttctttctataacgtcctccttgtcctccttccacgttcttaaagaaacttgcccttcctttaaagtactcagggagccctgcattgcttcttgaagccttctccagcttcatcatctcacagtggtctctcttttcactaaatgtccaatatgctgcacataagtaccccaaagttagcacagaattgttccatggctgtcatatatgttaaaaatcattaaaagttcattttttctctcaaaaaaaaaaaaaaacatgctcctactagtaaatttagtaggtagaaaaaaattatcactatctagactgctttccatttagtctttatgcatagctttcctgtctgcctatttttaccttgtgtttgtaacttactattataaaatatgcgtctctatgtgcattgtcaacattatttacaataacatggagtggattgacacgtattctctatatttggattaaaggagatagagtatgtgaaattaaatgggagaagtatctgatacataacaggcaatacaaatattatcacatagcgtcaatttatttgtgaatattgaaagctccaaaaaagaaaaacagttcttttgcaattcccgtaattacttatagcagtattgtgttcatacaaactgctcatcatttaggagaaataacaattttttcctcctcatggagttaggatgctcccggccacaaactctgacaccaagaggaactgtcttagaaagattctcccatatatcttgtttcgtaatatctagtacgctttaactgtttgtgaagtactgttccctgttaattggctccattcggtacatagagaaccccacttagggttccg

SEQ ID NO: 5941 - DNA, 1628 bp, Homo sapiens
tacacacacgcaatgacccacgagaaagggaaaggggaaaacaccaactacccgggcgctgggctttttcgacttttcctttaaaaagaaaaaagtttttcaagctgcgcgggcttcctgtgcgcggccgagcccgggcccagcgccgcctgcagcctcgggaagggagcggatagcggagccccgagccgcccgcagagcaagcgcggggaaccaaggagacgctcctggcactgcagataacttgtctgcatttcaagaacaacctaccagagaccttacctgtcaccttggctctcccacccaatggagatggctctaatggtggcacaaaccaggaaggggaaatctgtggtttaaattctttatgcctcatcctctgagtgctgaaggcttgctgtaggctgtatgctgttaatgctaatcgtgataggggtttttgcctccaactgactcctacatattagcattaacagtgtatgatgcctgttactagcattcacatggaacaaattgctgccgtgggaggatgacaaagaagcatgagtcaccctgctggataaacttagacttcaggctttatcatttttcaatctgttaatcataatctggtcactgggatgttcaaccttaaactaagttttgaaagtaaggttatttaaaagatttatcagtagtatcctaaatgcaaacattttcatttaaatgtcaagcccatgtttgtttttatcattaacagaaaatatattcatgtcattcttaattgcaggttttggcttgttcattataatgttcataaacacctttgattcaactgttagaaatgtgggctaaacacaaatttctataatatttttgtagttaaaaattagaaggactactaacctccagttatatcatggattgtctggcaacgttttttaaaagatttagaaactggtactttcccccaggtaacgattttctgttcaggcaacttcagtttaaaattaatacttttatttgactcttaaagggaaactgaaaggctatgaagctgaatttttttaatgaaatatttttaacagttagcagggtaaataacatctgacagctaatgagatattttttccatacaagataaaaagatttaatcaaaaatttcatatttgaaatgaagtcccaaatctaggttcaagttcaatagcttagccacataatacggttgtgcgagcagagaatctacctttccacttctaagcctgtttcttcctccataaaatggggataatactttacaaggttgttgtgaggcttagatgagatagagaattattccataagataatcaagtgctacattaatgttatagttagattaatccaagaactagtcaccctactttattagagaagagaaaagctaatgatttgatttgcagaatatttaaggtttggatttctatgcagtttttctaaataaccatcacttacaaatatgtaaccaaacgtaattgttagtatatttaatgtaaacttgttttaacaactcttctcaacattttgtccaggttattcactgtaaccaaataaatctcatgagtctttagttgatttaaaataaaaaaaaaaaaaaaaaaaaaaaaaaaa

SEQ ID NO: 5942 - DNA, 4722 bp, Homo sapiens
  misc_feature (150)..(155): n is a, c, g, or t
  misc_feature (171)..(172): n is a, c, g, or t
  misc_feature (4564)..(4564): n is a, c, g, or t
  misc_feature (4578)..(4578): n is a, c, g, or t
ttacagcagaaaggcccaggtcccggcgtgactccggccggggcgacacaggccgagtcacttctctgcccgtgcccgggtgtcctcatcgggggatgggtgcgccttccacatcctgcccaggactgaaggagccgggcccagcgagcnnnnnngaggtgtgtggacatnngagggtggcggccaggcgagccaggagcctgcaggcctgaaccagggtgatgctgaagatgatgaccttcttccaaggcctctagagccatcagcctgtgccaggcaccctcgacttgcctagaggcccccaaaagttgcagtccacatcagaggcagagtcagaggcctccatgtcggaggcctcctctgaggacctggtgccacccctggaggctggggcagccccatatagggaggaggaagaggcggcgaagaagaagaaggagaagaagaagaagtccaaaggcctggccaatgtgttctgcgtcttcaccaaagggaagaagaagaagggtcagcccagctcagcggagcccgaggacgcagccgggtccaggcaggggctggatggcccgccccccacagtggaggagctgaaggcggcgctggagcgcgggcagctggaggcggcgcggccgctgctggcgctggagcgggagctggcggcggcggcggcggcgggcggtgtgagcgaggaggagctggtgcggcgccagagcaaggtggaggcgctgtacgagctgctgcgcgaccaggtgctgggcgtgctgcggcggccgctggaggcgccgcccgagcggctgcgccaggcgctggccgtggtggcggagcaggagcgcgaggaccgccaggcggcggcggcggggccggggacctcggggctggcggccacgcgcccgcggcgctggctgcagctgtggcggcgcggcgtggcggaggcggccgaggagcgcatgggccagcggccggccgcgggcgccgaggtccccgagagcgtctttctgcacttgggccgcaccatgaaggaggacctggaggccgtggtggagcggctgaagccgctgttccccgccgagttcggcgtcgtggcggcctacgccgagagctaccaccagcacttcgcggcccacctggccgccgtggcgcagttcgagctgtgcgagcgcgacacctacatgctgctgctctgggtggagaacctctaccccaatgacatcatcaacagccccaagctggtgggtgagctgcagggtatggggctcgggagcctcctgccccccaggcagatccgactgctggaggccacattcctgtccagtgaggcggccaatgtgagggagttgatggaccgagctctggagctagaggcacggcgctgggctgaggatgtgcctccccagaggctggacggccactgccacagcgagctggccatcgacatcatccagatcacctcccaggcccaggccaaggccgagagcatcacgctggacttgggctcacagataaagcgggtgctgctggtggagctgcctgcgttcctgaggagctaccagcgcgcctttaatgaatttctggagagaggcaagcagctgacgaattacagggccaatgttattgccaacatcaacaactgcctgtccttccggatgtccatggagcagaattggcaggtaccccaggacaccctgagcctcctgctgggccccctgggtgagctcaagagccacggctttgacaccctgctccagaacctgcatgaggacctgaagccactgttcaagaggttcacgcacacccgctgggcggcccctgtggagaccctggaaaacatcatcgccactgtagacacgaggctgcctgagttctcagagctgcagggctgtttccgggaggagctcatggaggccttgcacctgcacctggtgaaggagtacatcatccaactcagcaaggggcgcctggtcctcaagacggccgagcagcagcagcagctggctgggtacatcctggccaatgctgacaccatccagcacttctgcacccagcacggctccccggcgacctggctgcagcctgctctccctacgctggccgagatcattcgcctgcaggaccccagtgccatcaagattgaggtggccacttatgccacctgctaccctgacttcagcaaaggccacctgagcgctatcctggccatcaaggggaacctatccaacagtgaggtcaagcgcatccggagcatcttggacgtcagcatgggggcgcaggagccctcccggcccctattttcccttataaaggttggttagcttttcctgtggcctgacctgcctgtgagtgcccagcaagccttgggcacaccccgctgggagctgttaagagcagcgctggttctcggttcctcccgggtctcctgtgctctgatgctacttctgcctagccctggcggaggtgcaggccctgtcagctggaactggacagaccttggtttgtttacatgtccgatgggggcaggagctcccatcctgggcagccaaccaggcaacaccaaggactctttgtaaacgatagctgatcgtgtgcacgcaaggaaagaaccaggagggagagtgcagccaggctcagggatccccggacacctctgtccagagcccctccacagtcggcctcatgactgtcctcctcgtgggtggggccgagggccctcttcagctctctggagacaggggccgagcctcacccatctgccctctgcagcccagggccgccgtgagcgggattcagcaatggtggaatggaagacagaactggaagagaaagaaggaaaagatgagctctcgtctggcaggggcttttagggtcctgtggcgagctgtgagcaccgccagcgttagacgtcacatccaggtggccccacggcccctacaggctggccctgcaatggggccctgagccctccctcttcatcccccaaggcctcaactagagggtggtcccccgagggcttggtgtctactaccgaagggcccaagacctcctgggtcctctcaggctcccccttccccaaggcagggacaggccctgggggtgccaccgtgggccctgccacccagaagtctggctgaggtctgggcaggggcagggcaagcttgacctctcactgttgaccctttggcctctgtatttgtttcctattgccgtgacaggtttccacaaacttcgtggatcaaaacgaggtcttccagttctgcgggtcagaaggctgacctggggctcaaatctgggtgtcggcagtcctgcactccttctggaggctctaggggagaattcatttctggccttttcatttttagaggctgaccgtaattcttgacttcaggctcctccatcttcagagccagctgtgggtagttgaatctttttcccgtcacctcattgaggcctcccctctcctgcctccctccaccacttttttttttttttttttgagacagggtcttgctgtgttgcccaggctggagtgcagtggcctggtcatggcatcaaggctcactgcagcctggacctcctggttcaagtgatcctcttgtctcagtcccctgagacaatcccccacgcccagctacatatttttgtggatacagggtctcattctgttgcctaggcttgtctggaactcctgggctcaagggatcttgtagccttagcctcctaaagtgctgggattataggcatgagtcactcgtacccggcctgctctaccgcttttaaggacgcttatgatcacattgcgcctacccagagaacccaggtcgtctttctattttcaggtcagctgattagccaccttagttccatctgcaactttagttcccactggctgtgtaacctaacatagtcacaggctctggggactgtcacgtggacatctttgggaggccgttattctgcccaccgcaccctccgttcatcccctgccctgccgggcacctcgctctaccccaggaaaatgtgagctcgttttcctgctcggcatgtgctccccctaaggctctgctcctccctgggcctgaaagttccttctcagcctgagagggggcccttcgatctcaggcatgactcagcccggctgatgcctctgcagtgctgagtcaggatttggggccggctctcttgggtctgtccccttttcccaggtactgccttacaaagctgtggccaggaagtggccggtataaaggatgcccaaggtctttgtacgtgtgtaggagttagcgtgtttgatattgttaatataataataattattttttagagtactgcttttgtatgtatgttgaacaggatccaggtttttatagcttgatataaaacagaattcaaaagtgaaaaaaaaaaaaaaaaaaaaaaaaaaaaaaaaaaaaaaaaaataataattaccaaacccttaaaacccctcaaataccttttatattttaaactaaatataaaccttaatacccattccccttgtatcaccttaccacaattacccccatttaaacttcctttaattttttggccncgcgcctagccganattttctttataatggaagagtccttaaagcgggcccctatatttcaaagcccatgcgcctatttccacttatgggaggggggatacactccccatggggcgggtttttaaaattggggcgggtggaagaacactggggaaccc

SEQ ID NO: 5943 - DNA, 1803 bp, Homo sapiens
tcttcagaagcagaaggactccatgaaagatgacagaagaagttattgtgatagccaagtgggactacaccgcccagcaggaccaggagctggacatcaagaagaacgagcggctgtggttgctggacgactccaagacgtggtggcgggtgaggaacgcggccaacaggacgggctatgtaccgtccaactacgtgcgagcggaagaacagcctgaagaagggctccctcgtgaagaacctgaaggacacactagcccagcgacttctccgtgtcccttaacagcgtcagggaagaacaaacacttcaaggctgcagctcgtggacaactgtctactgcattgggcagcggcgcttccacaccatggacgagctggtggaacactacaaaaaggcgcccatcttcaccagcgagcacggggagaagctctacctcgtcagggccctgcagtgacggcgccccggccccacactcgcctcccgggccccacggtggagctgcccgcccggccttgtggcagaggctcctcccgcggggacggccccgacggcttctctgcgagtctctctttatgttcaggtcgcttggtcggttcgtctcccatttgccatccaggcctcacacccacactcgagcccacccggccggccagctttagaggaggggaggagcagggcgagttcacattattccttttccatcggaagtggcgctcgtgcattcaacttgttcccgctcatggaacccctctttaaaaagacgcagggcacctgtgagcgcaggagcgagcctaaggccacccagcggcagcgcccgtgtcctgggcactcagcgtgctgggcagagcaggtgcgatggctcccggactgtgcagggagccgatacgtttgctgatagcaatactggaaccaccgggtgcgatggcagtgaggagactgcccagtgcctttggggctgtgcttgcaataaagaaagaatttcctggaaaggcagtctgcaaaagagggaaccggtgactcagaaagacagatgttttggtaatttaccccaaatgtgccatccacatagtgctttttcctcttgcccttcggcttgtttgaatctcacaattatgtatttaattctcaaagaaatatgtatctgtagccgtttgttgacactaatacagatgattaaggaaaacagctgatctttggggaagggagctaccaacactttatacacacacacacgtgcacacacacacacacacacacacactatatatatatatattatttacagggaaatttttcagggtttacaaaagagtatgtgattggtagtaagagacacacagaatgtttatgaagaaattgcattttctttttcctttacatttgaacttctttatagtttaaatataacgtcttgagatggcacattcctacgattgaagaaggggtcttgagatcccctaaacttgcatacccagttttttggatattgtaataaaaaaaagtattatgacaaaaaaaaaaaaaaaaaaaaacaaaaaaaaagggggggcccctccaaaaattcccccgggggggccccattttcccgttcccccgcgtttttgtggatagcaagtgggcccccctttgtaggagcgtctggcttttccaaccctgaaccgcgcggggccgctgtatccacccccttgtgatcgggaccaccctcgctggccgggaactgtttggcgagagccctcatcctctctgggggggcacatcttggggcctgtccccccggaacattttagacgtgctaggagactc

SEQ ID NO: 5944 - DNA, 921 bp, Homo sapiens
gggtggccaagggataggacttctgcagcacagctcccttcccaggacgtgaagaatctgccttctcaccatgaggcttctagtcctttccagcctgctctgtatcctgcttctctgcttctccatcttctccacagaagggaagaggcgtcctgccaaggcctggtcaggcaggagaaccaggctctgctgccaccgagtccctagccccaactcaacaaacctgaaaggacatcatgtgaggctctgtaaaccatgcaagcttgagccagagccccgcctttgggtggtgcctggggcactcccacaggtgtagcactcccaaagcaagactccagacagcggagaacctcatgcctggcacctgaggtacccagcagcctcctgtctcccctttcagccttcacagcagtgagctgcaatgttggagggcttcatctcgggctgcaaggaccctgggaaagttccagaactccacgtccttgtctcaattgtgccatcaactttcagagctatcatgagccaacctcaccccacagggcctcagtcgccaccatgtgggcctctccagtgcaaaccaccgagcattccaccatgaccggtcacagctacaaatccagagaccatcaatcctgctagagtgcagggtggcaagcacccaagggtggctgaccaagactgcagagtctcctccatcttcaggtccattcagcctcctggcatttaactaccagcatccagtggtccccaaggaatcccttcctagcctcctgacatgagtctgctggaaagagcatccaaacaaacaagtaataaataaataaataaactcaaagcagaaacaaaaaatgcgcgcctttggcgggggcgcagggacagatggacaggacaacggccggccagttgtcccgatccggccag

SEQ ID NO: 5945 - DNA, 3126 bp, Homo sapiens
  misc_feature (1609)..(1681): n is a, c, g, or t
  misc_feature (2454)..(2476): n is a, c, g, or t
atgatgcaaactaaagtacagaacaagaaaaggcaagtggctttcttcattttattgatgctttggggagaggtgggttctgaatcgattcagtattccgtattggaggagacagaaagtggcacgtttgtggccaacttgacaaaggacctgggactgagggtgggggagctggcttcgcggggcgctcgggttgttttcaaagggaacagacaacatttgcagtttgatccacagacccatgatttactgctaaatgaaaaactggaccgggaggagctgtgtggctccactgagccgtgtgtgctacctttccaagtgttactggaaaaccccttgcagttttttcaggcttccttgcgagtcagagatataaatgaccacgccccggaattccctgccagagaaatgctcctgaaaatatcagaaattactatgccaggaaagatatttcctttgaaaatggcacacgatttagacaccggcagcaacggccttcagaggtacacaatcagctccaaccctcacttccacgttctcacccgcaatcgcagcgaaggcaggaagttcccggagctggtgctagacaaaccgttggaccgcgaggagcagccccaactcaggctaacgctgatcgcgctggatggcgggtctccgccccggtcagggacctccgagattcagatccaggttttggacatcaatgacaacgtccccgagtttgctcaggagctctatgaagcacaagtccctgagaacaaccccctcggctctctggttattaccgtctcagccagagatttagatgcaggatcgtttgggaaggtatcttacgccctgtttcaagtcgatgacgtcaaccaacccttcgaaataaacgcaatcacaggagaaattcggctgagaaaggctttggattttgaggaaattcagtcttatgacgtggatgttgaggctacagatggtggaggcctatcaggaaaatgctctttagtcgtcagggtcctggacgtgaatgacaatgcccctgaactcaccatgtcgttcttcatcagcctcatcccagaaaacttaccagagatcacagtggcagttttcagtgtttcagatgcagactctggacataaccaacaggttatttgttcaatagagaacaatctcccctttctactaagaccttccgtggagaatttctacaccctggtaacagaaggcgcgctggacagagagagcagagccgagtacaacatcactatcacggtcactgatttggggacaccaaggctgaaaacccagcagagcataactgtgcaggtctccgacgtcaatgacaacgtccccgccttcacccaaacctcctacaccctgttcgtccgcgagaacaacagccccgccctgcacatcggcagcgtcagcgccacagacagagactcaggcatcaacgcccaggtcacctactcgctgctgccgccccaggacccgcacctgcccctctcttccctggtctccatcaacgcggacaacggccacctgtttgccctcaggtcgctggactacgaggccctgcagtctttcgagttccgcgtgggcgccacagaccgcggctccnnnnnnnnnnnnnnnnnnnnnnnnnnnnnnnnnnnnnnnnnnnnnnnnnnnnnnnnnnnnnnnnnnnnnnnnncgcccttcgtgttgtacccgctgcagaacggctccgcgccctgcaccgagctggtgccccgggcggccgagccgggctacctggtgaccaaggtggtggcggtggacggcgactcgggccagaacgcctggctgtcgtaccagctgctcaaggccacggagctcggtctgttcggcgtgtgggcgcacaatggcgaggtgcgcaccgccaggctgctgagcgagcgagacgcagccaagcacaggctggtggtgcttgtcaaggacaatggcgagcctccgcgctcggccaccgccacgctgcacgtgctcctggtggacggcttctcccagccctacctgcctctccctgaggcggccccggcccaagcccaggccgactctctcaccgtctacctggtggtggcgttggcctcggtgtcgtcgctcttcctcttttcggtgctcctgttcgtggcggtgcggctgtgcaggaggagcagggcggcctcggtgggtcgctactcggtgcccgagggtccctttccagggcatctggtggatgtgagcggcaccgggaccctatcccagagctaccagtacaaggtgtgtctgacgggaggctcagaaacaaatgagttcaagttcctgaagccgattatgcccaacttccctcctcagggcactgagagagaaatggaagaaacccccacctctcggaatagcttcccgttcagttaagtgtgggattattttactaaatcttacttatgtttggagatctcttttaacttnnnnnnnnnnnnnnnnnnnnnnngtttcttgtttattttacctctattctttaggttgaaattttatataaagtaagatactggtatcttagtatttcctgttcatgcttagtagtttattacttcacttgagggtacttgacaatatgaacaaaaagtaaatttttatttgcataattttaagcttttgaaattaaattatctattcttcccccccccaaaaaaaagtattgtaaatccttaagtaaaattgtatttctagctattggtaagagttgtttcactattgctatgtaggactgtttaaaatgtgagtatctgatattatttaatcctccaatgtctcattttgcagtaactcctacagtgtgtaacactaaaaataagaactaatgatggctaaacactaaagtagccattcatacttatgcatattttagtatcccataatagtcaatccaaaatttttgtgactatagactttactgaagtgtcaacacattagtttgtgagcctcatgtaagaacatgatggtctttttttaaaaaaaaagtcgtgccaattataagtgcttaataaatatttgctgaatgttactaaaaaaaaaaaaaaaaaacacaaaacaaaaaaaaaaaccctccaaaaaaaaaaaaaacaaaaacaacccttgtcg

SEQ ID NO: 5946 - DNA, 489 bp, Homo sapiens
gctttaagcatttcatgactgagctgctgtctggatgctacctgaagagattctcattgaatatcattatggcccgtaagtgttccataattttctttaagctccatctatgtaaatatttttgaacaattttgcacaagtacagggccacatacctatttgttataaacccgacgttgataaaatgcactcttagtataattgggtcttgttttgatcctggcagtttcatattgggatttggcagtgagttcaacagaataagcattatcctcttgaggcccatctaggattgaactaaagggcttctacaatatccacatgatcatacaattagttctctctctccctctcttttttttgtgctgtgatagtgtaactgaatatgagctggttgccagggtattgtggtagaataataccctgcagtaaacagttaatcatgcagcagaactggcttgatttatcgacgaaaaaaaagtcgacgcg

SEQ ID NO: 5947 - DNA, 1174 bp, Homo sapiens
gcacgagggaacgtctgaaacgaaggtggcgcggcctggacaaacctgacccttcgacatcccccgcccctgcgcccgccctcgctaagcggggaggagcgaccgctacaatggatcctcccgcaggctttgtgcgcgctgggaatccagctgtcgccgccccgcagagccgggggggggcggagggcgctcatttccgggccgcccaccacccgcgtagcaccggcagccgctgtcccggcagtctccagccgtcccgcccgcttgtggccaaactggctccagtcactcccgaaatgccagtcgacttcactgggtactggaagatgttggtcaacgagaatttcgaggagtacctgcgcgccctcgacgtcaatgtggccttgcgcaaaatcgccaacttgctgaagccagacaaagagatcgtgcaggacggtgaccatatgatcatccgcacgctgagcacttttaggaactacatcatggacttccaggttgggaaggagtttgaggaggatctgacaggcatagatgaccgcaagtgcatgacaacagtgagctgggacggagacaagctccagtgtgtgcagaagggtgagaaggaggggcgtggctggacccagtggatcgagggtgatgagctgcacctggagatgagagtggaaggtgtggtctgcaagcaagtattcaagaaggtgcagtgaggcccaggcagacaaccttgtcccaaggaatcagcaggatgtgtgggccaggatccccctctttgcacagcatgaggcaaaaatgtccagccacccccaggcatctgttagcagagtctgtctcttggctttgtcacttttccttttcttaaaacaaagccatgccaataaagtgatctgtgttcaaaaaaacaaaaaaaaaaaaaaaaaaaaaaaaaaaaaaaaaaaaaaatgaccaaaaaaaaaaagaggggggggagacaaaacataccaggagacaaaaataccgcaccgtatgtagaagagccgcacaaaggagctataacaaaaaggacggcgcagaaaaagacagagaaaaaaacaatagacactagagagacacactagctgggaaaatgtaacacacagacaagcgcgagaaacatagaggatgcaacaaacatccgagaaatatataaaacacggcaata

SEQ ID NO: 5948 - DNA, 995 bp, Homo sapiens
caggattggctgccagctgggccacttacgcgtcgctcttcctcgtttgcccctcgtgttcatgggagctcgttttcttttcctctaggcagagaagaggcgatggcggcgatggcatctctcggcgccctggcgctgctcctgctgtccagcctctcccgctgctcagccgaggcctgcctggagccccagatcaccccttcctactacaccacttctgacgctgtcatttccactgagaccgtcttcattgtggagatctccctgacatgcaagaacagggtccagaacatggctctctatgctgacgtcggtggaaaacaattccctgtcactcgaggccaggatgtggggcgttatcaggtgtcctggagcctggaccacaagagcgcccacgcaggcacctatgaggttagattcttcgacgaggagtcctacagcctcctcaggaaggctcagaggaataacgaggacatttccatcatcccgcctctgtttacagtcagcgtggaccatcggggcacttggaacgggccctgggtgtccactgaggtgctggctgcggcgatcggccttgtgatctactacttggccttcagtgcgaagagccacatccaggcctgagggcggcaccccagccctgcccttgcttccttcaataaacatcacaggacctgggactgcacaggaaaaaaaaaaaaaaaaaaaaaaaaaaaaaaaaaaaaaaaaaaaaaaaaaaaagcactaaaaagtacccccttgagcgcgcccacggtataacgcgacccccggttttcttgtcacaagggggcccatattaggaagacccgaatatataagcatagggccactgcccgcgagtatacaccacgcttggacacgggcgaaaccggtgcacacccgggggacactggagcaagggacccatactcgcggggggcgaccaaacggggacacaaacccacaagagatataacgccagacgcaactataag

SEQ ID NO: 5949 - DNA, 2445 bp, Homo sapiens
  misc_feature (651)..(669): n is a, c, g, or t
  misc_feature (2371)..(2371): n is a, c, g, or t
  misc_feature (2409)..(2409): n is a, c, g, or t
  misc_feature (2414)..(2414): n is a, c, g, or t
  misc_feature (2423)..(2423): n is a, c, g, or t
  misc_feature (2437)..(2437): n is a, c, g, or t
gtcacttatgaaacacaggtccttgttgctgcagagaagcagttgttttgctggaaggagggagtgcgcgggctgccccgggctcctccctgccgcctcctctcagtggatggttccaggcaccctgtctggggcagggagggcacaggcctgcacatcgaaggtggggtgggaccaggctgcccctcgccccagcatccaagtcctcccttgggcgcccgtggccctgcagactctcagggctaaggtcctctgttgctttttggttccaccttagaagaggctccgcttgactaagagtagcttgaaggaggcaccatgcaggagctgcatctgctctggtgggcgcttctcctgggcctggctcaggcctgccctgagccctgcgactgtggggaaaagtatggcttccagatcgccgactgtgcctaccgcgacctagaatccgtgccgcctggcttcccggccaatgtgactacactgagcctgtcagccaaccggctgccaggcttgccggagggtgccttcagggaggtgcccctgctgcagtcgctgtggctggcacacaatgagatccgcacggtggccgccggagccctggcctctctgagccatctcaagagcctggacctcagccacaatctcatctcnnnnnnnnnnnnnnnnnnnctgcacaacctcagtgccctccaattgctcaagatggacagcaacgagctgaccttcatcccccgcgacgccttccgcagcctccgtgctctgcgctcgctgcaactcaaccacaaccgcttgcacacattggccgagggcaccttcaccccgctcaccgcgctgtcccacctgcagatcaacgagaaccccttcgactgcacctgcggcatcgtgtggctcaagacatgggccctgaccacggccgtgtccatcccggagcaggacaacatcgcctgcacctcaccccatgtgctcaaggggtacgccgctgagccgcctgccgccactgccatgctcggcgccctcagtgcagctcagctaccaacccagccaggatggtgccgagctgcggcctggttttgtgctggcactgcactgtgatgtggacgggcagccggcccctcagcttcactggcacatccagatacccagtggcattgtggagatcaccagccccaacgtgggcactgatgggcgtgccctgcctggcacccctgtggccagctcccagccgcgcttccaggcctttgccaatggcagcctgcttatccccgactttggcaagctggaggaaggcacctacagctgcctggccaccaatgagctgggcagtgctgagagctcagtggacgtggcactggccacgcccggtgagggtggtgaggacacactggggcgcaggttccatggcaaagcggttgagggaaagggctgctatacggttgacaacgaggtgcagccatcagggccggaggacaatgtggtcatcatctacctcagccgtgctgggaaccctgaggctgcagtcgcagaaggggtccctgggcagctgcccccaggcctgctcctgctgggccaaagcctcctcctcttcttcttcctcacctccttctagccccacccagggcttccctaactcctccccttgcccctaccaatgcccctttaagtgctgcaggggtctggggttggcaactcctgaggcctgcatgggtgacttcacattttcctacctctccttctaatctcttctagagcacctgctatccccaacttctagacctgctccaaactagtgactaggatagaatttgatcccctaactcactgtctgcggtgctcattgctgctaacagcattgcctgtgctctcctctcaggggcagcatgctaacggggcgacgtcctaatccaactgggagaagcctcagtggtggaattccaggcactgtgactgtcaagctggcaagggccaggattgggggaatggagctggggcttagctgggaggtggtctgaagcagacagggaatgggagaggaggatgggaagtagacagtggctggtatggctctgaggctccctggggcctgctcaagctcctcctgctccttgctgttttctgatgatttgggggcttgggagtccctttgtcctcatctgagactgaaatgtggggatccaggatggccttccttcctcttacccttcctccctcagcctgcaacctctatcctggaacctgtcctccctttctccccaactatgcatctgttgtctgctcctctgcaaaggccagccagcttgggagcagcagagaaataaacagcatttctgatgcaaaaaaaaaaaaaaaaaaaaaagcagccgaaagcttattnccctttaagtaaggggttaatttttagcttgggcactnggccntcgttttanaacgtcgtgaattnggaaaacc

SEQ ID NO: 5950 - DNA, 3110 bp, Homo sapiens
ttcggcacatgcgtgaacaaatagctgaggggcggccgggccagaacggcttgtgtaactttgcaaacgtgccagaaagtttaaaatctctcctccttccttcactccagacactgcccgctctccgggactccgcgccgctccccgttgccttccaggactgagaaaggggaaagggaagggtgccacgtccgagcagccgccttgactggggaagggtctgaatcccacccttggcattgcttggtggagactgagatacccgtgctccgctcgcctccttggttgaagatttctccttccctcacgtgatttgagccccgtttttattttctgtgagccacgtcctcctcgagcggggtcaatctggcaaaaggagtgatgcgcttcgcctggaccgtgctcctgctcgggcctttgcagctctgcgcgctagtgcactgcgcccctcccgccgccggccaacagcagcccccgcgcgagccgccggcggctccgggcgcctggcgccagcagatccaatgggagaacaacgggcaggtgttcagcttgctgagcctgggctcacagtaccagcctcagcgccgccgggacccgggcgccgccgtccctggtgcagccaacgcctccgcccagcagccccgcactccgatcctgctgatccgcgacaaccgcaccgccgcggcgcgaacgcggacggccggctcatctggagtcaccgctggccgccccaggcccaccgcccgtcactggttccaagctggctactcgacatctagagcccgcgaagctggcgcctcgcgcgcggagaaccagacagcgccgggagaagttcctgcgctcagtaacctgcggccgcccagccgcgtggacggcatggtgggcgacgacccttacaacccctacaagtactctgacgacaacccttattacaactactacgatacttatgaaaggcccagacctgggggcaggtaccggcccggatacggcactggctacttccagtacggtctcccagacctggtggccgacccctactacatccaggcgtccacgtacgtgcagaagatgtccatgtacaacctgagatgcgcggcggaggaaaactgtctggccagtacagcatacagggcagatgtcagagattatgatcacagggtgctgctcagatttccccaaagagtgaaaaaccaagggacatcagatttcttacccagccgaccaagatattcctgggaatggcacagttgtcatcaacattaccacagtatggatgagtttagccactatgacctgcttgatgccaacacccagaggagagtggctgaaggccacaaagcaagtttctgtcttgaagacacatcctgtgactatggctaccacaggcgatttgcatgtactgcacacacacagggattgagtcctggctgttatgatacctatggtgcagacatagactgccagtggattgatattacagatgtaaaacctggaaactatatcctaaaggtcagtgtaaaccccagctacctggttcctgaatctgactataccaacaatgttgtgcgctgtgacattcgctacacaggacatcatgcgtatgcctcaggctgcacaatttcaccgtattagaaggcaaagcaaaactcccaatggataaatcagtgcctggtgttctgaagtgggaaaaaatagactaacttcagtaggatttatgtattttgaaaaagagaacagaaaacaacaaaagaatttttgtttggactgttttcaataacaaagcacataactggattttgaacgcttaagtcatcattacttgggaaatttttaatgtttattatttacatcactttgtgaattaacacagtgtttcaattctgtaattacatatttgactctttcaaagaaatccaaatttctcatgttccttttgaaattgtagtgcaaaatggtcagtattatctaaatgaatgagccaaaatgactttgaactgaaacttttctaaagtgctggaactttagtgaaacataataataatgggtttatacgacagcaacggatagatgaatttagaaacaatgctcctactgtttaaatacatatggacacatctggtgctgagaaagaaacaaacacattaccattggtgtcaagaaatattactatatagcagagaaatggcaatacatgtactcagatagttacatccctatataaaaagtatgtttacatttaaaaaattagtagataacttcctttctttcaagtgcacaatttcattttgacttgagtcaacttttgttttggaacaaattaagtaagggagctgcccaatcctgtctgatatttcttgaggctgccctctatcattttatctttcccatgggcagagatgttgtaagtgggattcttaatatcaccattcttgggactggtatacataaggcagccgtgaaactggaaagtcattttgatgactgatgtgatacatccagaggtaaaatgcatttaaacatattaaagtatttgccaaagatacaattttcttgctgacataaaaatcacacaaacaagtcccccccaaaccacaactgtctctcaaatagcttaaaaaaattgaaaaacattttaggatttttcaagttttctagattttaaaaagatgttcagctattagaggaatgttaaaaattttatattatctagaacacaggaacatcatcctgggttattcaggaatcagtcacacatgtgtgtgtgtctgagatatagtctaaattagcaaagcacatagtattacatacttgaggggttggtgaacaaaggaaaaatatactttctgaaaaccaaggactgtgctgggtaatgagaacagctgtgaatttatttggaactgtgaacctgttgcctatagaattggaatttgtttacctaattcaagaaatggattacttttggttggggctagaataatttcatttacagttaatccagagatttcggcaatttgggataaggccgcctttgagaaaaacattatttctcggcatcacgaagaaccgggagtatacggcacaaaggtctctcaacacatcacaaattc

SEQ ID NO: 5951 - DNA, 790 bp, Homo sapiens
  misc_feature (763)..(763): n is a, c, g, or t
tttttttttaattgaagagggaccatcactgtcccaccacagcagataaaaaggaatatgtatgggcatatggtctccatctggctcctaaatacccacagactgagttactaagggatcactatttttaattttttgaagcttagaaggctggtgggctgataatggcaaagcatatactttaggttttatctacagtcattcacagtcaatcaaagctttttctgacctccttcaaaaaagagcaatctaacagcatttatctcccctggcaagaatgaatggctccctgatttgcccatcagcagcaccacaacaggcatgatatttagtcactaacagagagctgacttccacctaaatatctgagtcaaagaatatttctttggtagtctctgaagtgaggatttaaaggtgtcccaaacctactagtcttgttaaataaaaacgaagcatcttttaatgtgccaggattatgggaagcatctaagagcaaaattgaaataatttaacactgaaattagaaaccaaatacatgagctttcttgggctttttctcagaacacaatcaatgcagctgacttaattcttgtcagcagagaagagacatggcccaaacattctcaagtttttccatcaaagggtgcaaaataagttgactcagtgcccttttaactctcagacaactttttcccaagattttctttgaatattagtaatagtaaagtttatccaaaaacactctactattttacatcttatntatttacatttcaatgtaatggtgaga

SEQ ID NO: 5952 - DNA, 4837 bp, Homo sapiens
  misc_feature (152)..(175): n is a, c, g, or t
  misc_feature (1421)..(1473): n is a, c, g, or t
  misc_feature (4775)..(4775): n is a, c, g, or t
  misc_feature (4781)..(4781): n is a, c, g, or t
  misc_feature (4796)..(4796): n is a, c, g, or t
  misc_feature (4814)..(4814): n is a, c, g, or t
  misc_feature (4824)..(4824): n is a, c, g, or t
gcttcccggctgccaggctacagaactcgcctcgccactcctgagacatggacaacgccgttgacggactggacaaagcttctatagcaaactcagatggccccacagcaggttcccaaacacctcccttcaaaagaaaggggaaactatcnnnnnnnnnnnnnnnnnnnnnnnnttggaaatggaggaaaaagaagaccagcgacaaatttagagaaacctcggcagtattagaaaggaagatatccacacgacaaagtagagaggagctgataagaaggggagtgcttaaggaattgcctgatcaagatggagatgtaacagttaactttgaaaattcaaacgggcacatgatacccatcggagaggaatctacccgagaggaaaatgtagtaaagtctgaagaaggtaatggctctgtatctgaaaaaacaccacctctggaggaacaggcagaagataagaaagagaacactgaaaaccactctgaaacaccggcagctcctgctctacctccttctgctcctcctaagcctagatccaaacctaaacccaaaaaatcacctgtgcctccgaaaggggccactgctggggccagccacaaaggtgatgaagtgcctcccattaaaaaaaataccaaggctcctggtaagcaggcccccgtccctccacccaagccagcaagccgaaacacgacccgagaggctgctggctcctctcattcaaaaaaaacaactggctctaaagcatcagcttcgccatccacttcatccacctcatctcgtcccaaagcttcaaaggagacagtttctagcaaagcagggacagtggggaccaccaagggcaagagaaaaactgacaagcagccaataacttctcacctgtcctcagacacaacaacttctggcacatccgacctgaaaggagagcctgcagagaccagagtggagagtttcaaactcgaacagactgtccctggagctgaggagcagaacacaggcaaattcaagtccatggtccctccaccccctgtggctccagcaccttctcctctggccccccctctccctcttgaggatcagtgcattactgcctcagacactccagttgtcctcgtcagcgttggagctgacctgcccgtctctgccttagacccaagtcagcttctttgggctgaagagccgacgaacagaaccactctctactcaggcactggcttaagtgttaacagagaaaatgcaaaatgtttcacaaccaaagaggagctggggaagacagtgcctcagctactgactcctgggctgatgggcgaatcttcagaatcctttagtgcctcagaagatgaaggccacagggaataccaagccaatgactctgactcggacgggcctatcttgtacaccgatgatgaggacgaagannnnnnnnnnnnnnnnnnnnnnnnnnnnnnnnnnnnnnnnnnnnnnnnnnnnnagggatactcttgctatcaaacttggcaacagaccatctaagaaagaactagaggacaaaaacatcttgcagcgtacatctgaagaagagaggcaggaaatccgacaacaaattggaaccaagttagtcaggaggctgagccagaggcccacaactgaagaattagagcaaagaaacatcctaaaacaaaagaatgaagaagaggaacaagaagcaaaaatggaacttaaacgcagactcagcagaaagctcagcctgagacccacagtggcagagctacaagctcgaaggatcctgcgatttaacgagtatgtagaagtcacggattctcctgactatgaccgccgagcagacaagccctgggccaggttaacacctgcagacaaggcagcaataaggaaagaactaaatgaatttaaaagcacagaaatggaagttcatgaagagagtcgacagtttacaaggtttcatcgtccataacgaagagtgagactatttggaaacagagactgatcatctttgggggaagccctgcttcctgaaaacctgatattgcactgggatttgaatgtgtgtgtttccgtttaacttgtggtgaaggaagtgtgtgactcagcttggctgggaagtgctcctcacctgtgtggcccagatggctccaacaagcaaaaggaaggatgcagtgactcttgctgcccagaatgcacagcgatggtaagagacaccgtggatattcttcatcagaagctttaatcaaagaagatgagcagaagacaatcactggctccctgttaccagaaagccaaattttataatgcgggtgaaagaaaaatatagattaaaattgctgggcactgaaaaggggtgggagttggaaatcagaaagaaagagaaatatttcattatgttaatgaagaaaagagaaaattgaagcataaatgtatttttgaagtagttattcggtagctgagaacttattaagggatttaggaatttaacctcctgatgtggattcctcaaagacttgatcggagaatactcttgtttcaccattatgttggtacagtatagtaccattattttatgttgtgccagtgaatccagttgccagaaataagtctgaatgttttcatgcatctttttcttaaatgcaagagcttctactgactcttaacaagcatgcttacccaaattttgttgcatgcttttaagtagcattagctatgcacacttgacatttttaaatatccctttcctagtgtaccagccttcacaggataagaggactgggaataaagtcagatgtaatgtgaccctagaaaactgtagcaagcttcagaaataaatcttttgatctttccctatcttgattagatccaaagtcaaagcaaccatacttcacctagagaagacagtattggcaatcatgacacctgtaataaaaacttgaatccaaagtcaaaacttaagcaagatacaaatgtgctgcctgcagttagtcctgcatgggaataaggactagttatttttttagtgctgcatttttttaaagttggattgctgctatttaaaaaaaaaaaaaggacacagatcaaaaaaacacccaaaggcttaacagaacatggaaagttcccactaagttgtgtgtgaggaaatcctcatcttgtattttaagaatctgcagatggcatccatagatacagtacagtatttactgtcaatgcaaaagaatcagtgaggttaaagtagtggaagttttccctatgagcctacagtctgtattgtttacattaagaaactctctattattgtgttgctattttccatggagtcacaggcacactatgacttctgctcccaaatacatatgaccatatgtaaataccaccttgcatttcattgttcttcacaagtgctttgtgcccctttaattaaaaacacatgaaatgaataacaaaacaagacccaaatagagtttattttattctcagagtttggactacaattttctaagatgtttctggttcaagactgtcattttctatttcaaccgaaaagtaagcatttaacccggtgaataaatgtagatcctgccattcattggtattttaaagaaccacttgaaatcggatcattttatttaaaaataaaaaatgttaatgccagttggcctactataaaaagccaggaccatgttagaattaggaaaagtaaccagcattactgcacctcttgttagactctgtgcattaataaaacacacctagagtctgttgtcatttcactaataggataagacaaattttttgctttgaaaaaatttttctgcatgcccaggtgtctgtctctggctgaggttttgtctattttacagtgtttcaatccagccataaaaattaacttgtgattttttttttcccaaagtcatgcttttccttaattatatttttattttattattttagtgtcttgagaaaaataccaagagatataatgtttcttttaattgtctatgcttaatcatctttaaacactttttaaatttctaaccacaagacctctctataatggtaaatgtaagacatcaccattttatcactcaaagtatgttattgaaagtttctatttggttgataaaaggaacaattttttcccacttttgatgcctgtgatgcaattttttattgcctacaatgagatacacttagtacaaaaaatgaaaatctggtatttcaaaattgcatttcttgtataataggtcagatttattaactactcatactttttctttacactaatcgatacatttagaaaaaattttctaagttagagacaagtttaaaagtaaaaaaaaaaaaaaattagccactggtagtctactgtttaggtaatcggaatcaccaattattttattagaatgatggcttgagtaaaaagctgtggaaagaattaaaggattatgagctaagctgtattttgcagaatatggttctattttagtagagcagagatgagacatatccccaccggccacccagccagaggtctcctacctgggggccctaaagggatgcagaggtctggcccaccctccgtgcataggcacctctgtccaccaccagcgtttcagcaatccaaccagtaagcatatgctgtataggaaaaataaaagtgtgtgggaattggatttcttttgttgtaacacaattccaggtttttggctatttaaagtttgacattaggctgacatcgaggaagtaagtgggttttcctaagttcccaagatgtgatttaaggaaganaacaangccatctccagggtnggtcccagggcagggaangtagcttagncagatgttaggga

SEQ ID NO: 5953 - DNA, 761 bp, Homo sapiens
aaactagttaattaaatgaacataatttttcaagttaataaattaagaaaatatctaaatgaaagagagaataaaatcagcatatgtgacagcccatatagtaaggacagtttcgcaatcaacgtaaccaaggaaaacagctttgttatcatttcaaacatgcaggcacacacaggcagaggcaaagctggaaccaaaccaaacaaaaagaagattttgaatattaaaaaactgggcctctagacactttgccttttagaaccagcttcctacatgttcaagtaaattccactgatagatcttgactatctacaatgtgctaggtattatgttaggtgatgaggacactaaagtgaataagacataacccttgttctcaaagagctcacaatgaaattaaggaaacagagcgagatgacttatcatcatctaatccagcaagtctttcctaatcctcccatccctagttcaagctagggaccttctctatgctaaacctgtgccttgtatataccttttattgtcacactaccccaatgtgtgatttatttgtttatgtttccatctccatttctagactgtgagctccttgagggcaggatttgtatctaattgatctctgtccccagtgtctagcatgatgcctggcacaaagagggagcccaataaatcactgttgaaaagaaccaagttacgatatgacaattgccaaatacaagctcacaataagagcggtatggatcaaaaaaaaaaaaaaaaaa

SEQ ID NO: 5954 - DNA, 1325 bp, Homo sapiens
cggaatcggttcttaaaagacggacggcttgtgggggtgttaaggtaaaaaacgggggggtgggggttttgggttttcccggatgtaaggggtggggaggttaccggggtttccgggtcccggccttgcggtaagggtggggggaatctgcgggggacgccatggaggggtcgaattttctttcccatttggcggggcggttcccatatggtggccccctgttcgccttgggtgatgttcagagaaatttgatgaaaaaagcaaaatttttccgaggtgcatcgcagttgaaaagcttcaggttattaagggttattgaggatcgattgatagaggaatttcgggggtttgaaaccatgggtttagttcagatcatgcctaagaaagatcctgtcaaaatagtccgatgccatgaacatatagaaatccttacagtaaatggagaattactcttttttagacaaagagaagggcctttttatccaaccctaagattacttcacaaatatccttttatcctgccacaccagcaggttgataaaggagccatcaaatttgtactcagtggagcaaatatcatgtgtccaggcttaacttctcctggagctaagctttaccctgctgcagtagataccattgttgctatcatggcagaaggaaaacagcatgctctatgtgttggagtcatgaagatgtctgcagaagacattgagaaagtcaacaaaggaattggcattgaaaatatccattatttaaatgatgggctgtggcatatgaagacatataaatgagcctcagaaggaatgcacttgggctaaatatggatattgtgctgtatctgtgtttgtgtctgtgtgtgacagcatgaagataatgcctgtggttatgctgaataaattcaccagatgctaaaaaaaaaaaaaaaaaaaaaacaaaaacaaaaacaaaaaaacaagaaaaaacaaaaaaaaaaaaaagggggggggccggaggaaaacaaccaaaggaaggggggcagggcaacaaaagaacagcagagggggaacaagaagagagcaccagcatcacggagacaatggaacaaccacagacgaccgccgggactgccaacaagcaacgacagccgcgacggcagaacacgcccccgcgagagaccagacacaaaacacattgagagcggaagcaagcacaccagagaacccacgagagaaaaagcgccagcagcacaatagacaatacataggcagtggggaacaaccagagaaaccgggggcgaacaaaaggctcgacaaggagcaaaaaacaccaagcaaggagactatacc

SEQ ID NO: 5955 - DNA, 2073 bp, Homo sapiens
  misc_feature (4)..(72): n is a, c, g, or t
  misc_feature (74)..(105): n is a, c, g, or t
  misc_feature (107)..(109): n is a, c, g, or t
  misc_feature (111)..(113): n is a, c, g, or t
  misc_feature (116)..(157): n is a, c, g, or t
  misc_feature (159)..(262): n is a, c, g, or t
  misc_feature (280)..(280): n is a, c, g, or t
  misc_feature (311)..(312): n is a, c, g, or t
  misc_feature (318)..(318): n is a, c, g, or t
  misc_feature (325)..(325): n is a, c, g, or t
  misc_feature (335)..(335): n is a, c, g, or t
  misc_feature (347)..(347): n is a, c, g, or t
  misc_feature (360)..(361): n is a, c, g, or t
  misc_feature (388)..(388): n is a, c, g, or t
  misc_feature (393)..(394): n is a, c, g, or t
  misc_feature (402)..(402): n is a, c, g, or t
  misc_feature (418)..(418): n is a, c, g, or t
  misc_feature (431)..(431): n is a, c, g, or t
  misc_feature (440)..(440): n is a, c, g, or t
  misc_feature (450)..(453): n is a, c, g, or t
  misc_feature (460)..(462): n is a, c, g, or t
  misc_feature (467)..(467): n is a, c, g, or t
  misc_feature (479)..(479): n is a, c, g, or t
  misc_feature (504)..(505): n is a, c, g, or t
  misc_feature (522)..(522): n is a, c, g, or t
  misc_feature (616)..(617): n is a, c, g, or t
  misc_feature (659)..(659): n is a, c, g, or t
gtcnnnnnnnnnnnnnnnnnnnnnnnnnnnnnnnnnnnnnnnnnnnnnnnnnnnnnnnnnnnnnnnnnnnnngnnnnnnnnnnnnnnnnnnnnnnnnnnnnnnnnannnannnccnnnnnnnnnnnnnnnnnnnnnnnnnnnnnnnnnnnnnnnnnncnnnnnnnnnnnnnnnnnnnnnnnnnnnnnnnnnnnnnnnnnnnnnnnnnnnnnnnnnnnnnnnnnnnnnnnnnnnnnnnnnnnnnnnnnnnnnnnnnnnnnnnnttttgggtcgggaccccnagggtttccctccgggggggaatttggcccnncggggncttggantttcccaaanccccccccaaantgggggccggccnntggggttcattttcaaaggggggccanccccnnccctttgntcccttggatttcccnttaaagggggggncctggattngggaaccttnnnnaaaaccnnntccanccgggtttgttnccaaatcccttttaaaattgattanntccttgttactttgtanttaattgttcaagttttcttgtatccttgcgctttgtttaagcccttgaaccaggaccaacagggtcaagcttctggaggttggttggaacaannacggcaagtgctcgaaatgacaatccagagaaatctaaactnctgtgggttccgaagtgttaacccaaatgacacctgtctggctagctgtgttaaaagtgaccactcgtgctcgccatgtgctccaatcataggagaatatgctggagaggttttgagatttgttggtggcattggcctgttcttcagttttacagagatcctgggtgtttggctgacctacagatacaggaaccagaaagacccccgcgcaaatcctagtgcattcctttgatgagaaaacaaggaagatttcctttcgtattatgatcttgttcactttctgtaattttctgttaaggctccatttgccagtttaaggaaggaaacactatctggaaaagtaccttattgatagtggaattatatatttttactctatgtttctctacatgtttttttctttccgttgctgaaaaatatttgaaacttgtggtctctgaagctcggtggcacctggaatttactgtattcattgtcgggcactgtccactgtggcctttcttagcatttttacctgcagaaaaactttgtatggtaccactgtgttggttatatggtgaatctgaacgtacatctcactggtataattatatgtagcactgtgctgtgtagatagttcctactggaaaaagagtggaaatttattaaaatcagaaagtatgagatcctgttatgttaagggaaatccaaattcccaattttttttggtctttttaggaaagatgtgttgtggtaaaaagtgttagtataaaaatgataatttacttgtagtcttttatgattacaccaatgtattctagaaatagttatgtcttaggaaattgtggtttaatttttgacttttacaggtaagtgcaaaggagaagtggtttcatgaaatgttctaatgtataataacatttaccttcagcctccatcagaatggaacgagttttgagtaatcaggaagtatatctatatgatcttgatattgttttataataatttgaagtctaaaagactgcatttttaaacaagttagtattaatgcgttggcccacgtagcaaaaagatatttgattatcttaaaaattgttaaataccgttttcatgaaagttctcagtattgtaacagcaacttgtcaaacctaagcatatttgaatatgatctcccataatttgaaattgaaatcgtattgtgtggctctgtatattctgttaaaaaattaaaggacagaaacctttatctttgtgtatgcatgtttgaattaaaagaaagtaatggaagaattgatcgataaaaaaaaaaaagtggaattcttttctttctgctttagcttctctctgttggacttagagctgggtattgctattttagtgtataatcaacctgtggaaataaatttccagcattagaatcaaaaaaaaaaaaaaa

SEQ ID NO: 5956 - DNA, 2476 bp, Homo sapiens
gcttctatgaggagaccatgtgccgaggtcgtgtgctaggaagccagttgctgtgagaaatgaccagtgtcatgtctgtctttcagccaccctacatcatgtagcagttcttctgagatcatgtctgtgctgttcttctacatcatgaggtacaagcagtcagatccagagaatccggacaacgaccgatttgtcctcgcaaagagactgtcgtttgtggatgtggcaacaggatggctcggacaaggactgggagttgcatgtggaatggcatatactggcaagtacttcgacagggccagctaccgggtgttctgcctcatgagtgatggcgagtcctcagaaggctctgtctgggaggcaatggcctttgcttcctactacagtctggacaatcttgtggcaatctttgatgtgaaccgcctgggacacagtggtgcattgcccgccgagcactgcataaacatctatcagaggcgctgcgaagcctttgggtggaacacttatgtggtggacggccgggacgtggaggcactgtgccaggtattctggcaggcttctcaggtgaagcacaagcccactgctgtggtggccaagaccttcaagggccggggcaccccaagtattgaggatgcagaaagttggcatgcaaagccaatgccgagagaaagagcagatgccattatcaaattaattgagagccagatacagaccagcaggaatcttgacccacagccccccattgaggactcacctgaagtcaacatcacagatgtaaggatgacctctccacctgattacagagttggtgacaagatagctactcggaaagcatgcggtctggctctggctaagctgggctacgcgaacaacagagtcgttgtgctggatggtgacaccaggtactctactttctctgagatattcaacaaggagtaccctgagcgcttcatcgagtgctttatggctgaacaaaacatggtgagcgtggctctgggctgtgcctcccgtggacggaccattgcttttgctagcacctttgctgcctttctgactcgagcatttgatcacatccggataggaggcctcgctgagagcaacatcaacattattggttcccactgtggggtatctgttggtgacgatggtgcttcccagatggccctggaggatatagccatgttccgaaccattcccaagtgcacgatcttctacccaactgatgccgtctccacggagcatgctgttgctctggcagccaatgccaaggggatgtgcttcattcggaccacccgaccagaaactatggttatttacaccccacaagaacgctttgagatcggacaggccaaggcgtatccatgctccaggacagctggagcagtgtaatttcctatcaaaagtcctccgccactgtgtcagtgacaaggtcacagttattggagctggaattactgtgtatgaagccttagcagctgctgatgagctttcgaaacaagatatttttatccgtgtcatcgacctgtttaccattaaacctctggatgtcgccaccatcgtctccagtgcaaaagccacagagggccggatcattacagtggaggatcactacccgcaaggtggcatcggggaagctgtctgcgcagccgtctccatggatcctgacattcaggttcattcgctggcagtgtcgggagtgccccagagtgggaagtccgaggaattgctggatatgtatggaattagtgccagacatatcatagtggccgtgaaatgcatgttgctgaactaaaatagctgttagccttggtcttttggcctctttaccctgtgtttatgtttgttccaaaaccatcatttaaatctctactgtcacattttgtttcttaaaagcaaagccagctaacaccttcattcatccctagttcggaaattcaagctaactacttaccctttaaactgtcactgcatatgcaagtaccgctctaatttttggatcattaaagggagttacacaacttttaagtgaaaaaaataggtaacaaaacaaccacctgatagtaagttttctgataagactatagataagtggtagaggtaatcaattcttccgaagtgtttccttcgtgaataactggtagaggtaatagttttttcaatgtatttccttcatgagtaaagaaaatgtggattgaagtatagattccagtagcctagtttccacagcacgataacaccatgacgcctactgctgttcccaccttgggattctgtgtgctgccatcccacctgcagctgccctggaattcccttcgctgtttgccttcatctccctccacgtttgagaggctgtcaggcagcagcgaaagcttgttaggatgtcctgtgctgcttgtgatgagagcctccacactgtactgttcaagtcaatgttaataaagcatttcaaaaccaaaaaaaaaaaaaaaaaaagatt

SEQ ID NO: 5957 - DNA, 1911 bp, Homo sapiens
cttttttttaagcagggctgagaatgtttattccatgcccaaggcagcacagacctggcagacagcagtaccacagggcaaagagggaattcccgtggctcgaggcccaacgaggctccctggagcccgacgcagagcagcgccctggccgggccaagcaggagccggcatcatggattccttcaaagtagtgctggaggggccagcaccttggggcttccggctgcaagggggcaaggacttcaatgtgcccctctccatttcccggctcactcctgggggcaaagcggcgcaggccggagtggccgtgggtgactgggtgctgagcatcgatggcgagaatgcgggtagcctcacacacatcgaagctcagaacaagatccgggcctgcggggagcgcctcagcctgggcctcagcagggcccagccggttcagagcaaaccgcagaaggcctccgcccccgccgcggaccctccgcggtacacctttgcacccagcgtctccctcaacaagacggcccggccctttggggcgcccccgcccgctgacagcgccccgcagcagaatggacagccgctccgaccgctggtcccagatgccagcaagcagcggctgatggagaacacagaggactggcggccgcggccggggacaggccagtcgcgttccttccgcatccttgcccacctcacaggcaccgagttcatgcaagacccggatgaggagcacctgaagaaatcaagccaggtgcccaggacagaagccccagccccagcctcatctacaccccaggagccctggcctggccctaccgcccccagccctaccagccgcccgccctgggctgtggaccctgcgtttgccgagcgctatgccccggacaaaacgagcacagtgctgacccggcacagccagccggccacgcccacgccgctgcagagccgcacctccattgtgcaggcagctgccggaggggtgccaggagggggcagcaacaacggcaagactcccgtgtgtcaccagtgccacaaggtcatccggggccgctacctggtggcgctgggccacgcgtaccacccggaggagtttgtgtgtagccagtgtgggaaggtcctggaagagggtggcttctttgaggagaagggcgccatcttctgcccaccattatggacgtggcgcttatggcacccagctgtgccaagtgcaagaagaagattacaggcgagatcatgcacgccctgaagatgacctggcacgtgcactgctttacctgtgctgcctgcaagacgcccatccggaacagggccttctacatggaggagggcgtgccctattgcgagcgagactatgagaagatgtttggcacgaaatgccatggctgtgacttcaagatcgacgctggggaccgcttcctggaggccctgggcttcagctggcatgacacctgcttcgtctgtgcgatatgtcagatcaacctggaaggaaagaccttctactccaagaaggacaggcctctctgcaagagccatgccttctctcatgtgtgagccccttctgcccacagctgccgcggtggcccctagcctgaggggcctggagtcgtggccctgcatttctgggtagggctggcaatggttgccttaaccctggctcctggcccgagcctggggctccctgggccctgccccacccaccttatcctcccaccccactccctccaccaccacagcacaccggtgctggccacaccagccccctttcacctccagtgccacaataaacctgtacccagctgagaaaaaaaaaaaaaaaaaaaaaaaaaaaaaaaaaaaaaaaaaaaaaaaaaaaaaaaaaaagaagaaaagggccagaggagagggagcgagggagggaggggaccgaaagcggaa

SEQ ID NO: 5958 - DNA, 2681 bp, Homo sapiens; identical to SEQ ID NO: 5910
  misc_feature (707)..(720): n is a, c, g, or t

SEQ ID NO: 5959 - DNA, 2954 bp, Homo sapiens
  misc_feature (2868)..(2926): n is a, c, g, or t
acgccattctcctgcctcagcctcccgagtagctgggactacaggcgcccgccactgcgcccggctaattttttgtatttttagtagagagggggtttcaccgtggtctcgatctcctgacctcgtgatccgcccgcctcagcctcccaaagtgctgggattacaggcgtgagccaccgcgcccggccagttcaatggattttaaaaattattattctctagaaaaaagaccacgaactttggagtggacatcctgagacctgcctacgaagaccattaggtggcctccagaagacactcccctgattcctacaccgagggaacacacagcagcaagctaggaaagaaggggtgacccagcccaacgctgtaaaccagggcgcgaaccggcgttgagctgtgcagctgcgccctgggctccagtcctgctctgccgcagaccccaccggagccagcacctgcctccccgaccctcgctggggcggctgtgagatgagcccagagccttcctgagccaaccctcgcaaggaaagtctgtctgctcaccccactatccttgtcttgaaggatgaagaaaagagggccccccgggaggtcccaaaaggtggaatggacatctgggatccaagcacagcaatttctttatttttcttaaggtatccagcttgttggaatctaagatctgcgaaggtattaatagaattcctgcatcttctgccactccccatagaagcttgaagttacacaaatgttaaattatacgtcagatgtgcatatatgaacaaaacctacgagtgtgcatgaaataacaccttcttaaatatatagattcttttttctgcaatattaaatggaaaccccactagaacatcgtttttccttaatagcataccctccacactgtgtggtctaaattcaagctctaccacctactagccattaagcaagttattaaggtcttcgtgcttccattttcttacgtggaaaatgaggtggcaatagtatgtatgagttcttcggagggattaaacaagtcaaataggccaagtgccatggcttacgcctgtaagcccagcactttgggaggccaaggcaggaggactgcttgagcccaggaggtcaaggctgaagtgagctgtgtttgcatcactgcactccagcctgggcagcagagtgagactttgtctctcaataaataaagaaatagtcaaattaaatataactggcaaactaaaacaactccatagtccttagctacaatttgtctcatttctccaaagaattaaatcagatgattcttaactaactcaaagctctgcataatttgtcttctgctacacatacatctttatagtaaaataaaataaagctgtcccctctgtattgagaagttattctggtaaatatttgacctcttcaaatatatgaacgagcacttgccttctaatgcctcagtttcagattctttttagaaatgtcattattcaagaaaaatgcacaatgggaagaatcttaacaacagcactttgttacttcagcctctcactagaggatgaaaatcgttctgcataaaggcctgggctttatgaaaaatatattcacacctcccgtgtccgagctgggataccaaagaagttcctggttgagtactacttatgaatgaaggattcaggggatgcacaggtgggtgactgcaaatgcacagacgttgtgctgtgttccccacaataaaggggtctgtattaagatgcaggcattctcatggaacacagacgtataacactcaagctgggggactgcaaaggagcatctggggctgcaggaagagagttaaggtgcaaaaatgccctgacccaactgagacttgtaattgctcatgtggtaatacatgtgacttcattcccctgctctgtctttgtgaatgcaaccattgttggggagatagtgagaggggacactggcattgaaagttttgtttgcagcaggcctcaaaaggcactcagatgcagatttccctgcaaagacttcccggcctatcatggagttccccatccctagatctctgatctctgagctggtgtaatacttagtctttgtctgtgttgatcatggcatctgccacacttaatgtttgtggcattcactttctgatgcttagatcttacgattctagagaacagcatttttctacatattccctcttagggccttgaacataataagtgctcaataaatactgagtgaaatcctctactctgagctttgcctctgagcagctgtcctagttctctccaacaagaagtttgttgggtctctcaagttcacttccacctgtcactgtcagttttcagtccagccccttactcaggtctggctggcccatctcccccagagggctgtcccatagagcccattgtaaaggacactcattgttgccaagagtttgtgccaatgcagtatgactcacccttcactcattgaacaagctcttcctgattacctagatgggcaaaatttccctgctcatgcgaagcaggctggcgactcagtgctgcagcaaatggcccagaagctgggaaagcagatagccgttctgacacttctcttctagacagaaaatcaagggaagctcaagacccacacttgaattttttttaaaaaattagacaaggggctgggtgtggtggctcatgcctgtaatcccagcactttgggaggccgaggcaggcagatcacctgaggttgggagttcaagaccagcctgaccaacatggagaaacccctgtctctgttaaaaatacaaaattagccaggcgtggtggcacatgcctataatcccagctactcgggaggctaaggcaggagaannnnnnnnnnnnnnnnnnnnnnnnnnnnnnnnnnnnnnnnnnnnnnnnnnnnnnnnnnncctggcaacaagagcgaaactcagtctc

SEQ ID NO: 5960 - DNA, 1403 bp, Homo sapiens
tgtcttcgcgttggaatttctgtatcgcctttcgccggacacctggtactttaccgtccgtctgggctcatttccacctgagctagaactgcctggttcacagcgtcgcactgactgttatgttctgtgttggttgtctacttctatcaccgaggaataatttacgagttatgtgtgacctcccaagtggtcggttctagacctcgattgaacatgggcattcagaggccagttagctttcttgggcctacagagtaaatggacatatagttatggaaggacttgcatccagcttcctattacaatgggaggtttaggtttcataatcctggaccgatcgaatgcaccaatatcccatactcaatagattccttcttctgttcattggattcgtctgtgtcctattgagttttttcatggctagagtattcatgagaatgaaactgccgggctatctgatgggttagagtgcctttgagaagaaatcagtggatactggatttgctcctgtcaatgaagttttaaaggctgtaccaatcctctaatatgaaatgtggaaaagaatgaagagcagcagtaaaagaaatatctagtgaaaaaacaggaagcgtattgaagcttggactagaatttcttcttggtattaaagagacaagtttatcacagaattttttttcctgctggcctattgctataccaatgatgttgagtggcattttctttttagtttttcattaaaatatattccatatctacaactataatatcaaataaagtgattattttttacaaccctcttaacattttttggagatgacatttctgattttcagaaattaacataaaatccagaagcaagattccgtaagctgagaactctggacagttgatcagctttacctatggtgctttgcctttaactagagtgtgtgatggtagattatttcagatatgtatgtaaaactgtttcctgaacaataagatgtatgaacggagcagaaataaatactttttctaattaaaaaaaaaaaaaaaaaaaaaaaaaaaaaaaaaaaaaaaaaaaaaaaaaaaaaaaaaagggggaaaaattaattatcaggaaagaggacaatagaatcaagcgaacccgactgcattcagaatcaagaagaggaacaagaaggggggccggtataatcaagaccagcacgggggaggacaaaaatataaacgacccggtgctaatcgatgaaaagagcactctgcgaatcatggtaaaagaaaaccactcggtcggggaggtacataatagccagcacgccggaacaacatatgaggtttaggaaaagaaaacccctatgtgtgtagggtgacaaagccacacacccagagaaagcgtggatatgatatatagttattatacg

SEQ ID NO: 5961 - DNA, 2988 bp, Homo sapiens
agcggaggcacgagctctgtgagactgaggtggcggtcagccggagtgagtgttggggtcctggggcacctgccttacatggcttgtttatgaacattaaagggaagaagttgaagcttgaggagcgaggatggcagtcaacaaaggcctcaccttgctggatggagacctccctgagcaggagaatgtgctgcagcgggtcctgcagctgccggtggtgagtggcacctgcgaatgcttccagaagacctacaccagcactaaggaagcccaccccctggtggcctctgtgtgcaatgcctatgagaagggcgtgcagagcgccagtagcttggctgcctggagcatggagccggtggtccgcaggctgtccacccagttcacagctgccaatgagctggcctgccgaggcttggaccacctggaggaaaagatccccgccctccagtacccccctgaaaagattgcttctgagctgaaggacaccatctccacccgcctccgcagtgccagaaacagcatcagcgttcccatcgcgagcacttcagacaaggtcctgggggccgctttggccgggtgcgagcttgcctggggggtggccagagacactgcggaatttgctgccaacactcgagctggccgactggcttctggaggggccgacttggccttgggcagcattgagaaggtggtggagtacctcctccctgcagacaaggaagagtcagcccctgctcctggacaccagcaagcccagaagtctcccaaggccaagccaagcctcttgagcagggttggggctctgaccaacaccctctctcgatacaccgtgcagaccatggcccgggccctggagcagggccacaccgtggccatgtggatcccaggcgtggtgcccctgagcagcctggcccagtggggtgcctcagtggccatgcaggcggtgtcccggcggaggagcgaagtgcgggtaccctggctgcacagcctcgcagccgcccaggaggaggatcatgaggaccagacagacacggagggagaggacacggaggaggaggaagaattggagactgaggagaacaagttcagtgaggtagcagccctgccaggccctcgaggcctcctgggtggtgtggcacataccctgcagaagaccctccagaccaccatctcggctgtgacatgggcacctgcagctgtgctgggcatggcagggagggtgctgcacctcacaccagcccccgctgtctcctcaaccaaggggagggccatgtccctatcagatgccctgaagggcgttactgacaacgtggtggacacagtggtgcattacgtgccgctccccaggctgtcgctgatggagcccgagagcgaattccgggacatcgacaacccaccagccgaggtcgagcgccgggaggcggagcgcagagcgtctggggcgccgtccgccggcccggagcccgccccgcgtctcgcacagccccgccgcagcctgcgcagcgcgcagagccccggcgcgccccccggcccgggcctggaggacgaagtcgccacgcccgcagcgccgcgcccgggcttcccggccgtgccccgcgagaagccaaagcgcagggtcagcgacagcttcttccggcccagcgtcatggagcccatcgtgggccgcacgcattacagccagctgcgcaagaagagctgagtcgccgcaccagccgccgcgccccgggccggcgggtttctctaacaaataaacagaacccgcactgcccaggcgagcgttgccactttcaaagtggtcccctggggagctcagcctcatcctgatgatgctgccaaggcgcactttttatttttattttatttttattttttttttagcatccttttggggcttcactctcagagccagtttttaagggacaccagagccgcagcctgctctgattctatggcttggttgttactataagagtaattgcctaacttgatttttcatctctttaaccaaacttgtggccaaaagatatttgaccgtttccaaaattcagattctgcctctgcggataaataatttgccacggaagggtaactcctgtcaccactctgaaggtccagacagaaggttttgacacattcttagcactgaactcctctgtgatctaggatgatctgttccccctctgatgaacatcctctgatgatcaaggctcccagcaggctactttgaagggaacaatcagatgcaaaagctcttgggtgtttatttaaaatactagtgtcactttctgagtacccgccgcttcacaggctgagtccaggcctgtgtgctttgtagagccagctgcttgctcacagccacatttccatttgcatcattactgccttcacctgcatagtcactcttttgatgctggggaaccaaaatggtgatgatatatagactttatgtatagccacagttcatccccaaccctagtcttcgaaatgttaatatttgataaatctagaaaatgcattcatacaattacagaattcaaatattgcaaaaggatgtgtgtctttctccccgagctcccctgttccccttcattgaaaaccaccacggtgccatctcttgtgtatgcagggctatgcacctgcaggcacgtgtgtatgcactccccgcttgtgtttacacaagctgtggggtgttacgcatgcctgcttttttcacttaataatacagcttggagagatttttgtatcacattataaatcccactcgctctttttgatggccacataataactactgcataatatggatacgccttatttgatttaactagttccctaatgatggacttttaagttgtttcctttttttttcttttttgctactgcaaacgatgctataataaatgtccttatcaaaaaaaaaaaaaaaaaaaaaaaaaaaaaaaaaaaaaaaaaaaaaaaaaaaaaaaaaaaaaggaaaaaaaaaaaaaa

SEQ ID NO: 5962 - DNA, 1641 bp, Homo sapiens
ccccctcagcctctctctctctctctctttctctctctctctctctttctgtctcttcctcgctccctctctttctctcctccctctgccttcccagtgcataaagtctctgtcgctcccggaacttgttggcaatgcctattttttggctttcccccgcgttctctaaactaactatttaaaggtctgcggtcgcaaatggtttgactaaacgtaggatgggacttaagttgaacggcagatatatttcactgatcctcgcggtgcaaatagcgtatctggtgcaggccgtgagagcagcgggcaagtgcgatgcggtcttcaagggcttttcggactgtttgctcaagctgggcgacagcatggccaactacccgcagggcctggacgacaagacgaacatcaagaccgtgtgcacatactgggaggatttccacagctgcacggtcacagcccttacggattgccaggaaggggcgaaagatatgtgggataaactgagaaaagaatccaaaaacctcaacatccaaggcagcttattcgaactctgcggcagcggcaacggggcggcggggtccctgctcccggcgttcccggtgctcctggtgtctctctcggcagctttagcgacctggctttccttctgagcgtggggccagctccccccgcgcgcccacccacactcactccatgctcccggaaatcgagaggaagatccattagttctttggggacgttgtgattctctgtgatgctgaaaacactcatataggattgtgggaaatcctgattctcttttttatttcgtttgatttcttgtgttttatttgccaaatgttaccaatcagtgagcaagcaagcacagccaaaatcggacctcagctttagtccgtcttcacacacaaataagaaaacggcaaacccaccccattttttaattttattattattaattttttttgttggcaaaagaatctcaggaacggccctgggccacctactatattaatcatgctagtaacatgaaaaatgatgggctcctcctaataggaaggcgaggagaggagaaggccaggggaatgaattcaagagagatgtccacggacgaaacatacggtgaataattcacgctcacgtcgttcttccacagtatcttgttttgatcatttccactgcacatttctcctcaagaaaagcgaaaggacagactgttggctttgtgtttggaggataggagggagagagggaaggggctgaggaaatctctggggtaagagtaaaggcttccagaagacatgctgctatggtcactgaggggttagctttatctgctgttgttgatgcatccgtccaagttcactgcctttattttccctcctccctcttgttttagctgttacacacacagtaatacctgaatatccaacggtatagatcacaagggggggatgttaaatgttaatctaaaatatagctaaaaaaagattttgacataaaagagccttgattttaaaaaaaaagagagagagatgtaatttaaaaagtttattataaattaaattcagcaaaaaaagatttgctacaaagtatagagaagtataaaataaaagttattgtttgaaaaaaaaaaaaaaaaaagat

SEQ ID NO: 5963 - DNA, 2391 bp, Homo sapiens
  misc_feature (16)..(32): n is a, c, g, or t
gagcgagcccagcagnnnnnnnnnnnnnnnnntgggggctggctggggccttaatgtgaaaagacagtggcaggcagctggagtagagcgagcccagcagccctaaaaggctgccttcatggccatctagccccagttcagggcagcatccatagcccacaagccagcgtgggtggggcgggggtggtcccacagctgggttccacctgaagagcctccgtgcctcggagcaggagaggcaggctatggctgtcaccctccctcctgcctgtgtcccagtgagaactgacctgagtccccttccaaacccagacccacctcctgccccaggcccactgaagcatgttccatttctaaaaagcccagagttcagtgtgtcccaaggaaaacccaaagtggaggtgctcaggtccaggggagtccagtgggcaggacccttggcaggcaagcccctcccttcactcccaggacctaccttctgctagtaaaggactggcttcattctaattatggcccacagactgccccggagacctggaggacagcagtgctggcacttgggtgtccatgggcccgtctgccggctctgcctgtgctgcaagtgttggccgtgggtccagccaacaactccctacgtcctgtgtggggccctgcccaagtggatgaggcattccttgaggagtatcattttccctgacaatccccatcacctttaggggttccctgcttggctcctttccagctgaaaaactagacctgtgccattggggaagctggacaaagtctagggggcccgcctggtagagggtcccgggaagctggatctgtcagcctcggccctgaggcccctgttaactcaagactgtgagctgcctctaggtggtcacgtctgggagctagcttgtatggcttctgaccagtatcaggatttctgttctgagagcagcgtgggcagcaaggcagggcagcccagaggtggcagcggcaggcaatctggtcactaggtctttgtgatgccaaaaataaaagagggtggggtgggtgctttctgttcctctgattggatggagtccgccagcaggcatggggctacattccagtgcctgactatagggaggcactcctgattccatggagcagcccggactttgagaatgggctctggtttgcggggggcaggcgtaccagactgcaagaccccccagtacctcaccgtgccaaataggaagaggtggccttggtgtagccaaatggatctttttaacagtgtgcctttggggagggacccatgtccatggcttcgttgagggccatccatatgccagctgggggccagcccacagtggccatatggctgcagcaggaatggtgcccacctcggcgaattgaagggctaagagtcccagatagctaggccagagctggaagcagacagtaaggggaagagctgctcccacaggagagggagagattccagctcactgcgcagcctgggaggaggcgtggatcctggcacgctgagcctcaggcaccagcctccctgtgctcgacagcaaagtcttgactccttcctgctgagcactgtgctaccttcactgctccaaagccagactaacagctctccaagcccttggggtgactcggcttccaggagctgttggagaaatgaggatgtctgtccctgtctgcctgggcaggccagattcctccccagcagccgggtctctccagaccctgattcggtgcctttctgtttaccagctacttcaatcccaaagtttgaatctgcagataccttactcccagccactttgccttcttactgtgttgtgtgtttttcctggtgcttcaagagcgtgtgcagggcaagtgccgtcactgggaactgcaccagatgctcagacttggttgtcttatgtttaccaataaataaaagtagactttttctatttttatttgctgctatttgtgtgtgtgtttgtgtttgtgtagctaggtatctggcacttctgacgatgcattgttgcttttttcccgaaggtcccgcaggaactgtggcaatggtgtgtgtgtgaaatggtgtgttaaccgcgttttgtttgctcctgtattgaataggaagcagtggccagtctgtcttccttagagatgttagcatatttttatatgtatatattttgtaccaaaaaagagtgttccttgttttggttacactcgaaattctgacctagctggagagggctctgggccgagagctttcactaaggggagacttcaggggaggatcaagctttgaaccaaagccaatcactggcttgatttgtgttttttaattaaaaaaaaaatcattcatgtatgccacttctaaaaaaaaaaaaaaaaaaaaaaaaa

SEQ ID NO: 5964 - DNA, 547 bp, Homo sapiens
gctctcatcacttctgagcacggagcaatggcctctcgctgggctgtgcagctgctgctcgtggcagcctggagcatgggctgtggtgaggccctcaagtgctacacctgcaaggagcccatgaccagtgcttcctgcaggaccattacccgctgcaagccagaggacacagcctgcatgaccacgctggtgacggtggaggcagagtaccccttcaaccagagccccgtggtgacccgctcctgctccagctcctgtgtggccaccgaccccgacagcatcggggccgcccacctgatcttctgctgcttccgagacctctgcaactcggaactctgaacccagggcggcagggcggaaggtgctcctcaggcacctcctctctgacggggcctggctccacctgtgatcacctccccctgcttcctgctgctgtggcacagctcactcatggggtctgaggggagagaagcacaccaggggcgccctctgccttccataccccacgcttataaaacataactaagccaagagtggaaaaaaaaaa

SEQ ID NO: 5965 - DNA, 1941 bp, Homo sapiens
aagcataacaggacccggtgcatttcaaggactgaaataaggagggccgacagcatgacttctgaagaccaagaacctgagcgggactatgagaacgagtctgagtcttcggagcccaaactgggcgaggaatccatggaaggggatgagcacattcacagcgaagtgagtgaaaaagtcctgatgaatagtgagaggcctgatgagaaccacagtgagccctctcaccaggacgtcatcaaggtgaaggaagaatttacagaccccacttacgacatgttttacatgagccagtatggactgtacaatggtgggggtgccagcatggccgccttgcatgagagctttacatcgtctctgaattatggcagccctcaaaagttctccccagaaggtgacctatgttctagcccagaccccaaaatctgttatgtgtgcaagaagagtttcaaaagctcctacagtgtgaaacttcactacaggaacgttcacttgaaagagatgcacgtctgcacagtggctggttgcaatgctgcattcccctctcgccgaagccgagacagacacagtgccaacataaacctacatcgtaaactgttgaccaaagaactcgatgacatgggcctggactcgtcgcagccctcccttagcaaggacctccgcgatgaatttttggtgaagatatatggtgcccagcaccccatggggctcgatgtcagggaagacgcctcctctcccgcagggactgaagactcccacctgaacgggtatgggagaggcatggcagaggactacatggtccttgacttgagcaccacctccagcctccagtccagcagcagtatccattcctccagagaatccgacgcaggcagcgatgaggggattcttctcgatgacattgacggggcgagtgacagtggggagtcggcacacaaggccgaggcccctgccctccctggcagcctaggggctgaagtttcaggatctcttatgttcagcagcttgtctgggagcaatggtgggatcatgtgcaacatttgccacaaaatgtacagcaacaaggggaccctgagagtgcactacaaaactgtgcatttgagagaaatgcacaagtgcaaagtcccaggttgcaatatgatgttttcctctgtacgaagccgaaatcggcacagtcagaaccctaatctccacaaaaacattcccttcacttcagtagattagtctcagaatggacactacaaatgccagctctcaccagatggcctacgtgtttgaactgccatagtcagtgtgcgcttatgtacttggggtgtgtgtgtgtgtgtgtgtgtgtgtgtgtgtgtgtgtgcataaatgtatgctctgtggctacatatacacacacgtatttccttgagataaacaagataaacactaggtgcttttgaatttttttcacttccctttatagttttgggaaaggagtgggatctttgatttcagggtgaaaacagagtacccctttaaacacacacacacacacgcacatacacacacacacacacacgcacacacacacacacacacagtgtgcaactagccccagttttgacagaataattcttggtcttccccaaagagacaatttgttgtacccatgactgttgcctgcaaaaataaaagggaaaaaaaaaaaaaaaaaaaaaaaaaggaacttcttatagttgtcttttgtgaactttaaggttttgaaagaatcttcaattaaagcatggcagattcacctgtaaatatttagccttgaggggccattgatgtaaaacaattgtattgatggttgtttaacttttttgtttaatttttacagttacatccagctgttagatatgcaggaaaagatagtttgctggctagctctattcatttatgttagcattaatgcacatttttaaaaaaaga

SEQ ID NO: 5966 - DNA, 1735 bp, Homo sapiens
ccgcgtttttttttttaatttatgatatacttaattacaaaaaaagtctaactgcaatataaaggagaaacaaaatgaaagtaatttgtaatatatataagtatgcaaacaaaacaatactagaaaacataaaatattcataagtagaatcactgacagtggcagctatgaacaaaatcttccatatattcccataggttaagaatgtctgaggggtcaggcggtgctggcaagatggctgcacttgagaagatgacgtttcccaagaagatgacatttccagagaaaccaagccacaaaaagtacagggccgccctgaagaaggagaaacgaaagaaacgtcggcaggaacttgctcgactgagagactcaggactctcacaggaggaggaagaggacacttttattgaagaacaacaactagaagaagagaagctattggaaagagagagggaaagattacatgaggagtggttgctgagggagcagaaggcacaagaagaattcagaataaagaaggaaaaggaagaggcggctaaaaaacggcaagaagaacaagagagaaagttaaaggaacaatgggaagaacagcagaggaaagagagagaagaggaggagcagaaacgacaggagaagaaagaaaaagaggaagctttgcagaagatgctggatcaggctgaaaatgagttggaaaatggtaccacatggcaaaacccagaaccacccgtggatttcagagtaatggagaaggatcgagctaattgtcccttctacagtaaaacaggagcttgcagatttggagacagatgttcacgtaaacataatttcccaacatccagtcctacccttcttattaagagcatgtttacaacgtttggaatggagcagtgcaggagggatgactatgaccctgacgcaagcctggagtacagcgaggaagaaacctaccaacagttcctagacttctatgaggatgtgttgcccgagttcaagaacgtggggaaagtgattcagttcaaggtcagctgcaatttggaacctcacctgaggggcaatgtatatgttcagtaccagtcggaagaagaatgccaagcagccctttctctgtttaacggacgatggtatgcaggacgacagctgcagtgtgaattctgccccgtgacccggtggaaaatggcgatttgtggtttatttgaaatacaacaatgtccaagaggaaagcactgcaactttcttcatgtgttcagaaatcccaacaatgaattctgggaagctaatagagacatctacttgtctccagatcggactggctcctcctttgggaagaactccgaaaggagggagaggatgggccaccacgacgactactacagcaggctgcggggaaggagaaaccctagtccagaccactcctacaaaagaaatggggaatccgagaggaaaagtagtcgtcacagggggaagaaatctcacaaacgcacatcaaagagtcgggagaggcacaattcacgaagcagaggaagaaatagggaccgcagcagggaccgcagccggggccggggcagccggagccggagccggagccggagccgcaggagccgccgcagccggagccaaagttcctctaggtcccgaagtcgtggcaggaggaggtcgggtaatagagacagaactgttcagagtcccaaatccaaataaactagttttgttcttaaaaaaaaaaaaaaaaaaaaaa

SEQ ID NO: 5967 - DNA, 1623 bp, Homo sapiens
ggggagagaacaaaacagaaactcttggaagcaggaaaggtgcatgactcaaagagggaaattcctgtgccataaaaggattgctggtgtataaaatgctctatatatgccaattaccaatttcctttcatgttcagcatttctactccttccaagaagagcagcaaagctgaagtagcagcaacagcaccagcagcaacagcaaaaaacaaacatgagtgtgaagggcatggctatagccttggctgtgatattgtgtgctacagttgttcaaggcttccccatgttcaaaagaggacgctgtctttgcataggccctggggtaaaagcagtgaaagtggcagatattgagaaagcctccataatgtacccaagtaacaactgtgacaaaatagaagtgattattaccctgaaagaaaataaaggacaacgatgcctaaatcccaaatcgaagcaagcaaggcttataatcaaaaaagttgaaagaaagaatttttaaaaatatcaaaacatatgaagtcctggaaaagggcatctgaaaaacctagaacaagtttaactgtgactactgaaatgacaagaattctacagtaggaaactgagacttttctatggttttgtgactttcaacttttgtacagttatgtgaaggatgaaaggtgggtgaaaggaccaaaaacagaaatacagtcttcctgaatgaatgacaatcagaattccactgcccaaaggagtccaacaattaaatggatttctaggaaaagctaccttaagaaaggctggttaccatcggagtttacaaagtgctttcacgttcttacttgttgtattatacattcatgcatttctaggctagagaaccttctagatttgatgcttacaactattctgttgtgactatgagaacatttctgtctctagaagttatctgtctgtattgatctttatgctatattactatctgtggttacagtggagacattgacattattactggagtcaagcccttataagtcaaaagcatctatgtgtcgtaaagcattcctcaaacattttttcatgcaaatacacacttctttccccaaatatcatgtagcacatcaatatgtagggaaacattcttatgcatcatttggtttgttttataaccaattcattaaatgtaattcataaaatgtactatgaaaaaaattatacgctatgggatactggcaacagtgcacatatttcataaccaaattagcagcaccggtcttaatttgatgtttttcaacttttattcattgagatgttttgaagcaattaggatatgtgtgtttactgtactttttgttttgatccgtttgtataaatgatagcaatatcttggacacatttgaaatacaaaatgtttttgtctaccaaagaaaaatgttgaaaaataagcaaatgtatacctagcaatcacttttactttttgtaattctgtctcttagaaaaatacataatctaatcaataaaaaaaaaaaaaaaaaaatactgtaaaatttaggtatactcaagactagtttaaagaatcaaagtcatttttttctctaataaactaccacaacctttcttttttaaaaaaaaaaaaaaaaaaaa

SEQ ID NO: 5968 - DNA, 1051 bp, Homo sapiens
  misc_feature (276)..(399): n is a, c, g, or t
caccgttttagtggcatttaaatccccggcgctccgccgtctaggtgacgcgcagtcgcccccccaggcagcctaggcggcggcagctgctgcggcgactgcaaaggccgatttggagtgctggagcgaagaagagcaaaagctgcgttctgcgcgcgcccgactccgctgcccgccccgccaggcctccgggaggtgggggctgggaggcgtcccccgctcccgccccctccccaccgttcaatgaaagatgaactggcgagaggacgaatcgcnnnnnnnnnnnnnnnnnnnnnnnnnnnnnnnnnnnnnnnnnnnnnnnnnnnnnnnnnnnnnnnnnnnnnnnnnnnnnnnnnnnnnnnnnnnnnnnnnnnnnnnnnnnnnnnnnnnnnnnnnnnngaggaaggggcgagggaaggtagggagcaaacctatgaagaaacatcgcgttgtcattggaacttccaagcctttgctgttaagagccaggttcttaaatcaacccgccccacacacatgttgcttacatgctgcgttttctcacggtctgttttgcctgaacccatcaacagctgggagattaatcaaccacactgaaaatgtggagggatttatgggggagggggttgaaatgtgggtgtttgaaacaaaagtgtataaacaaatgaattgttgataacttagttattgacctggagactggtagcttattaaagaaactccgtgttactcattcctggagttgggggtttctgtaggcactttatttctccactttcaagagcttgggcttggcccaaatcttagactgtccaattctgcctctattaccaatttaaatctatggcttgaacctgtgcactgaaaatcaaatcctttaaaaagaaagaggagaagaagaagcaaaaaagaaagaaaaaacacttattagaagccctagtcattttttggctttctgttttgttgctgtccattgaagactttgaacatgccgccttaataaatgtattaaaattgaaaaaagaaaaaaaaaaaaaaaaaaaaaaagatt

SEQ ID NO: 5969 - DNA, 2032 bp, Homo sapiens
tatagatgaattgcgcgccgggataactataacagtggacaaacggggcagtacaaagggttaacccgcatatactctaggacagctggcaatcgccggccagaccacggagaagagtgtcaaggaagagacaagcacatgtatgccaagaacttctacggggcaatggcatcgtgggagcgcaggtgcccctgggcgctgggattgctctagcctgtaagtataatggaaaagatgaggtctgcctgactttatatggcgatggtgctgctaaccagggccagatattcgaagcttacaacatggcagctttgtggaaattaccttgtattttcatctgtgagaataatcgctatggaatgggaacgtctgttgagagagcggcagccagcactgattactacaagagaggcgatttcattcctgggctgagagtggatggaatggatatcctgtgcgtccgagaggcaacaaggtttgctgctgcctattgtagatctgggaaggggcccatcctgatggagctgcagacttaccgttaccacggacacagtatgagtgaccctggagtcagttaccgtacacgagaagaaattcaggaagtaagaagtaagagtgaccctattatgcttctcaaggacaggatggtgaacagcaatcttgccagtgtggaagaactaaaggaaattgatgtggaagtgaggaaggagattgaggatgctgcccagtttgccacggccgatcctgagccacctttggaagagctgggctaccacatctactccagcgacccaccttttgaagttcgtggtgccaatcagtggatcaagtttaagtcagtcagttaaggggaggagaaggagaggttataccttcagggggctaccagacagtgttctcaacttggttaaggaggaagaaaacccagtcaatgaaattcaatgaaattcttggaaacttccattaagtgtgtagattgagcaggtagtaattgcatgcagtttgtacattagtgcattaaaagatgaattattgagtgcttaaagattatttttgacttaaaatagtatactttgaacaaatactctaattatgaaaaggaagaacaattccttgtatgcctgtttcccctgcccccagccacctttttgggaggagaccattatggcggggcccctcacagcattctaccaaccatagcacccaccccgagcagcgctggtgctgcagcctgttcgcgctgaccatttctctacaagatacaatatttattatcaggcaagaggacagttccattttaaaataagacttttgtaatcattccaattttgtaatcatttcaaaggccacataacttagttttctctacttacacattcagtataaatatgaagctattttctgttcatatcaaacattaactacaaggcacattccgtatcagttttggtgtttctcaaattgaagtaccataccagttctgaggcagtgtcccagcttccatgtttgttaaataccccttgtttgtttcaccattccagcaagtgctgaagggtgtactttttttgagacagggtcgggctctgttgcccaggctggagtgcagtggtgtgatcatggctcactgcagcctccacacctcctgggctcaagcaatcctcccacctcagcctcctgcatagctgggaactacagtgaatttcctaatattccgggaggtcaaaacccaaggctcactggtttcacaatacacacagttctatgtttataaataacaggttttcaaaagaaactccggacagtaattaaaacaagttcttaaactattaatttgaacaaatggcattttttaatatgtaaaaccccgccggaattcgtggtatacccttacacgaagctttaacaaaaacatgtaacggggggggggaacacttctggcaacaacttaaccttgaattgggaattcaagcccttggccctttgggtttttcgggagccctcccctggaacccctttttgtgtaaatggggac

SEQ ID NO: 5970 - DNA, 1251 bp, Homo sapiens
  misc_feature (16)..(16): n is a, c, g, or t
  misc_feature (19)..(19): n is a, c, g, or t
gggggcaccgacagcnctncgagccaggctctgggtagtggctgaggccagaggccatcgcctgcccctgtccaactgagatggccttcaggagcctaggtttgaacagcagatgctgtcccaggaagggctagggacatcggaggggacctgcccccgcaccctctgctcagcccctggactcagccttgcctgtcttttcctgctgctcccagggggaggtgtcagacctcgggaggcagacgggaccagagccaggctgttcactgtgggcccacttgccccactgtgctagggcgcgggaggagagagcactgtggtcgccctctgcagccactctggctcccaagacttccctgactcccccactcccctccttgccaggggcacacccggaccccacacggcaggcccctctcttgggaggggcctttggaatgatgaaattccaaccctgctgcccggtcagcggtaccgtttcctgccctctctctgagaggccctttctggagtcctgggaaggtgtctgcctggccgcgctgccagatcagtacatcttttgtaaaaaccctgaaatgggcagggaagaaaacagggatttcccctctctagatccctgccaggtccctctccaggaggcccctctgctctcctgaagggtggtccctgagggtctgcccagccttggacgagaggttggttccagcccctggcagggcttccttccaagggcccctgcagcctaccaactgggcctcgggcgactcaaaataagtgctcttgggggtggctctaccccattacctcccccagccacaactcctggccttcgacttctggctgggttagccagaccctggtttctctaccctgatgttgcatgagacctggtaacagtgtctccctcccagctccttgccaaagcctctgttgagacctgggcttcttgtagccccttctccctctggccagctgcacagcctgtgggaggtgcccggcccaggctgggtgtgggggaagctggtccctgctgtgggtggcgctggggacctaggggctccttctgaggttggccttgtggcctctgggctgtatgcctctggggtgtagggaagaagcgggcgcaatctgtgaggcctcaacagactgggcaccgtactcaggtgtgtactcccgttccgatgtgcgacctgataacatgacggaagaggcgacctctttcgagctagacttcttggtcgtagtcatagc

SEQ ID NO: 5971 - DNA, 2860 bp, Homo sapiens
  misc_feature (2077)..(2077): n is a, c, g, or t
  misc_feature (2088)..(2088): n is a, c, g, or t
  misc_feature (2628)..(2653): n is a, c, g, or t
aggaggaggaggaagatcaggaggaggaggaagaagaggaaaaaagagaaaaagaagaaatatcacagaaaaaaaaattcttcgttgtctagactgggctttttttcccccctaaaaaatagcatattggagaattgggagaagtctctttggtttggaaaaaaaaaaaaggaatcttcagcctagatcactttcttatccggactgggatattaaatatacgacacatccaggagtttattggagcgcagactgatggcgcaaaggtacgatgagctgccccattacggcgggatggacggagtaggggttcccgcttccatgtacggagaccctcacgcgccgcggccgatccccccggttcaccacctgaaccacgggccgccgctccacgccacacagcactacggcgcgcacgccccgcaccccaatgtcatgccggccagtatgggatccgctgtcaacgacgccttgaagcgggacaaggacgcgatctatgggcacccgttgtttcctctgttagctctggtctttgagaagtgcgagctggcgacctgcactccccgggaacctggagtggctggcggagacgtctgctcctccgactccttcaacgaggacatcgcggtcttcgccaagcaggttcgcgccgaaaagccacttttttcctcaaatccagagctggacaatttgatgatacaagcaatacaagtactaaggtttcatcttttggagttagaaaaggtccacgaactgtgcgataacttctgccaccgatacattagctgtttgaaggggaaaatgcccatcgacctcgtcattgatgaaagagacggcagctccaagtcagatcatgaagaactttcaggctcctccacaaatctcgctgaccataacccttcttcttggcgagaccacgatgatgcaacctcaacccactcagcaggcaccccagggccctccagtgggggccatgcttcccagagcggagacaacagcagtgagcaaggggatggtttagacaacagtgtagcttcacctggtacaggtgacgatgatgatccggataaggacaaaaaacgccagaagaaaagaggcattttccccaaagtagcaacaaatatcatgagagcatggctcttccagcatctcacacatccgtacccttccgaagagcagaagaaacagttagcgcaagacacaggacttacaattctccaagtaaacaactggtttattaatgccagaagaagaatagtacagcccatgattgaccagtcaaatcgagcaggttttcttcttgatccttcagtgagccaaggagcagcatatagtccagagggtcagcccatggggagctttgtgttggatggtcagcaacacatggggatccggcctgcaggtttgcagagcatgccaggggactacgtttctcagggtggtcctatgggaatgagtatggcacagccaagttacactcctccccagatgaccccacaccctactcaattaagacatggacccccaatgcattcatatttgccaagccatccccaccacccagccatgatgatgcacggaggaccccctacccaccctggaatgactatgtcagcacagagccccacaatgttaaattctgtagatcccaatgttggcggacaggttatggacattcatgcccaatagtataagggaactcaagggaaaaggaaacacacgcaaaaactattttaagactttctgaactttgaccagatgttgacacttaatatgaaattccagacagctgtgattattttttacttttgtcatttttcatcaagcaacagaggaccaatgcaacaagaacacaaatgtgaaatcatgggctgactgagacaattctgtccatgtaaagatcctctggaaaaagactccgagagttataactactgtagtataaatataggaactaagttaaacttgtacatttctgttgatcacgccgttatgttgcctcaaatagttttagaagagaaaaaaaaatatatccttgttttccacactatgtgtgttgttcccaaaagaatgaccngtttggttcancagtgaattcaccatccaggagagactgtggtatatattttaaacctgttgggccaatgagaaaagaaccacactggagatcatgatgaacttttggctgaacctcatcactcgaactccagcttcagaatgtgttttcatgcccggcctttgttcctccataaatgtgtcctttagtttcaaacagatctttatagttcgtgcttcataagccaattcttattattatttttgggggactcttcttcaaagagcttgccaatgaagatttaaagacagagcaggagcttcttccaggagttctgagccttggttgtggacaaaacaatcttaagttgggcagctttcctcaacacaaaaaaaagttattaatggtcattgaaccataactaggactttatcagaaactcaaagcttgggggataaaaaggagcaagagaatactgtaacaaacttcgtacagagttcggtctattaattgtttcatgttagatattctatgtgtttacctcaattgaaaaaaaaaagaaaaaaaggacnnnnnnnnnnnnnnnnnnnnnnnnnntggtattgtatgtccatgaattcttcttttctcagcacgtgttcctcactagaagaaaatgctgttacctttaagctttgtcaaatttacattaaaatacttgtatgaggactgtgacgttatgttaaaaaaaaaaaggtgttaagtcacaaaaagcggtaataaatatttcatttttgaaaaaaaaataaaaaaaaaaaaaaaaaa

SEQ ID NO: 5972 - DNA, 2785 bp, Homo sapiens
  misc_feature (1479)..(1496): n is a, c, g, or t
gctcggcgctgtagccgccgctgccgccgctgctcttggctcggggacgcgggcgggcgctccgagaggctctggtgcctgcggctgctgctctcctccgacgcccggggctgcggcgctccgggtcccggcccctgtcccggcatctctcgggtccctgagccccggccacgggtcccgcgtccggccggagagaacgcactcagctgctcgagccgccccgggctcgcgcccccgggccatgaagaggggcccgtgaggcgcgcgcggagtcggaggaagaggagggaggagggaggccgagggggagggcgcgggaggcggaggatgccgccgcggctgctgccgccgccgccacccgcgggtccccggcgaccctgactccagacccgaggatggagccggcgctgggcgctgcagctgctcccggcgcgtccccgaccaggtagctggtgtcacttcggtgtggttggaagaagactttctccccagctgcattcccggaggcgccctttcgacctggaggccgggtctgctggccacagggctgccgcactggctgggactgccagctgggcctggagacgctggtggctgtggactccccagcttggagcagtccctctttgacctcaccccttggagaagcagccccatgaaggtgcccagccatgcaatgttcctggaaggccgtcctcctccttgccctggcctccattgccatccagtacacggccatccgcaccttcaccgccaagtcctttcacacctgccccgggctggcagaggccgggctggccgagcgactgtgcgaggagagccccaccttcgcctacaacctctcccgcaagacccacatcctcatcctggccaccacgcgcagcggctcctccttcgtgggccagctcttcaaccagcacctggacgtcttctacctgtttgagcccctctaccacgtccagaacacgctcatcccccgcttcacccagggcaagagcccggccgaccggcgggtcatgctaggcgccagccgcgacctcctgcggagcctctacgactgcgacctctacttcctggagaactacatcaagccgccgccggtcaaccacaccaccgacaggatcttccgccgcggggccagccgggtcctctgctcccggcctgtgtgcgaccctccggggccagccgacctggtcctggaggagggggactgtgtgcgcaagtgcgggctactcaacctgaccgtggcggccgaggcgtgccgcgagcgcagccacgtggccatcaagacggtgcgcgtgcccgaggtgaacgacctgcgcgccctggtggaagacccgcgattaaacctcaaggtcatccagctggtccgagacccccgcggcattctggcttcgcgcagcgagaccttccgcgacacgtaccggctctggcggctctggtacggcaccgggaggaaaccctacaacctggacgtgnnnnnnnnnnnnnnnnnntgcgaggacttctccaactccgtgtccaccggcctcatgcggcccccgtggctcaagggcaagtacatgttggtgcgctacgaggacctggctcggaaccctatgaagaagaccgaggagatctacgggttcctgggcatcccgctggacagccacgtggcccgctggatccagaacaacacgcggggcgaccccaccctgggcaagcacaaatacggcaccgtgcgaaactcggcggccacggccgagaagtggcgcttccgcctctcctacgacatcgtggcctttgcccagaacgcctgccagcaggtgctggcccagctgggctacaagatcgccgcctcggaggaggagctgaagaacccctcggtcagcctggtggaggagcgggacttccgccccttctcgtgacccgggcggtgcgggtgggggcgggaggcgcaaggtgtcggttttgataaaatggaccgtttttaactgttgccttattaacccctccctctcccacctcatcttcgtgtccttcctgcccccagctcaccccactcccttctgccccttttttgtctctgaaatttgcactacgtcttggacgggaatcactggggcagagggcgcctgaagtagggtcccgccccccccaccccattcagacacatggatgttgggtctctgtgcggacggtgacaatgtttacaagcaccacatttacacatccacacacgcacacgggcactcgcgaggcgacttctcaagcttttgaatgggtgagtggtcgggtatctagtttttgcactgtcttactattcaaggtaagaggatacaaacaagaggaccacttgtctctaatttatgaatggtgtccatcctttccccatccctgcctcctgcccctgacgcccatttccccccttagagcagcgaaactgccccctcctgcccgcccttgcctgtcggtgaggcaggtttttactgtgaggtgaacgtggacctgtttctgtttccagtctgtggtgatgctgtctgtctgtctgagtctcgtggccgcccctggaccagtgatgactgatgaatcttatgagcttctgattgatctcggggtccatctgtgatatttctttgtgccaaaaagaaaaaaaaagagtggatcagtttgctaaatgaacattgaaattgaaatgctttatctgtgttttctgtaaataaaagagtgcaataatcaaaaaaaaaaaaaaaaaaaaaaaaaaaaaaaaaaaaaaaaaaaaaaaaaaaaaaaaaaaaaaaaaaaa

SEQ ID NO: 5973 - DNA, 5607 bp, Homo sapiens
cggctcggccgcggggcgcgcaggcggctgctgggcggcctcggtgcgcgcctcccgccttcccagagacgtggcgcgaggcccgggccctgagcacctatcgcggggatccccggcgccaggagggggtgcagccggtgggcagcgccgcgcagggaggggccgcagcatcctcgccccccagcgcgcccgggcccgagaggaggaggccggggctctccgggcctcccgccgcttagcctgatgctggaaggacgaaggtgagtgaagatggcagagaggacgtgaccagcactcacccttgtccacctgcccagtggcaccgccatgcagaagcccagcggcctgaagccccccggccgtggggggaagcactccagccccatgggccggacatctactgggtcagcttcatcctcggcggcggtggccgctagctccaaggaaggctccccactgcacaaacagtcatctggaccctcctcctccccggccgcagctgctgcccccgagaagccgggccccaaggcggcggaagtgggggatgacttcctgggggactttgtggtgggcgagcgggtgtgggtgaacggcgtgaagccaggcgtggtgcagtatctgggagagacgcagttcgcaccgggccagtgggctggcgtggtgctggacgacccggtgggcaagaatgatggcgcggtgggcggcgtgcgctacttcgagtgcccggccctccagggtatcttcacgcggccctccaagctgacccggcagcccacggccgagggctcggggagtgatgcccactccgtggagtcgctgactgcccagaacctgtcattgcattcgggcacggccacgcccccgctgaccagccgcgtcatccccctgcgggagagcgtcctcaacagctccgtgaagactggcaacgagtcgggatccaacctctcagacagcggctctgtgaagcggggcgaaaaggacctgcgcctgggggaccgcgtgctggttggcgggacgaagactggcgtggtgcggtacgtgggggagacagactttgccaagggcgagtggtgtggcgtggagctggacgagccccttgggaagaatgatggggcggtggcgggcaccaggtacttccagtgcccacccaagtttggtctcttcgcgcccatccacaaagtgatccgtatcggcttcccatctaccagcccagccaaggccaagaagaccaagcgtatggccatgggtgtgtcagcactgacccacagtcccagcagttcctccatcagctccgtcagctctgtggcctcctccgtggggggtcggcccagccgcagtggcctgctcacggagacctcttcacgctacgcccgcaagatctcgggcaccacggccttgcaggaggcactgaaggagaagcagcagcacattgagcagctgctggctgaacgagacctggaacgggctgaggtggccaaggccacaagccacatctgcgaggtggagaaggagattgccctgctcaaggcacagcatgagcagtatgttgcagaagccgaggagaagctgcagcgagcccggctgctcgtggagagcgtgcggaaagagaaggtggacctgtccaaccagctggaggaggagaggaggaaggtggaggatctgcagttccgcgtggaggaggagtccatcaccaagggagacctggagacccagacgcagctggagcacgcgcgcattggggagctggaacagagcctgctactggagaaggcgcaggccgagcggctgctccgagaattagcggacaacaggctgaccacagtggccgagaagtcgcgcgtgctgcagctggaggaggagctcaccctgcgccgaggtgaaatcgaggagctccagcagtgcctgttgcactcgggtcccccacctccggaccacccagacgccgccgagatcctgcggctacgggagcggctgctctcggccagcaaggaacaccagagggagagtggggtgctgcgggataaatacgagaaggccctgaaggcctaccaggcggaggtggacaagctccgcgcggccaacgagaagtacgcacaggaggtggcgggcctgaaggacaaggttcagcaggccaccagcgagaacatggggctaatggacaactggaaatccaagctggactcgctggcctcggaccaccagaagtccctggaggacctcaaagccaccctgaactcgggcccaggcgcccagcagaaggagatcggcgagctgaaggcagtgatggagggcatcaagatggagcaccagctggagctgggtaacttgcaggccaagcatgacctggagaccgccatgcacgtgaaggagaaggaggccctgcgagagaagctgcaggaggcccaggaggagctggctgggctgcagcggcactggcgggcccagctggaggtgcaagccagccagcaccggctggagctgcaggaggcccaggaccagcgccgggatgccgagctgcgtgtgcacgagctggaaaaactggacgtggagtaccggggccaggcgcaggctatcgagttcctcaaggagcagatctcgctggccgagaagaagatgttggactacgagcggctgcagcgggcagaagcccagggcaaacaggaggtcgagagtttgcgggagaagctcctggtggctgagaacagactccaggcggtcgaggccctgtgctcctcccagcacacccacatgattgagtcgaatgacatttcagaggagacgatcaggacgaaggaaactgtggagggcctgcaggacaagctgaacaagagggacaaagaggtgacagccttgacctcccagaccgagatgctcagggcccaagtaagtgcgctggagagcaagtgtaagtcaggcgagaagaaggtggacgccctcctgaaggagaagcggcgcctggaggcagagctggagaccgtgtcccggaagacccatgacgcctcgggccagctagtcctcatcagccaggagctgctgcggaaggagcggagcctgaacgaactgcgggtgttgctgctggaggccaatcgtcactccccagggccggagagggacctgagccgtgaggtacacaaggctgagtggcggatcaaggagcagaaactcaaggatgacatccggggcctgcgtgaaaagctgaccgggctggacaaagagaaatccctgtcggatcagaggcgctactccctcatcgaccggtcctcggcgcccgagcttctgcggctgcagcaccagctgatgagcacggaggacgccctgcgggatgcgctggaccaggctcagcaggtggagaagctgatggaggccatgaggagctgccctgacaaggcccagaccatcggcaattccggttctgcaaacggcatccaccagcaggacaaagctcagaaacaagaggacaagcactgatcctgaggggatactgtggagcagcccagtccacaccagagccccacgcggctgcccggcagtacctcctccaggcaggagccgggactgtcactttggagacaaaacagtgtttgtaacaataacgtactcaccgccgcggacaatcccccaccccgatccctcgccagaccaggacgcttcctcaagcccagccttctacagagagtgtgaacggtacagccctggcctgacccggggaccttcagcctggacacccggcagcttctggagtttgtcagtggaggcagaggggatccggccaggcccctctgtccagaaggagctgccctgaggaccatcttagcggccctgtcctctttttccgcccattctccctcgggtctccccagaggggccggcgggggctggggagggggtaagtttatccatgcagacaccaagggggagcatccagtctttaagagccaagtgggggccccttttccgaagccacttccaggccaaggcagtcgccagggcttcttgtccccaccttctgaaccttcttcaaacagtagtacaagctcccctcagccagcctgcctgcccagcgaggcccccaggttcaaggtgttggcgggggcggagggcaggggaacgggatccttctcccgctgcccaccaacaccaacacacacacacctctaagctgctggccgaagatgtcaccaaggccaaagacacagtattatgaaggtttggaaacccctctcctcacctcccaccgtgaccttgggcaaaccctggctcggagcccagggcagaggcagctcagagtggaggctctaggcaggtttgacaaaggtcagtaatacggtttcccctggggttgaccggcatgttgcaaaatatctgcatccacctggagatgcagctaagtgggtccttatgtacacaccacgttcacacacacacagagggaccacgtgtgcacgcatgaccgtgtgggtggcggcgtttgctgtgaaccatgctcaggccacacagagacacatacttggtttctgggactgagacccaggcctggcaggaccgtgcctacagatactgcaaacgttcctacagcctagaggtgcgtatacacacccaagtacacgcagccaggcattcaggggtgtgtttgccacatggagcatcccttcctggtcttgccaggcacctgcacagagcgtctccagccccatctcctaacgggggctgggggtaagagaaatctaactgcgctcccccaacccctcgccctgccatcttcccctcaagcctgctaagttatcccaggcctgtgcgtggtggaagaagccagccttggccctgcagcctccacctcgccgctgggggaccaacaggttgcttacagctttgcaccccggcatcagcacaggggtccctgccccaccctccggcagctcagggagtgttttcctgtgaggcctcccccatcagtggaccagagggagaagcccgatgccccatcccggctttcccgtaacgcacaggacacgtgtgcaattcataggaacggcccagatcgccctcatgagtgccacctggtacaggtaggtggcgctcacgttcctgcccaaatgcagcccatcggggagtcacagtcagtccccccggcccccctcccagtccctgttggctttcggtagctctcgcatgcagttctattaacagccgtctagaagcgatgctttagtggcctaacccagggtcaaatacagctctttctagcaaaatcaggcagctctgccccatcggtaggggcaccgattagtctactaacagccagaggtccatctaggagggtgccgggaggagctgagcccccggaggtgggctcctggtgacgggtgtccaagaagcggtttccttgggagcttctgcctccgtgggcctctcagcccgccccgtgtggccgcccgggtgtggctcagccatgtcccctccccaggtccttcattcacccctcccctccccacagtggaattgttgaagtgtggcgagtctgtgctcgggacaataaagcttgtgacaggtccaggaaaaaaaaaaaaaaaaaaaaaaaaaaaaaaaaaaaaaaaaaaatgcggcatt

SEQ ID NO: 5974 - DNA, 1699 bp, Homo sapiens
  misc_feature (425)..(442): n is a, c, g, or t
gaagcacatctggacagctgtgcggcctccttgcgggccgacgtcagccgagcacgtcccccacgtcctctccttctcgccacttattatttattcgttttcccaaagaagcgactagggacccaagtttaaaaattcctccccccactcaatgcgagacgtggccagatcccatccaacacacggtttaattttcatggggctctgggatcaaaagaacagaaacagcaacaacaaaagcccagccgctgtctgattttaagctggcaaagtgggaaaaataaagtgttgagtaaacagaccaagttggatcatggggaatttcagaggtcatgccctccctggaaccttcttttttattattggtctttggtggtgtacaaagagtattctgaagtatatctgcaaaaagcaaaagcgaaccnnnnnnnnnnnnnnnnnnaaacattattctatcgattggaaattttggagggaattacaatagttggcatggctttaactggcatggctggggagcagtttattcctggagggccccatctgatgttatatgactataaacaaggtcactggaatcaactcctgggctggcatcatttcaccatgtatttcttctttgggctgttgggtgtggcagatatcttatgtttcaccatcagttcacttcctgtgtccttaaccaagtaaatgttgtcaaatgccttatttgtggaggcctttatcttctacaaccacactcatggccgggaaatgctggacatctttgtgcaccagctgctggttttggtcgtctttctgacaggcctcgttgccttcctagagttccttgttcggaacaatgtacttctggagctattgcggtcaagtctcattctgcttcaggggagctggttctttcagattggatttgtcctgtatccccccagtggaggtcctgcatgggatctgatggatcatgaaaatattttgtttctcaccatatgcttttgttggcattatgcagtaaccattgtcatcgttggaatgaattatgctttcattacctggttggttaaatctagacttaagaggctctgctcctcagaagttggacttctgaaaaatgctgaacgagaacaagaatcagaagaagaaatgtgactttgatgagcttccagtttttctagataaaccttttcttttttacattgttcttggttttgtttctcgatcttttgtttggagaacagctggctaaggatgactctaagtgtactgtttgcatttccaatttggttaaagtatttgaatttaaatattttctttttagctttgaaaatattttgggtgatactttcattttgcacatcatgcacatcatggtattcaggggctagagtgatttttttccagattatctaaagttggatgcccacactatgaaagaaatatttgttttatttgccttatagatatgctcaaggttactgggcttgctactatttgtaactccttgaccatggaattatacttgtttatcttgttgctgcaatgagaaataaatgaatgtatgtattttggtgcaaaaaaaaaaaaaaaaaaaatggccctctttggcctcatcgggggaagctcttgggccggttccctttagggagggctaattccatgacacctcccttactgactcgttgggttcggcactaaggatggagga

SEQ ID NO: 5975 - DNA, 1911 bp, Homo sapiens
  misc_feature (1869)..(1870): n is a, c, g, or t
  misc_feature (1872)..(1872): n is a, c, g, or t
ggagctgcgggctgcgtggccgggatgagcgccagcacgggcggtggtggggacagcggcggcagcggcggcagtagcagcagctcacaggcctcctgcgggcccgagtcctcgggctccgaactagccctggccacaccggtgcctcagatgctgcagggccttctgggctccgacgacgaggaacaggaagaccccaaagactactgcaagggcggctaccaccctgtgaagatcggcgacgtgttcaatgggcggtaccacgtggtgcgcaaactgggctggggccacttctccaccgtctggctctgctgggacatccagcgcaagcgctttgtggccctcaaagtggtgaagagtgcggggcattacacggagacagctgtggatgagatcaagctcctgaaatgtgtccgggacagcgaccccagtgaccccaaaagagagaccattgtccagctcattgatgacttcaggatctcaggagtcaatggagtccatgtgtgcatggtgctggaggtgctgggccaccagctcctcaaatggatcatcaagtccaactaccagggcctgcccgtgccctgcgtgaagagcatcgtgaggcaggtgctgcacggcctggactacctccacaccaagtgcaagatcatccacacggacatcaagcccgagaacatcttgctgtgtgtgggggacgcttacatcaggcgcctggctgccgaggccacggagtggcaacaggcaggggcgccgcccccctcccgctccatagtcagcactgccccccaggaggtcttgaccggtaagctgtccaaaaacaagaggaagaagatgaggcgcaaacggaaacagcagaagcggctgctggaggagcggctgcgggacctgcagaggctggaggccatggaggctgccacccaggctgaggactctggcttgagactagacgggggcagcggctccacatcctcttcaggcttctccggctccctcttctctcctgcctcctgctccatcctctccggctcgtccaatcagcgagagaccgggggcctcctgtcgcctagcacaccattcggtgcctcgaacctcctggtgaaccccctggagccccaaaatgcagataagatcaagatcaagatcgcagacctgggcaacgcctgctgggtgcacaagcacttcacggaagacatccagactcggcagtaccgggccgtcgaggtgctgatcggcgccgaatacggccccccggcagacatctggagcacagcctgcatggccttcgagctggccactggtgactacctgttcgagccgcattctggagaagactacagtcgtgatgaggaccacatcgctcacatagtggagcttctgggggacatccccccagccttcgccctctcaggccgctattcccgggagttcttcaaccggagaggagagctgcggcacatccacaatctcaagcactggggcctgtacgaggtactcatggaaaagtacgagtggcccctagagcaggccacacagttcagcgcctttctgctgcccatgatggagtacatccccgaaaagcgggccagtgccgctgactgcctccagcacccctggctcaacccctaggcccggctgtggctccacctccagctctccgtgccttaagggaaaagcgggacagctcccaccaccctgctgggcgccagttctccacaaccacagggcagagagacgctggagccaggcccggctctcagagcgtgttctgcctgagacccccgtgagggctctcggagaaagtgtgtgtattcctttcttaataaagtgtggactgaaaaaaagtgcctggagtgagggaggcacacgccnnanaaaaaaaaaaaaaaaaaaaaaaaaaaaaaaaaaaaaaaa

SEQ ID NO: 5976 - DNA, 1510 bp, Homo sapiens
  misc_feature (40)..(47): n is a, c, g, or t
  misc_feature (54)..(56): n is a, c, g, or t
  misc_feature (79)..(79): n is a, c, g, or t
  misc_feature (108)..(108): n is a, c, g, or t
  misc_feature (110)..(111): n is a, c, g, or t
  misc_feature (156)..(156): n is a, c, g, or t
  misc_feature (446)..(446): n is a, c, g, or t
ccggatttatccccctctccttgtactcgtttttttcttnnnnnnnnatgtttnnncactgaagcatatctactttttnacgaccggatcgtcttagttttttcgccntnngcctgaaaacaccgggcggcagccgcgggtagagtcgtctaccgngaaattttcaatctaatatgattgtggctacactgctactgttttgttgaggatagtgggcctagagttaattcaacacagtgcaaccaccgcgcgcgcacagccgtgagtcggtgcacacgcaatgagagacgacaaatgttggaaactcggcctgcgcacaaggcgcggtgtgccactaggagtggtcggtacgcccccccaattatcactagcgacttagtacctccaagagattcgcagaagaaggaggctctataatggactgctacttgtcgggcctgggtgtnttttcttccacagcgttaagattttttatcatttcatccaaggagaccaaaggagaggagagggggtttggaggtgtgcactgcccgggagctcggattaccagattataatatttttaccaaccactgaccgcctggcacatctattcgccctaagtgtgttagacgtttcctctcacgtctagtaatagcgtcgatttggaggcggtgagcccgcacgctgctcgtatatcattcttgctacttcgcgcccaagctcacaaatgtctcccgccaaacttattcttcctctgcggctttaattttatattattcaccgttcgataaatgaaaccgactggggactgatcgttatccgagggcggggtgacgcacatagcggggggtgggggtgccgcctgtaaatgcttcgccccatacccattctcaggggggccaggtgcgtattgggcggtttaaggggttattcgtctctattggcccttctacaaaactttcccttctgggggcatggtccccaacgggccgcatgcttcctcctctcctacccactggtctgcttaaagcttccctctcagctgctgggacgatcgcccaggctggagctggccccgcttggtggcctgggatctggcacactccctctccttggggtgagggacagagccccacgctgttgacatcagcctgcttcttcccctctgcggctttcactgctgagtttctgttctccctgggaagcctgtgccagcacctttgagccttggcccacactgaggcttaggcctctctgcctgggatgggctcccaccctcccctgaggatggcctggattcacgccctcttgtttccttttgggctcaaagcccttcctacctctggtgatggtttccacaggaacaacagcatctttcaccaagatgggtggcaccaaccttgctgggacttggatcccaggggcttatctcttcaagtgtggagagggcagggtccacgcctctgctgtagcttatgaaattaactaattgaaaattcaaaaaaaaaaaaaaaaaaaaaaaaaaaaa

SEQ ID NO: 5977 - DNA, 1518 bp, Homo sapiens
  misc_feature (557)..(574): n is a, c, g, or t
  misc_feature (1333)..(1348): n is a, c, g, or t
ggtcagccaattagagctccagttgtcactcctacccacactgggcctgggggtgaagggaagtgtttattaggggtacatgtgaagccgtccagaagtgtcagagtctttgtagctttgaaagtcacctaggttatttgggcatgctctcctgagtcctctgctagttaagctctctgaaaagaaggtggcagacccggtttgctgatcgccccagggatcaggaggctgatcccaaagttgtcagatggagagtaaatacaaggagatactcttgctaacaggcctggataacatcactgatgaggaactggataggtttaagttctttctttcagacgagtttaatattgccacaggcaaactacatactgcaaacagaatacaagtagctaccttgatgattcaaaatgctggggcggtgtctgcagtgatgaagaccattcgtatttttcagaagttgaattatatgcttttggcaaaacgtcttcaggaggagaaggagaaagttgataagcaatacaaatcggtaacaaaaccaaagccactaagtcaannnnnnnnnnnnnnnnnntgcacttgcactctaaggaagctgaggtgcggggagccgtgctgcaccaaaagtctctcctcatgttaagcctgaacagaaacagatggtggcccagcaggaatctatcagagaagggtttcagaagcgctgtttgccagttatggtactgaaagcaaagaagcccttcacgtttgagacccaagaaggcaagcaggagatgtttcatgctacagtggctacagaaaaggaattcttctttgtaaaagtttttaatacactgctgaaagataaattcattccaaagagaataattataatagcaagatattatcggcacagtggtttcttagaggtaaatagcgcctcacgtgtgttagatgctgaatctgaccaaaaggttaatgtcccgctgaacattatcagaaaagctggtgaaaccccgaagatcaacacgcttcaaactcagccccttggaacaattgtgaatggtttgtttgtagtccagaaggtaacagaaaagaagaaaaacatattatttgacctaagtgacaacactgggaaaatggaagtactgggggttagaaacgaggacacaatgaaatgtaaggaaggagataaggttcgacttacattcttcacactgtcaaaaaatggagaaaaactacagctgacatctggagttcatagcaccataaaggttattaaggccaaaaaaaaaacatagagaagtaaaaaggaccaattcaagccaactggtctaagcagcatttaattgannnnnnnnnnnnnnnncctcttcaatcagattgtaagttacctgaaagctgcagttcacaggctcctctctccaccaaattaggatagaataattgctggataaacaaattcagaatatcaacagatgatcacaataaacatctgtttctcattccaaaaaaaaaaaaaaaaaaaaaaaaaaaaaa

SEQ ID NO: 5978 - DNA, 487 bp, Homo sapiens
ttttttttttttttttttttttttttttttttttttaagagcaggatgataatttactttcaacttctaacaggatttgtaaacaccatgataaatggggagaggcacaacgctgcattcctccagcgggtcctctgaacacaccacgtttcggcatcagttggcttaaatcattcatttcaaatcaggactgaaattctccagtgttcctgtcaggcacccttcccatctgatcccctggaaaggatatgtcagtcgaagtcacaggtaacacggtgtattaagacttgagagcgttgatatcaaatccattaactatgcttttggttgaaggcggtactgacaatatgtagtaagcaaagggacgattttgggaaaaggggaaaaatgttgaaggttctaatggcaagagtttaggcgtgtcttcaaatgtgctagaactttgtgcctcctgtgttcatgctctgtccttgctgcttttgtatcc

SEQ ID NO: 5979 - DNA, 3067 bp, Homo sapiens
  misc_feature (270)..(350): n is a, c, g, or t
  misc_feature (1310)..(1324): n is a, c, g, or t
aggagcaattgtggctgcagagggaggggaggacagggggtggatagaaggagactccaagctgaatagccagaaagaaataaatgctttagaattctcacgctaagcaagtagggttaatttctgctggtggtttctactctgtggtgctcttttgttgtttcagtaaccagaacacatgatgttttaaagaaggcaaggactaacttagaggtaaggaaactactgcaccagtcagaggcaccaagcctgtcccccacccatcaccannnnnnnnnnnnnnnnnnnnnnnnnnnnnnnnnnnnnnnnnnnnnnnnnnnnnnnnnnnnnnnnnnnnnnnnnnnnnnnnncaggtcctcagtgagcatcctgctagtttctgtccctatcaccctcccaccccgtcagctcctgcccctgtatcttggttcactctcacattgtcatcatctctcctttttactccaatttttcttctttgaggccaagttcagagactggagaaatgcaattcagctgactcttgaagtcattagacattcgggagtctgcctctgaatgagcttctagtagagggatcttgaggccagttatgtgttctactcttcatgaaaaagtaaaagcaatttgcaacctaataaactgatttcactgcacattcccgggttaagaacagcgatttgattttgctgtatctttaagtaacatgacaaaagagatctgttgggtctcattggtctaaaagcaaatttgttaataaataacaactgaaccttcagggaaaaaatgttatatatgtaccagacattatctacatttacttaaaacactaagtgttaatcattccctaggaagtgctttgaagaaaaacttgaggtatatgaaatggttaaaaatcagaaactaaaccttttaacatggacatcaaagctttgccataagcaattcagcatattcctagaaatgtttctaatccataacctgagagaatgttgatctccatagtgtgaaaatgacttgggccagtttaacttgctcttttttttattttttcactaattcccttttgtttttctctgataattcttctctttcctgagcctctttagagcagcacttacaggattgcctctgtaaagccttattcctgtcccagaaaaggtaacccaaaaagtctctagtatccactaaaaggtaacccaaaaatctctagtatccactggctttctccagtgtggaagctttcccctccacctcccatagatcactggaaaggacccgaggcctcggttctaatccctggcttatcnnnnnnnnnnnnnnngctttggcttgtcccttagtctctgtgagactgctgcaccctcatctgtcaaagatggaactgaacttagttgagctctgaggtccctgtggacttggcccctccacaccctcattatggcaactggacataaacttaacagaggacttcccagcaaaatgtcctcttcttcctacaaacaggctgtttctatatgtgcatgtttcatgctaagcacttctttcttgggtggagatggcaaaggcctctttctgctgagacaaagtgatttggagagtcacctggcccctgaagggggagtggtaggatccagccacccagtgtgcagtgaattggagcagggatctcagcacacagggaggtggggaggctccccctaacctcgggcacctgttgctcctccagactgcagcgcatgctcttagctcatcctcttaactggctctcaccgtgctcctggctttggtcaccacgtagctctcactccagcttcaggtagccatcagtaggacctggcaatatacactgatttggtttgttttatgtttgtctgcaggtgaaatccctaagggctctgccgtgtactccagccttgtgacccttgccttccaggaaccatgcaagaagcgcagccaccagaagtccttaaaacagcaggaaaggtgagcctgtcccccttttgtgcagctacctatctgctgaggagcatctgggcctcattcctccaagtccactggagggtccagaagagggagtcagagatgtatcctggtggagctgggagaaaggcagaaagcctttgtgacagctatggaataccgttagccaaggtccacttggcccagcactaagcaaaagatgcgtagtttgcacagaaggttttgtgatactgcctctcaacagccccagcagcttgggaactagcaagagcacatttcttgcctcatcagctgtcctgagatggaaaactcagtggatataggaccctgattccgatgaaaggggcacgtggtcccaatgctggagctcctctggcaggttctaaaagcacactacggagcagcggtgccctgccggacactgctggcgggggctcagtgagcactactcacagatccacacctgaccctgttgggtcgagtcaggctgggctttggtctgcactgtagcacctgtgttctttgagttcacatcatgaatgtggtgatttcccagataccatctcaggcttaacctagcacatcctatttcttttcttctatgatatccaaattggactgacctcacttcaaagttgctgtcccattttgtcaccctatcttatctcggggaaattgcagactgatggccagaccaactctgttgaaattcttgcatagagcaaacctgtgctcatttttaagtggcatgggagaggccccaagcctagtaaagcctagtctgtgtcttcacagtgctggtagaatgtgtttgtgtgtataaatatatgatatagatttatatatgttgctaacgccatatattgaaggccaacataactggtggacagggtgggtgacagaaaatgaaagtctttttggtgattgtttaagcaagatgtgtataaagaaataaatagtttttctttcaaaaaaaaaaaaaaaaaaaaaaaaaaaaaaaaaaaaaaaaaaaaaaaaaaaaaaaaaaaaaaaaaaaaaaaaaaaaaaaaaaaaaaaaaaaaaaaaaaaaaaaaaaaaaaaaaaa

SEQ ID NO: 5980 - DNA, 3529 bp, Homo sapiens
  misc_feature (84)..(84): n is a, c, g, or t
  misc_feature (117)..(117): n is a, c, g, or t
  misc_feature (123)..(124): n is a, c, g, or t
  misc_feature (1314)..(1331): n is a, c, g, or t
cagaacactgcgtgtcctgtgcgcgcgtacgggtccggccgcgggtcccaccgcaagcgggcgtgtgcagctgcggctcctggngggcgagcttaggagggagctggagctgcgganggcggnnaacaggagcaggccgagggaattccggccagaagaaatctggcctcggaacacgccattctccgcgccgcttccaataaccactaacatccctaacgagcatccgagccgagggctctgctcggaaatcgtcctggcccaactcggcccttcgagctctcgaagattaccgcatctattttttttttcttttttttcttttcctagcgcagataaagtgagcccggaaagggaaggagggggcggggacaccattgccctgaaagaataaataagtaaataaacaaactggctcctcgccgcagctggacgcggtcggttgagtccaggttgggtcggacctgaacccctaaaagcggaaccgcctcccgccctcgccatcccggagctgagtcgccggcggcggtggctgctgccagacccggagtttcctctttcactggatggagctgaactttgggcggccagagcagcacagctgtccggggatcgctgcatgctgagctccctcggcaagacccagcggcggctcgggatttttttgggggggcggggaccagccccgcgccggcaccatgttcctggcgaccctgtacttcgcgctgccgctcttggacttgctcctgtcggccgaagtgagcggcggagaccgcctggattgcgtgaaagccagtgatcagtgcctgaaggagcagagctgcagcaccaagtaccgcacgctaaggcagtgcgtggcgggcaaggagaccaacttcagcctggcatccggcctggaggccaaggatgagtgccgcagcgccatggaggccctgaagcagaagtcgctctacaactgccgctgcaagcggggtatgaagaaggagaagaactgcctgcgcatttactggagcatgtaccagagcctgcagggaaatgatctgctggaggattccccatatgaaccagttaacagcagattgtcagatatattccgggtggtcccattcatatcagtggagcacattcccaaagggaacaactgcctggatgcagcgaaggcctgcaacctcgacgacatttgcaagaagtacaggtcggcgtacatcaccccgtgcaccaccagcgtgtccaatgatgtctgcaaccgccgcaagtgccacaaggccctccggcagttctttgacaaggtcccggccaagcacagctacggannnnnnnnnnnnnnnnnncgggacatcgcctgcacagagcggaggcgacagaccatcgtgcctgtgtgctcctatgaagagagggagaagcccaactgtttgaatttgcaggactcctgcaagacgaattacatctgcagatctcgccttgcggatttttttaccaactgccagccagagtcaaagtctgtcagcagctgtctaagggaaaactacgctgactgcctcctcgcctactcggggcttattggcacagtcatgacccccaactacatagactccagtagcctcagtgtggccccatggtgtgactgcagcaacagtgggaacgacctagaagagtgcttgaaatttttgaatttcttcaaggacaatacatgtcttaaaaatgcaattcaagcctttggcaatggctccgatgtgaccgtgtggcagccagccttcccagtacagaccaccactgccactaccaccactgccctccgggttaagaacaagcccctggggccagcagggtctgagaatgaaattcccactcatgttttgccaccgtgtgcaaatttacaggcacagaagctgaaatccaatgtgtcgggcaatacacacctctgtatttccaatggtaattatgaaaaagaaggtctcggtgcttccagccacataaccacaaaatcaatggctgctcctccaagctgtggtctgagcccactgctggtcctggtggtaaccgctctgtccaccctattatctttaacagaaacatcatagctgcattaaaaaaatacaatatggacatgtaaaaagacaaaaaccaagttatctgtttcctgttctcttgtatagctgaaattccagtttaggagctcagttgagaaacagttccattcaactggaacattttttttttttccttttaagaaagcttcttgtgatccttcggggcttctgtgaaaaacctgatgcagtgctccatccaaactcagaaggctttgggatatgctgtattttaaagggacagtttgtaacttgggctgtaaagcaaactggggctgtgttttcgatgatgatgatgatcatgatgatgatgattttaacagttttacttctggcctttcctagctagagaaggagttaatatttctaaggtaactcccatatctcctttaatgacattgatttctaatgatataaatttcagcctacattgatgccaagcttttttgccacaaagaagattcttaccaagagtgggctttgtggaaacagctggtactgatgttcacctttatatatgtactagcattttccacgctgatgtttatgtactgtaaacagttctgcactcttgtacaaaagaaaaaacacctgtcacatccaaatatagtatctgtcttttcgtcaaaatagagagtggggaatgagtgtgccgattcaatacctcaatccctgaacgacactctcctaatcctaagccttacctgagtgagaagccctttacctaacaaaagtccaatatagctgaaatgtcgctctaatactctttacacatatgaggttatatgtagaaaaaaattttactactaaatgatttcaactattggctttctatattttgaaagtaatgatattgtctcatttttttactgatggtttaatacaaaatacacagagcttgtttcccctcataagtagtgttcgctctgatatgaacttcacaaatacagctcatcaaaagcagactctgagaagcctcgtgctgtagcagaaagttctgcatcatgtgactgtggacaggcaggaggaaacagaacagacaagcattgtctttgtcattgctcgaagtgcaagcgtgcatacctgtggagggaactggtggcctgcttgtaaagtgttctggcagcatctcttgacacacttgttcattgacacaaatccagtaccttgtgttttcaggttatctgaacaaaggcaggttttgattgcgaccatggaggcatgggcagggttctccctttcttgggaaacaacaatccatgctgggaatgcacaagttcttttcctaaggattgtgttatactgatggacgtcttggcccgtgggagaatgggctgaggcaacagacacgggagctgtgcaagcccgggaaatggccagttaaaagaggtggctcacaacgcgcactgcggaaagtgaaacaagaggaagagggggcaaac

SEQ ID NO: 5981 - DNA, 5531 bp, Homo sapiens
  misc_feature (657)..(683): n is a, c, g, or t
agcgggctcggtggccgcgagtgcatcttccacgaacctaattcatctctccagcaaaggacacatctctccagcaaaggacacctctctccagcaaaggacacctgcagagatgtccccagtccttcacttctatgttcgtccctctggccatgagggggcagcctctggacacactcggaggaaactgcaagggaaactgccagagctgcagggcgtcgagactgaactgtgctacaacgtgaactggacagctgaggccctccccagtgctgaggagacaaagaagctgatgtggctgtttggttgccccttactgctggatgatgttgctcgggagtcctggctccttcctggctccaatgacctgctgctggaggtcgggcccaggctgaacttctccaccccaacatccaccaacatcgtgtcagtgtgccgcgccactgggctggggcctgtggatcgtgtggagaccacccggcgctaccggctctcgtttgcccaccccccgtcagctgaggtggaagccattgctctggctaccctgcacgaccggatgacagagcagcacttcccccatcccatccagagtttctcccctgagagcatgccggaacccctcaatggccctatcaatatactgggtgagggccggcnnnnnnnnnnnnnnnnnnnnnnnnnnncttggtctggctttagactcttgggacctagacttctacaccaagcgcttccaggagctacagcggaacccgagcactgtggaggcctttgacttggcgcagtccaatagcgagcacagccgacactggttcttcaagggccagctccacgtggatgggcagaagctggtgcactcactgtttgagtccatcatgagcacccaggaatcctcgaaccccaacaacgtcctcaaattctgtgataacagcagtgcaatccagggaaaggaagtccgattcctacggcctgaggaccccacacggccaagccgcttccagcaacagcaagggctgagacatgttgtcttcacagcagagactcacaactttcccacaggagtatgcccctttagtggtgcaaccactggcacagggggccggattcgagatgtccagtgcacaggccgcggggcccacgtggtggctggcactgccggctattgctttggaaatctgcatattccaggttacaatctgccctgggaggatctaagcttccagtatcctgggaattttgcccggcccctggaggttgccattgaagccagtaatggagcttctgactatggcaacaagtttggggaaccagtgctggctggcttcgcccgctccttgggcctccagctcccagacggccagcggcgtgagtggatcaagcccatcatgtttagtgggggcattgggtccatggaagctgaccacataagcaaggaggccccagagccaggcatggaagttgtaaaggttggaggtcccgtctacaggattggagttggaggtggagctgcttcatctgtgcaggtgcagggagataacaccagtgacctggactttggggctgtgcagcgaggagacccggagatggaacagaagatgaaccgtgtgatcagggcttgtgtggaggcccccaagggaaaccccatctgcagccttcatgatcagggcgctggtggcaatggcaatgtcctaaaagagctgagtgacccagctggagccatcatttacaccagccgcttccagcttggggacccaaccctgaatgccctggaaatctggggggctgagtaccaggaatcaaatgctcttctgctgaggtcccccaaccgggacttcctgactcatgtcagtgcccgtgaacgttgcccggcttgcttcgtgggcaccatcactggagaccggagaatagtgctggtggacgatcgggagtgtcctgtcagaagaaatggccagggggatgcccccccgacacccccgccaacccctgtggacctggagctcgaatgggtgctgggcaagatgcctcggaaggagttcttcctgcagaggaagccccccatgctgcagcctctggccttgcccccagggctgagcgtgcaccaggctctggagagggttctgaggctgcccgccgtggccagcaagcgctacctcaccaataaggtggaccgctccgtgggaggcctggtggcccagcagcagtgcgtggggcccctgcaaactcctctggcagatgtagcggttgtggcactgagccatgaggagctcataggggctgccacagccttgggagaacagccagtcaagagcctgctggacccaaaagtcgccgcccggctggccgtggccgaagccctcaccaacctggtgtttgctctggtcactgacctccgggatgtgaagtgtagcgggaactggatgtgggcagccaagctcccaggcaggagggcgcagctttggcggatgcctgtgaggctatggtggcagtgatggcagccctgggtgtggcagtggatggtggcaaggactccctcagcatggctgctcgggttggcactgagaccgtgcgggctcctgggtcactggtcatctcagcctatgccgtctgcccagacatcacagccactgtgaccccagacctcaagcatcctgaagggagaggccatctgctctatgtggctctgagccctgggcagcaccggctcgggggcacagctctggcccagtgcttctcccagcttggggaacaccctccagacctggaccttcctgagaacttggtgcgggccttcagcatcactcaggggctgctgaaagaccgcctcctctgctcaggccacgatgtcagtgacggaggcctcgtcacatgcctgctggagatggcctttgctggaaattgcgggctacaggtggatgtgcctgtccccagggttgatgtcctgtctgtgctgttcgctgaggagccaggcctcgtgctggaggtgcaggagccagacctggcccaggtgctgaagcgttaccgggatgctggcctccattgcctggagctgggccacacaggcgaggccgggccccacgccatggtccgggtgtcagtgaacggggctgtggttctggaggagcctgttggggagctgcgagccctctgggaggagacgagtttccagctggaccggctacaggcagagcctcgctgtgtggcagaggaggaacggggcctgagggagcggatggggcccagctattgcctgccccccacctttcccaaagcctccgtgccccgtgagcctggtggtcccagcccccgagtcgccatcttgcgagaggagggcagtaatggagaccgggagatggccgatgccttccacttagctgggtttgaggtatgggacgtgaccatgcaggacctctgctctggggcaattgggctggacactttccgtggcgtggccttcgtgggcggcttcagctatgcagatgtcctgggctctgccaaagggtgggcagctgctgtgacctttcatcccagggctggggctgagctgaggcgcttccggaagcggccagacaccttcagcctgggcgtgtgtaatggctgtcaactgctggctctgctcggctgggtgggaggcgaccccaatgaggatgctgcagagatgggccctgactcccagccagcccggccaggccttctgctacgccacaacctgtctgggcgctacgagtctcgctgggccagcgtgcgtgtggggcctgggccagccctgatgctgcgagggatggagggcgccgtgctgcccgtgtggagtgcgcacggggaaggttacgtagcattttcttctccggaactccaagctcagattgaggccaggggcttggctccactgcactgggctgatgatgacgggaaccccacagagcagtaccctctgaatcccaatgggtccccagggggcgtggctggcatctgctcctgtgatggccgccacctggctgtcatgcctcaccctgagcgggccgttaggccttggcagtgggcatggcgaccccctccatttgatactctgaccacctccccctggctccagctctttatcaatgcccgaaactggaccctggaagggagctgctgactggccacaggggctcacctgggccccatggcttttcacctaagtgggtcctgccccctcccccatgaccttcaggagcaccccatattatttccaaaaatatcttggacagacaaggaccaaaatgccaaaatctcagcggactcgatgatctgcctgctgatgttccttctgtggctgtgtctattttcagttctgctctaacatggcatgccctttctcagcccaggaaacagcatgtggttcagagaaaagagcgacaaggaaaagttaggactcctgaggtccgaacaggggcttctgttgcccacttcacaacacccagtgatcaccggtgtgcaattgcctccttggctctgagggatgttttgcgctcccttttctcatcattggggttagcgggtgcagacaaattcagcaatagtatgcagatcagcccctcaccacctcattgttctcatctggaactgaaactttctggatttctcttgaagtgctacactgcactgaatgtaaggaattgttgcttgtggaagtttctcagcgtttctggctgtcttagggctggcctcagaacccagcattcctgttatttgcttctaaattagcagctctctttttttttttttttttgaggcagtctcactctgtcacccaggctggagtgcaatggcgtgatctcggcccactgcaacctctgcctcctgggttcaagcaattttcctgcctcagcctcccgagtagctgggagtacaggcacacaccaccacacccagctaatttttgtatttttagtagagatagggtttcaccatgtctcccaggctggtctcaaactcctaacctcaagtgattcgcctgcctcggcctcccaaagtgctgggattacaggtgggagccactacagctggcccagcagctctgtttctgatagaggtggttggggctctcatccctagatcctaaccctttagtatgctggaattctactcttcacttactgcattgactgttgttgattagttattattgcaaagcactgtcaccggcctcagggagtttatgtgtaatagaattaaaaataatagctgtgtataacacttagctcaagccacgcatgtgtgaggcatttggtatgtatctgaattaattctcactaaaattcagcaaaggacttgatagcctctccccgccttttcaataaaggatgaatgaaggttgaaaaaaaaaaaaaaaaaaaaaaaaaaaaaaaaacacaaaacaaggcgggggagataaaacaacaccaaaagcaacaaatgcacccatgtttgaaaggggccaaaaagatataaagagcgcgggaaaaaaggcagagagaacgacagaaagagacaatggtggaggtgaaccaacaaca

SEQ ID NO: 5982 - DNA, 3000 bp, Homo sapiens
agcgggggggggagcccgcgccgcggctgcagctgccaagggagcgttccgagcccacgtcaggggaggtgtcgggataaatagggtcccgcaatggccgtggttggctgcgctccgagctgcggagtcagcggccgctgaattctagggcgggttcgcgccccgaaggctgagagctggcgctgctcgtgccctgtgtgccagacggcggagctccgcggccggaccccgcggccccgctttgctgccgactggagtttgggggaagaaactctcctgcgccccagaagatttcttcctcggcgaagggacagcgaaagatgagggtggcaggaagagaagggcgctttctgtctgccggggtcgcagcgcgagagggcagtgccatgttcctctccatcctagtggcgctgtgcctgtggctgcacctggcgctgggcgtgcgcggcgcgccctgcgaggcggtgcgcatccctatgtgccggcacatgccctggaacatcacgcggatgcccaaccacctgcaccacagcacgcaggagaacgccatcctggccatcgagcagtacgaggagctggtggacgtgaactgcagcgccgtgctgcgcttcttcttctgtgccatgtacgcgcccatttgcaccctggagttcctgcacgaccctatcaagccgtgcaagtcggtgtgccaacgcgcgcgcgacgactgcgagcccctcatgaagatgtacaaccacagctggcccgaaagcctggcctgcgacgagctgcctgtctatgaccgtggcgtgtgcatttcgcctgaagccatcgtcacggacctcccggaggatgttaagtggatagacatcacaccagacatgatggtacaggaaaggcctcttgatgttgactgtaaacgcctaagccccgatcggtgcaagtgtaaaaaggtgaagccaactttggcaacgtatctcagcaaaaactacagctatgttattcatgccaaaataaaagctgtgcagaggagtggctgcaatgaggtcacaacggtggtggatgtaaaagagatcttcaagtcctcatcacccatccctcgaactcaagtcccgctcattacaaattcttcttgccagtgtccacacatcctgccccatcaagatgttctcatcatgtgttacgagtggcgttcaaggatgatgcttcttgaaaattgcttagttgaaaaatggagagatcagctcagtacaagatccatacagtgggaagagaggctgcaggaacagcggagaacagttcaggacaagaagaaaacagccgggcgcaccagtcgtagtaatccccccaaaccaaagggaaagcctcctgctcccaaaccagccagtcccaagaagaacattaaaactaggagtgcccagaagagaacaaacccgaaaagagtgtgagctaactagtttccaaagcggagacttccgacttccttacaggatgaggctgggcattgcctgggacagcctatgtaaggccatgtgccccttgccctaacaactcactgcagtgctcttcatagacacatcttgcagcatttttcttaaggctatgcttcagtttttctttgtaagccatcacaagccatagtggtaggtttgccctttggtacagaaggtgagttaaagctggtggaaaaggcttattgcattgcattcagagtaacctgtgtgcatactctagaagagtagggaaaataatgcttgttacaattcgacctaatatgtgcattgtaaaataaatgccatatttcaaacaaaacacgtaatttttttacagtatgttttattaccttttgatatctgttgttgcaatgttagtgatgttttaaaatgtgatcgaaaatataatgcttctaagaaggaacagtagtggaatgaatgtctaaaagatctttatgtgtttatggtctgcagaaggatttttgtgatgaaaggggattttttgaaaaatctagagaagtagcatatggaaaattataatgtgtcttttttacaatgacttcagctctgtttttagctagaaactctaaaaacaaaaataataataaagaaaaataaataaaaaggagaggcagacaatgtctggattcctgttttttggttacctgatttccatgatcatgatgcttcttgtcaacaccctcttaagcagcaccagaaacagtgagtttgtctgtaccattaggagttaggtactaattagttggctaatgctcaagtattttatacccacaagagaggtatgtcactcatcttacttcccaggacatccaccctgagaataatttgacaagcttaaaaatggccttcatgtgagtgccaaattttgtttttcttcatttaaatattttctttgcctaaatacatgtgagaggagttaaatataaatgtacagagaggaaagttgagttccacctctgaaatgagaattacttgacagttgggatactttaatcagaaaaaaagaacttatttgcagcattttatcaacaaatttcataattgtggacaattggaggcatttattttaaaaaacaattttattggccttttgctaacacagtaagcatgtattttataaggcattcaataaatgcacaacgcccaaaggaaataaaatcctatctaatcctactctccactacacagaggtaatcactattagtattttggcatattattctccaggtgtttgcttatgcacttataaaatgatttgaacaaataaaactaggaacctgtatacatgtgtttcataacctgcctcctttgcttggccctttattgagataagttttcctgtcaagaaagcagaaaccatctcatttctaacagctgtgttatattccatagtatgcattactcaacaaactgttgtgctattggatacttaggtggtttcttcactgacaatactgaataaacatctcaccggaattcaaaaaaaacaacaaaaagggcggccgct

SEQ ID NO: 5983 - DNA, 966 bp, Homo sapiens
cctgggccctcctgctccttgcagccatgctcctgggcaacccagcccctgcctccgcatctgcgtggtgaaggccattggcctcatcggtggatctgcgtttcctcgggcccacactgtctaggattgtgcggggctggtgagagaacaagatctcttccgtgttcaaggcagacttcctgccccctgcaccctgctctctcccgggccttgaggtcagtgtgagccccaagggcaagaacacttctggaagggagagtggatttggctgggcctctggatggaaggtctggtcttctctcgtctgagccctgagtactacgacccggcaagagcccacctgcgtgatggggagaaatcctgcccgtgcgggcaggagggcccccagggtgacctgttgaccaaaacacaggagctgggccgtgactacaggacctgtctgacgatagtccaaaaactgaagaagatggtggataagcccacccagagaagtgtttccaatgctgcgacccgggtgtgtaggacggggaggtcacgatggcgcgacgtctgcagaaatttcatgaggaggtatcagtctagagttacccagggcctcgtggccggagaaactgcccagcagatctgtgaggacctcaggttgtgtataccttctacaggtcccctctgagccctctcaccttgtcctgtggaagaagcacaggctcctgtcctcagatcccgggaacgtcagcaacctctgccggctcctcgcttcctcgatccagaatccactctccagtctccctcccctgactccctctgctgtcctcccctctcaggggaataaagtgtcaagcaagattttagccgcaaaaaaatcttctttggtggatttgaggggtgggtgtcagtggcatggtggggtgagctgtgtagtccttcaataaatgtctgtcgtgtgtcccttaaaaaaaaaaaaaaaaa

SEQ ID NO: 5984 - DNA, 2853 bp, Homo sapiens
gttataataacactacaccagcaactcctggcttcccagcagccggaacacagacaggagagagtcagtggcaaatagacatttttcttatttcttaaaaaacagcaacttgtttgctacttttatttctgttgatttttttttcttggtgtgtgtggtggttgtttttaagtgtggagggcaaaaggagataccatcccaggctcagtccaacccctctccaaaacggcttttctgacactccagctgtctgacaacatctacccggtggaggacctcgccgccacgtcggtgaccatctttcccaatgccgaactgggaggcccctttgaccagatgaacggagtggccggagatggcatgatcaacattgacatgactggagagaagaggtcgttggatctcccatatcccagcagctttgctcccgtctctgcacctagaaaccagaccttcacttacatgggcaagttctccattgaccctcagtaccctggtgccagctgctacccagaaggcataatcaatattgtgagtgcaggcatcttgcaaggggtcacttccccagcttcaaccacagcctcatccagcgtcacctctgcctcccccaacccactggccacaggacccctgggtgtgtgcaccatgtcccagacccagcctgacctggaccacctgtactctccgccaccgcctcctcctccttattctggctgtgcaggagacctctaccaggacccttctgcgttcctgtcagcagccaccacctccacctcttcctctctggcctacccaccacctccttcctatccatcccccaagccagccacggacccaggtctcttcccaatgatcccagactatcctggattctttccatctcagtgccagagagacctacatggtacagctggcccagaccgtaagccctttccctgcccactggacaccctgcgggtgccccctccactcactccactctctacaatccgtaactttaccctggggggccccagtgctggggtgaccggaccaggggccagtggaggcagcgagggaccccggctgcctggtagcagctcagcagcagcagcagccgccgccgccgccgcctataacccacaccacctgccactgcggcccattctgaggcctcgcaagtaccccaacagacccagcaagacgccggtgcacgagaggccctacccgtgcccagcagaaggctgcgaccggcggttctcccgctctgacgagctgacacggcacatccgaatccacactgggcataagcccttccagtgtcggatctgcatgcgcaacttcagccgcagtgaccacctcaccacccatatccgcacccacaccggtgagaagcccttcgcctgtgactactgtggccgaaagtttgcccggagtgatgagaggaagcgccacaccaagatccacctgagacagaaagagcggaaaagcagtgccccctctgcatcggtgccagccccctctacagcctcctgctctgggggcgtgcagcctgggggtaccctgtgcagcagtaacagcagcagtcttggcggagggccgctcgccccttgctcctctcggacccggacaccttgagatgagactcaggctgatacaccagctcccaaaggtcccggaggccctttgtccactggagctgcacaacaaacactaccaccctttcctgtccctctctccctttgttgggcaaagggctttggtggagctagcactgccccctttccacctagaagcaggttcttcctaaaacttagcccattctagtctctcttaggtgagttgactatcaacccaaggcaaaggggaggctcagaaggaggtggtgtggggacccctggccaagagggctgaggtctgaccctgctttaaagggttgtttgactaggttttgctaccccacttccccttattttgacccatcacaggtttttgaccctggatgtcagagttgatctaagacgttttctacaataggttgggagatgctgatcccttcaagtggggacagcaaaaagacaagcaaaactgatgtgcactttatggcttgggactgatttgggggacattgtacagtgagtgaagtatagcctttatgccacactctgtggccctaaaatggtgaatcagagcatatctagttgtctcaacccttgaagcaatatgtattataaactcagagaacagaagtgcaatgtgatgggaggaacatagcaatatctgctccttttcgagttgtttgagaaatgtaggctattttttcagtgtatatccactcagattttgtgtatttttgatgtacactgttctctaaattctgaatctttgggaaaaaatgtaaagcatttatgatctcagaggttaacttatttaagggggatgtacatatattctctgaaactaggatgcatgcaattgtgttggaagtgtccttggtgccttgtgtgatgtagacaatgttacaaggtctgcatgtaaatgggttgccttattatggagaaaaaaatcactccctgagtttagtatggctgtatatttctgcctattaatatttggaattttttttagaaagtatatttttgtatgctttgttttgtgacttaaaagtgttacctttgtagtcaaatttcagataagaatgtacataatgttaccggagctgatttgtttggtcattagctcttaatagttgtgaaaaaataaatctattctaacgcaaaaccactaactgaagttcagataatggatggtttgtgactatagtgtaaataaatacttttcaacaataaaaaaaaaaaaaaaaaaaaaaaaaaa

SEQ ID NO: 5985 - DNA, 2554 bp, Homo sapiens
  misc_feature (332)..(332): n is a, c, g, or t
gaatggggaaggtctgggactataggcggccagggggaaatacgggattgtgggttacgcggtggagaaacgtctgaaaaaggggggttggaaaattcgagagattattatggggcaaggccagggcaagcgcgggcgggaaacacatgttttcgctgcaattcaaaagtgccttagagggagttttgctttgaggggagtaaagaatttagatttcccggccaacccaggaatattttaatattagctattctcagtaatgatttcaagaaaggcaggtataacattggtgaggttctattagattcatacaccataatggacaatctggnctggcagatacatccagaacagcagatatcagttgccgaatgttttcttttagcacaaactgagtatttaaaaaactgacaatatgtagtatcagaaaaaatctttaactttcatagaataaaagagagaatacaatcagtgtagagatcaacaaaagatacctcaaactcctggcctcaagtgatcctcttgcctcagcctcccaaaatgttgagatcacaggcctgagccatcatgcccagcctagatacctgatttctttttaattatgcttgaaattcaaattacaaaatactaagtaacccatgcatagaggaaacaaaaattgaagattattttatttgtaaaataatgacaataccaatttcataggactttttattagtagtatcataggcagtcttctgacaaattaggaaaagtagatagggtctgtccttagagtagtggcttgggctgattacctaacttctctgcacctcagcactgtcatcattacattgaaggggtccctatggtgccttaaagtgctcaagctctattattcaccacactattttgtcatttttaaattatcataggatattcaacctgaagttttactttacctgcccacgtcatctctacatattctcatgagatgcagttcatgaattctaaagcagtatcatttaatgtattattttaaaaagatatttagaaaggtatattcatttcaaacatctttaagaataacagtatatccacttaataccaaaaagcatctctacagcattatttcatttatatcaatttttaaatcagccaaaaatgcaaagctactattagtaatatacatttaaggtgtcgaactatgaagaaagtaaaatgagtaaggcaaaattctggatggcggcatcctctgaaggtggaggatggaattggcaatctggcaggctcatgccgggcatgctgattttgttctattatataatcaaggggcagggttgagtgtattagtttattatatttatcatgttttcccattttttattcatgtataagtaaagattaagtggacaaatcttaatagcctgaagactgtctacatgtgtttcccatgtaattcctagtaatgcaaagagagagaacattcccaatagcttctcaggcacaaatttgccctctcagttaatactgcataaatgtgaccattatcttgtcttttatcatcatgtatgatgtttggttatgaacttaacaacataattctacagtatttcctactgtgtatctggtatgccactgccactcaaggtttctttgagagggagactatatatttgttactattattaatgaatctatttccatgactgctgtgaaaaacccaggctgagttaacagtgatgagctctggccaggcacagtggctcacgcctgtaatccaacactttggaaggctgaggcaggaggatcacttgagcccaggagttcaagaccaggctggggaacatagggagacctcatctctagaaactcacaggtggcatgcgcctgtggtctcagctactagggaggttgaggcaggaggactgcttaggccaggaggataaggctacagtgagctatgactgcacaactgcactccagcctgggggatagagcaagaccccatctcaaaaaaaaaaaaagaaaaagcctcaagcatgtcagttcaaaaaaaatttttttttaagtgatgagttctggaggtaaatacacccactctggattttctggttacaatcactaccttttctctcaacctcagctagaaatccagactcatgaggcctcaatccctgacctttcattccttgcaaatgccaaagccaactatgtaggaaactttttcagagaagaaaactctgtcctcccagaagataaattttccactttgctctatgaggcagagagcaacctcaaaccacaaacaggttgggacttgaacaggcctgaactcaagtattctttcctgggaaattcatccatcttgttggataaaagcagcagttttaatcagtgtgttttcatccatttacttactgtttcacagtttacttaaacatcttacaaatgactgtccaattgaactatttacagttgttattataaaagtttttttttttttttttcttgagacatagccttcactctcggtagtatctatgctggtgcggtattcaactcatcactggtg

SEQ ID NO: 5986 - DNA, 3837 bp, Homo sapiens
  misc_feature (6)..(6): n is a, c, g, or t
  misc_feature (951)..(1004): n is a, c, g, or t
gaattnccggggcgcgccccacgcgcgcggaaaaattcagaaccttcccttcccatctatctggaggcaaagggtgaaactttaaagcctgacagaacagaaggcagtttatctcagcagtgaagggatggcagtaatgggatggcagtcagggtggaccagcagaatgggtgaagagatgtattggattggctgacttgctaatcggagctattctttttttccccttttgaaatcaggtggagatgttacagccaaaaatatctggttggcagaaagtgttctggatatcctgacagagcaaagggagtgggtcctgaagagcagcatcctcattgccatggcggtttacacgtacctccgcctcatcgtggaccaccatgggactgcccagctccaggccctgcgacagaaggaagtagacttctgcatctcactgcttcgggaacggttcatggaatgtctgatgattggtcgggatctcgtaagactacttcagaatgttgctaggataccagaatttgaactgctttggaaagatattatccataatcctcaggccttgagtcctcagttcacaggtatcctacagcttcttcagtcaagaacatcccgaaaattcctagcatgtcgtctaaccccggacatggagactaaactcctcttcatgacatcccgggtgcgatttggtcaacaaaagcgataccaagattggttccagcgccagtacctgtcaactccagatagtcagtctctgcgctgtgacctcattcgctacatctgtggggtagtccacccttctaatgaagtactgagttcagatatcttgccccggtgggccatcattggttggctcctgacaacgtgcacgtcaaatgtcgctgcctccaatgccaagctggctttgttttatgactggctgttctttagtccagacaaggatagcattannnnnnnnnnnnnnnnnnnnnnnnnnnnnnnnnnnnnnnnnnnnnnnnnnnnnnagccccacccagccatcactgccacactcctggacttcatgtgccgcatcattcccaacttctatccaccattggagggccacgtgcggcagggtgtcttttcctccctcaaccacattgtggagaaacgggtcttggcgtgtaaaaagtattggctctacctcagactgctgggcatatgtcttcttggctcttagaggaatttctctcctgccatcgtattacaaagacacctagctcccctgtttgacaaccctaagttggataaggagctgcgggcaatgctgagagagaagtttcctgagttctgcagctcaccctccccacctgtggaagtcaaaattgaggagccagtttccatggagatggacaaccatatgtcggataaggatgagagttgctatgacaatgcagaggcagccttcagtgacgatgaagaggatctcaacagcaaaggaaagaagagggagtttcgcttccaccctatcaaggagacagttgtggaggagccagttgatatcaccccttaccttgaccagttggatgagtccctgagggacaaagtactccagctacagaaggggagtgatacggaggcccagtgtgaggtcatgcaggaaattgtggaccaggtcctggaggaagactttgactcggagcagctgtctgtccttgcttcctgcctacaggagctcttcaaggcccactttcgaggggaggtcctgcctgaggagattactgaggagtccctggaggagtctgtaggaaagcctctgtacctaatatttaggaacctatgtcagatgcaggaagacaacagcagcttctctctacttctagaccttctctccgagctatatcagaagcagcccaagattggctaccacctgctctactacctgagggccagcaaagccgccgcagggaagatgaacctgtacgagtcatttgcccaggctacccagctgggcgatctgcacacctgcctgatgatggacatgaaggcctgccaggaggacgatgtgcggctcctgtgccacctcacgccctccatctacacagagtttccagatgaaaccttgaggagcggagagctgctgaacatgatcgtggctgttattgactctgcacagctccaggagctggtctgccacgtgatgatgggtaacctggttatgtttcgaaaagactcagttctcaacatactcattcagagcctagactgggagacctttgagcagtattgtgcctggcagctctttctggcccacaatattcccctggagaccataatccccatcctgcagcacctcaaatacaaggagcacccagaggccctgtcctgcctactgcttcaactccgaagagaaaagcccagcgaggagatggtgaagatggtgctgagccggccctgccatcctgacgaccagttcaccaccagcatcctgcggcactggtgcatgaaacatgacgagctgctggccgagcacatcaagtccctgctcatcaaggacaacagcctgcctcgcaagagacagagcctgaggagctctagcagcaagctggcccagctgactctggagcagatcctggagcacttggacaatctgcggctcaacctgaccaacaccaagcagaacttttttagccagacgccaattctccaggcgctgcagcatgtccaagcgagctgtgacgaagcccacaagatgaaattcagtgatctcttctccctggcggaggaatatgaggactcttccaccaagccacccaagagccggcgaaaagcagctctgtccagccctcgaagtcgaaagaatgccacacagccccccaatgccgaagaagagtcgggctccagcagtgcttcagaagaggaagacacgaaaccgaagcctaccaagcggaaacgaaaagggtcctctgcagtgggctctgacagtgactgaggccctgcattccccatcccacccccggctggactgccctctccttcttggtgattcaaaggttaatagaggctgaggagattgcaggggaaacacccttgctgcatccccaagctcccccggtggaaggaggagctttctcctctggctgagtttgagaagctgccatgcagcccctagccccttccctcctcctggggcctccagcccctcacactgctgttcccagtgatatttgggatctgactgaagccagaggctctgtaaaatcagaccatagtggaagtcctcagccccctggccccttccgcaatctcctcccccagtctcccaaagagccatttcaacagagaagggaaatgacaaaggggcagctggccagataagctaggatgagagcagagactcagtgtgtgggtgtcccttcctgcttccccttcaggtcttggtttgttctgaagggacgttttatagtcactatccacatgccagtgtgaaatgggcatctatgacgtggtcagggtgtccattcctaatcatggggcagatgccacaagcattcagaaaggagtctgaaagggtggccacagccccacgtggtgtgccctggaggcttaggttggtctgaggttggcacctcaatctacaccagagcccagggagtcccagaggcaagtttcacagaattgtcaaatgatcccatttccttgagtctgttttttttttttgtttttttttgttttttttttggcagagataatcgtgtcttaaaagttgtttttaaatgacaataaaacaagccagaatgtcaaaaaaaaaaaaaaaaaaattttgaaaaaaaaaaaaaaaaattaaaaaaatgtgggcgcgcggccccagtatta

SEQ ID NO: 5987 - DNA, 2007 bp, Homo sapiens
  misc_feature (1478)..(1478): n is a, c, g, or t
  misc_feature (1489)..(1489): n is a, c, g, or t
  misc_feature (1497)..(1497): n is a, c, g, or t
  misc_feature (1514)..(1514): n is a, c, g, or t
  misc_feature (1517)..(1517): n is a, c, g, or t
  misc_feature (1524)..(1524): n is a, c, g, or t
  misc_feature (1531)..(1531): n is a, c, g, or t
ggtccggaatttccgggatggcgaccaacggaccggacagagacgaggagaggaacaggaagagagaagctgggagaatcgggaacctgggggctagtgacctgcacacagggcaggggcactcggcagttcccagaggccacccctcccaccccagacatccagacatctggaactttgggtgccaagagtccagcttaatgcaggcagcctggcttttgggggctttggtggtcccccagctcttgggctttggccatggggctcggggagcagagagggagtgggagggaggctggggaggtgcccaggaggaggagcgggagagggaggccctgatgctgaagcatctgcaggaagccctaggactgcctgctgggaggggggatgagaatcctgccggaactgttgagggaaaagaggactgggagatggaggaggaccagggggaggaagaggaggaggaagcaacgccaaccccatcctccggccccagcccctctcccacccctgaggacatcgtcacttacatcctgggccgcctggccggcctggacgcaggcctgcaccagctgcacgtccgtctgcacgcgttggacacccgcgtggtcgagctgacccaggggctgcggcagctgcggaacgcggcaggcgacacccgcgatgccgtgcaagccctgcaggaggcgcagggtcgcgccgagcgcgagcacggccgcttggagggctgcctgaaggggctgcgcctgggccacaagtgcttcctgctctcgcgcgacttcgaagctcaggcggcggcgcaggcgcggtgcacggcgcggggcgggagcctggcgcagccggcagaccgccagcagatggaggcgctcactcggtacctgcgcgcggcgctcgctccctacaactggcccgtgtggctgggcgtgcacgatcggcgcgccgagggcctctacctcttcgaaaacggccagcgcgtgtccttcttcgcctggcatcgctcaccccgccccgagctcggcgcccagcccagcgcctcgccgcatccgctcagcccggaccagcccaacggtggcacgctcgagaactgcgtggcgcaggcctctgacgacggctcctggtgggaccacgactgccagcggcgtctctactacgtctgcgagttccccttctagcggggccggtaccccgcctccttgcccatcccaccacccggcctttccctgcgccgtgcccaccctcctccggaatcgcccttcccttcctggccacgaatggcagcgtcctccccgacccccagtctgggcgcttctgggagggctcttgcggtgccggcactcctccttgttagtgtctttccttgaaggggcgggcaccaggctaggtccggtgccaataaatccttgtggaatctgaaaaaaaaaaaaaaaaaaaaaaaaaaaaaaaaacaaaaaaaaaaaaaaaaaaaaaaaaaaaaaaanaaaaaaaaaanaaaaaaanaaaaaaaaaaaaaaaanaanaaaaaanaaaaaanaaaaaaaagggggcggccgcctcaaaaaaatccccccgagggggccacaatttaaacgcgaccccacgttttttttggaaaaaggggggccccccataaaggggggcctattataaaacctagggccctgcgcccgccttttttaacacgccccgggatgggaaaaaatctgcattcctgggggactttttggggagggaacctccaccttccggggggggggaaaatattggggcaaaccccctcccacaaaattttaaggctcctagggaaaataaaaaaattttataggcggaagaggggacaaaacaaccgccaatagcttggcgcgtgggaaaaattttcctccccgggcttgatttcctcgcaaattttttccccgcggggactcggggttctccaatcgttggcgggggcctcttaaaaaaaccaaaccccccagaggggtgatttttcgcggcagcctccgtaccccc

SEQ ID NO: 5988 - DNA, 2169 bp, Homo sapiens
atggctgtgcgcggcgccaacaccttgacgtccttctccatccaggcgatcctcaacaagaaagaggagcgcggcgggctggccgcgccagaggggcgcccggcgcccgggggcacagcggcatcggtggccgcggctcccgctgtctgctgttggcggctctttggggagagggacgcgggcgcgttggggggcgccgaggactctctgctggcgtctcctgccggtaccagaacagctgcggggaggactgcggagagcccggaaggctgggactcggactccgcgctcagcgaggagaacgagagcaggcggcgctgcgcggacgcgcggggggccagcggggccggccttgcggggggatccttgagcctcggccagccggtctgtgagctggccgcttccaaagacctagaggaggaagccgcgggccggagcgacagcgagatgtccgccagcgtctcaggcgaccgcagcccaaggaccgaggacgacggtgttggccccagaggtgcacacgtgtccgcgctgtgcagcggggccggcggcgggggcggcagcgggccggcaggcgtcgcggaggaggaggaggagccggcggcgcccaagccacgcaagaagcgctcgcgggccgctttctcccacgcgcaggtcttcgagctggagcgccgctttaaccaccagcgctacctgtccgggcccgagcgcgcagacctggccgcgtcgctgaagctcaccgagacgcaggtgaaaatctggttccagaaccgtcgctacaagacaaagcgccggcagatggcagccgacctgctggcctcggcgcccgccgccaagaaggtggccgtaaaggtgctggtgcgcgacgaccagagacaatacctgcccggcgaagtgctgcggccaccctcgcttctgccactgcagccctcctactattacccgtactactgcctcccaggctgggcgctctccacctgcgcagctgccgcaggcacccagtgaacccgcttgggctgaggcagcgagtgattcccgcgctccggctccggaccggcgctgacagctgtaggctgtagcctgcacggggcgccccgccaaggaggcacctggaggtgaaacccagctccagctcccgttagccaggacttgtcccctggcagctgggctgagtctgccctgagggggcgcctttttctaatttgaacagaggcaccctatggcctaggggccctgatcgcccacctgcctggaagcccctgggctctatttattatcatgacaatgttggaattaaattttgattcgaatatgtctgcctgggggtggggttttccctgagcggcaactcctggagaccacatagcctgaatcctcagaatttcaggcctgctgggagctttctgcactaggccacactagttcatggtatccatgctaccaatctatgtgtatctacatatcttttatttttggaaattgcatttgtaaccaaggggtgcgaaaccctggcagtcccaggcagcaccaggccaggggttgatttgaaacgtgaaggattgggttttcaggccctctgctccacccctcctgtgtgtcagagctagggtgggggtgcccgattcgggtgctgaatgtaaggaggggagcctccaagtgtggtgcaagccgggggtctccacatcttccttctctgaagtccaggtacctgcacaagcaggaagcgcctgggagccccggaaggaggagagcgcacacccaggcagccctctgcggaaactttccttggtttctttttatttgtgtaaaggaggttaagacgtgtcgcacttttcagttgtttgtattcaaatgacgattatttttctactcaatgtgaatatccctggccagcctttccacggcgcccaccgcagtgccgctgcctggccctcagtgtctaccttccgccctctgcgactccagtgctctggcccgggactcccctatccgcccctcacttacccttaaacaggtgatcccacctgtcttgtcaacctcgccgcttttcgcctccttaatggcactgtgcactcaactagagtattaactgtaaaaagatttgtgaagtttggaagctctattcgctgtattttttctttaatttataaacttttagtttaacatgcaaca

SEQ ID NO: 5989 - DNA, 2997 bp, Homo sapiens
agcggcgtcggtcccagcgtgccctcgctcccgcccctcagcccacgtggcctcccacccgatgctgccatgccccagggactgatccggggcccgcccttgtgaaaagcagatccttcataacttcttcaaaaacatgaaaaaatggaaaggtaataaaaactttgaacttagcagaggcccactttctaagcaatgagggaagttgggtagaaaccgggctgctggcccagacatggtgagaaagatccaaggtcacttctgtaggggctttgtgaggagcatggactcatcttcctgagagtgtggccttcggtgggtgccaggtgcgtctcccgggctggaggctcaggacgtggcgctgtagctggtgctggacccatgagggcagtgcctgccattggctcagtgaccatcctgtgcagagccagtgcctggtcaaggccccaactgccttgagtgctgacctgtggtgggtcacacacattccccaggtcgtcgcactaaacggcgttttctccactctttttcagagaggaagcagtgcattggtgaaggcaacgttaggtgtgatttccattcctgctgggagacccgggacgcagcccgggagcttcgtccagcctgtggatggagcctgactggctgcagatggaacttctgtgtcctcccaccctaggtgggctaaggttctgctctcagagctgaattgacaggaggtgtgtgtgtgtgctcacttgtgtgcacaagcatgcgtttatgcatgttttcacgcaaccagaagagccattcgtgggatttagccatttcgaggcacctagaagttgaggcagccagctgtgcagccaggtgtgactgttactggcagcattgtataaaagacacgactcagctgccgtagggaggactgggttgtctggaagtattaggctcattttatatttgtgtcagaagaaatgtctgactttggggcagatgacacggtggctgcggaccaggcatggctccctaggttgaaatcagggaaaagctaatagtatcagacagatatgctttttctttggtggctgcaggatttttgctggaaaatgcactattaatcagcacttgtccaagaaagacccatccatttctgttgtcattcaagccacagttcctgatttactcggcaagatactgggccagttcagtgtctctagctgagcctgacctcggggtttgcgtctcgagtctgaaatcctgtttagtcctctgtgcatagttttgtctcattttaacgactgcatcttcttggcacatttattatactcacaactgaatggcacacaatagccttgtgttaataaaagctaccgtggcgctgtgggtgaaccgctgggttgaagtccgatggactctacgatgcaggcatccagaaatatgttgtaactctacctggctccctgccagcctggcctcctcctctgggagagctcctggcatggtcccaatgtgtacctgcatgggaacaacagctgcatgggccagctgtttcggatctaaagatgtgcagtgaaactcacattcccagattcacatccctcatgtttatttgggtcatcatggtttagcatgttgtatatatgtctggagcacttcatacacctctatccaccacagacactcttaatcacagttctgtaataataaggcaaactatacggcaaagagaagcatgtaaatatgtaccaaatccttatgaagttgtaattgtttatatgtaaaaagtatgtatataggaacgggagaaggtgcaaggaatgtgctgaataacatccaaactgcatcgcgtctctgccccattcctgaaagcacacatctagttggagcgtcagttcctctccttagatatcattgttttcactcgtctatcataggcaccttctttacatctgattacaatacccagcatttcagaactgggtttttgcccccaaaaaggtaaatatgagcatttatcactgactcctcctggtccagtgagcagcagcagaattcaagtatttaaaaataaggtgcatttctaaattgcaggctataccttcttttccaaaccaatgggctagagtgaatttcctccaagtacttgggctgtcttactgctagctcttctaacaggggaagtctgtatgaatgcatcaccccctaataaggcaagaggaaggaccctgaaatgttgccagaaatgtactgttacatcaacatttacattatattaacatcatcacactctgtgttcaacacacagaacaacatagatactttagtttgtctaaagtaaaaatccacataaatagcagattcctttgttgacaccagtgtgttgtttaccttgtgcccatggtccagattttgagctggagaaggactatggctgttccttaaagtctctgcccttgcagaatctgtagccttcaggataccccgagtgccttacagggcttgtgaacaccgatactagaagtcaaaaagaagagagtgcccaagtgtgggtttggaggcactgacgcattcgccaactcaccgtcatcccatccttgaaaccctgagagagagtgtgtgttttatcacagtaatggaattcagtttagcctcaggaaactcatattgtgaatataggtatcaaatcatatatttgtttactgtatattttttaaaaagctttattgtaaatttatgcaaaaactaaccgggcctgttttcttacggcggcatgccaggtagtgtgtgtattctcccaggcactcccttcatagtcaccctctaaccacgtgacattccgttccatgctaagcagtattcacaggcctaaaataggtttgtatggtgatctacaagattttacaaatatttttgtattgtgattcctatgatatataccagagaattttttactcgtttgtaaattattgtacagttttaataaaaaatgttttaaatcttaaaaaaaaaaaaaaa

SEQ ID NO: 5990 - DNA, 3107 bp, Homo sapiens
atagttgaccagcttctgcaggggctcctcagtgagagaatggaggtgaggtcagggactcctgccttgcctctgccatcacttccagtgatgcctattcctaagattgatcgtgtcctgtgctgaagatgtttccggaacaacagaaagaggaatttgtaagtgtctgggttcgagatcctaggattcagaaggaggacttctggcattcttacattgactatgagatatgtattcatactaatagcatgtgttttacaatgaaaacatcctgtgtacgaagaagatatagagaattcgtgtggctgaggcagagactccaaagtaatgcgttgctggtacaactgccagaacttccatctaaaaacctgtttttcaacatgaacaatcgccagcacgtggatcagcgtcgccagggtctggaagatttcctcagaaaagtcctacagaatgcacttttgctttcagatagcagccttcacctcttcttacagagccatctgaattcagaagacattgaggcgtgtgtttctgggcagactaagtactctgtggaagaagcaattcacaagtttgccttaatgaatagacgtttccctgaagaagatgaagaaggaaaaaaagaaaatgatatagattatgattcagaaagttcatcctctgggcttggacacagtagtgatgacatcagttcacatggatgtaaagtaaatacagctccgcaggaatcctgaaaaataattctaatgttactatcttaggaatagcaaattatgtccagtcatagagaagaaagcttcataataatacattcttacctaaagctcactgtcatgatgttaggtatttaaattcttaaagatgttgggttgtttattagtggtatttttatgttgtcttattttaggtaagcttctgtgtaaagctaaaaatcctgtgaatacaatactatcctttacaggcagacattattggtaaacaagatcttgccctccaatgaaatgacttacatgttttaaaaaaccgagttggttttattgaatttaaaaagataggtaactaagtagcatttaaaatcaagatagagcattccttcttgtatcagtggggcagtgttaccataaacacggtgtatatgttgttaaaccctatgaagagtaacagtgtagaccagactgcctctctcagatatgtgcctgatattttgtggatacctcccctgcactggcaaaacactatgcttttgggtgttagactgaaatattttaagagtatttaacctttccagtattctgtttcacgcttagatggaaatgtatcttatgaatagagacatattaaaataatgtttacatcttagaaaaaacatagatagtgctagtaatattacttataactgtaatatatagattcagaaatacattttcattatccaaaatcagcttcaacaaatggtttctggagacaaataatttgttttcattatcattgtataatcaggttaatgatttattttttgactaaatgtgcaatttcttatcactagataactttcagtatcagtggtggttacttattacttaaatcagaggaaggattttataaagattaataaatttaattttaccaataaatattcccataatttagaaaaggatgtcgacttgctaatttcagaaataattattcatttttaaaaagccccttttaaagcatctacttgaagattggtataattttcataaaatgtctttttttttagtgtcccaaagatatcttagataaactattttgaagttcagatttcagatgaggcaacattttcttgagataattacccaagtttcatccatgttgaatggtacaaaatatttctgtgaaactaacaggaagatattttcagataactaggataacttgttgctttgttacccagcctaattgaagagtggcagaggctactacaaaaagcaaccttttcattttcactaagagtttaaaagctattgtattattaaaaagtctttacaatgcttgtttcaaagaaccaacagaaaaaaaagctaagaaaactgagaactaacattaaaaaaattaaatttagaataagaatgatttctttaatttgtcctttttttctttggtctaaaacattattaaatttttgtaaatattttgatttaatgtgtcttagatcctcattattttaatacaggaaaagaaaagatttagtaatttcttaccatgctaatatgtaaagttcatgccatccaggcatttaagagcgatcctcatcccttcagcaatatgtatttgagttcacactatttctgttttacagcagttttgaaaaacacatactatgccaccaattgtcatattatttttagatgatgtaacatagccatcaaaattaatattatgtaatgcctaatacttagtatgtaaatgtcacgagatcatttttacattaaacgtgaaaaaaaaaaaaaaaaaaaaaaaaaaaaaaaaaaaaaacaccccacccacaaaaaaaaaaaaaaaaaaaaaaaataaactaaaagaaccacataaggcaaccaataaaagataaaaaacaaagcgatataatcaacacacagaaaacaataaactagagtggtgcgggtgtggtcctctttattctgaatcactgctgggctgtgtgcgcctttctgcgagaggtctcatgtgactcgtaatttgtcgagacgagacagactcgacactccaatcgagtgtgatgtatattcacactgcacaacacgctcctcgtgaacccagtagtgatcaattaatcatcatcgcgatgggtatctgcaagaattatgcgctgctatggcacagctgtacatcggaaagaacatactcgctcttcgttcttcgtgggtgtcggcgtgtgcaaggtatcatgactgaactctcatatatcagtagacgagaaatgaatcgatcggactcatgtgcaatcgttcctccacacttacagatccgtcaggggcttgtgtgtctattaggcgagagaaggtaacaacgataatgacaatgtggcgaggggacggcgaagtgaggcatggagtggttagatc

SEQ ID NO: 5991 - DNA, 2668 bp, Homo sapiens
  misc_feature (1514)..(1528): n is a, c, g, or t
gcgctgtcctgggtgcgcctcgggccgctgcgctcctggcctgctccccccagcgcctgggaggcgatccccagtgcgcccgggttcaaaggcccggcgaggcagttccagcccctctggggggcggggaggcgacgggggtggtgcagaagccagaaaagcccgagccacagtcggccagctccgcgcagggatgggcagcgcgctctgaaagtttatgaccgccgcagccaactcctggccggagctggagacgcagcgagcgatcggccggcctcgaacccccacagctggagggcgaggccagctgtacccggccccagtgccctttcgcggccacaagcggccgtcctcctggtccggtgctccggcgcctgatctaggttcatggagccggggctgtggctccttttcgggctcacagtgacctccgccgcaggattcgtgccttgctcccagtctggggatgctggcaggcgcggcgtgtcccaggcccccactgcagccagatctgagggggactgtgaagagactgtggctggccctggcgaggagactgtggctggccctggcgaggggactgtggccccgacagcactgcagggtccaagccctggaagccctgggcaggagcaggcggccgagggggcccctgagcaccaccgatccaggcgctgcacgtgcttcacctacaaggacaaggagtgtgtctactattgccacctggacatcatttggatcaacactcccgaacagacggtgccctatggactgtccaactacagaggaagcttccggggcaagaggtctgcggggccacttccagggaatctgcagctctcacatcggccacacttgcgctgcgcttgtgtggggagatatgacaaggcctgcctgcacttttgcacccaaactctggacgtcagcagacaggttgaagtcaaggaccaacaaagcaagcaggctttagacctccaccatccaaagctcatgcccggcagtggactcgccctcgctccatctacctgcccccgctgcctctttcaggaaggagccccttaggaggacaggcctgcagcatcctggtctcgggaggcttctgtcattgctcacacacagttcagatttccacctctttatagacaagaagtgaatttgcctggggcagaacacccacccaaagagtccccacttaacaataccccccccccacggcaagaatgcccaaatccgaatgaccccagttttcctaatgagtaaaatgatcccagatgtgccccagagcatgacgcctgcagctccggtttcatgcaggaaattggttttggagagttttggcaagttggaaagccacttactggcttttgacatgacttctcttggagaataagtggactccaagctaactctttgcaaatgtaaacacatgtccatcttgtaataaatgcaaaatgcccgtgcagcagaagcatgcgactttcatatccttgcctagaataggctgcatggtgtannnnnnnnnnnnnnncgaggcgtcggctttagacacagatcatagctctacaggagtttatgaatttgaagcttatggatttgggcagagaaattttcagcctgtgcttgataccacacaaaagaatgtatctcgaaagaatgaaggaagaagaaaaaaggatccttgatgtttgtgacaagaaaatgagaaagttagtatctgcaatacagagcttgttcctgttcagtgactgaccctctgtattctgtatagacaccaggccgatacacagtggagttcccaggccttgtttgcaggaagccgactgtaaagacagccccagctcaaggctattaggttgaatatttgctttcatgagtaaatgtggatctttggggaatggcttcaaaataagtcacgaacacaaattctttgtaaattatgtaaattcctgtttatataaattggcaacaacttataccgtctgacagttcaaaatctctttcagctgcgctcttcccaccgagccgagcttactgtgagtgtggagatgttatcccaccatgtaaagtcgcctgcgcaggggagggctgcccatctccccaacccagtcacagagagataggaaacggcatttgagtgggtgtccagggccccgtagagagacatttaagatggtgtatgacagagcattggccttgaccaaatgttaaatcctctgtgtgtatttcataagttattacaggtataaaagtgatgacctatcatgaggaaatgaaagtggctgatttgctggtaggattttgtacagtttagagaagcgattatttattgtgaaactgttctccactccaactcctttatgtggatctgttcaaagtagtcactgtatatacgtatagagaggtagataggtaggtagattttaaattgcattctgaatacaaactcatactccttagagcttgaattacatttttaaaatgcatatgtgctgtttggcaccgtggcaagatggtatcagagagaaacccatcaattgctcaaatactcagaaagtactgtcaaaagcctaataaaaaacctaaagtttgctctgaaaaaaaaaaacaaaaaaacccccaccaaatcaccaaacaccacatatctacctttatcttaatctgctggggg

SEQ ID NO: 5992 - DNA, 2147 bp, Homo sapiens
cgccctccgtgccgcggagctggaaacctggtgctccgcgcgtcgggtgcggctggcggcgcgggcaggcaggcggggatgacaggctgggggcggcgacctgtgaggggccgcgcgcggagggcgcctggtgcagcatgggcggcccgcgggcttgggcgctgctctgcctcgggctcctgctcccgggaggcggcgctgcgtggagcatcggggcagctccgttctccggacgcaggaactggtgctcctatgtggtgacccgcaccatctcatgccatgtgcagaatggcacctaccttcagcgagtgctgcagaactgcccctggcccatgagctgtccggggagcagctacagaactgtggtgagacccacatacaaggtgatgtacaagatagtgaccgcccgtgagtggaggtgctgccctgggcactcaggagtgagctgcgaggaagcttcctctgcctccttggagcccatgtggtcgggcagtaccatgcggcggatggcgcttcggcccacagccttctcaggttgtctcaactgcagcaaagtgtcagagctgacagagcggctgaaggtgctggaggccaagatgaccatgctgactgtcatagagcagccagtacctccaacaccagctacccctgaggaccctgccccgctctggggtccccctcctgcccagggcagccccggagatggaggcctccaggaccaagtcggtgcttgggggcttcccgggcccaccggccccaagggagatgccggcagtcggggcccaatggggatgagaggcccaccaggtccacagggccccccagggagccctggccgggctggagctgtgggcacccctggagagaggggacctcctgggccaccagggcctcctggcccccctgggcccccagcccctgttgggccaccccatgcccggatctcccagcatggagacccattgctgtccaacaccttcactgagaccaacaaccactggccccagggacccactgggcctccaggccctccagggcccatgggtccccctgggcctcctggccccacaggtgtccctgggagtcctggtcacataggacccccaggccccactggacccaaaggaatctctggccacccaggagagaagggcgagagaggactgcgtggggagcctggcccccaaggctctgctgggcagcggggggaacctggccctaagggagaccctggtgagaagagccactggggggaggggttgcaccagctacgcgaggctttgaagattttagctgagagggttttaatcttggaaacaatgattgggctctatgaaccagagctggggtctggggcgggccctgccggcacaggcacccccagcctccttcggggcaagaggggcggacatgcaaccaactaccggatcgtggcccccaggagccgggacgagagaggctgagggtggtggcggcccctgaggcagaccaggccaggcttcccctcctacctggactcggccagctgcctccagggaccgcccgtccatatttattaatgtcctcagggtcccttctgccatctaggccttaggggtaagcaggtctcagtcctggcaccatgcacatgtctgaggctgagcaagggctgagaggagaggcttgggcctcagtttccctctgtgaagtggggggaggcaggccttcaaggagggatagaggtacaaggcttcgtctcatctgctgtctgagcatccaggcccaaaggcactgagggagtcaggagctggggctcggcacatgcagagatgacagggcagggggcagtcttcctccccctccccgaccaaacctcggggagccctcctgtgcccctccctccttgttgtccagtgctgggctccccaccccgaggtcaggctgcccaatcctctgactggatcaccgggggcttcttgcctcagttcttccctctgagcccccaggccctcccgcatctcaggttggggatggggacatggagaggaaggggccgcctactcctgcaaatgcttgtgacagatgccaggaggtagatgtgtgctggccaataaaggcccctacctgattccccgcaaaaaaaaaaaaaaaaaaaaaaaaaaaaaaaa

SEQ ID NO: 5993 - DNA, 5284 bp, Homo sapiens
  misc_feature (3355)..(3379): n is a, c, g, or t
gcagaagggcacaactcgcggctctagggaaggccacagacctcagctgtacgagcggaacctggactagaggaactttcctcaggactcagggcacacagcccctcggccactactgtctgcgagcccgaggcgcaggggagcgccagcggctgcaggtacgctgcgcacccgcactggggcctgggcggtgcagcggcggcgggagggtcctgggaaccgcagccgccgaggccagtgtgtgagccggccggccgcggcaagccgcatcccccggccgcccctcgcagccccttgctccccggcagccgccgccgccctcacgcagcccagccgggcgctcgcgccaggacttccccgccgcccgcctcggcccggaacatggctgcgcgccctgctgccaccctcgcctggtcgctactgctcctctcctcagccctgctccgcgaaggctgccgagcgcgcttcgtcgccgagcgggactcggaggacgacggagaggagccggtggttttcccggagtcgcccctgcagagccccacggtgctcgtggcggtcctcgcccgcaacgcggcgcacacgctgccgcacttcctcggctgcctggagcggctggactaccccaagagcaggatggccatctgggcagccactgatcacaatgtggataatacaacagaaatattcagggagtggttgaaaaatgtacagagactctatcactatgtggagtggaggcctatggatgaaccagagtcttaccctgatgaaattggaccaaagcactggccaacctcccggtttgcccatgtgatgaaactacgacaggcagcccttcgaactgcgagggaaaaatggtcagactacattctgttcatagatgttgacaatttcctgactaatccacagaccctcaatctactgattgcagaaaacaaaactattgtggcccccatgctggagtctcggggcctgtattctaatttctggtgcggaatcacccctaagggcttctataagaggaccccagactacgttcagattcgagaatggaagaggacaggctgcttccccgtccccatggtccactccaccttcctaattgacctcaggaaggaggcctcggacaagctgactttctaccccccacaccaggactacacctggacctttgatgacatcattgtctttgccttctccagcaggcaagcaggcatccagatgtacctctgcaacagagagcactatggctacctgcccatccccctgaagccccatcagacactgcaggaagacatcgagaacctcatccatgtgcagattgaagcaatgattgaccgtcctccaatggaaccctcccagtatgtctcagttgtccctaaatatccagacaagatgggatttgatgagattttcatgataaacctcaaacgcagaaaggacaggcgggaccggatgctgcgcacactgtatgaacaggagattgaggtcaagattgtcgaggctgtggatggaaaggcactcaacacaagccagctgaaggcactgaatattgaaatgctgcctggctatcgagatccctattcctccaggcctctaacaaggggtgaaatcggctgctttctcagccactactcagtctggaaagaggtaattgatcgagagctagagaagactcttgtaattgaagacgatgtgcgttttgagcatcagtttaagaagaagctgatgaagctgatggataacattgaccaggctcagctggactgggaactgatttatattggtaggaagaggatgcaagtaaaggagccagagaaagcagtgcccaatgtggcaaacctggtcgaagccgactattcctactggaccctgggctacgtcatctctctggaaggagcacagaagctggttggagccaatccttttgggaagatgctgccagtggatgagtttctgccagtcatgtacaacaagcatcccgtagccgagtacaaggagtattatgaatccagggacctgaaagccttctctgcagaacccttgctcatctaccctacgcactacacaggccagccggggtacctgagtgacacggagacctccaccatctgggacaatgagacagtggccaccgactgggataggacacatgcctggaagtcccggaagcaaagccgcatctacagcaatgccaagaacacagaggccctgccaccgccaacctccctggacactgtgccttcaagggatgagctatgaaggctccctgggagtgtggcccacatcagttcaacatcctctggtttttctaaagggctattcatctgtttgctccagttttctgttttgttttgttcttagtggtcacagtcatctaaccaaagtgatctagtgtgatagatcgaaattaacatatttttgaccatggaaggaaataaggaaattcaacccaaatttcccaagacggctgaaagacaggttttttggaaactgttaagataaactgtaatccagacacctaattcttcagttcactactcatgtgatactgattcccacattaaggttgaacaacatggctcagagtcttgttcaagagaaagtgatcaccgagctgtcacatcagcaaatatgtagtcaaggcagccaggccaactagaccacacttattggtctagtttgtccgttttatatgacattgaaaacttgtgtgtgcaacttttgggggacaggaatcacttaaaatcatatttatttggctttttatttaaaggattctgtcacaagtcttattgaaaagtagattttttaaaaaaaaaaatcttagtccctgttatccagtaggggtgggtatttgggtccgactgagacttggcctgtgaccatcatggcagttggagttctcatatagaggtgaccagtttgccatgtggatataatttagtagatatttgacagtttgtgtaggtatttgagggaaaaaactcaatgtttggcttttttattatggccactcgagtcaggatgctctatttataaagataaatgtaatatataaagggtgaggactggctgtgcatcctgccctgtcccgggtttgcgcgctgctacagagcttcacgctctccgctccaccccttagcctgggaacccaccgcagtgtagttctgtgagtcactgctaagagacagagcacattttcaggccagcaactatccttgccagggttttttcattatattttgaattatttattttacaaaatgggcgaagatattgtcttttaggataaggcagagaaacagatgttgcagacttccacagcacccggggagtggtgggtgtggacacnnnnnnnnnnnnnnnnnnnnnnnnngaatttcccagccaggctcttgtggggaggcctgtggatggggggatttgaactatttggaaacaaatgattctctatctcaggtgagaaacctggtcagaaacaaagggctggtcacctgatttaggccagcaaccagggaagctcttagaatcccaggcggacaccctttctcaaaagatatcccctaagagtcctttctgctttcttcacagattgattttatgtaaaatgcagagttggactacacgatttcttcccactccacaatctgtcatcctagtatagatcatggtggtttccctcaagtttatgttctcatgccctcaatctgtaaatttttgtctccagaaaaaccctcccaggcatcccataccagcaccgttcctcatcactgtccatgcaccatgcagccatatggggggccgtgcacaccccaaaccctgagcttcacacttaaactcatggggaggggcccttcagagcagagtccacaggcgggtggtgctacatacacaagcttagtgtacgagtgtaagatacactttaagccagacacctaattcttcagttcactgcccatgtgatactgattgccacattaaggttgaacagcatggctcagagtctagagaaagtgatcaccaagctgtctcatcaccaaataggtagtcaaggcagcctcatctccccaggtgaggggcgggtccccactttaggacaagaggcagcttgccttccaccagacgccagcctcggccttccttcccgactcactgtgggtacccttctacactgaccagcaagctaggccgctggaggaaagggaactcacccaactctaaattgtgccgcttagacttagctgtcagtgtgacttcctttcccacccacccccagaaaaacagaaagagcatctggggagcgagtgaaaattccttaggtgattcctaagatttccttgggtatctggtttttgttttcatatttgagtgtgtgcatgtgtgcatgactttaatgacttttttaatggggtgggaggtggctggggtgctggggttgaaggaagtttgggttgatttttgtggtgttttgtttaatagagaattttttttttcctgttcccctgtcagctggtctgacagatttaagaactctcattcttaaaagactttggacttaaattctagcattttagactaggactgttctactgtgaagaaagttctgtctcctttagcccggtttgtttctccctgctcaggtctagaatcccaagcagtgttcttttctggtgaacactgtgagccgcagatgtgactttttttttaaagtcatctcttcagcaatccagaggttccttgacctcattatttgtcctatctctcccttatagtcctaagccaagacatttgacctttgacatttgacctttgcagtgtcatgtgagggcgtcagtatagaggcctttgcatctgggcctggcacccgctctctgcctctggaggctaaaccctgtctggatttctcttgggatctaacgtgggatcttctggacagacaaccgtgacatcagcagtgctggtgctgctgtgtgtggactgaacacctgcactttgcagaggacacgctgcatgggccccgcttgcggttcattcaggcctgctgcaggagctctgagaacaagaaagagtggacacccgttcccctgcatcatctgtcttgcgtgctatttcagagtggggaagtgataaactatttgccttctggagctctttgtgaaaaattaaaaaaaaacttagctcaaaaaaaaaaaaaaaaaaaacccacacaacaccacaacaacacagccccacaaccacctcacaccacccaaaccacacaaaaacacacaacaagagaggg

SEQ ID NO: 5994 - DNA, 1806 bp, Homo sapiens
  misc_feature (1500)..(1805): n is a, c, g, or t
cccccccccccccccagcggagcgcgagtgccagagcccagccggcgcggagcgggagcggtgcaggctgaggtctccgagcggctcgccatggctggcccgcagcagcagcccccttacctgcacctggccgagctgacggcgtcccagttcctggaaatatggaagcactttgacgcagacggaaatgggtatattgaaggtaaagagctagaaaactttttccaagagctggagaaggcaaggaaaggctctggcatgatgtcaaagagtgacaactttggagaaaagatgaaggagttcatgcagaagtatgataaaaactcagatgggaaaatcgagatggcagagctggcgcagatcctgccaaccgaagagaacttccttctgtgcttcaggcagcacgtgggctccagcgccgagtttatggaggcttggcggaagtacgacacagacaggagtggctacatcgaagccaatgagctcaagggattcctgtcagacctgctgaagaaggcgaaccggccgtacgatgagcccaagctccaggaatacacccaaaccatactacggatgtttgacttgaacggggatggcaaattgggcctctcagagatgtcccgactcctgcctgtccaggaaaacttcctgcttaaatttcagggcatgaagctgacctcagaggagtttaacgcgatcttcacattttacgacaaggatagaagcggctacattgacgagcatgagctggatgcccttttgaaggatctgtacgagaaaaacaaaaaggaaatcaatattcaacagctcaccaactacagaaagagcgtcatgtccttggcagaggcagggaagctctaccgcaaggacctggagattgtgctctgcagcgagccccccatgtaaagtggggacgggggctgcttctccacctcccccaaaccctgcttctgctgccctgatgcgtctacccagactcagagaccgtgagcgccccgcccccacccctacagcctgcacacacctgcctgcagagcaggaaacgagagatagaggatgggcagctggggggctgtcctgagccccctgcacccacccctgcccaggcagtctttgctcagtggatcacacacatggaaggtgatgggggcatgggtggagggtccctaattctcttcgctgtgatgcatgagctccctcgctgtatgatttaggcttctatgtccaacagagtggactcttccctctcgctcccctctgccggtcccccatgccaccacccaccccaaacttccaggttccatccaccaccttgccaatggtgtagctgtcctctcagaactcctgtgtgtggaaggcacccgccctttccttgccttctttactcggcgtgctccttttctctttgggtttcttgtttaccaaagaagagtttacagacaataaaatggaaaggtcctgctgtggaaacttaaaaaaaaaaaaaaaaaaaaaaaaaannnnnnnnnnnnnnnnnnnnnnnnnnnnnnnnnnnnnnnnnnnnnnnnnnnnnnnnnnnnnnnnnnnnnnnnnnnnnnnnnnnnnnnnnnnnnnnnnnnnnnnnnnnnnnnnnnnnnnnnnnnnnnnnnnnnnnnnnnnnnnnnnnnnnnnnnnnnnnnnnnnnnnnnnnnnnnnnnnnnnnnnnnnnnnnnnnnnnnnnnnnnnnnnnnnnnnnnnnnnnnnnnnnnnnnnnnnnnnnnnnnnnnnnnnnnnnnnnnnnnnnnnnnnnnnnnnnnnnnnnnnnnnnnnnnnnnnnnnnnnnnnnna

SEQ ID NO: 5995 - DNA, 5869 bp, Homo sapiens
  misc_feature (2027)..(2048): n is a, c, g, or t
tttttttttttttttttcctaatttttggtcggcggcggtgctgggccaggggaaggaagggacacggaggccgccctcgtcccgccacctcctacccgcttccccccagccccggctccgggagatgtgccgggcggggggcccgggttcgccgagccgcaggagagacacgctgggccgaccccagagaggcgctggacaggctggtggtccaggccgtggtgcctgccaggtgatgtggggcaaagccccccgcacaggccactgagagctccggacacgcacccggctgccaccatggcccgcctagccgcagtgctctggaatctgtgtgtcaccgccgtcctggtcacctcggccacccaaggcctgagccgggccgggctcccgttcgggctgatgcgccgggagctggcgtgtgaaggctaccccatcgagctgcggtgccccggcagcgacgtcatcatggtggagaatgccaactacgggcgcacggacgacaagatttgcgatgctgaccctttccagatggagaatgtgcagtgctacctgccggacgccttcaagatcatgtcacagaggtgtaacaaccgcacccagtgcgtggtggtcgccggctcggatgcctttcctgacccctgtcctgggacctacaagtacctggaggtgcagtacgactgtgtcccctacaaagtggagcagaaagtcttcgtgtgcccagggaccctgcagaaggtgctggagcccacctcgacacacgagtcagagcaccagtctggcgcatggtgcaaggacccgctgcaggcgggtgaccgcatctacgtgatgccctggatcccctaccgcacggacacactgactgagtatgcctcgtgggaggactacgtggccgcccgccacaccaccacctaccgcctgcccaaccgcgtggatggcacaggctttgtggtctacgatggtgccgtcttctacaacaaggagcgcacgcgcaacatcgtcaagtatgacctacggacgcgcatcaagagcggggagacggtcatcaataccgccaactaccatgacacctcgccctaccgctggggcggaaagaccgacattgacctggcggtggacgagaacgggctgtgggtcatctacgccactgagggcaacaacgggcggctggtggtgagccagctgaacccctacacactgcgctttgagggcacgtgggagacgggttacgacaagcgctcggcatccaacgccttcatggtgtgtggggtcctgtacgtcctgcgctccgtgtacgtggatgatgacagcgaggcggctggcaaccgcgtggactatgccttcaacaccaatgccaaccgcgaggagcctgtcagcctcaccttccccaacccctaccagttcatctcctccgttgactacaaccctcgcgacaaccagctgtacgtctggaacaactatttcgtggtgcgctacagcctggagttcgggccgcccgaccccagtgctggcccagccacttccccacccctcagcacgaccaccacagccaggcccacgcccctcaccagcacagcctcgcccgcagccaccaccccgctccgccgggcacccctcaccacgcacccagtgggtgccatcaaccagctgggacctgatctgcctccagccacagccccagtccccagcacccggcggcccccagccccgaatctacacgtgtcccctgagctcttctgcgagccccgagaggtacggcgggtccagtggccggccacccagcagggcatgctggtggagaggccctgccccaaggggactcgaggaattgcctccttccagtgtctaccagccttggggctctggaacccccggggccctgacctcagcaactgcacctccccctgggtcaaccaggtggcccagaagatcaagagtggggagaacgcggccaacatcgccagcgagctggcccgacacacccggggctccatctacgcgggggacgtctcctcctctgtgaagctgnnnnnnnnnnnnnnnnnnnnnntggatgcccagctgcaggccctgcggcccatcgagcgcgagtcagccggcaagaactacaacaagatgcacaagcgagagagaacttgtaaggattatatcaaggccgtggtggagacagtggacaatctgctccggccagaagctctggagtcctggaaggacatgaatgccacggagcaggtgcacacggccaccatgctcctcgacgtcctggaggagggcgccttcctgctggccgacaatgtcagggagcctgcccgcttcctggctgccaaggagaacgtggtcctggaggtcacagtcctgaacacagagggccaggtgcaggagctggtgttcccccaggaggagtacccgagaaagaactccatccagctgtctgccaaaaccatcaagcagaacagccgcaatggggtggtcaaagttgtcttcatcctctacaacaacctgggcctcttcctgtccacggagaatgccacagtgaagctggccggcgaagcaggcccgggtggccctgggggcgcctctctagtggtgaactcacaggtcatcgcagcatccatcaacaaggagtccagccgcgtcttcctcatggaccctgtcatcttcaccgtggcccacctggaggacaagaaccacttcaatgctaactgctccttctggaactactcggagcgttccatgctgggctactggtcgacccaaggctgccgcctggtggagtccaacaagacccataccacgtgtgcctgcagccacctcaccaacttcgctgtgctcatggctcaccgtgagatctaccagggccgcatcaacgagctgctgctgtcggtcatcacctgggtgggcattgtgatctccctggtctgcttggccatctgcatctccaccttctgcttcctgcgggggctgcagaccgaccgcaacaccatccacaagaacctgtgcatcaacctcttcctggctgagctgctcttcctggtcgggatcgacaagactcagtatgagattgcctgccccatcttcgccggcctgctgcactatttcttcctggctgccttctcctggctgtgcctggagggcgtgcacctctacctgctactagtggaggtgtttgagagcgagtattcccgcaccaagtactactacctgggtggctactgcttcccggccctggtggtgggcatcgcggctgccattgactaccgcagctacggcaccgagaaggcctgctggctccgagtggacaattacttcatctggagtttcatcgggccagtctccttcgttatcgtggtcaacctggtgttcctcatggtgaccctgcacaagatgatccgaagctcatctgtgctcaagcccgactccagccgcctggacaacattaaatcctgggcgctgggggccatcgcgctgctgttcctgctgggcctcacctgggctttcggcctcctcttcatcaacaaggagtcggtggtcatggcctatctcttcaccaccttcaacgccttccagggggtcttcatcttcgtctttcactgcgccttacagaagaaggtgcacaaggagtacagcaagtgcctgcgtcactcctactgctgcatccgctccccacccgggggcactcacggatccctcaagacctcagccatgcgaagcaacacccgctactacacagggacccagagccgaattcggaggatgtggaatgacactgtgaggaaacagacggagtcctccttcatggcgggtgacatcaacagcacccccaccctgaaccgaggtaccatggggaaccacctgctgaccaaccccgtgctgcagccccgtgggggcaccagtccctacaacaccctcatcgccgagtcagtgggcttcaatccctcctcgccccctgtcttcaactccccagggagctaccgggaacccaagcaccccttgggaggccgggaagcctgtggcatggacaccctgcccctgaacggcaacttcaataacagttactccttgcgaagtggggatttccctcccggggatgggggccctgagccgccccgaggccggaacctagccgatgcggcggcctttgagaagatgatcatctcagagctggtgcacaacaacctgcgggggagcagcagcgcggccaagggccctccaccgcctgagccccctgtgccacctgtgccagggggcgggggcgaggaagaggcgggcgggcccgggggtgctgaccgggccgagattgaacttctctataaggccctggaggagcctctgctgctgccccgggcccagtcggtgctgtaccagagcgatctggacgagtcggagagctgcacggccgaggacggcgccaccagccggcccctctcctcccctcctggccgggactccctctatgccagcggggccaacctgcgggactcaccctcctacccggacagcagccctgaggggcccagtgaggccctgcccccaccccctcccgcaccccccggcccccccgaaatctactacacctcgcgcccgccagccctggtggcccggaatcccctgcagggctactaccaggtgcggcgtcctagccacgagggctacctggcagccccaggccttgaggggccagggcccgatggggacgggcagatgcagctggtcaccagtctctgagggcacctcatggaccaggggctggtggcccaggccagggagggaaccctgggcagggctctggtgggagagggagacagatggaggcagtggctggtgggccactctctccaggtgcccctcagccatgggccctacagtcccctcaggggactctaacctgggggcctgaggtgccagggttcacagacagggtttcccaccagccacacgcaccagctctatttgggggaagtgtagtgaggaggagcccagaggaccccaggggagtgaggagggagaacttggaagggtgcagcccacttccagactctcccctctcccacccttctaccctgtgaagggaaatgagggctttagtttcctgggcagggaggggcagcttctgaggttgccaaaggcccccactggatggaacctgttagctgctcctctccgcagccagaaatgctgccggctgcacccagagggagcagtgaggcaggacagatggacaggttcctcctgcgctgtaattccctgctccctggagactgggaaaaggccgcagggcagggggactgggcggtggtggctggtggtttaaaggttgaactttctctgaagctcctttccccttgctcttggtccctgccccgcaagcaaacctgccccctctgcctcccagtgcacccaatgaccccctcccttggggcgactcctgatgaagcacaactccccgcagggcccccagcccacaggggtggccatatttgggcagttcccagtcctgtgggctcggctatctggggagcagattttgggtctggatctccctggggagtgggtcctgggcttggatctttccctagggggccctcttactccttcctctctcctcctccttccccattgctgtaaatatttcaacgaaatggaaaagaaaaaaaaaagacaaaaaaaaaaaaaaaaaaaaaaaaaaaaaaacccgggggcaaaatttttccccctgaggggggggtttatttttggggggacaggggggtgttttaaaaaggggggggggggaaaaaacaggggggttgaccaattttgtgcggtgggaaaatccccttttcaactggggtaaattggaaaggcctgacggttgtccttcatgggggggga

SEQ ID NO: 5996 - DNA, 1275 bp, Homo sapiens
tgcgcgctgttttctaatcacgtggctggcacccaggtaagaagaggccgctcttcctggggttgtttctccgtgtgacgtgtggcctttgagatcaactctcctgtaccagcgtaggccgcatgagtggggggcgggctcccgcggtcctgctcggcggagtggcctctctgctcctgtcttttgtttggatgccggcgctgctgcctgtggcctcccgccttttgttgctaccccgagtcttgctgaccatggcctctggaagccctccgacccagccctcgccggcctcggattccggctctggctacgttccgggctcggtctctgcagcctttgttacttgccccaacgagaaggtcgccaaggagatcgccagggccgtggtggagaagcgcctagcagcctgcgtcaacctcatccctcagattacatccatctatgagtggaaagggaagatcgaggaagacagtgaggtgctgatgatgattaaaacccaaagttccttggtcccagctttgacagattttgttcgttctgtgcacccttacgaagtggccgaggtaattgcattgcctgtggaacaggggaactttccgtacctgcagtgggtgcgccaggtcacagagtcagtttctgactctatcacagtcctgccatgatgagccctgttcctgctcatcatgaagatccccgcgatacttcaacgccttctgacttccaggtgatgactgggcccccaataaatcccgtctttgggtctctctgaaaaaaaaaaaaaaaaaaatgtaatgtatgcaaatttgttgggagaatataagtgcttctagtccctgtattctctacatctttcagaatgactcagagctgctaaaaaaaaaaaaaaggggggggcgccctttaaagaaatccccctcgggggggccccagttttaaccggaccccactttttttttgaaaaaagggggccccctaagggggaggcctattttaaaacattaggcccctgggccccttttttttaccagggcgggggagtgggaaaaaccgggtacccttggaaaactcttggggaagggaaacccttacttctggggggggggggaccctatttgggacaactttcccctcaaggaattttttaggccttcggggggaaaaataaaaattttttttaggggggaaaaaaggggggtaaaaaaaaaccggcaaaagtcttcccgggcccttagaaaatttttctctatccgggggaatgttttttttgaaaaattt

SEQ ID NO: 5997 - DNA, 4118 bp, Homo sapiens
  misc_feature (530)..(553): n is a, c, g, or t
ggggggcagcatgcccgcgcgcgctgcctgaggacgccgcggcccccgcccccgccatgggcgcccctgcctgcgccctcgcgctctgcgtggccgtggccatcgtggccggcgcctcctcggagtccttggggacggagcagcgcgtcgtggggcgagcggcagaagtcccgggcccagagcccggccagcaggagcagttggtcttcggcagcggggatgctgtggagctgagctgtcccccgcccgggggtggtcccatggggcccactgtctgggtcaaggatggcacagggctggtgccctcggagcgtgtcctggtggggccccagcggctgcaggtgctgaatgcctcccacgaggactccggggcctacagctgccggcagcggctcacgcagcgcgtactgtgccacttcagtgtgcgggtgacagacgctccatcctcgggagatgacgaagacggggaggacgaggctgaggacacaggtgtggacacaggggccccttactggacacggcccgagcgnnnnnnnnnnnnnnnnnnnnnnnngccggccgccaacaccgtccgcttccgctgcccagccgctggcaaccccactccctccatctcctggctgaagaacggcagggagttccgcggcgagcaccgcattggaggcatcaagctgcggcatcagcagtggagcctggtcatggaaagcgtggtgccctcggaccgcggcaactacacctgcgtcgtggagaacaagtttggcagcatccggcagacgtacacgctggacgtgctggagcgctccccgcaccggcccatcctgcaggcggggctgccggccaaccagacggcggtgctgggcagcgacgtggagttccactgcaaggtgtacagtgacgcacagccccacatccagtggctcaagcacgtggaggtgaacggcagcaaggtgggcccggacggcacaccctacgttaccgtgctcaagacggcgggcgctaacaccaccgacaaggagctagaggttctctccttgcacaacgtcacctttgaggacgccggggagtacacctgcctggcgggcaattctattgggttttctcatcactctgcgtggctggtggtgctgccagccgaggaggagctggtggaggctgacgaggcgggcagtgtgtatgcaggcatcctcagctacggggtgggcttcttcctgttcatcctggtggtggcggctgtgacgctctgccgcctgcgcagcccccccaagaaaggcctgggctcccccaccgtgcacaagatctcccgcttcccgctcaagcgacaggtgtccctggagtccaacgcgtccatgagctccaacacaccactggtgcgcatcgcaaggctgtcctcaggggagggccccacgctggccaatgtctccgagctcgagctgcctgccgaccccaaatgggagctgtctcgggcccggctgaccctgggcaagccccttggggagggctgcttcggccaggtggtcatggcggaggccatcggcattgacaaggaccgggccgccaagcctgtcaccgtagccgtgaagatgctgaaagacgatgccactgacaaggacctgtcggacctggtgtctgagatggagatgatgaagatgatcgggaaacacaaaaacatcatcaacctgctgggcgcctgcacgcagggcgggcccctgtacgtgctggtggagtacgcggccaagggtaacctgcgggagtttctgcgggcgcggcggcccccgggcctggactactccttcgacacctgcaagccgcccgaggagcagctcaccttcaaggacctggtgtcctgtgcctaccaggtggcccggggcatggagtacttggcctcccagaagtgcatccacagggacctggctgcccgcaatgtgctggtgaccgaggacaacgtgatgaagatcgcagacttcgggctggcccgggacgtgcacaacctcgactactacaagaagacaaccaacggccggctgcccgtgaagtggatggcgcctgaggccttgtttgaccgagtctacactcaccagagtgacgtctggtcctttggggtcctgctctgggagatcttcacgctggggggctccccgtaccccggcatccctgtggaggagctcttcaagctgctgaaggagggccaccgcatggacaagcccgccaactgcacacacgacctgtacatgatcatgcgggagtgctggcatgccgcgccctcccagaggcccaccttcaagcagctggtggaggacctggaccgtgtccttaccgtgacgtccaccgacgagtacctggacctgtcggcgcctttcgagcagtactccccgggtggccaggacacccccagctccagctcctcaggggacgactccgtgtttgcccacgacctgctgcccccggccccacccagcagtgggggctcgcggacgtgaagggccactggtccccaacaatgtgaggggtccctagcagccctccctgctgctggtgcacagccactccccggcatgagactcagtgcagatggagagacagctacacagagctttggtctgtgtgtgtgtgtgtgcgtgtgtgtgtgtgtgtgcacatccgcgtgtgcctgtgtgcgtgcgcatcttgcctccaggtgcagaggtaccctgggtgtccccgctgctgtgcaacggtctcctgactggtgctgcagcaccgaggggcctttgttctggggggacccagtgcagaatgtaagtgggcccacccggtgggaccccgtggggcagggagctgggcccgacatggctcggcctctgcctttgcaccacgggacatcacagggtgcgctcggcccctcccacacccaaagctgagcctgcagggaagccccacatgtccagcaccttgtgcctggggtgttagtggcaccgcctccccacctccaggctttcccacttcccaccctgcccctcagagactgaaattacgggtacctgaagatgggagcctttaccttttatgcaaaaggtttattccggaaactagtgtacatttctataaatagatgctgtgtatatggtatatatacatatatatatataacatatatggaagaggaaaaggctggtacaacggaggcctgcgaccctgggggcacaggaggcaggcatggccctgggcggggcgtgggggggcgtggagggaggccccaggggtctcacccatgcaagcagaggaccagggctttttctggcaccgcagttttgttttaaaactggacctgtatatttgtaaagctatttatgggcccctggcactcttgttcccacaccccaacacttccagcatttagctggccacatggcggagagttttaatttttaacttattgacaaccgagaaggtttatcccgccgatagagggacggccaagaatgtacgtccagcctgccccggagctggaggatcccctccaagcctaaaaggttgttaatagttggaggtgattccagtgaagatattttatttgctttgtcctttttcaggagaattagatttctataggatttttctttaggagatttattttttggacttcaaagcaagctggtattttcatacaaattcttctaattgctgtgtgtcccaggcagggagacggtttccagggaggggccggccctgtgtgcaggttccgatgttattagatgttacaagtttatatatatctatatatataatttattgagtttttacaagatgtatttgttgtagacttaacacttcttacgcaatgcttctagagttttatagcctggactgctacctttcaaagcttggagggaagccgtgaattcagttggttcgttctgtactgttactgggccctgagtctgggcagctgtcccttgcttgcctgcagggccatggctcagggtggtctcttcttggggcccagtgcatggtggccagaggtgtcacccaaaccggcaggtgcgattttgttaacccagcgacgaactttccgaaaaataaagacacctggttgctaacctgaaaaaaaaaaaaaaaaaaaaaaaaaaaaaaaaaaaaaa

SEQ ID NO: 5998 - DNA, 1553 bp, Homo sapiens
ggacactcctaggggcttttctaaagctagactcgcagctccttgctcaggaaaattaaactattcacgtttcagatcaagtgttgacagtcaccagtttttttgagttcttaaagagttttatgttgactgaatattgcacattgagtccccattgagtccctggtgggaaaagtccacaatttcccattgatagctttttactgttgtgaaaaagggaagcgtcagcacacaaaagcctgcatgaccgctgcttcggagaagctctcgaccctaactgcagtcactgttacttggatcagatcaagcgcagtgactttttgggattcagtggttattctccacacttcgtaggccattcaaccaactctgagcacaaaatgcagccatcctctatgcagcaagccctgcccagtcagtgaccctactggacagatccaaggccagccctggttccctgctgcagccaccgtcctgacgttcatcggagcaggccggggcctggccttcccggcacaagtggctgttctgacaggcccccagtttgtcccatctgaactgctgggaggtttccgggtggccagaggagcaaagctgccttccaagtgcctgtctgtgcctgggagaacagagcaggagcgtcgtgcggtccaccgcgcagtgcatggcgattccaagcgctgaacaactcccctggacccttgggcctgcatctgactcccagctgcagagtcagaagctgagtccaggcaactgcttggccactcccgatcgctcctccctggacacccggttaccaaagtcagcaaagaagatgcggtaatcgccgcctgatctccacatggtgaaacacaacactcccaccaacacctccttgactggtcggtcttcagcaccgggggtgggcaggcaggtgttctgtgttgacaagaattgcacaggctaaacacaaacacggaaccagagtgagaacacctcactcacgggagcccaggctgctccctaccaggtgacggagcgcgccggggctgtgggtgccaggggctgagtgctagggactcgtcatgagtggggatccccacgttcctgtcactgctgtcaaacagaaggtaaacagtcttatgaatgtatttccttaggaaaacttgtaaaaacttttattaggatatctatttaatactgaactttggcctactttgtgatagactataaacaaattgaggaaatcactatttctcacttctgtattttctcaaaaataattttgttacagagttcaatatactgtgtaccattgatcttctattgtgaaagcaaagaatttcatcaaaatattttaaattatgagtgaaaattgtgtatgttaattttgcagctataatattaatcaaattttgtgtaattctaatcacaaaatgacgtgccttaagtgcccctccagctgtgggttggcagtgtccagacagggagggcccatcaccgaaatcctgaacgattactagaccaattctattaaaaacatttcaaggcaaaaaaaaaaaaacttgttatac

SEQ ID NO: 5999 - DNA, 2705 bp, Homo sapiens
agcggagggggcgctgcccctggccggcctggctggccgggtgggcactgcccggggggccccactgccaagctatctacttctggcctccgtgctggagagtctggccggcgcctgtggcctgtggctgcttgtcgtggagcggagccaggcacggcagcgtctggcaatgggcatctggatcaagttcaggcacagccctggtctcctgctcctctggactgtggcgtttgcagctgagaacttggccctggtgtcttggaacagcccacagtggtggtgggcaagggcagacttgggccagcaggttcagtttagcctgtgggtgctgcggtatgtggtctctggagggctgtttgtcctgggtctctgggcccctggacttcgtccccagtcctatacattgcaggttcatgaacgaggaccaagatgtggaaaggagccagtgaacttgctgactgagaaggcaccttggaactctctggcctggactgttaccagttacgtcttcctcaagttcctccaggggggtggcactggcagtacaggcttcgtgagcaacctgcgcaccttcctgtggatccgggtgcagcagttcacgtctcggcgggtggagctgctcatcttctcccacctgcacgagctctcactgcgctggcacctggggcgccgcacaggggaggtgctgcggatcgcggatcggggcacatccagtgtcacagggctgctcagctacctggtgttcaatgtcatccccacgctggccgacatcatcattggcatcatctacttcagcatgttcttcaacgcctggtttggcctcattgtgttcctgtgcatgagtctttacctcaccctgaccattgtggtcactgagtggagaaccaagtttcgtcgtgctatgaacacacaggagaacgctacccgggcacgagcagtggactctctgctaaacttcgagacggtgaagtattacaacgccgagagttacgaagtggaacgctatcgagaggccatcatcaaatatcagggtttggagtggaagtcgagcgcttcactggttttactaaatcagacccagaacctggtgattgggctcgggctcctcgccggctccctgctttgcgcatactttgtcactgagcagaagctacaggttggggactatgtgctctttggcacctacattatccagctgtacatgcccctcaattggtttggcacctactacaggatgatccagaccaacttcattgacatggagaacatgtttgacttgctgaaagaggagacagaagtgaaggaccttcctggagcagggccccttcgctttcagaagggccgtattgagtttgagaacgtgcacttcagctatgccgatgggcgggagactctgcaggacgtgtctttcactgtgatgcctggacagacacttgccctggtgggcccatctggggcagggaagagcacaattttgcgcctgctgtttcgcttctacgacatcagctctggctgcatccgaatagatgggcaggacatttcacaggtgacccagggcctctctccggtctcacattgggagttgtgccccaagacactgtcctcttttaatgacaccatcgccgacaatattccctttacgggccgtgtcacagctgggaatgatgaggtggaggctgctgctcaggctgcaggcatccatgatgccattatggctttccctgaagggtacaggacacaggtgggcgagcggggactgaagctgagcaggcggggagaagcagcgcgtcgccattgcccgcaccatcctcaaggctttaccgggcatcattctgctggatgaggcaacgtcaggcgctggatacatctaatgagagggccatccaggcttctctggccaaagtctgtgccaaccgcaccaccatcgtagtggcacacaggctctcaactgtggtcaatgctgaccagatcctcgtcatcaaggatggctgcatcgtggagaggggacgacacgaggctctgttgtcccgaggtggggtgtatgctgacatgtggcagctgcagcagggacaggaagaaacctctgaagacactaagcctcagaccatggaacggtgacaaaagtttggccacttccctctcaaagactaacccagaagggaataagatgtgtctcctttccctggcttatttcatcctggtcttggggtatggtgctagctatggtaagggaaagggacctttccgaaaaacatcttttggggaaataaaaatgtggactgtgaaaaaaaaaaaaaaaaaaaaaaaaaaagtcgtatcgatgaaaaaaacaaaaaaaaaaaaaaaaaaacggcgggggccccccacaaaaatatctctctctcctaggaggggccccaacgtcttgtcgagcgccgactccacccgatttgttatttggataaaatgggggcgcccccctattagtggaggctggctatatgttaaaatcactaacggagatcaggtggcggcgctcgatttataacagaaagacgtggagggagggaggaaaaaacggcggcgtcagggggagacaatctcttggggagaaggaggagaacctctattttctgtgtgggtggtaggtgagaaaaatgatggggtgacaaaaaaaacctccaaagcaaagaaatataaacaacgtctaccgggaagtatattat

SEQ ID NO: 6000 - DNA, 444 bp, Homo sapiens
tttttttttttttttttttttttttttttttttttgttggatggaaaatgttttattggagttcctgaggcaggaaagagttatggtaggttgagaatcagcgctcacgctagccccctcttccagtggaggtcatggtcactgggcatcaggagttgcgctcctcagtcctttcagcttaggaaaggcatcccacttgaggaaaggaagtttccttttgatagactcaaagagggcgtgccagttcagtaacgcagatcgcaatttgtcgatgttcaggaacggggtgttaaaggcctcgggtcgtgacgcataattctcaatggtgctttcttcctcaggaccacccagggtggctccctgggcagagtggagcaccaggagggagaggagcaccacggcaggaaggaccgggatcttcatggcgtcaagtttggcggtgcc

SEQ ID NO: 6001 - DNA, 4660 bp, Homo sapiens
  misc_feature (1155)..(1169): n is a, c, g, or t
  misc_feature (4602)..(4602): n is a, c, g, or t
aaggcgctggcggccggcggctgccccagttctccgccgaggcggtgaggcgcctggccgggctgctccgcagggcactgatccgcgtggcccgcgaggcgcagcgcctgagcgtgctgcacgccaagtgcacccgctttgaggtgcagagcgccgtgcgcctggtgcacagctgggcgctggccgagagctgcgcgctggcagccgtcaaggcgctgtccctgtacagcatgagcgccggcgacgggctgcgccggggcaagtccgcgcgctgcggcctcaccttctcagtgggtcgctttttccgctggatggtggacacccgaatctccgtgcgcatccacgagtacgcagccatctccctcaccgcctgcatggagaacctggtggaggagatccgggccagggtgatggccagccacagccctgatggcggaggggccggaggcggggaggtgtctgctgaggccctggagatggtcatcaacaacgacgccgagctctggggcgtcttgcagccctatgagcatctcatctgcggcaagaacgccaatggtgtcctctccctccccgcatacttcagcccctacaacggcgggtccctgggccatgacgagcgagccgatgcctatgcccagctggagctccgaaccctggagcagtccctcctggccacctgcgtgggcagcatctcggagctgagtgacttggtctcccgtgccatgcaccacatgcaggggcgtcaccccctgtgcccgggtgccagccctgcccgccaggcccgccagccgccacagcccatcacttggtcccccgacgccctccacacgctctactactttctgcggtgtccacagatggagtccatggagaaccccaacctggaccccccgagaatgaccttgaacaatgaacggcccttcatgctgctgccgcccctcatggagtggatgcgcgtggccatcacctacgcagagcaccgccgcagcctcaccgtggacagcggcgacatccggcaggcagcccggctgctgctgcctggtctggactgtgaacctcggcagctcaaacccgaacactgtttcagttccttccggaggctggatgcccgagcagctactgaaaaattcaaccaggacctgggtttccgcatgnnnnnnnnnnnnnnnacggacctcatcaaccaagccatcgaggccttgggtccggatggggttaacaccatggatgaccagggtatgacgccactgatgtacgcctgcgctgctggggacgaagcgatggtccagatgctgattgatgctggggcaaacttggacatccaggttccaagcaactcccccaggcacccttccatccaccccgacagccggcactggacctcactgacattcgctgtgctgcatggacacatctctgtggtccagttgctgctggatgctggtgcccatgtcgagggctcggcagtgaacggcggcgaggacagctatgcggagacgcccctgcagctggcctctgcggcagggaactatgagctggtcagtttgttgctgagccgaggcgccgaccccctcctcagcatgctggaggcccacggcatgggctcctccctccacgaggacatgaactgcttcagccactcagctgcccacggccacaggaacgtcctgaggaagctcctgacgcagccacagcaggctaaagcggacgtgctgtccctggaggagatcctggccgagggtgtggaggaaagtgatgcgtcgagccagggcagtggcagcgaggggcccgtgcggctgagccggacccgcaccaaggccctacaggaggccatgtactacagcgctgagcacggctacgtggacatcaccatggagctgagggcactgggagtcccctggaagctgcacatctggatcgagtctctgaggacctcgttctcgcagtcgcggtactcggtggtgcagagcctcctgcgggacttcagctccatcagagaggaggagtacaacgaggagctggtgaccgagggcttgcagctcatgttcgacatcctcaagaccagcaaaaacgactccgtcatacagcaactgactaccatcttaacccactgctatggcagcagtcccatccccagcatcccagagatccggaagaccctgccggccaggctagatccacactttttgaacaataaggagatgtcagatgtgaccttcctggtggaaggaaagctgttttatgcacataaagtcctgctggtgacagcttctaacaggttcaagacactaatgaccaataaatcagaacaggatggggacagcagcaagaccatcgagatcagcgacatgaagtaccacatttttcagatgatgatgcagtatctgtactacggaggaacagaatccatggagatccccaccactgacatcctggagctgctgtcagctgccagcctgttccagctggatgccctgcagaggcactgcgagatcctgtgctcccagaccctcagcatggagagtgccgtgaacacctacaaatatgccaagatccacaatgccccagaactggccctgttctgtgagggcttcttcctcaagcacatgaaggccctactggagcaggatgccttccggcagctcatctacggccgcagcagcaaagtgcagggcctggatccactgcaggacctgcagaacaccctggcagagcgcgtgcactctgtctacatcacctcccgggtgtgaggcagggggcggaggctgccgaggccagggcctgtggaggtgccagggcccaccatgtcggggtatggttgtaggccctcttggagccaggttcacggggctgtttcctcctcctcccccagatgtcccccctgtcaccgggcagctcaccctcatctcctctgccctagagctgtttgttcaatcactgatgggcaaaggggagatgtagctaactggtggccctcctccccatctcagtttgcaactcaagggcagccatgcactccccctgggtgtcgctctcccctcctgcaggtcagcagctgatcctgatccacctccgcccaggccctccaagctctactcacccctagggcctcagtaaactcagaccatcccaactggggctcctgggggtacaggaatccttatgaatgtatagaatgcatactgcctaggcccccagtcgtctgcagtaattcaaaagctggtatttttcttcctaaatgtcacatagcaaaggctgcccaaatccccaaacttgttcttcaaaggtttgacaggcttaatgtgggcatccagtggcctgtggacccccccctgccaccacgactgctgccacccggagttcccccattgtctttggtgcctgggcttccagagtccctcccatcaggactaccagcttgctcagttagcagcagagggcagttccccagcttgatggtttctgagctaagtctggcatggaggggcaaggggtaggggatggggtgctgtgtaggaatggcctcagctcttgttttgctgctggttttaggggccaaagtaaatgggtggattctggaacctcaggcctagactaggttgcctttgtgggggcgatgaagcagagtcccctggtcaagtctctcggctcctttaatgtaggattgagagctgggcaaacaggtcccactggggactgtgactcttggagattaaaggacagggcattgatggaaggtaagggccaggagaagaggcctttctgctgtgtcccctcacggccttgccctcgaattctgcaggccctgggctcccctgacacctgtcatatttatggaccagacactggggcagcatcaggcacagtctgtctgggtgcaacttcttcagctgtctggccgcaccttaaaaactatttattcaccaaaagccccaggcatttcagaaggtggcactcaggtcaccctgaaaagcccccaggggcttgcaattctggaaaatattttgactagctgcttggctggatgtacaaagaaataggcattattttattgctgtaatattgtatgatactttaactgtacaataatgttgtcacttactgtaaatgtactatggttttattaacaataaacactcattaacaatgaaaaaaaaaaaaaaaaacctggtagagggttactcagagttcagaactggggaggagccccttaggaccaggaagagatcccagagctaacgctgttactcaggtctcccccctctcagagccaagaccctaccaaagccattgctgtggccacccagcactcgcctctctccagaaacgaagcctggatccattcctcacccgcccacgctcacatttaattaagcacatgtgtgccactgagctggacagacaccaaatgactgaggaatatgacactatcaggctttcctgatctccactcccatcccctccacggccctttatgtgggagctattttgggggttgtcttcagaggcacatccccaaatggcacagcccaccaaagtggcagcagggcctccttcacccaggcctgacctggcctgattgatttgagggactatccctgngtgactgctgcccccaggcccagctaagctaagctggctgtaccaccacaaggccact

SEQ ID NO: 6002 - DNA, 1532 bp, Homo sapiens
cgggtgccgggaaaaactatacgggggaaaacggcggccgcggcgtctcctccgggacgctgaggggcccgaggagaccgtgaggctctggcctgcagctcgcgccgccatggacgctgccgaggtcgaattcctcgccgagaaggagctggttaccattatccccaacttcagtctggacaagatctacctcatcgggggggacctggggccttttaaccttgtttacccgtgggaagtgcccctgtggctggcgattaacctgaaacaaagacagaaatgtcgcctgctccctccagagtggatggatgtagaaaagttggagaagatgagggatcatgaacgaaaggaagaaacttttaccccaatgcccagcccttactacatggaacttacgaagctcctgttaaatcatgcttcagacaacatcccgaaggcagacgaaatccggaccctggtcaaggatatgtgggacactcgtatagccaaactccgagtgtctgctgacagctttgtgagacagcaggaggcacatgccaagctggataacttgaccttgatggagatcaacaccagcgggactttcctcacacaagcgctcaaccacatgtacaaactccgcacgaacctccagcctctggagagtactcagtctcaggacttctagagaaaggcctggtgcaggcggcttgctgggggatgtgagcgctcaggacgtgatgaggtactcgtggttctggagctctagaaacacttctgatgcatgaaaaatgtgtgatggtgcaaggaatggattcaggatgttgttggagaaacaagtttgtgattagtccttaaaacttagctccctgggacattcttcaattccacatctgtttctagaaaccagccctttttccccccacttttgagaaataaaaaagccttaggtaaataagtcattctccctagcagagccacttgggtctcctgcatggaagccgtcacacttgggcaggtgttcagtgactggtaggtgtagatacagcaggagtggccatgtggtccacggctttttaccccttcttgatcctgatttcttgggctgaatttagactctctcacagaggtggctcacagagaaggatggcagatggtgcagccaacaatgctgaccggtgcttatcctctaagccctgatccacaataaaaatggacccaactcaaaaaaaaaaaaaaaaaaaaaaaaaaaaaatttgggggggggcctggggccccggaaaaggtttttaaacccatcggtggggcgccggcgggcgcccaggaagggtaagggagcaaggggcgcccatagcgggtggtccccagaggagaaaccgcgggctccgaggaaccagggggcggggaattcttcccccatgtaaaaaaaagcccgcgggggaaaacggcgagggttttcggaacaattcccagaagggagtcccgggggcccacagggggactatacacccgggggctccaggaaccgcaatttcaattagcccccagggggc

SEQ ID NO: 6003 - DNA, 1446 bp, Homo sapiens
  misc_feature (127)..(142): n is a, c, g, or t
aaaaaactaagccggtttcaagtttcagctcctccttgaattccaggctgctgagacttccctctagaatcctccaacatggagcctcttgcagcttacccgctaaaatgttccgggcccagagcannnnnnnnnnnnnnnnggctgtctatagttctatgcacagtaacgctatttcttctacaactaaaattcctcaaacctaaaatcaacagcttttatgcctttgaagtgaaggatgcaaaaggaagaactgtttctctggaaaagtataaaggcaaagtttcactagttgtaaacgtggccagtgactgccaactcacagacagaaattacttagggctgaaggaactgcacaaagagtttggaccatcccacttcagcgtgttggcttttccctgcaatcagtttggagaatcggagccccgcccaagcaaggaagtagaatcttttgcaagaaaaaactacggagtaactttccccatcttccacaagattaagattctaggatctgaaggagaacctgcatttagatttcttgttgattcttcaaagaaggaaccaaggtggaatttttggaagtatcttgtcaaccctggcagggtccaagttggtgaagttctggaggccagaggagcccattgaagtcatcaggcctgacatagcagctctggttagacaagtgatcataaaaaagaaagaggatctatgagaatgccattgcgtttctaatagaacagagaaatgtctccatgagggtttggtctcattttaaacattttttttttggagacagtgtctcactctgtcacccaggctggagtgcagtagtgcgttctcagctcattgcaacctctgcctttttaaacatgctattaaatgtggcaatgaaggatttttttttaatgttatcttgctattaagtggtaatgaatgttcccaggatgaggatgttacccaaagcaaaaatcaagagtagccaaagaatcaacatgaaatatattaactacttcctctgaccatactaaagaattcagaatacacagtgaccaatgtgcctcaatatcttattgttcaacttgacattttctaggactgtacttgatgaaaatgccaacacactagaccactctttggattcaagagcactgtgtatgactgaaatttctggaataactgtaaatggttatgttaatggaataaaacacaaatgttgaaaaatgtaaaatatatatacatagattcaaatccttatatatgtatgcttgttttgtgtacaggattttgttttttctttttaagtacaggttcctagtgttttactataactgtcactatgtatgtaactgacatatataaatagtcatttataaatgaccgtattataacatttgaaaaagtcttcatcattttcagtaaaaaaaaaaaaaaaaaaaaaaaaaaaaa

SEQ ID NO: 6004 - DNA, 2200 bp, Homo sapiens
  misc_feature (899)..(899): n is a, c, g, or t
cgctgtgtctgcccggtctctcctggggtctccggttctgccgcctcctgtccctccttccggctgccccggccagaggggctcgaaggcgcgttggggcccggggccacgctgggagacacgccttcggccgcgcctaattcgagccaggcgcgggacgcgtcccccggccgggcggagcgggaggggacgcccgccgcgctcggcctccccgggccccgacccctcctttgtaatttgaataaaacgcctcccccgcccgcgcgccgccttaacccgccgcctccgctctccccggctgcaggcggcgtgcaggaccagcggcggccgtgcaggcggaggacttcggcgcggctcctcctgggtgtgaccccgggcgcgcccgccgcgcgacgatgagggcgcggccgcaggtctgcgaggcgctgctcttcgccctggcgctccagaccggcgtgtgctatggcatcaagtggctggcgctgtccaagacaccatcggccctggcactgaaccagacgcaacactgcaagcagctggagggtctggtgtctgcacaggtgcagctgtgccgcagcaacctggagctcatgcacacggtggtgcacgccgcccgcgaggtcatgaaggcctgtcgccgggcctttgccgacatgcgctggaactgctcctccattgagctcgcccccaactatttgcttgacctggagagagggacccgggagtcggccttcgtgtatgcgctgtcggccgccgccatcagccacgccatcgcccgggcctgcacctccggcgacctgcccggctgctcctgcggccccgtcccaggtgagccacccgggcccgggaaccgctggggaggatgtgcggacaacctcagctacgggctcctcattggnggccaagttttccgatgctcctatgaaggtgaaaaaaacaggatcccaagccaataaactgatgcgtctacacaacagtgaagtggggagacaggctctgcgcgcctctctggaaatgaagtgtaagtgccatggggtgtctggctcctgctccatccgcacctgctggaaggggctgcaggagctgcaggatgtggctgctgacctcaagacccgatacctgtcggccaccaaggtagtgcaccgacccatgggcacccgcaagcacctggtgcccaaggacctggatatccggcctgtgaaggactcggaactcgtctatctgcagagctcacctgacttctgcatgaagaatgagaaggtgggctcccacgggacacaagacaggcagtgcaacaagacatccaacggaagcgacagctgcgaccttatgtgctgcgggcgtggctacaacccctacacagaccgcgtggtcgagcggtgccactgtaagtaccactggtgctgctacgtcacctgccgcaggtgtgagcgtaccgtggagcgctatgtctgcaagtgaggccctgccctccgccccacgcaggagcgaggactctgctcaaggaccctcagcaactggggccaggggcctggagacactccatggagctctgcttgtgaattccagatgccaggcatgggaggcggcttgtgctttgccttcacttggaagccaccaggaacagaaggtctggccaccctggaaggagggcaggacatcaaaggaaaccgacaagattaaaaataacttggcagcctgaggctctggagtgcccacaggctggtgtaaggagcggggcttgggatcggtgagactgatacagacttgacctttcagggccacagagaccagcctccgggaaggggtctgcccgccttcttcagaatgttctgcgggaccccctggcccaccctggggtctgagcctgctgggcccaccacatggaatcactagcttgggttgtaaatgttttcttttgttttttgctttttcttcctttgggatgtggaagctacagaaatatttataaaacatagctttttctttggggtggcacttctcaattcctctttatatattttatatatataaatatatatgtatatatataatgatctctaatttaaaactagctttttaagcagctgtatgaaataaatgctgagtgagccccagcccgcccctgcagttcccggcctcgtcaagtgaactcggcagaccctggggctggcagagggagctctccagtttccgggca

SEQ ID NO: 6005 - DNA, 3057 bp, Homo sapiens
tacaagagaagagacgagatggggtttcaccatgttggtcaggttggcctcgaactcctgatctcaggtgatccacctgcctcggcttctcaaagtgctgggattccaggcatgagccaccatgcctggccgcatgtgtcattttcttgggtgttatactgatcgtatatttgcaggtttgcttttgtgacagacttcttctgggggaaaaaaagtatccttctatctttttacttttgtccagttccaggtatccctgtttttttcttcactcttccttccttgttcatgggagtttttcttgaggacttcaagcccagcttcggagaatcctggttgtgtcatctcatctcctttctgctctcttctctacctagcctttccaccctcacacctcccggggtctgaaaatggaaagataagggtgtttccctgaaagttgctcttctgtgtggggatgacaggttctaaagactcttttctggtccctgccctcattgccatgattaatcagttaagtggcccgaggttttgtaacagcacagtcttaaaatgcttctcccaagtttaatttctctccatttgaccttttaaggatgtgaattggctttaagcagtagactccctttagtacggcgctgtgagcctctcagtgaatctgctacatccattccacccacgggtctggaaacttgtctgtttacctttccctaaaaacctaagatatatttttaagaagtgccttgtaacttttcatatagcctttcccctactttgggtagactgtttcttacaggaatttggtagatctttccaaagagaattctgtatctctatttttaaagcataaatcctgtcaactttggaggagaactgatttggcttgagttttctcagacatgggaacttttgacctaagtttgtattttacattgttgaaagggaactccgggatcccagaaaacatatggactgcaattgggtaaagtttctgtttcagtacttattcctacttactagccgtttaatcttggtcaagtcagccatgtggctctcaacttcctcatctgtaacataaaaggattagagcagacaatctctaacaaatgctataataccactgacaaataataatattagctaatatgtgtaaggcactgtgtttagtgctttttcccttaatacaatagctttgagatataatttatataccatacaatttacttcttaaaaaagtacacaattcagtaattttaatagataggagtaaccatcaccacagtcaattctagaatatttttatacatcagaagaaaccctttacccattatcaattactctccattcctcctaactccctcccagccctaggcaactactagtctactttctgtctttatttgcctcttctggacatttcatacaaatggaaacatgcagcatgtagtaatttatgacagcttctttcacttagcatgaggttttcaaagttcattgatgtggtagcatttatcagtactctgtgcctttttatggctgaataatattttatcatatggatttaccacattttatcattttatttatccatcatcagttgattgacatttgagttgcttctactttttgagtattatcaataattctgttatgaacattcttgtataattttttggtagacatttatcttcatatttcttggatatatacctaggagcagaattgctgcgtcagatggtaatgctgtttaaccttttcaggaactgtcagactgttctgaagtgggtacattattttacattccaaccagcagtgtatgagaattccagtttatccacatcctcatcaacagttgttattgtctgtcttttttattatattcatctgtaatgtgaagtgtttatctcattgtggttttgatttacatttccctgatggttgatgattttcaacatcttttcatatacttattagtcattatgtatcttctttggagaatgtctgttcagatcctttacctactttataattggtttatctttttaatattgaactgtaatagttttaaaaaaatatatcctaaatacaagtctcttatcagataatatgacttgcagatattttctgtcattctatgtactgtcttttcacattcttgatgatatacttttcagcccaaatgtttttaacttgatggaatacaatttattttttcttttgttgcttgtgctttcagtcatatttgtgaaaactttgcttatcccacattacaaagatttactacttctaagtgatttataattttaccacctacctttaggtctctgatccattttgagttaatttttatgtgcaaggagggagtctaacttgattcttttacatgtggatatttagttgtcccaggaccatttgttgaattaagtgcccagaacaagtacatctatatatagagaaagtagattagtggttgtcagagactgcaagaagtggggaattggagagtgactgcccatgggtacaggcatgctttttggcattatgaaaatattctggaattaggtagtggtgatggttgcagaacttttggaatatggtaaaagacactgaaatatatgcttaaaaatggtgatttttgtgatatatgaattatactatggaactaataataacagtaataaagcaaggtgtctttccacatctccatgccttgtattttcattaaaaaaaaaaaaaaaaaaaaaaaaagcatttcagggccaggctcagtggtttactcctgtaatcccagcacttttggaggcctaggtgggaggatcgcttgaggccagaagttcaaaaccagcctgagcaacatagcaagaccttgtctccatgaaaaataaaaaattagccagaaatggtgatgtgtgcctagagttccaactacttggaaagctgaggcaagaggatcacttgagcctaggagttcaaggttgcagtgatctataatcaccactgcactccagcctgggtgacagaacaagaccctgtctcaaagaaaaaaaaaaaaaaaaa

SEQ ID NO: 6006 - DNA, 2280 bp, Homo sapiens
gggactgtcgcgtcggcgcccgacgcggagtcagcaggggcgaaaagcggtagatcatggcaaccatagaagaaattgcacatcaaattattgaacaacagatgggagagattgttacagagcagcaaactgggcagaaaatccagattgtgacagcacttgatcataatacccaaggcaagcagttcattctgacaaatcacgacggctctactccaagcaaagtcattctggccaggcaagattccactccgggaaaagttttccttacaactccagatgcagcaggtgtcaaccagttattttttaccactcctgatctgtctgcacaacacctgcagctcctaacagataattctccagaccaaggaccaaataaggtttttgatctttgcgtagtatgtggagacaaagcatcaggacgtcattatggagcagtaacttgtgaaggctgcaaaggattttttaaaagaagcatccgaaaaaatttagtatattcatgtcgaggatcaaaggattgtattattaataagcaccaccgaaaccgctgtcaatactgcaggttacagagatgtattgcgtttggaatgaagcaagactctgtccaatgtgaaagaaaacccattgaagtatcacgagaaaaatcttccaactgtgccgcttcaacagaaaaaatctatatccgaaaggaccttcgtagcccattaactgcaactccaacttttgtaacagatagtgaaagtacaaggtcaacaggactgttagattcaggaatgttcatgaatattcatccatctggagtaaaaactgagtcagctgtgctgatgacatcagataaggctgaatcatgtcagggagatttaagtacattggccaatgtggttacatcattagcgaatcttggaaaaactaaagatctttctcaaaatagtaatgaaatgtctatgattgaaagcttaagcaatgatgatacctctttgtgtgaatttcaagaaatgcagaccaacggtgatgtttcaagggcatttgacactcttgcaaaagcattgaatcctggagagagcacagcctgccagagctcagtagcgggcatggaaggaagtgtacacctaatcactggagattcaagcataaattacaccgaaaaagaggggccacttctcagcgattcacatgtagctttcaggctcaccatgccttctcctatgcctgagtacctgaatgtgcactacattggggagtctgcctccagactgctgttcttatcaatgcactgggcactttcgattccttctttccaggctctagggcaagaaaacagcatatcactggtgaaagcttactggaatgaactttttactcttggtcttgcccagtgctggcaagtgatgaatgtagcaactatattagcaacatttgtcaattgtcttcacaatagtcttcaacaagataaaatgtcaacagaaagaagaaaattattgatggagcacatcttcaaactacaggagttttgtaacagcatggttaaactctgcattgatggatacgaatatgcctacctgaaggcaatagtactcttcagtccagatcatccaagcctagaaaacatggaactgatagagaaatttcaggaaaaggcttatgtggaattccaagattatataaccaaaacatatccagatgacacctacaggttatccagactactactcagattgccagctttaagactgatgaatgctaccatcactgaagaattgtttttcaaaggtctcattggcaatatacgaattgacagtgttatcccacatattttgaaaatggagcctgcagattataactctcaaataattggtcacagcatttgaaaactgtgactgcagtgctgtaaacttaactgttctttgccagaacacaagacaccaaattgaactcactgcttttgaggcatctggaaatttttactttaaaaagtaaccagaatccaaggtatttttattttagcttcccttaagaatttttgaagtgactgggcaggcagcagaaattaaatgaatttttcttcctgattcctttaaatgaatatgaaacactacaaatttattcttggtgaagatgatacctgaagctgtcacctcttgattatctaaactaagcgctcattctattttataaaacaaataaattagtctcttttttctgaaaaaaaaaaaaaaaaaaaaaataaataaaaaactagtattggtacttgatgcgtcgggaatctctaagagaaaaaaa

SEQ ID NO: 6007 - DNA, 1915 bp, Homo sapiens
aggaagtggcgcgggcgttcgatttcgcgtttcggttcccccccttccccttccccggggtctgggggtgacattgcaccgcgcccctcgtggggtcgcgttgccaccccacgcggactccccagctggcgcgcccctcccatttgcctgtcctggtcaggcccccaccccccttcccacctgaccagccatgggggctgcggtgtttttcggctgcactttcgtcgcgttcggcccggccttcgcgcttttcttgatcactgtggctggggacccgcttcgcgttatcatcctggtcgcaggggcatttttctggctggtctccctgctcctggcctctgtggtctggttcatcttggtccatgtgaccgaccggtcagatgcccggctccagtacggcctcctgatttttggtgctgctgtctctgtccttctacaggaggtgttccgctttgcctactacaagctgcttaagaaggcagatgaggggttagcatcgctgagtgaggacggaagatcacccatctccatccgccagatggcctatgtttctggtctctccttcggtatcatcagtggtgtcttctctgttatcaatattttggctgatgcacttgggccaggtgtggttgggatccatggagactcaccctattacttcctgacttcagcctttctgacagcagccattatcctgctccataccttttggggagttgtgttctttgatgcctgtgagaggagacggtactgggctttgggcctggtggttgggagtcacctactgacatcgggactgacattcctgaacccctggtatgaggccagcctgctgcccatctatgcagtcactgtttccatggggctctgggccttcatcacagctggagggtccctccgaagtattcagcgcagcctcttgtgccgacggcaggaggacagtcgggtgatggtgtattctgccctgcgcatcccacccgaggactgagggaacctaggggggacccctgggcctggggtgccctcctgatgtcctcgccctgtatttctccatctccagttctggacagtgcaggttgccaagaaaagggacctagtttagccattgccctggagatgaaattaatggaggctcaaggatagatgagctctgagtttctcagtactccctcaagactggacatcttggtctttttctcaggcctgagggggaaccatttttggtgtgataaataccctaaactgcctttttttcttttttgaggtggggggagggaggaggtatattggaactcttctaacctccttgggctatattttctctcctcgagttgctcctcatggctgggctcatttcggtccctttctccttggtcccagaccttgggggaaaggaaggaagtgcatgtttgggaactggcattactggaactaatggttttaacctccttaaccaccagcatccctcctctccccaaggtgaagtggagggtgctgtggtgagctggccactccagagctgcagtgccactggaggagtcagactaccatgacatcgtagggaaggaggggagatttttttgtagtttttaattggggtgtgggaggggcggggaggttttctataaactgtatcattttctgctgagggtggagtgtcccatccttttaatcaaggtgattgtgattttgactaataaaaaagaatttgtaaaaaaaaaaaaaaaaaaaaaaaaaaaaaaaaaaaaaaaaaaaaaaaaaaaaaaaaaaaaaaaaaaaaacaacggacaacagactaaaacaaaaaacagaagagggcaactcacaacagaaaacacgagatagagacacaagaatcaagaaccacacaagactggtagaacaacaacggcgcccaacaggagcagaatagaac

SEQ ID NO: 6008 - DNA, 5843 bp, Homo sapiens
  misc_feature (453)..(467): n is a, c, g, or t
  misc_feature (842)..(858): n is a, c, g, or t
  misc_feature (2468)..(2486): n is a, c, g, or t
  misc_feature (2547)..(2587): n is a, c, g, or t
gaggaggagacggcatccagtacagaggggctggacttggacccctgcagcagccctgcacaggagaagcggcatataaagccgcgctgcccgggagccgctcggccacgtccaccggagcatcctgcactgcagggccggtctctcgctccagcagagcctgcgcctttctgactcggtccggaacactgaaaccagtcatcactgcatctttttggcaaaccaggagctcagctgcaggaggcaggatggtctggaggctggtcctgctggctctgtgggtgtggcccagcacgcaagctggtcaccaggacaaagacacgaccttcgaccttttcagtatcagcaacatcaaccgcaagaccattggcgccaagcagttccgcgggcccgaccccggcgtgccggcttaccgcttcgtgcgctttgactacatcccaccggtgaacgcannnnnnnnnnnnnnnatcaccaagatcatgcggcagaaggagggcttcttcctcacggcccagctcaagcaggacggcaagtccaggggcacgctgttggctctggagggccccggtctctcccagaggcagttcgagatcgtctccaacggccccgcggacacgctggatctcacctactggattgacggcacccggcatgtggtctccctggaggacgtcggcctggctgactcgcagtggaagaacgtcaccgtgcaggtggctggcgagacctacagcttgcacgtgggctgcgacctcataggaccagttgctctggacgagcccttctacgagcacctgcaggcggaaaagagccggatgtacgtggccaaaggctctgccaannnnnnnnnnnnnnnnngtttgcttcagaacgtccacctagtgtttgaaaactctgtggaagatattctaagcaagaagggttgccagcaaggccagggagctgagatcaacgccatcagtgagaacacagagacgctgcgcctgggtccgcatgtcaccaccgagtacgtgggccccagctcggagaggaggcccgaggtgtgcgaacgctcgtgcgaggagctgggaaacatggtccaggagctctcggggctccacgtcctcgtgaaccagctcagcgagaacctcaagagagtgtcgaatgataaccagtttctctgggagctcattggtggccctcctaagacaaggaacatgtcagcttgctggcaggatggccggttctttgcggaaaatgaaacgtgggtggtggacagctgcaccacgtgtacctgcaagaaatttaaaaccatttgccaccaaatcacctgcccgcctgcaacctgcgccagtccatcctttgtggaaggcgaatgctgcccttcctgcctccactcggtggacggtgaggagggctggtctccgtgggcagagtggacccagtgctccgtgacgtgtggctctgggacccagcagagaggccggtcctgtgacgtcaccagcaacacctgcttggggccctcgatccagacacgggcttgcagtctgagcaagtgtgacacccgcatccggcaggacggcggctggagccactggtcaccttggtcttcatgctctgtgacctgtggagttggcaatatcacacgcatccgtctctgcaactccccagtgccccagatggggggcaagaattgcaaagggagtggccgggagaccaaagcctgccagggcgccccatgcccaatcgatggccgctggagcccctggtccccgtggtcggcctgcactgtcacctgtgccggtgggatccgggagcgcacccgggtctgcaacagccctgagcctcagtacggagggaaggcctgcgtgggggatgtgcaggagcgtcagatgtgcaacaagaggagctgccccgtggatggctgtttatccaacccctgcttcccgggagcccagtgcagcagcttccccgatgggtcctggtcatgcggcttctgccctgtgggcttcttgggcaatggcacccactgtgaggacctggacgagtgtgccctggtccccgacatctgcttctccaccagcaaggtgcctcgctgtgtcaacactcagcctggcttccactgcctgccctgcccgccccgatacagagggaaccagcccgtcggggtcggcctggaagcagccaagacggaaaagcaagtgtgtgagcccgaaaacccatgcaaggacaagacacacaactgccacaagcacgcggagtgcatctacctgggtcacttcagcgaccccatgtacaagtgcgagtgccagacaggctacgcgggcgacgggctcatctgcggggaggactcggacctggacggctggcccaacctcaatctggtctgcgccaccaacgccacctaccactgcatcaaggataactgcccccatctgccaaattctgggcaggaagactttgacaaggacgggattggcgatgcctgnnnnnnnnnnnnnnnnnnntgacggtgtgaccgatgagaaggacaactgccagctcctcttcaatccccgccaggctgannnnnnnnnnnnnnnnnnnnnnnnnnnnnnnnnnnnnnnnncttacgtgcacaaccctgcccagatcgacacagacaacaatggagagggtgacgcctgctccgtggacattgatggggacgatgtcttcaatgaacgagacaattgtccctacgtctacaacactgaccagagggacacggatggtgacggtgtgggggatcactgtgacaactgccccctggtgcacaaccctgaccagaccgacgtggacaatgaccttgttggggaccagtgtgacaacaacgaggacatagatgacgacggccaccagaacaaccaggacaactgcccctacatctccaacgccaaccaggctgaccatgacagagacggccagggcgacgcctgtgaccctgatgatgacaacgatggcgtccccgatgacagggacaactgccggcttgtgttcaacccagaccaggaggacttggacggtgatggacggggtgatatttgtaaagatgattttgacaatgacaacatcccagatattgatgatgtgtgtcctgaaaacaatgccatcagtgagacagacttcaggaacttccagatggtccccttggatcccaaagggaccacccaaattgatcccaactgggtcattcgccatcaaggcaaggagctggttcagacagccaactcggaccccggcatcgctgtaggttttgacgagtttgggtctgtggacttcagtggcacattctacgtaaacactgaccgggacgacgactatgctggcttcgtctttggttaccagtcaagcagccgcttctatgtggtgatgtggaagcaggtgacgcagacctactgggaggaccagcccacgcgggcctatggctactccggcgtgtccctcaaggtggtgaactccaccacggggacgggcgagcacctgaggaacgcgctgtggcacacggggaacacgccggggcaggtgcgaaccttatggcacgaccccaggaacattggctggaaggactacacggcctataggtggcacctgactcacaggcccaagaccggctacatcagagtcttagtgcatgaaggaaaacaggtcatggcagactcaggacctatctatgaccaaacctacgctggcgggcggctgggtctatttgtcttctctcaagaaatggtctatttctcagacctcaagtacgaatgcagagatatttaaacaagatttgctgcatttccggcaatgccctgtgcatgccatggtccctagacacctcagttcattgtggtccttgcggcttctctctctagcagcacctcctgtcccttgaccttaactctgatggttcttcacctcctgccagcaaccccaaacccaagtgccttcagaggataaatatcaatggaactcagagatgaacatctaacccactagaggaaaccagtttggtgatatatgagactttatgtggagtgaaaattgggcatgccattacattgctttttcttgtttgtttaaaaagaatgacgtttacatataaaatgtaattacttattgtatttatgtgtatatggagttgaagggaatactgtgcataagccattatgataaattaagcatgaaaaatattgctgaactacttttggtgcttaaagttgtcactattcttgaattagagttgctctacaatgacacacaaatcccgctaaataaattataaacaagggtcaattcaaatttgaagtaatgttttagtaaggagagattagaagacaacaggcatagcaaatgacataagctaccgattaactaatcggaacatgtaaaacagttacaaaaataaacgaactctcctcttgtcctacaatgaaagccctcatgtgcagtagagatgcagtttcatcaaagaacaaacatccttgcaaatgggtgtgatgcggttccagatgtggatttggcaaaacctcatttaagtaaaaggttagcagagcaaagtgcggtgctttagctgctgcttgtgccgttgtggcgtcggggaggctcctgcctgagcttccttccccagctttgctgcctgagaggaaccagagcagacgcacaggccggaaaaggcgcatctaacgcgtatctaggctttggtaactgcggacaagttgcttttacctgatttgatgatacatttcattaaggttccagttataaatattttgttaatatttattaagtgactatagaatgcaactccatttaccagtaacttattttaaatatgcctagtaacacatatgtagtataatttctagaaacaaacatctaataagtatataatcctgtgaaaatatgaggcttgataatattaggttgtcacgatgaagcatgctagaagctgtaacagaatacatagagaataatgaggagtttatgatggaaccttaatatataatgttgccagcgattttagttcaatatttgttactgttatctatctgctgtatatggaattcttttaattcaaacgctgaaaacgaatcagcatttagtcttgccaggcacacccaataatcagtcatgtgtaatatgcacaagtttgtttttgtttttgttttttttgttggttggtttgtttttttgctttaagttgcatgatctttctgcaggaaatagtcactcatcccactccacataaggggtttagtaagagaagtctgtctgtctgatgatggatagggggcaaatctttttcccctttctgttaatagtcatcacatttctatgccaaacaggaacgatccataactttagtcttaatgtacacattgcattttgataaaattaattttgttgtttcctttgaggttgatcgttgtgttgttgttttgctgcactttttacttttttgcgtgtggagctgtattcccgagaccaacgaagcgttgggatacttcattaaatgtagcgactgtcaacagcgtgcaggttttctgtttctgtgttgtggggtcaaccgtacaatggtgtgggaatgacgatgatgtgaatatttagaatgtaccatattttttgtaaattatttatgtttttctaaacaaatttatcgtataggttgatgaaacgtcatgtgttttgccaaagactgtaaatatttatttatgtgttcacatggtcaaaatttcaccactgaaaccctgcacttagctagaacctcatttttaaagattaacaacaggaaataaattgtaaaaaaggttttctataaaaaaaaaaaaaaaaaaaaaaaaaaaagggaggaagct

SEQ ID NO: 6009 - DNA, 5975 bp, Homo sapiens
  misc_feature (4243)..(4268): n is a, c, g, or t
cccaaagttcgaaaccaacagaacgaaaagcaacgaagcacacttaaagtgaggaacccggcaagcggcgaaattcttgctgaagagaagaaaaagcgaaaggttttccgctgcaaccaatcagatgagaggattcttggcacgcccctttctatctaccaatcaacatctagctcaatggggcagtccattgccacagggaaagggcttggtgcagcttccctcacaacacacacgtcattctaggccattccacgaactgtgctcaaaagaggaaaacagtgcaacagttccaaagctgatcagtctcgtggtgagcagcgaaactatagacttctctaacaaaaccatggattctaggagggactgggaaagagaaaaacgaattctggaaggcaaactacaactcccaaaggcccttgcgcggactcagcgcgcgagggacgaagggcgggcgtggacgagccggtggctgcagcggcggcggtccccggagtcctgtgaagcgcccctgtccgcgcctctgtggggccctcagagagggctgccaggacgcgagccactgaggagccgctcagccagcgccatagcccttaggactatcggtcacattctcgcgctcctgctccggctcctccatcttggcctcggcagtggcggctgccgggaggatgtgccgccttctggcagggggaagaaggaggagaagatgaagaagcaccggcgggccttggccctggtctcctgcctctttctgtgctctctggtctggcttcccagctggcgtgtatgttgtaaagagagttcctcagcttcagcgtcatcatattactctcaagatgacaactgcgcactagaaaatgaagatgtacaattccagaaaaagaatacagagtcaaaaaagttaagtccaccggtggtggagacactccctacagttgatttgcatgaagagtcttccaatgcagttgtggacagtgaaactgttgaaaatatttccagctcatctacctcagaaatcactccaatctcaaagcttgatgaaatagaaaaatctggtactattccgatagccaaaccaagtgaaactgagcagtctgaaactgattgtgatgttggtgaggcccttgatgctagtgctccaattgaacaaccttcctttgtcagtccacctgacagccttgttggccagcatatagaaaatgtatcatcttcacatggtaaaggaaagataacaaaatcagaatttgaatcaaaagtttcagcaagtgaacagggcggtggtgatccaaaatctgcattgaatgcttcagataatttaaaaaatgagagctctgattatacaaaaccaggagacattgaccctacatcagtagcaagtcccaaagatccagaagatataccaacatttgatgaatggaagaagaaagttatggaagtagaaaaagaaaaaagtcagtcgatgcatgcatcttctaatggaggttcacatgccaccaaaaaggtccagaaaaatcgaaataattatgcctcagtagaatgtggtgccaaaattctagcagctaatccagaagccaagagcacatctgctattcttatagaaaatatggatctttacatgttgaatccttgcagcactaaaatttggtttgttattgaactttgtgaaccaattcaagtaaaacagcttgatattgcaaattatgaattattttcttctactcctaaagattttctggtttctatcagtgacagatatccaacaaataagtggattaagctgggtacttttcatggtagagatgagcggaatgtacagagtttccctttagatgaacagatgtatgcaaaatatgtcaaggttgagttgctatcacattttggatcagagcacttttgtccattaagccttataagggtatttggcactaacatggtggaagaatatgaagaaattgctgattcccagtatcactcagaacgccaggaactatttgatgaggactatgattatccactggattataatactggagaggataaatcctcaaaaaatcttcttggttctgctacaaatgccattctaaatatggtgaatattgctgctaatattctgggagcaaaaactgaagacctgacagaaggaaataaaagtatatctgagaatgccactgccacagctgcacctaaaatgcctgaatcaactcctgtttcaactcctgttccatctcctgagtatgtaaccactgaagtacacacacatgacatggagccgtcaacaccagatactccaaaagagagtcccattgtacagttagttcaagaggaggaagaggaggcaagtccatctacagtgacccttctgggcagcggtgaacaggaagatgaatcatcaccctggtttgagtcagagacacaaatattttgcagtgaactgaccacaatttgttgtatttctagtttttcagaatacatatataaatggtgttcagttagagttgctctttatcggcagcgcagccgaactgctttgagtaaaggaaaagattatcttgtgttagctcaaccacccttactacttcctgcggaatcagtagatgtttcagtattgcaacctctgagtggagaattggaaaatacgaatatagaaagggaagctgaaactgttgttctgggtgatttaagtagtagtatgcaccaggatgacttggtgaatcacactgtagatgcagttgaacttgaaccaagccattctcaaactctttctcagtctcttcttttagatattaccccagaaatcaatcccttgcctaaaatagaagtatctgagtctgttgaatatgaggcaggacatataccatcaccagtgattccccaagagagttctgttgagatcgataatgaaacagaacaaaagtctgagagctttagttctatagagaaaccatctattacctatgaaacaaataaagttaatgagttaatggataatattataaaagaagatatgaactccatgcaaattttcacaaagctgtctgaaacaatagtgccaccaataaatacagccactgtacccgacaatgaagatggggaagccaaaatgaatatagctgacacagcaaagcaaactttgatttctgttgtggattcttcttcattacctgaagtaaaagaagaagaacagtctccagaagatgcccttttgagagggttacagaggacagctacagatttttatgctgaattgcaaaattctacagatctaggatatgctaatggaaatcttgtacatggatcaaaccaaaaggagtcagtatttatgagacttaataatcgtattaaagccttagaagttaacatgtctctcagtggtcgctatctggaggagcttagccaaaggtaccgaaaacaaatggaagaaatgcaaaaggctttcaacaaaacaatcgtgaaacttcagaatacttcaagaatagcagaggagcaggatcagcggcaaactgaagccatccagttgctacaggcacagctgaccaacatgacacagcttgtttcaaatttatcagcaacagtagcagaattgaaacgggaggtttcagatcgacaaagctatcttgtcatatctttggttctttgtgttgtcttgggactgatgctttgtatgcagcgttgtcgaaatacttctcaatttgatggagattatatttcaaaacttcctaaaagtaatcagtatccaagccctaaaaggtgtttctcttcctatgatgatatgaatttgaaaagaagaacttcattcccactcatgagatccaagtctctacagttaactggcaaagaagtagacccaaatgatttgtacattgtagaacccctcaagttttctccagaaaagaagaagaagcgctgcaagtacaaaattgaaaaaattgagaccataaagcctgaagaaccattgcaccccatagccaatggcgacataaaaggaagaaagccctttacgaaccagagagatttttctaatatgggagaagtttatcactcttcttataaaggtcctccatctgaaggaagctcagaaacttcatcacagtcagaagagtcctatttttgtggcatttcagcttgcacaagtctgtgcaatggacagtctcaaaagacaaaaactgagaagagggctttaaaacgaagacgatctaaagtccaagaccaaggaaaattgataaaaactctaatacagacnnnnnnnnnnnnnnnnnnnnnnnnnnatgacataatcaaaggaaacaaagagatcaccgtgggaacatttggtgttacagcagtctcgggacatatctaaaattaattgaacttttcatacagaagacttttttgttgttgttctttgaagaacagtctgtagtatttgaagggtttgggggagggagaaaatattaatgggaaaggcattcagaaattatggtttctacctttttaaaaagtagatgggattgtgctcaatcttggttaatgagctacagttttacaaagctgatcacttcctataaggacaatggtagacattttataaagatgttttttcacaagattaattactgggacaaaagtaatttggaagcccagttccttaggtgggataggaatgaaagcctaaacctcttcctttagctttgttcctatttcttgcaccttcccatatttatgtgccttttgtctatttataatgccactggaagaggagggataactttttctgttatttgatttcttttataactttgttaggtttttgaagctgcaaacactacaatgctttgagggggtctgtgcctgaagctcaggagtgtggatcagacagtctaaagatcctaaaaacttgccaactggatctttgtttagcaaactcactggaaatgaacacttaatggaatttttaagtctgttctgttaggtagatggtgatgctcttgttattttcacttattcaggctggattacttcttacttagttactaactcaatgaggaaaaaatccctacaggatctttttttgcaaacaactgatatatgcagacaaatttttgacaaattcaccttttaaacacgacgttaaccgatttgtgaaggttttctttagcttacattttaaacatacacaataaacactaatcctccaaactttcactgtttttattagtatgaatataaaatttgaaggtttggccaattagtacaagtctcatgatataatcacagcctgcatacatatgcacagatccagttagtgagtttgtcaagcttaatctaattggttaagtctaaagagattattattccttgatgtttgctttgtattggctacaaatgtgcagaggtaatacatatgtgatgtcgatgtctctgtctttttttttgtctttaaaaaataattggcagcaactgtatttgaataaaatgatttcttagtatgattgtacagtaatgaatgaaagtggaacatgtttctttttgaaagggagagaattgaccatttattgttgtgatgtttaagttataacttattgagcacttttagtagtgataactgtttttaaacttgcctaatacctttcttgggtattgtttgtaatgtgacttatttaacgccttttttgtttgtttaagttgctgctttaggttaacagcgtgttttagaagatttaaatttctttcctgtctgcacaattagctattcagagcaagagggcctgattttatagaagccccttgaaaagaggtccagatgagagcagagatacagtgagaaattatgtgatctgtgtgttgtgggaagagaattttcaatatgtaactacggagctgtagtgccattagaaactgtgaatttccaaataaatctgaacacttgtctttattaaaaaaaaaaaaaaaaaataattccccaggcacataactaccatattcaacggcca

SEQ ID NO: 6010 - DNA, 3118 bp, Homo sapiens
tgctgtactgagagagaatgttacataacattgagaactagtacaagtaaatattaaagtgaagtgaccatttcctacacaagctcattcagaggaggatgaagaccattttggaggaagaaaagcacccttattaagaattgcagcaagtaagccaacaaggtcttttcaggatgattttcttatatcaagtggtacatttcattttatttacttcagtttctggtgaatgtgtgactcagttgttgaaggacacctgctttgaaggaggggacattactacggtcttcacaccaagcgccaagtactgccaggtagtctgcacttaccacccaagatgtttactcttcactttcacggcggaatcaccatctgaggatcccacccgatggtttacttgtgtcctgaaagacagtgttacagaaacactgccaagagtgaataggacagcagcgatttctgggtattctttcaagcaatgctcacaccaaataagcgcttgcaacaaagacatttatgtggacctagacatgaagggcataaactataacagctcagttgccaagagtgctcaagaatgccaagaaagatgcacggatgacgtccactgccactttttcacgtacgccacaaggcagtttcccagcctggagcatcgtaacatttgtctactgaagcacacccaaacagggacaccaaccagaataacgaagctcgataaagtggtgtctggattttcactgaaatcctgtgcactttctaatctggcttgtattagggacattttccctaatacggtgtttgcagacagcaacatcgacagtgtcatggctcccgatgcttttgtctgtggccgaatctgcactcatcatcccggttgcttgttttttaccttcttttcccaggaatggcccaaagaatctcaaagaaatctttgtctccttaaaacatctgagagtggattgcccagtacacgcattaaaaagagcaaagctctttctggtttcagtctacaaagctgcaggcacagcatcccagtgttctgccattcttcattttaccatgacactgatttcttgggagaagaactggatattgttgctgcaaaaagtcacgaggcctgccagaaactgtgcaccaatgccgtccgctgccagttttttacctataccccagcccaagcatcctgcaacgaagggaagggcaagtgttacttaaagctttcttcaaacggatctccaactaaaatacttcacgggagaggaggcatctctggatacacattaaggttgtgtaaaatggataatgagtgtaccaccaaaatcaagcccaggatcgttggaggaactgcgtctgttcgtggtgagtggccgtggcaggtgaccctgcacacaacctcacccactcagagacacctgtgtggaggctccatcattggaaaccagtggatattaacagccgctcactgtttctatggggtagagtcacctaagattttgcgtgtctacagtggcattttaaatcaatctgaaataaaagaggacacatctttctttggggttcaagaaataataatccatgatcagtataaaatggcagaaagcgggtatgatattgccttgttgaaactggaaaccacagtgaattacacagattctcaacgacccatatgcctgccttccaaaggagatagaaatgtaatatacactgattgctgggtgactggatgggggtacagaaaactaagagacaaaatacaaaatactctccagaaagccaagatacccttagtgaccaacgaagagtgccagaagagatacagaggacataaaataacccataagatgatctgtgccggctacagggaaggagggaaggacgcttgcaagggagattcgggaggccctctgtcctgcaaacacaatgaggtctggcatctggtaggcatcacgagctggggcgaaggctgtgctcaaagggagcggccaggtgtttacaccaacgtggtcgagtacgtggactggattctggagaaaactcaagcagtgtgaatgggttcccaggggccattggagtccctgaaggacccaggatttgctgggagagggtgttgagttcactgtgccagcatgcttcctccacagtaacacgctgaaggggcttggtgtttgtaagaaaatgctagaagaaaacaaactgtcacaagttgttatgtccaaaactcccgttctatgatcgttgtagtttgtttgagcattcagtctctttgtttttgatcacgcttctatggagtccaagaattaccataaggcaatatttctgaagattactatataggcagatatagcagaaaataaccaagtagtggcagtggggatcaggcagaagaactggtaaaagaagccaccataaatagatttgttcgatgaaagatgaaaactggaagaaaggagaacaaagacagtcttcaccattttgcaggaatctacactctgcctatgtgaacacatttcttttgtaaagaaagaaattgattgcatttaatggcagattttcagaatagtcaggaattcttgtcatttccattttaaaatatatattaaaaaaaatcagttcgagtagacacgagctaagagtgaatgtgaagataacagaatttctgtgtggaagaggattacaagcagcaatttacctggaagtgataccttaggggcaatcttgaagatacactttcctgaaaaatgatttgtgatggattgtatatttatttaaaatatcttgggaggggaggctgatggagatagggagcatgctcaaacctccctaagacaagctgctgctgtgactatgggctcccaaagagctagatcgtatatttatttgaccaaaaatcaccatagactgcatccatactacagagaaaaaacaattagggcgcaaatggatagttacagtaaagtcttcagcaagcagctgcctgtattctaagcactgggattttctgtttcgtgcaaatatttatctcattatgctgtgatctagttcaataaccctaaatttgaattgtcaccacatagtttcaatctgtgccaacaaatatacaattccatcaagtgtg

SEQ ID NO: 6011 - DNA, 783 bp, Homo sapiens
  misc_feature (751)..(752): n is a, c, g, or t
  misc_feature (754)..(754): n is a, c, g, or t
  misc_feature (762)..(762): n is a, c, g, or t
  misc_feature (764)..(764): n is a, c, g, or t
  misc_feature (769)..(769): n is a, c, g, or t
  misc_feature (773)..(773): n is a, c, g, or t
ttttttttttttttttttatttttcatgaaatgatttattacttttagaaaacagtataaacttacaaactataaattaagatataagtatatttctgccaaagtaagtcaagaaaaatgcacttcagaatcagcttttattacaggcaatgtattgtaaactcgaacatccagaatctgagttacacttattatttttaacattttactcaataaaaatctgatatactgggtccaagtgatgacacattccaaattaatgtaactttcttgcagcttaaataaacaaatttagatcaccaagtgaaatcaaagccaagtgtatttgcacaactcaagaatgatgtgaatggattagaatctctcatagtgcatacttcgccatttatacacaaactttgagagtcttctgagtgacatggtatttaactttgtttccaagggccaaatactaaaatgtatagaatatcctactctatactcactattaaatgtcatggactaggaaatctgagacacagaataagaagcaactgattacacaccctagtcatttaagttggaagagttctcttaggtgactctgggtcaggccatcttgatgagccttagacaagttttccttcccataaatcctgctttctcaggcagaatcatataccgtaactgaaaggaaatggctgctgattatctgctcattatcttctttcattccctgcaaaggggactacgatgactgatttgtttagannancactaccngncctgncccncgtgccgaat

SEQ ID NO: 6012 - DNA, 1383 bp, Homo sapiens
  misc_feature (560)..(581): n is a, c, g, or t
gggagcgtcgcgggagccgtttgtgctagcgggagtgttctctggacgtaggcgtggcctgggtgggctaaatgatagtgagagagtggggatatgtagaggcgcgagtgtccggtgtcgcactgtgcaggagcggggtgatgagagggggtgggagagatgggaggcaagcggggcacaacacgggagcgagggtacggtgacggggtaaggagaggggacagaagggtgttgagtgggggggtgaaaaaggtgggggttaggcgctggaagttagtgcaggcgagggagggagtgaggtggggaatagcgggcacgcagcgtagaatacagggggatgtgaacggagggtgcaggcgtactggccggacggatgcggcaaatggcgatcggagggagggatagggtgtgtgggggcgatcagctaggcaatcgagtggcgtaagttataattgtacgcacatacactgcacggtagtaggatagggggcaaaacgtggtggacagggagaagggagaggtgagggttgaagtgcgagcgtgtgggggtgtgtggaggnnnnnnnnnnnnnnnnnnnnnngggggatggggagtggggaagatggagggtagggacatggcgaatggggagggggaatggcagggaaaaagagcgggagggggtagtgggaagggggagagtaggaggagggaggggtaaggaaaaaaaaacaaggtgaggcgcgtcggggtgtgcgaggtgttggatgcgggaggacgggccaaggaggggagagaagatgggggggcggggggaagggtagaccacaaggggcggggggggtccgtgtcgctgcgagtacctcatggagctgagtgacgccagccgcctgcccggagccaccgcctgaagcacccaccgaagacgaccatgacgagctctagctggatgggcgcagagaacctcaagaaggcatgaagccagcccctgcagtgccgtccacccgcccctctgggcctgcctgtggctctgttgccctcctctgtggcggcaggacctttgtggggcttcgtgccctgctctggggcccaggcggggctggtccacattcccaggccccaacagccttcaaagatgggtaaaggagcttgccctccctgggccccccaccttggtgactcgccccaccacccccagccctgtccctgccacccctcctagtggggactagtgaatgacttgacctgtgacctcaatacaataaatgtgatcccccacccaaaaaaaaaaaaaaaaaaaaaaaaaaaaaaaaaaaaaaaaaaaaaaaaaaaaaaaaaaaaaaaaaaaaaaaaaaaaaaaaaaaaaaaaaaattttttttttttttttttttttttttttttt

SEQ ID NO: 6013 - DNA, 2569 bp, Homo sapiens
  misc_feature (431)..(443): n is a, c, g, or t
agacgataacaacgacattgcaccccgaggagtcaaaggagcaaaggggtaccggggtcccgagggcccccaggcacgaggaggacaccaaggaccgcctgggccggacgaatgcgagattttggacatcatcatgaaaatgtgctcttgctgcagaatgcaagtgcggccccatcgacctcctgttcgtgctggacagctcagagagcattggcctgcagaacttcgagattgccaaggacttcgtcgtcaaggtcatcgaccggctgagccgggacgagctggtcaagttcgagccagggcagtcgtacgcgggtgtggtgcagtacagccacagccagatgcaggagcacgtgagcctgcgcagccccagcatccggaacgtgcaggagctcaaggaagccatcaagagcctgcagtggatggcgggnnnnnnnnnnnnnggggaggccctgcagtacacgcgggaccagctgctgccgcccagcccgaacaaccgcatcgccctggtcatcactgacgggcgctcagacactcagagggacaccacaccgctcaacgtgctctgcagccccggcatccaggtggtctccgtgggcatcaaagacgtgtttgacttcatcccaggctcagaccagctcaatgtcatttcttgccaaggcctggcaccatcccagggccggcccggcctctcgctggtcaaggagaactatgcagagctgctggaggatgccttcctgaagaatgtcaccgcccagatctgcatagacaagaagtgtccagattacacctgccccatcacgttctcctccccggctgacatcaccatcctgctggacggctccgccagcgtgggcagccacaactttgacaccaccaagcgcttcgccaagcgcctggccgagcgcttcctcacagcgggcaggacggaccccgcccacgacgtgcgggtggcggtggtgcagtacagcggcacgggccagcagcgcccagagcgggcgtcgctgcagttcctgcagaactacacggccctggccagtgccgtcgatgccatggactttatcaacgacgccaccgacgtcaacgatgccctgggctatgtgacccgcttctaccgcgaggcctcgtctggcgctgccaagaagaggctgctgctcttctcagatggcaactcgcagggcgccacgcccgctgccatcgagaaggccgtgcaggaagcccagcgggcaggcatcgagatcttcgtggtggtcgtgggccgccaggtgaatgagccccacatccgcgtcctggtcaccggcaagacggccgagtacgacgtggcctacggcgagagccacctgttccgtgtccccagctaccaggccctgctccgcggtgtcttccaccagacagtctccaggaaggtggcgctgggctagcccaccctgcacgccggcaccaaaccctgtcctcccacccctccccactcatcactaaacagagtaaaatgtgatgcgaattttcccgaccaacctgattcgctagattttttttaaggaaaagcttggaaagccaggacacaacgctgctgcctgctttgtgcagggtcctccggggctcagccctgagttggcatcacctgcgcagggccctctggggctcagccctgagctagtgtcacctgcacagggccctctggggctcagccctgagctggcgtcacctgtgcagggccctctggggctcagccctgagctggcctcacctgggttccccaccccgggctctcctgccctgccctcctgcccgccctccctcctgcctgcgcagctccttccctaggcacctctgtgctgcgtcccaccagcctgagcaagacgccctctcggggcctgtgccgcactagcctccctctcctctgtccccatagctggtttttcccaccaatcctcacctaacagttactttacaattaaactcaaagcaagctcttctcctcagcttggggcagccattggcctctgtctcgttttgggaaaccaaggtcaggaggccgttgcagacataaatctcggcgactcggccccgtctcctgagggtcctgctggtgaccggcctggaccttggccctacagccctggaggccgctgctgaccagcactgaccccgacctcagagagtactcgcaggggcgctggctgcactcaagaccctcgagattaacggtgctaaccccgtctgctcctccctcccgcagagactggggcctggactggacatgagagccccttggtgccacagagggctgtgtcttactagaaacaacgcaaacctctccttcctcagaatagtgatgtgttcgacgttttatcaaaggccccctttctatgttcatgttagttttgctccttctgtgtttttttctgaaccatatccatgttgctgacttttccaaataaaggttttcactcctcaaaaaaaaaaaaaaaaaaaccggaacgtcaaccgtttgtaggcctacggataagcaggcggaaagagaacagattagatgggtgaacaaagaatttgtcgcaaataaaaaagc

SEQ ID NO: 6014 - DNA, 877 bp, Homo sapiens
ccatgtgtagaggatggtgtggagagggggtctcaccacgtgggccaggcgggtctcgaactcctgacctcaggtggtccaccggtctgggcctcctagagtgtggggattacaggcatgagccaccacgctcggcccagtccagactttttaactacctggccccactgcagacacagttccctctagtccttcccagagttacaagaagagaactccagtagccttattctgtcagggacgaattgtttaccccatgataatgtaggatatcataaattcttcttcaaaggttttagcctgtaatttgttaagtacattgagttctgagatcctctccaaagaaccaatgtatcagtatgttcagctcacctgttctttgttcttcattttaacttttaatttcctcattctttatgtctccttgcccctagtttcagtaaacaatcccctcctagcctctgtcacctgctctgacctgagtcacctttagtcacctggtccgtaaccatctttcctgtctaaacttctcaccccaccactctggcttatacccctgctctctttaaaatagccagtcagaattagcttagattgtgcggtccaaccctagcccataggggaacaacacagcagtagggggtacctgcatcagggataagaacccattcccctcccttgttccggtgtgctctcgccattgcaccatccatgagacgcactcttgtatagaagtaaaattgccttgctgagaaaatgtaaaaaaaaaaaaaaaaaaaaaaaaaaaaaaaaaaaaaaaaaaaggggggggggcaaaaaattcccccgggggggcccatttacggaccccctttttttgtaaaagggggcccctaag

SEQ ID NO: 6015 - DNA, 1091 bp, Homo sapiens
gggatgagtggaggatgggatgagtggaggatgggatgagtggcgttggctgcagatttgtggtgcgttctgagccgtctgtcctgcgccaagatgcttcaaagtattattaaaaacatatggatccccatgaagccctactacaccaaagtttaccaggagatttggataggaatggggctgatgggcttcatcgtttataaaatccgggctgctgataaaagaagtaaggctttgaaagcatctctttcaaaagcgcctgctcctggtcatcactaaccagatttacttggagtacatgtgaaagaaaacgtcagtctgcctgtaaatttcagcaagccgtgttagatggggagcgtggaacgtcactgtacacttgtataagtaccgtttacttcatggcatgaataaatggatctgtgagatgcaaaaaaaaaaaaaaaaaaaaaaaaaaaaaaaaaaaaaaaaaaaaaaaaaaaaaaaaaaaaaaaaaaaaaaaaaaaaaaaaaaaaaaaaaaaaaaaaaaaaaaaaaaaaaaaaaaaaaaaaaaaaaaaaaaaaaaaaaaaaaaaaaaaaaaaaaaaaaaaaaaaaaaaacagacaacactgtagaaggagggaaagagcacaggggaccccgaagagaggcgagtacaaacgacgcagcacgcagggcagacaggcatagaagacccaggccaggaggtagcacccaacagacgggctagaacgagacaaccagccgtgtgggctagcagcagaacacacacggtggagcggaaaagaagagcgacacaggccaaacagaaagaggcaagacgaacggaaacaaacacgacaacaagagtgaggcagaaaacggcgaactgaccggagagagcaggaccaccagagtagaagcacacataaacaagcagagaggagaccgaacagacagaggcaggagcggcacaaggagagaaaacaaggagagggaccaggaacactacaaggaaaggaagagccaagaagacgagagaagcaaggagagagacagcgacaaacagaagaaacagaaagaaaagaaacgacaggccggaaggcacagcaagc

SEQ ID NO: 6016 - DNA, 4122 bp, Homo sapiens
gctgggaccatctgctgggttccctctaggtgctatgcacttgccgggcatgtgatgccgtttatctcactcagtcttcacaaacccatgagagatgcagtattattccctttatgcagatgaagaaactggggttaattgaggttgagtaccttgcccagggtcacacagtaagcgatagaacctggattcaaccccagtctggagccccatggtgcgtcacacgtatgatcatcctctgtcttgtatgtcttgtttggaaagggttggaaactcttgacatgaggaatggttgttattaatagcaggttttgaggaaaaccttctagaagagtcccagtatggggaagtggcagaggagacccctgcctccaacaaccagaatgccaggatgctcgagggaagacagacacctgcctccaccctggagcaagatgccactgactaccgcctccgaagcctgcggaaactcctggctcagccccgggagggcctgctggcccccttctccaagcggaactccacagcgtccttcccagggaggaccagccacattccagtgcagcagccagagaagaggaagcaaaaacccagccctgagcccagccaagattcacctcattccgacaagtggcctcctgggcaccctgtgaagaacctgcctcagatgagggggcccaggcccaggcccgctggtgacagccccaggaagactcagtggctgaaccaggtggagtcgtacatcgcagagcagagacggggtgacaggatgcggcctcaggcccccggaaggggctggcatggggaggaggaagtggtggcggccgcaggccaggaaggacaagtggagggagaggaagagggggaagaagaggaggaggaagaggatatgagtgaggtgttcgagtacgtacctgtgtttgacccggtagtaaactgggaccagaccttcagtgcccggaatctcgacttccaagccctgaggactgactggatcgatctgagctgtaacacatctggcaacctgctgcttccagagcaggaagctctggaggtcacgcgagtcttcttgaagaagctcaaccagaggagccgggggaggtaccagctacagcgcattgtgaacgtggaaaagcgtcaggaccagctacgtgggggtcgctacctcctggagcttgaactgttggaacaaggccagcgcgtggtgcggctctcggagtatgtgtctgcacgaggctggcagggcatcgatccagctggtggggaggaggtcgaggcccggaacctgcaaggcctggtctgggacccacacaaccgtaggagacaggtcctgaatacccgggcccaagagcccaagctgtgctggcctcagggtttctcctggagtcaccgagccgtggtccacttcgtcgtgcctgtgaagaaccaggcacgctgggtacagcaattcatcaaagacatggaaaacctgttccaggtcaccggtgacccacacttcaacatcgtcatcactgactatagcagtgaggacatggatgttgagatggcactgaagaggtccaagctgcggagctaccagtacgtgaagctaagtggaaactttgaacgctcagctggacttcaggctggcatagacctcgtgaaggacccgcacagcatcatcttcctctgtgacctccacatccacttcccagctggagtcatcgatgccattcggaagcactgtgtggagggaaagatggcctttgcccccatggtgatgaggctgcattgtggggccaccccccagtggcctgagggctactgggaggtgaatgggttcgggctgcttggcatctacaagtctgacctggacaggattgggggcatgaacaccaaggagttccgagaccgctggggcggggaagactgggagctgctggacaggatactccaagcgggcctggacgtggagcgtctctccctcaggaatttcttccatcatttccattccaagcgaggcatgtggagccgtcgccagatgaagacgctgtagccggagggtgtccgcggggcccagcactccccgctctggactagcagtggctccccagggccctgctactgttcagggatggggagtggggtgacggctggaccccaagaggcctcgaagctgacggcccactccacctggagctgtcccctcacagaggcaggttccggggctcctgtctctgcctcctgggccttcagaagggaggactttgagagagaggccaggagggaccacttgctcagtcgagaacgggaagagctcctgagaaggacaggtcaggaaggagagatctgactgagcgacaccatcctcatccatgaaggtgcacgcccacatcccccaagcgctcctcacgccaagcgctgaccaccagaccctcttctagtggacatattttattggggggcggggattttaaaaacagaaaaccgaaactgctgtccagagcgggggtgaggttgtgcactgagggactgtccccacgtgcaggcctcccgcccactcctatgtcccttgggcgttgtccctggccgcgggactggtcccacgtggggcagatctctgctccaccccaggctcgttgccttccagagacacacatctcccagtagccaccaaacagctggccactgattagggcattaacttcctccggatggctcacgtcagaccagaagcacagaacgggctgtttctggtgcttgggcattgggaggtggggagctggcgggcagggggcttgccactccctggcactggacattgaggcctgcagaacaggcagggtgatgaaggcaggggagagaagccctttcccttaccggcgtgcctgtgggtaaggcctcccgagaggacatggagaagaggtaaagaggatgtggacatatctgtcaatttccttaggcaagaagcgggtgggggctggacagaaagggacgaaaagggaagtggaagctgtgagcctcacagtccagctccactgcagacctgcccttctgcagggagagccctggccacccggccttgagtggaagaagaggaaagggtgtacgggggcaaaaccctggacagggagcaggataagaagggggcgggatgagaggttcggggaggtgaggacattgccctgagatatcccctggaggcagggagaggagtgggggcaggaggaactgaagaggggggcagtttcagggaaaatagcccttagcctttttagtcgatgccaccctttctgtcacctggagaccttgtacttctcttgcactaataaccccggtgcttttgtggctgggggtttttctgttgctgctgctgcctccaccactgctgtgaattcacccatggtgcattggacactggatcttgaactccagagtctgtttagggaggtgagcacagggctgggggaggtgcggcggggcccagaagaccaggccactgagcccgcgctccaggctgtgacggtccaaaccacggcactggagctgcagggtctgcctagtgggctctgcattccccgagagcacgagtttggcacatgggagaatggagcccgtggagaaccttctggggggtcggggagaatccctgcctccctttaaggaatcatgaaggacagagacttttgagattgtggcttaggaaggccatacctgctccctgggctgtggctttttctggtccctgctgaggccgactggcccctggagaaggatggtggggcataggctagggctgcagttggccagtggggctgccagtttctttctgggaccactctcgtcctcgggcattgcactggaaggctggaaccagcccaaactgcccacctgcttcacttccaatgactaggagccagcccagcctcctgccctgcccacacccctgcgccctgggccagtgccttgcgtttgatgttacctccacaccatctgccttaagaggaagggccgggcaaggcccctactccctagagaaatgtcttgggtaggagagggtgtgggatggtgggaggggaagcattaaatacagcaacttcttagaaaaaaaaaaaaaaaaaaaaaaaaaaaaaaaaaaaaaaa

SEQ ID NO: 6017 - DNA, 4164 bp, Homo sapiens
agagtgaagccaagccagctagcgctgcgaagcccaggccgcgcggactccccagagacttgccgccgcctgcgcctttgccgctgcagccatccctcttactccttgcctttcgtccccgtcgtctcctctgccgccgtgccgcagccgcaccagcatcgacaacagctaagtggccgattcggggacttggggtcggggttggggcggacgcaaggcacgaacagcactcgcgagcccgccatctctacgtcagccgccactgctgcagtaacccttctagggcgagagaggaaagcactgtggagaggcacacgctgtcccagtgctcacggttagagttcgagcgtttctgccaaaaccttggtgagagccttgcgcttggagaagggagcacagaccaggtctttgagatcgcaaaaaatatatatatcatattgcatagtgttgactttttgtcagtttaatcgaccagggcagcagctttccccaagccctcttaatccctgagctatgtctcctccaaccgtgcctccgatgggggtagatggcgtgtccgcatacctgatgaagaaaaggcacacccacaggaagcaacggcgcaagcccactttcctcactcgtaggaacatcgtgggctgccgcattcaacacggctggaaggaaggcaacgagccagtggagcagtggaagggtactgtgctcgagcaggtttccgtgaagcccactctttacatcattaaatatgatggcaaagatagtgtgtatggactagaactgcaccgcgataagagagttttagcgctagagatccttcctgagagagtgccaactcctcgtatcgattcacgactggcagattccctgattggcaaggcagtggagcatgtgtttgaaggtgaacatggtaccaaggatgaatggaagggtatggtcctggcgcgagctcctgtgatggatacttggttttacatcacctacgagaaagatcctgttctctatatgtacacgctgcttgatgactacaaagatggtgacttacgcattattccagattccaactactatttccctacagcagaacaggagcctggagaggtggtcgacagtctcgtgggcaagcaggtggagcatgccaaagatgacgggtccaagagaactggcatttttatacatcaagtggtggcgaagccatctgtttacttcattaagtttgatgatgatattcacatttatgtctatggtttggtgaaaactccttaaattctttgtgctctttagagaagttgtggatctgttagatgtgaattattttgtgttctcgtagttgtgaacgcagagaagagtttaggtgtcagaaattcaggaaagtggataaattttattgtgccaacaaatcttaccttgactagtttcacaattttgcctcaagtgtactttgctacttttgatattgccttgttctgtaacttaacagttaaattgggtgctaatagaaaattaaaaagtgtttgcaaccattggaacaatgcaaaaatagattaagaaaaattaatggtgtaaacccacaccccgtccttaccccttcctttccttaccttgtttcttcccagaaaacaagtgttgaggatgcgaagtacatccttccacctattttccccatcttcatgcagaaagtatgttctagtagtttctgtaaaaatggcaagccacatgcttttctcacttgacatgtagatgatatctcttcttatcagtagcttcagtctttcttgctctctctggctctctctggccctcactcttactctcttgcactcttgctctccccctccctcccttactctaacagctgaatacacagtacttgttgatgtaccaaaaaggcattcaaccatttcgttattgatcgtcttttatttcctttttttattttttttcaaaataacactgctgtaatacatactggtgcttttatttatataggttggattcccagaaatactatgtaggcatatgtttcagaaatattacaagattactatccaaaatgaaagcgcccgttccagcgtcctctccagcactctttaatgcttgaaaatatgaaaggctaaaaattgcattgtattgcttgttagtttaattgccttttgtctgagttcaaagaggtttgttgttgttgctgtccttgtttctgtttggatttttctctgatttgcctgttcttaccctttgctcatgtatctattgatgtttttcattataaatttgtagaaattcttactacatagtgcatattaatcatttgtagctctaatgtgttatgacgttttcatcttgactttattgatgatatattttcctttaaaatttttaaactttttaggtagacccttatctcttttatagattttggtttcctttttttatcacatggatgcccccaccaaagtcatacaaatattcacctacattttcttctaataactttattatttttaatgtttaaatgtttgatccatctgaaatttatttttgtatatggtgtaagatggggatccagctataacattttgttcacattggatacctgattgtgacatttatttaaaatgttacccattttcaaatttctgagccaatatcatgatttaattatagtggcttcatcgtaagttttagaatccgataaagcaagtcccacttcattagttttttttttctttatataatatgtcctagacattcattttttcatgtgaaaaaatgaaatgcagaattttaataaaattctaattatgatggctgacatcacaattaaaatcctgcatttttgtttagagggctctttagtaatattaaatcttagcactcaagagtcttcgtacatcattgaaatcttttggtcttgttattggaatattcttcacgtaagtatatcatagctaactgaatttatttctaagtatttttacagttttatttcatattttgacattgtgaattggtttttttcttctcatttgtaattagctatttttgacaatatagacaacctatagatttttgtatttttatcttctgtctaatgagcttatttaatcattgaaattacagtagatttttaagaatataatattttgggttttctagatatgaaattatttcacctgaacatatagatcattttatttcctcttaatgtttatactgattactgttacattagctggatttttcaaaacaatgttgaagagtgatgacagacgtgactgtcttgttcttaattttcatggaagtaagaatgcaaaatattaatagggaatagtattccctattagtatgacatttacttttggttattagtaggtagtcattaacatgtttaagagtttccgctattcctgttttatagtgttattgctagaagtggttcctgaattttataaaatgccttttcagcatctattgataaaattgtatgattttttttctctttaatttgttgatgtaatgaattagaatggtaggcatttgatgtggaaccaaacttgtatttctggaacaaatactacttggtcattgtgaaataatgatttgctacatgagtggattttatttaccagtatttaatttagaattattgcattttcattccaaagtaaaattgtattttgtccttctgatgctatctttatcaagttttgttattgaagttgtgctagctttaaaaaaatatgaatatgtgagttttcaatttttttcctgtggtctggaataatttaaatagcattagaattatttgtttgttaaaagttagctaggacaaagtgtaaaacaatctaatcctgatgacacttttaatagtagatttttaatcagctttgtgatttctttaatagttattggtttattcaggctttttattaaaaaggtatatacattctctgtgacatacaaagttaaaagttctctattattgctgattgtactggttgttgcttgttgactgtactattcagatggctttatgcttttgtgtattttatgtcacctagatctaattctgaaaacattgtaataaaataattagctataatggtaaaaaaaaaaaaaaaaaaaaaaaaaaaaaaaaaaaaaaaaaaaaaaaaaaaaaaaaaaaaa

SEQ ID NO: 6018 - DNA, 3109 bp, Homo sapiens
  misc_feature (360)..(374): n is a, c, g, or t
  misc_feature (819)..(879): n is a, c, g, or t
cgcggtatctgcatcgggcctcactggcttcaggagctgaataccctcccaggcacacacaggtgggacacaaataagggttttggaaccactattttctcatcacgacagcaacttaaaatgcctgggaagatggtcgtgatccttggagcctcaaatatactttggataatgtttgcagcttctcaagcttttaaaatcgagaccaccccagaatctagatatcttgctcagattggtgactccgtctcattgacttgcagcaccacaggctgtgagtccccatttttctcttggagaacccagatagatagtccactgaatgggaaggtgacgaatgaggggaccacatctacgctnnnnnnnnnnnnnnntagttttgggaacgaacactcttacctgtgcacagcaacttgtgaatctaggaaattggaaaaaggaatccaggtggagatctactcttttcctaaggatccagagattcatttgagtggccctctggaggctgggaagccgatcacagtcaagtgttcagttgctgatgtatacccatttgacaggctggagatagacttactgaaaggagatcatctcatgaagagtcaggaatttctggaggatgcagacaggaagtccctggaaaccaagagtttggaagtaacctttactcctgtcattgaggatattggaaaagttcttgtttgccgagctaaattacacattgatgaaatggattctgtgcccacagtaaggcaggctgtaaaagaattgcaagtctacatatcacccaagaatacagttatttctgtgaatccatcnnnnnnnnnnnnnnnnnnnnnnnnnnnnnnnnnnnnnnnnnnnnnnnnnnnnnnnnnnnnnctccagagattttctggagtaagaaattagataatgggaatctacagcacctttctggaaatgcaactctcaccttaattgctatgaggatggaagattctggaatttatgtgtgtgaaggagttaatttgattgggaaaaacagaaaagaggtggaattaattgttcaagcattccctagagatccagaaatcgagatgagtggtggcctcgtgaatgggagctctgtcactgtaagctgcaaggttcctagcgtgtacccccttgaccggctggagattgaattacttaagggggagactattctggagaatatagagtttttggaggatacggatatgaaatctctagagaacaaaagtttggaaatgaccttcatccctaccattgaagatactggaaaagctcttgtttgtcaggctaagttacatattgatgacatggaattcgaacccaaacaaaggcagagtacgcaaacactttatgtcaatgttgcccccagagatacaaccgtcttggtcagcccttcctccatcctggaggaaggcagttctgtgaatatgacatgcttgagccagggctttcctgctccgaaaatcctgtggagcaggcagctccctaacggggagctacagcctctttctgagaatgcaactctcaccttaatttctacaaaaatggaagattctggggtttatttatgtgaaggaattaaccaggctggaagaagcagaaaggaagtggaattaattatccaagttactccaaaagacataaaacttacagcttttccttctgagagtgtcaaagaaggagacactgtcatcatctcttgtacatgtggaaatgttccagaaacatggataatcctgaagaaaaaagcggagacaggagacacagtactaaaatctatagatggcgcctataccatccgaaaggcccagttgaaggatgcgggagtatatgaatgtgaatctaaaaacaaagttggctcacaattaagaagtttaacacttgatgttcaaggaagagaaaacaacaaagactatttttctcctgagcttctcgtgctctattttgcatcctccttaataatacctgccattggaatgataatttactttgcaagaaaagccaacatgaaggggtcatatagtcttgtagaagcacagaaatcaaaagtgtagctaatgcttgatatgttcaactggagacactatttatctgtgcaaatccttgatactgctcatcattccttgagaaaaacaatgagctgagaggcagacttccctgaatgtattgaacttggaaagaaatgcccatctatgtcccttgctgtgagcaagaagtcaaagtaaaacttgctgcctgaagaacagtaactgccatcaagatgagagaactggaggagttccttgatctgtatatacaataacataatttgtacatatgtaaaataaaattatgccatagcaagattgcttaaaatagcaacactctatatttagattgttaaaataactagtgttgcttggactattataatttaatgcatgttaggaaaatttcacattaatatttgctgacagctgacctttgtcatctttcttctattttattccctttcacaaaattttattcctatatagtttattgacaataatttcaggttttgtaaagatgccgggttttatatttttatagacaaataataagcaaagggagcactgggttgactttcaggtactaaatacctcaacctatggtataatggttgactgggtttctctgtatagtactggcatggtacggagatgtttcacgaagtttgttcatcagactcctgtgcaactttcccaatgtggcctaaaaatgcaacttctttttattttcttttgtaaatgtttaggtttttttgtatagtaaagtgataatttctggaattagaaaaaaaaaaaaaaaaaaaaacacaagccaccaaaagcaaaaaaacgcagacaaaaacgacacccaaaacagcaaccacccacaagccaaaacagtcaaaaagaaaagaacaaaagcacagaacaaaaaacgacacagaagcggggcgccgccgagtgcagaagcaaataaggatatccgcacgagaccagcagcgacaaaacaaaacaggcaacgagcgaaagaaacaaagtaataaagtagatgctcgaagaaaggagcatccgcaacacaaagaagggaa

SEQ ID NO: 6019 - DNA, 5837 bp, Homo sapiens
gggctccggggctccggggaaggcggttgcagctcctgagtgcagcgcggcttcctgccactgtcccggcccggccacctctctgtcatggctctggcggacagcacacgtggattacccaacgggggcggcggcgggggcggcagtggctcctcgtcgtcctccgcggagccaccgctcttccccgacatcgtggagctgaacgtggggggccaggtgtacgtgacccggcgctgcacggtggtgtcggtgcccgactcgctgctctggcgcatgttcacgcagcagcagccgcaggagctggcccgggacagcaaaggccgcttctttctggaccgggacggcttcctcttccgctacatcctggattacctgcgggacttgcagctcgtgctgcccgactacttccccgagcgcagccggctgcagcgcgaggccgagtacttcgagctgccagagctcgtgcgccgcctcggggcgccccagcagcccggcccggggccgccgccctcgcggcgcggggtgcacaaggagggctcgctgggtgacgagctgctgccgcttggctactcggagcccgaacagcaggagggcgcctctgccggggcgccgtcgcccacgctggagctggctagccgcagtccgtccgggggcgcggcgggcccgctgctcacgccgtcccagtcgctggacggcagccggcgctcgggctacatcaccatcggctaccgcggctcctacaccatcgggcgggacgcgcaggcggacgccaagttccggcgagtggcgcgcatcaccgtttgcggaaagacgtcgctggccaaggaggtgtttggggacaccctgaacgaaagccgggaccccgaccgtcccccggagcgctacacctcgcgctattacctcaagttcaacttcctggagcaggccttcgacaagctgtccgagtcgggcttccacatggtggcgtgcagctccacgggcacctgcgcctttgccagcagcaccgaccagagcgaggacaagatctggaccagctacaccgagtacgtcttctgcagggagtgagctccccagaccccctcgccactccagcgcccagtccttctcctgcccgagagatgattacagagcctcttgtcccacctttgtcccctggctgctgccctcccattctccccctccagtagtagctgggtgagacctgtccgcccaccttccctccactacagaacctgcagccgcaaatcctctgggctgcttcgtcttctttggacctcctgaaccgagagaacccagaggaacccccaccccacccccacctaccactccatgctttctctactccctgcctcaaaccacccctcccccagatggtacttcagtttggatctattgggggagtgtggccacagaccgggggatgattgaattgttcagaacctgattggaccgtgtccaatgtgcggaagatttccttgaaatcttctcaagctcttatgactcactgggggtttaagagatcaggattggttccactgtctggggttagtgttttacaaggtcattacacagtctttttgacctcttttgaaggtagagttttagaaggctggatggaagattctgagcctggaattaggaccccatggaggcagttcagtaactaaactaataaagttttgaaaagttacacgtaaagtagaagaatctagtgcgtgggacagtaaaggatcctttctcgtacagaataaaaggtctcagcctgtagcttaaacttatagaaagtgatccgcctgcctgcagaggcgcccttttcagctgctgctcgccagaagcccttgattccactggttgacatggcagcagttactggcaagagggagaaaggacgctgccgcctaagagtgcaaggctgctcaggtctccaagcgccgtaggaggtcacctggcagtgactgtagggagctgggtcatagtgcacgtcgtgggtattaggaaagcctgtattctttcaatgaatgtcagtaggaccttcctttagctgtaagacttggtgggcggggtggggtggggagggaggaaagggtaggaagggtgggaagggagaagcagacatagtcatttatgatttgaaagttggaagtttgtaccatctgtttgagtatatgcacatttaaaaaatatcatatagtaaatgcaaacatgccaagtattttataaagattaataacagacctactcttacctggcagtttacttaacttactgttttgagtcctaaacttagagttgttaatgcttatatataatctaaccaaagagttacccagtagggttttagtttttgaacttttattttcttgttgattataaatcctgattttggaatctattgcgcaaaagaagtttcattttggttacttagacctaagatcacttattaaaaatccttattttctccaagcccagcaaacgttgacttctgggcaaacctgaaaacctgaaaatgccactttcatgcagtttgtttgaagttaagtggaatcctttcaaatgacgagctgcagagaactcagcaccaagggctgcctatctgtagatagctgtaaaatggaatatttttaaatgaaggcaaataagtacttaaaagtgagctgagcaataaaatggtccaataataggtaaatgcaacagaaacagaaggagacctggttgccttatgcctttactcttacatggaataaattcccaatgcatatcctatgtaaaccataagtgaagggaaataaacctcgtcatgctccatgctgtgaggtgtcctttggatattctgtgatgacagagaagcctattttgttttgttttcagcatctttctctgatgtacgtttttaaggattttgtaagagctgttttcagtgtttaaattagtgctatttttccttgtttttaaaaatgaatctcgtactgtatcttactatgtccatacagatgttacaaatcgacagttttattcttagactcatgtgatccaagctgtatataccatatataaacattttacatgaatcatttagttttttaattcatttactaatgctataaaatttcctatattaccccagtaatttgcatcagctggtttatatactaaagcaacatgttttgatgagtttcttacatccttatcgaggaattgggttaggaaaaaatacataattgtaaaactgagtttgctgtattatactttttttcttgagtattagttgtattactaatcatatgttgattaactgtctacttaaagtcaaggtacctgtatttttaatccactaatttttttttagttgggaaatagatttcaggtcttttattagactaacattttttgagaagtaaaattgacttcatatacaaagcctgtaattttaggcgaaatggaagcagaaatctaggaagttgtgcttgcttgtatgttgagtttggtctcagactaagtaatgcatcagaattcatctgtttgaagcctgaaataatttaggactctgattcactgaccaaaagtcagtgttgcagagatttctctaccccgtatggtattttgttagattgttcaacaggaagcacatgattgagaacatcttgggacagaccaaaaccactgacagatggcaaggctcggcgattctgatttcccttctcaaatctgctcaactccaagagtcttgagaaactgctaaaattttgcctctgtcactcaagtcttacaaatgttatcttgtaaacctttgaggtgaactattccactgtcttgtacataggcatcttattcactgcaccctgtcacacccagcaccccccgccccgcacattatttgaaagactgggaatttaatggttagggacagtaaatctacttctttttccagggacgactgtcccctctaaagttaaagtcaatacaagaaaactgtctatttttagcctaaagtaaaggctgtgaagaaaattcattttacattgggtagacagtaaaaaacaagtaaaataacttgacatgagcacctttagatcccttcccctccatgggctttgggccacagaatgaacctttgaggcctgtaaagtggattgtaatttcctataagctgtaatagtggaggtattgtgggttcatttgagtaagccctccaaagataccattcaaataacctgggagaatgtcataaattattcagataattaacactgcatgaatctgattcagaggcatgcatttacatatgttgccctaattaccatttgatgatcataaatacaagtgaatgacattggacttttagtaacaaacttaatttttaaaaaggtgtagacaatggtggttaaaaaaaaaaaaaaaaaaataccaggttctgtgtgtttgcaccaagtaattgacatgttttttgtttaatacatgtggaccatgaacagtattcattctcctttttcaaatgatatgctgtagaaaatattccttgaagatgtgagatttaaaaatttttccctttcaatgttgttttaattgtatttcttacttggtttttttgattgatagcacagtgataaatcataatactagacaaaattgtcttctctttcaaaccagagccatatatatgtctgtatatatgggacctactgcttctctgaggaaatgcataatctgttaatatcagacaaaatgagcaattggcagtgctcataatatattccaatttttattggaattttcgatggaatgttatttcaataaagccatgtaaggtgaaactttgataactttttactcttcaagttagggtaaattctgatccaatattcaattcatttgtgtactcccacatgcaaaatgctaaattacaatgcagacattaagaaaaagtattgactggaggggttgaattccttgagaatttattttatagtctaaatcacaaatactttactcaatttagtttttaaaatagtaaactgaatatttttgttgtaagcctatcagagtcaatccttcgtttggaattgttttcctgtttttccttactataaatcatttaaaaactgaattcattttcttagatggcataagtctgtctcttgagaaataagtaaaatactcctattttcagtatctgtagcacctgaaataggtctttgtatagccagaaacaagttatgttgaagttagcttttctttgtcaacagttttggacaataaaaatctgaaagtattaacacttgattttctactggggcccttcaaacttggttggaagaaattcaaccagaatatctacattagagtataatcatgtgtggtaggaagatggactagttaatcaagatttgttgtcacttaaattttttgtgatttttttccaagccagtttttttaaattctacaatgtgtctgaggtatgggtacattaattgtacatgtaaactattatacaactgtttttgcgactttataggcaggtaaatttgctatttactattgaactaccacatgacaattcatttatgagcactcaacagcgttaggtaccatttagtgacaaaggattaaacatccatctggatgtaaattgtgaagatgtaacataatatgtggtcaaactctcacagcatctgaaaactttttctgctcaacctgtagcatacaccacatactggatcgacactcacgagcaattcatacaccactctctcaaactaaaagaaaacacttaacacacaactcacccccaactcaaaaacttattaaagcgcagcttacacaccacagaattaaacaat

SEQ ID NO: 6020 - DNA, 3132 bp, Homo sapiens
ggctaatgcacagacatgaacatctattgaggaaaaccacaaaaaacttcaaaacagctacaacggtatcctaagaatatttcaattaaatattagtatgtctgctgaaggcactaattattaagaaacttaaaattatcaatctttcttgaatttctgatagagaagtaaaactattttccaaggctatttttcagacatgttcatctgattgatgaaaactgctagaatcttaattaaagatcactaagggttaaatactgttctctggcccttactgcgcacaccctgccaaaacatcctctaagcttttaaatattgcttcgatggtctgaatttttatttccagggaaaaagagagttttgtcccacagtcagcaggccactagtttattaacttccagtcaccttgatttttgctaaaatgaagactctgcagtctacacttctcctgttactgcttgtgcctctgataaagccagcaccaccaacccagcaggactcacgcattatctatgattatggaacagataattttgaagaatccatatttagccaagattatgaggataaatacctggatggaaaaaatattaaggaaaaagaaactgtgataatacccaatgagaaaagtcttcaattacaaaaagatgaggcaataacaccattacctcccaagaaagaaaatgatgaaatgcccacgtgtctgctgtgtgtttgtttaagtggctctgtatactgtgaagaagttgacattgatgctgtaccacccttaccaaaggaatcagcctatctttacgcacgattcaacaaaattaaaaagctgactgccaaagattttgcagacatacctaacttaagaagactcgattttacaggaaatttgatagaagatatagaagatggtactttttcaaaactttctctgttagaagaactttcacttgctgaaaatcaactactaaaacttccagttcttcctcccaagctcactttatttaatgcaaaatacaacaaaatcaagagtaggggaatcaaagcaaatgcattcaaaaaactgaataacctcaccttcctctacttggaccataatgccctggaatccgtgcctcttaatttaccagaaagtctacgtgtaattcatcttcagttcaacaacatagcttcaattacagatgacacattctgcaaggctaatgacaccagttacatccgggaccgcattgaagagatacgcctggagggcaatccaatcgtcctgggaaagcatccaaacagttttatttgcttaaaaagattaccgatagggtcatacttttaacctctattggtacaacatataaatgaaagtacacctacactaatagtctgtctcaacaatgtgtaaaggaacttaagtattggtttaatattaaccttgtatctcattttgaaggaatttaatattttaagcaaggatgttcaaaatcttacatataataagtaaaaagtaagactgaatgtctacgttcgaaacaaagtaatatgaaaatatttaaacagcattacaaaatcctagtttatactagactaccatttaaaaatcatgtttttatataaatgcccaaatttgagatgcattattcctattactaatgatgtaagtacgaggataaatccaagaaactttcaactctttgcctttcctggcctttactggatcccaaaagcatttaaggtacatgttccaaaaactttgaaaagctaaatgtttcccatgatcgctcattcttcttttatgattcatacgttattccttataaagtaagaactttgttttcctcctatcaaggcagctattttattaaatttttcacttagtctgagaaatagcagatagtctcatatttaggaaaactttccaaataaaataaatgttattctctgataaagagctaatacagaaatgttcaagttattttactttctggtaatgtcttcagtaaaatattttctttatctaaatattaacattctaagtctaccaaaaaaagttttaaactcaagcaggccaaaaccaatatgcttataagaaataatgaaaagttcatccatttctgataaagttctctatggcaaagtctttcaaatacgagataactgcaaaatattttccttttatactacagaaatgagaatctcatcaataaattagttcaagcataagatgaaaacagaatattctgtggtgccagtgcacactaccttcccacccatacacatccatgttcactgtaacaaactgaatattcacaataaagcttctgagtaacactttctgattactcatgataaactgacatggctaactgcaagaattaaatcttctatctgagagtaataatttatgatgactcagtggtgccagagtaaagtttctaaaataacattcctctcacttgtaccccactaaaagtattagtctacacattacattgaagttaaacacaaaattatcagtgttttagaaacatgagtccggactgtgtaagtaaaagtacaaacattatttccaccataaagtatgtattgaaatcaagttgtctctgtgtacagaatacatacttattcccatttttaagcatttgcttctgttttccctacctagaatgtcagatgtttttcagttatctccccatttgtcaaagttgacctcaagataacatttttcattaaagcatctgagatctaagaacacaattattattctaacaatgattattagctcattcacttattttgataactaatgatcacagctattatactactttctcgttattttgtgtgcatgcctcatttccctgacttaaacctcactgagagcgcaaaatgcagctttatactttttactttcaattgcctagcacaatagtgagtacatttgaattgaatatataataaatattgcaaaataaaatccaaaaaaaaaaaaaaaaaggaaaaaaaaaaaacactcgtgggcgcggccccaagtagagaactgtccacgggtccaaagaaacccggccgacatgctggttccccaaaaaagcccggggaccggcgtctggaacccaagggcgggctagggccaaaagggccgctacacgg

SEQ ID NO: 6021 - DNA, 6994 bp, Homo sapiens
  misc_feature (2141)..(2158): n is a, c, g, or t
gtgagcggcgctcggggcgcgctaggcggggagccgagccgggctggcggcaggcggacggggcgggcgcgtgcggcgcgagccgggcgctgaggacaagggccgctggtagggccggccggccggcgggcggagcgccgccgccgacgcacacgaggtgaccaggcattgatgcacccccaggaaggccacgcgctcaggaggccccccccccgctggctgctgctcacatggtgtctgggcccttggcactccggtggtgcgcgtgggcagggcgcggggacatggggcccgacatggagctgcccagccactcgaagcagctcctgctgcagctgaaccagcagaggaccaagggcttcctgtgtgacgtcatcatcatggtggagaactccatcttccgggcccacaagaacgtcctagccgccagcagcatctatttcaagtccctggtcctgcacgacaacctcatcaacctggacacagacatggtcagctccacagtgttccagcagatcttggacttcatctacacaggcaagctgctgcccagcgaccagccagccgagcccaacttcagcaccctcctcactgccgccagctacctccagctgcccgagttggcagccctctgccgccgcaaactcaagcgagccggcaagccctttggctctgggagggcggggtccactggcatggggcggcccccccgcagccagcggctgtccacggcctctgtcatccaagctcggtatcgggggctcgtggatgggcgcaagggggcccacgccccccaggagctcccccaagccaaaggctcagacgatgaactctttcttggtggctctaaccaggatagcgtgcaaggtctgggccgggctgtctgcccagctggcggggaggcgggtctggggggctgcagcagcagcaccaacgggagcagcgggggctgcgagcaggagctgggcttggacctgtccaagaaaagcccacccttgccccctgccaccccaggtccccacctcactcccgatgacgcagcccagctgagcgacagccaacatggctcgccccctgcggcctctgcccctcccgttgccaacagtgcctcttattctgagctggggggcacccctgatgagcccatggatctggagggggccgaggacaaccacctgagcctgctggaggcgcctggtgggcagcctcggaagagcctccggcactccactcggaagaaggagtggggcaagaaggagcctgtggctggctccccctttgagcggagagaagcagggcccaagggtccctgcccgggagaggagggtgagggggtcggggacagggttcccaatggcatcctggctagtggggctggccctagcgggccctatggggagcccccctacccctgcaaggaggaggaggagaacggcaaggatgcaagtgaagacagtgcgcagagcgggagcgaggggggcagcggccacgccagcgcccactacatgtaccggcaggagggctacgagacggtgtcctacggggacaacttgtatgtgtgcattccctgcgccaagggcttccccagctctgagcagctcaatgcgcacgtggagactcacacggaggaagagctgttcatcaaggaagagggggcctacgagacaggcagtgggggtgccgaggaggaggccgaggacctgtcagcacccagtgcggcctacacggctgagccccggcccttcaagtgttcggtctgcgagaagacctacaaggacccagccacgctgcggcagcacgagaagacgcactggctgacacggcccttcccctgcaacatctgtggcaaaatgttcacgcagcgcggcaccatgacgcgtcacatgcggagccacctgggcctgaagcccttcgcctgcgatgagtgtggcatgcgcttcacccgtcagtaccgcctcacggagcacatgcgtgtgcactcgggcgagaaaccttacgagtgccagctgtgcgggggcaagttcacccagcagcgcaacctcatcagccacctgcgcatgcacacctccccctcctagaagccaaagacccgcgggcgccctctgccaccttgctccccgggaacccatggaaggagaagnnnnnnnnnnnnnnnnnnggggcaagaccctgggtccagtggaggctccgggtggcccctctggcccccactgcccacacccagagctttaatggacagtccgtaccaagcagagccgagaggagggaagccaggggtcccagcccgtctacctccccatcccacccaggcccccagctccccgcgggggccaccgcagggcctgtgggctgggtcacgtgggtctcgctgggacctggtccctttgttgcaggcggcttggagaaagggcagtgggacgctggccacggccagggtggtgtcgggagcaggcctcaccccgctggccgtgtctgtgtgtgtgcacgtgtgcttgtgtctgtgcgggcgcgtgcagccctggttctgcagggaaaaggtgctgggggtgcagatccctccctccttgagccagggtggcactgttcactggcgctgggacagtcagggtgaccccaccgcctacctctctacaactaaagagccctctgggcctgtgttgctgttattcctactgatctgttcctctgtttttctttttgatttttgttttttaaaccaaaacagacaatagcttattttctttccgccccctccggggctgagcctgggtctgaagactgaatgtaacaggggccgctggcactcctgcgcgtcccccggctctggcgctgcaggggtgtcggcgcgccacctctccaggccccagaagcccttcttgcccaaaggcttccctggtccctgagccctgcctcggctgcctcaggggagagtgcttttcctgtagtttccaaggaatattctttgtttagaggtacttgttttttattaagagaaaaaccagtgtaacgtttatgtgactgtttgaactggaaggtctggggttccggggggtggggggaggctagactcaatgccggggccgtcggtactcttgttttcatttgtgtgtgcgtgcgtgtgtgtgtgtgtatgtgcgtatgtgtgtgtctatgtgtggtgtgtgccgtatgcatgggcagatgtttcgctttccctccttcctcgctgaacaaggtggagacttctgaccttttgctacctcttgaattcatgacaacgatatgttggtgactggcagtggaagcccttgacactcttgttttccttcgcttagcacctaggaagtcgtgtgtaggagccagcagggcgccaagtggcccagtgcctgcagctcacctgtgggttttccctttgagcctttggccacatccacctcgaggggaccctggcaccccgggcacacaaacctctgtggtataggtgaggggtgtgaggccccagcctggagccaggcactgggtgctgacaggggaaccatgaggagggtggcaggtctttgcagctcccggccagggtgaggcggaagtgagccctcatcctgccactcctatcctccattcctgcaagagttttaagcttgagagagctgaccacagggccccccggggaacagggatggcacttccctgagcagtcctggcccccggccactgtctcggggcccacctctcgcccctcatcttggtaattagccagcctcagatacttctgtgggccctgaagtgggctctcaaggtcagaccaaggttgctgatctcagtcccactgtcttcagccagctgaagctgtggggctgggctggcagcctttattgtcatcttgcttcaccatttttttttctctctcttttcattctattttaagtttagaccaaaaaaatacagagtcatcccctacccccacccctctagagaccctccagctaaaaacagagcctgagttcagggacccaagtggtgagcggcgtcttttgggggtgagggagcttgggtagatgaggctcctggctgagccctccctgtggtgatcccagcctaagatggcccctcttccctcctggtgggagacagaggactggaccctgggtctcaggttccagcaagtcaggctagggacctggggggaggagacccatggacttcacccatactcagtgagggggctcctgccgtcctgacgccaccccgccccatcagcacttaagccacatgacacaaagtctgtaccgcacgggaaatgttcacgcgcctggccgtgtgcatggcctcccgggctgtgggcagccgcatctgtgaggtgactcgtgaaagtaggtgattcctttgcagaacttcagggactgggagcagaggcccctcactcaacgacgtttgtgcgacatagtattgtatccaccttagtattgtatcgagccttttctgtgttttaatgagaaagcagaacactagtttcctatttaagactttaagggtttgtggggcggggcgggattaacacaacatttggctttgttttctttttcctttgatttccacatcaggtgtgtgcgagtgtgtgtgtgtggagatgttaagagcctcacaaggaaactgggttattggaggccaaggcggcttacagttctctgcgttcgtcacttaattcctgaatgtttcagagaaacaggaatcagaaaatagcagatatcatgtaggaaagagaggataaacaaagaaaaaagaaaaaaaaataagctcatacccaaattcacaaagcctattttttaaaccaaagcacattttgaatgagtatggaacctccatgggctcagaaaaaagatgctaatatatttatctcattgtttacataagcttttacagtttcagacctcagcagctgtaaggccagtccagggaaccctcccctgctgctggaaacccttctgagttggccctggagtggctcacgggcagagaagggtagccctggggctgggggagggattggaagcctccctggagtcacctgagccctcgtccccattcccagggcccctccaagcccagctggcaccaaagagcttgggcccgtgctgaccagcccccaaggccctctggccggaccatgctggtcctgaccagctagcctacgcggggatggccgtcagttctggccacaggacccgagtctgggcttgggtccccctgctgctctgcccgtgacccttggggatgggttgatgcgagggtcccactcaagccaaaaagccgggacctttgcgcagctctgtcgactctggtgggtccccactcctggggccccctaaccccaccccaggcagcggaaggggctgactgggtctggtccttaccaacatagacggtgcaaacactcttaacagtgttgtttttgtatcaatatgtttgtgcagtgatgaatgtatttatttctcagacttggggcgagtgagcgggtggcaggccgggctccgccactgcatgctcccgccggaccgagccccagcaagggctcctccaggattgcaaaaaaaaaggaagagaaaagatgaacctttaagcaaataagaatctcagagactcgcagcatagccatacacctcagcctgtgaaatgaacgatccggaccctcaccaactttccccacctcaggcagccctgtgtgtttaccgttcatcaccactcgggggcaccgggccgcccacccactcccaaaatccgtcagtattcactggacctcaggccctgtgcaggagtgcgatccgggctgggccgctgggcaggctgaccccctgccctcctgcggccatcctgagttggggtgaggcctgggcagccggagggcagggctcagggagcaggaggctgcatccgtccacccccaggcgtgggggacaaaagccaaaggtgccaggccttagagcagacaagggctctcagccctggcatgccccctaaagggaccaaggtcctcctatttcccagaaccccgttggggcagatgttactgaacctgtgaatcagacgccaggagtgagggctggggagggacctaactggagcctcagtctgacattccacgccggggtgggggtgggcatgagcggtgggaactgaggctgcccaggacccccttcctaggatgccccggcttcagtcaccccactttaactttctaccaggaccccctccccctacctcaccttgctatttattgctgtaatttattgacctcaaaaatgctgcataacagacctcactggggcagggaggatccccagggctcccaccctccacttggcgggccccgtggggccaggtgctgaggggagcctctctaccccacccatcactagcttccctctgccctctcccaccccgggggggacccaggtggggcactggctcatttctcgcaaatacctcgaaggggaggggggagggatggggttatagctgttttgtttaattggaactggaagagggatcatgttttgttttatgcccttcccagaaggggggagggacaccgggatcgcactcctgtactggccaccgccgctgtcacttgtcacattgagttcatgtcccttgagagtttgtataaattcaggtcagagctgcagctacacagctgcccagtgtcatagaaaagcaattcaccaacgactgatctctccattcagaagtgtgcagtcttaaatgtacagcgataagaaactgttattttatgatcttttcattaaaagcttgattgaaaaaaaaaaaaaaaaggccgcgaaaaatcccaaggggccaagagtacgcaccgagcatcgagaagcgccacaagggagaaacgacagggcgcggaacaagaaacgaagaagcgacagaggacgacaccggcgaaggcgcccgcccgcaccgcacagccgcagagcgtgcagcagacacagacgacaggacacaggaggaa

SEQ ID NO: 6022 - DNA, 2830 bp, Homo sapiens
tgagtaaacatccttctaataatgaacagaccaataatgtcttaagagagaaaaagaacaatcttttcctttttgctgtttctcgagaaggatgtttgaatttggaaacccatgttggctgtcccaaatatgagatttggcatctttcttttgtggtggggatgggttttggccactgaaagcagaatgcactggcccggaagagaagtccacgagatgtctaagaaaggcaggccccaaagacaaagacgagaagtacatgaagatgcccacaagcaagtcagcccaattctgagacgaagtcctgacatcaccaaatcgcctctgacaaagtcagaacagcttctgaggatagatgaccatgatttcagcatgaggcctggctttggaggccctgccattcctgttggtgtggatgtgcaggtggagagtttggatagcatctcagaggttgacatggactttacgatgaccctctacctgaggcactactggaaggacgagaggctgtcttttccaagcaccaacaacctcagcatgacgtttgatggccggctggtcaagaagatctgggtccctgacatgtttttcgtgcactccaaacgctccttcatccacgacaccaccacagacaacgtcatgttgcgggtccagcctgatgggaaagtgctctatagtctcagggttacagtaactgcaatgtgcaacatggacttcagccgatttcccttggacacacaaacgtgctctcttgaaattgaaagctatgcctatacagaagatgacctcatgctgtactggaaaaagggcaatgactccttaaagacagatgaacggatctcactctcccagttcctcattcaggaattccacaccaccaccaaactggctttctacagcagcacaggctggtacaaccgtctctacattaatttcacgttgcgtcgccacatcttcttcttcttgctccaaacttatttccccgctaccctgatggtcatgctgtcctgggtgtccttctggatcgaccgcagagccgtgcctgccagagtccccttaggtatcacaacggtgctgaccatgtccaccatcatcacgggcgtgaatgcctccatgccgcgcgtctcctacatcaaggccgtggacatctacctctgggtcagctttgtgttcgtgttcctctcggtgctggagtatgcggccgtcaactacctgaccactgtgcaggagaggaaggaacagaagctgcgggagaagcttccctgcaccagcggattacctccgccccgcactgcaatgctggacggcaactacagtgatggggaggtgaatgacctggacaactacatgccagagaatggagagaagcccgacaggatgatggtgcagctgaccctggcctcagagaggagctccccacagaggaaaagtcagagaagcagctatgtgagcatgagaatcgacacccacgccattgataaatactccaggatcatctttccagcagcatacattttattcaatttaatatactggtctattttctcctagatgcttgtaattctacaaatttcacatttccatggcatgcactacagaaataactgtataatgaaaaagtatttaaggatatggttaaaaaaaaatcccaggacccacccatgttttcactatcccttctgcagctttccaaagctacattgacgagacacttactggtttaatttgcacttattaaccatctattgaatacacagcattatattaggtgctgcaggaaatacgacactgtagcgactgatgttagttgttacccagatcccctggaaaagcacactaccagtgttgtgggcacatttagttccacccgttagacccttgatgctattcacatgaataatttattttcctcaagtgtcattacattgttcaggctacgtgaacttggaagcacctacaggccatttgcatgaaattcacatgcacctaaatcctcactttgacagaaactcatgcttcagtttataacctattacctattttgtatgcgactccacctccgcatgttcgttttaataaaaggcaatgataacattcacattatttttctttatatgctgtggttcacaggctttaccccttcacaagaaaagctctttagattggcgcaattgcttctgattttggtgaaattttccctggtagggaaactttgaagataagagtacacacatgcattttgtctgttgtgtcatagaggtaactaggctagaaaatttgtgtttaaatgttccctattttatataatcaccacttcatgtttcttcttcttggagcatgtccttgttcaaagagaagtgctttctcagtgatgtgatatcttcactgaggaacttgggtagagaatgatttcttctgcataaacacttcaaggaaatacataatttgggactacttgtaactcattagaatgagaaatactcacatggtttcttaagagaaaaagaacatcggaaagcaaaataaatgggaagatatcactggacatctgcatttatactcgaaataccagcattttctatggaccagaaaactgccatcacctagaccacacagcccagataccaggcagacggatggcccaatggcaactgatgtcagggcatggggtaaaggagagggttctaatctggtgtatcacttaaaaacagttatttatattatatatctgctatatagatcaacctccaccaaacttacccaaacagcatttgttttatttgaaactcactttaataaagtgaattatatacacaaaaaaaaaaaaaaa

SEQ ID NO: 6023 - DNA, 5842 bp, Homo sapiens; identical to SEQ ID NO: 5334

SEQ ID NO: 6024 - DNA, 1621 bp, Homo sapiens
  misc_feature (1596)..(1596): n is a, c, g, or t
  misc_feature (1612)..(1612): n is a, c, g, or t
tgatggctaggtacgagtctcggttttgtcggatagcgcggcggcacgaggcctgcagcggtggtcggctgttgggtgtggagtttcccagcgcccctcgggtccgaccctttgagcgttctgctccggcgccagcctacctcgctcctcggcgccatgaccacaaccaccaccttcaagggagtcgaccccaacagcaggaatagctcccgagttttgcggcctccaggtggtggatccaatttttcattaggttttgatgaaccaacagaacaacctgtgaggaagaacaaaatggcctctaatatctttgggacacctgaagaaaatcaagcttcttgggccaagtcagcaggtgccaagtctagtggtggcagggaagacttggagtcatctggactgcagagaaggaactcctctgaagcaagctccggagacttcttagatctgaagggagaaggtgatattcatgaaaatgtggacacagacttgccaggcagcctggggcagagtgaagagaagcccgtgcctgctgcgcctgtgcccagcccggtggccccggccccagtgccatccagaagaaatccccctggcggcaagtccagcctcgtcttgggttagctctgactgtcctgaacgctgtcgttctgtctgtttcctccatgcttgtgaactgcacaacttgagcctgactgtacatctcttggatttgtttcattaaaaagaagcactttatgtactgcaattcttttttttttttttcttttgaagaacaggtttctctctgtccttgactcttgggtctgtgggccatggcatgagtgttttctagtagtagattggagggaaagctttgtgacacttagtactgtgtttttaagaagaaataatttggttccagatgtgttagaggatcttttgtactgaggtttttaacactttacttgggtttaccaagcctcaactggacagaccataaacagtccacaggcaccgttcctgccaggccccaacccacagggagtctctccgcagagccttcttggtgttgccctaacttgccagtggcctttgctcagagcctcctcctgtgacatgtgaacaatgaagaggcctgcgcctcctgccttgccgcctgcaaagcaaagaaactgccttttattttttaaccttaaaaagtagccagatagtaacaagactggctggctgatgagcaaagcctttgctctcacgcagaggaaggcttggatgtacaatgaaactgcctggaactaaaagcagtgaagcaagggaggcaatcacactgaagcgggtcttcctccaggaacggggtcccacaggcgtgttgttttaaataacctgatgctgtgtgcatgatgctggtgcttgaccatgaaaggaaagtctcatccttaaaatgtgttgtacttcacaatcctggactgttgcttcaagtaaacaatatccacattttgaaaaaaaaaaaaaaaaaaaagcagacggaaaaaaatctaataataagaattgcctccgaggcattcttatggtcggggggcggggaaaaaggaaggtaattggaaatgggcaaccttgggnccaataagcttgtttntccctggaa

SEQ ID NO: 6025 - DNA, 3444 bp, Homo sapiens
  misc_feature (841)..(874): n is a, c, g, or t
ggcacgaggctcctccagcctctcacactctcctcagctctctcatctcctggaaccatggccagcacatccaccaccatcaggagccacagcagcagccgccggggtttcagtgccaactcagccaggctccctggggtcagccgctctggcttcagcagcgtctccgtgtcccgctccaggggcagtggtggcctgggtggtgcatgtggaggagctggctttggcagccgcagtctgtatggcctggggggctccaagaggatctccattggagggggcagctgtgccatcagtggcggctatggcagcagagccggaggcagctatggctttggtggcgccgggagtggatttggtttcggtggtggagccggcattggctttggtctgggtggtggagccggccttgctggtggctttgggggccctggcttccctgtgtgcccccctggaggcatccaagaggtcaccgtcaaccagagtctcctgactcccctcaacctgcaaatcgatcccaccatccagcgggtgcgggccgaggagcgtgaacagatcaagaccctcaacaacaagtttgcctccttcatcgacaaggtgcggttcctggagcagcagaacaaggttctggaaacaaagtggaccctgctgcaggagcagggcaccaagactgtgaggcagaacctggagccgttgttcgagcagtacatcaacaacctcaggaggcagctggacagcattgtcggggaacggggccgcctggactcagagctcagaggcatgcaggacctggtggaggacttcaagaacaaatatgaggatgaaatcaacaagcgcacannnnnnnnnnnnnnnnnnnnnnnnnnnnnnnnnnaagaaggatgtggatgctgcctacatgaacaaggttgaactgcaagccaaggcagacactctcacagacgagatcaacttcctgagagccttgtatgatgcagagctgtcccagatgcagacccacatctcagacacatctgtggtgctgtccatggacaacaaccgcaacctggacctggacagcatcatcgctgaggtcaaggcccaatatgaggagattgctcagagaagccgggctgaggctgagtcctggtaccagaccaagtacgaggagctgcaggtcacagcaggcagacatggggacgacctgcgcaacaccaagcaggagattgctgagatcaaccgcatgatccagaggctgagatctgagatcgaccacgtcaagaagcagtgcgccaacctgcaggccgccattgctgatgctgagcagcgtggggagatggccctcaaggatgccaagaacaagctggaagggctggaggatgccctgcagaaggccaagcaggacctggcccggctgctgaaggagtaccaggagctgatgaatgtcaagctggccctggacgtggagatcgccacctaccgcaagctgctggagggtgaggagtgcaggctgaatggcgaaggcgttggacaagtcaacatctctgtggtgcagtccaccgtctccagtggctatggcggtgccagtggtgtcggcagtggcttaggcctgggtggaggaagcagctactcctatggcagtggtcttggcgttggaggtggcttcagttccagcagtggcagagccattgggggtggcctcagctctgttggaggcggcagttccaccatcaagtacaccaccacctcctcctccagcaggaagagctataagcactaaagtgcgtctgctagctctcggtcccacagtcctcaggcccctctctggctgcagagccctctcctcaggttgcctgtcctctcctggcctccagtctcccctgctgtcccaggtagagctggggatgaatgcttagtgccctcacttcttctctctctctctataccatctgagcacccattgctcaccatcagatcaacctctgattttacatcatgatgtaatcaccactggagcttcactgttactaaattattaatttcttgcctccagtgttctatctctgaggctgagcattataagaaaatgacctctgctccttttcattgcagaaaattgccaggggcttatttcagaacaacttccacttactttccactggctctcaaactctctaacttataagtgttgtgaacccccacccaggcagtatccatgaaagcacaagtgactagtcctatgatgtacaaagcctgtatctctgtgatgatttctgtgctcttcactctttgcaattgctaaataaagcagatttataatacaaaaaaaaaaaaaaaaaaaaaaaaaaaaaaaaaaaaaaaaaaaaaaaaaaaacactaaaaacaccaaaaacaaaaacaacacaacaacaaaaagaaacaccacacaaaaaaaaaaaaaagacaaaagaacaagaaaagaagaacgacaaaagcagcggcggcgcggcgcgcgccggccttcactacctccggcagcgcagaggcggccggccgcgatagagtgaagcccggtacgcgccgcagcgggtgggctgaggcgagggcggcgtcgccggcgataggtgggcgatggcatcgttcgccccgagtgcgcggcgcgcggtgatgtgcgatcaacattgatacagaaatgagagagagagaagagaagatagtataatattagatggtgaagagagggaatgatctctctctagtggtagatggtattagacaatattatagatcgattggctgatggtgagggagagagttagattttattatttatagctaaacgatcaaagacatcgggcagcagcgaagatccacgcaggcggcgcaagacggaagcgtaggcgtgggggagggacagcagcagacgatagggggcgaggggaaatcgagaggagtgagggcgggagcagacgggacaggcggagcgctgcagcactttgtgtgatgtggggcggaggagtgggagcgcagagggaggggaggtgaggaggggatcaggtaccgtcgtttgtttgctgctagtagtgtagaactgatcattctagtatagcatgggaggctgcgtagtaagtgccggagtcaaggcagctaacgctgagaccggaggagaactagcacgacagacacgcgacacacgcggacggtggcggacacgctgggtgtagactgcgggaagtatagagccggggggagggctagggggtggtggcggggtggggtggtcggaggtgggcggtttagcgcgaggagatggttgagtgtatgcggggacgagtgcagcacgaggcgtcggggggtgagaccagggtgcggtgtgggattggtgggctgcggtggggacccgagacacggacaacacggacaggatgcggagcgaccgagagacaccatacacagaacgcagaccagacaacgccacacagaggc

SEQ ID NO: 6026 - DNA, 741 bp, Homo sapiens
cttttttttttttttgcgaagtgggctcgtgggttggcagtatgagagttgtaatggcccgactgttgagtgagggggagcaggggatcccaacggcttgcgctgcctttgcgcagcagccggcgggcgagccacgtcgcggcctggctggggtaggagagggcggtccccagtgcagttgggtgaactaccgttgcacactggagtttctggtgtctttgcttggaactgacctagctcgtggcagggggaactcggctagcggccccacagcccctgctgactcaaaacaactaatgaactctggaagcccagccagggacaatgcaccttcacagagattctgcactaatctgagtgaaggtctaaggtttggaatctccccctcatggagagaagctttgtatggctgtcatgcttagacagtgattcctgcaacttgaccttcaggctgggagaggtggagagccatgcctgttctccttccttgctatggaatttgctgacacaatatcttccgcctggtgctgggcatatcctaagaacttacaactttcctgtattatcctgtgtgagcagctgtcaccttattgggggaaaaatgcctgaaaattagggggcacttcaagtagatagcttctatttcctatatttgtcttatatacaagtatttgcttttatcaaaataattccaataaagcattttaaagtaaaaaaaaaaaaaaaaaaaaaacgaattta

SEQ ID NO: 6027 - DNA, 730 bp, Homo sapiens
ctaattctgtgaagtggcttggggttccaggcgggcagcagctgcaggctgaccttgcagcttggcggaatggactggcctcacaacctgctgtttcttcttaccatttccatcttcctggggctgggccagcccaggagccccaaaagcaagaggaaggggcaagggcggcctgggcccctggcccctggccctcaccaggtgccactggacctggtgtcacggatgaaaccgtatgcccgcatggaggagtatgagaggaacatcgaggagatggtggcccagctgaggaacagctcagagctggcccagagaaagtgtgaggtcaacttgcagctgtggatgtccaacaagaggagcctgtctccctggggctacagcatcaaccacgaccccagccgtatccccgtggacctgccggaggcacggtgcctgtgtctgggctgtgtgaaccccttcaccatgcaggaggaccgcagcatggtgagcgtgccggtgttcagccaggttcctgtgcgccgccgcctctgcccgccaccgccccgcacagggccttgccgccagcgcgcagtcatggagaccatcgctgtgggctgcacctgcatcttctgaatcacctggcccagaagccaggccagcagcccgagaccatcctccttgcacctttgtgccaagaaaggcctatgaaaagtaaacactgacttttgaaagcaagaaaaaaaaaaaaaaa

SEQ ID NO: 6028 - DNA, 5171 bp, Homo sapiens
  misc_feature (1732)..(1748): n is a, c, g, or t
  misc_feature (2551)..(2565): n is a, c, g, or t
ggcgagctaagccggaggatgtgcagctgcggcggcggcgccggctacgaagaggacggggacaggcgccgtgcgaaccgagcccagccagccggaggacgcgggcagggcgggacgggagcccggactcgtctgccgccgccgtcgtcgccgtcgtgccggccccgcgtccccgcgcgcgagcgggaggagccgccgccacctcgcgcccgagccgccgctagcgcgcgccgggcatggtcccctcttaaaggcgcaggccgcggcggcgggggcgggcgtgcggaacaaagcgccggcgcggggcctgcgggcggctcgggggccgcgatgggcgcggcgggcccgcggcggcggcggcgctgcccgggccgggcctcgcggcgctagggcgggctggcctccgcgggcgggggcagcgggctgagggcgcgcggggcctgcggcggcggcggcggcggcggcggcggcccggcgggcggagcggcgcgggcatggccgcgcgcggccggcgcgcctggctcagcgtgctgctcgggctcgtcctgggcttcgtgctggcctcgcggctcgtcctgccccgggcttccgagctgaagcgagcgggcccacggcgccgcgccagccccgagggctgccggtccgggcaggcggcggcttcccaggccggcggggcgcgcggcgatgcgcgcggggcgcagctctggccgcccggctcggacccagatggcggcccgcgcgacaggaactttctcttcgtgggagtcatgaccgcccagaaatacctgcagactcgggccgtggccgcctacagaacatggtccaagacaattcctgggaaagttcagttcttctcaagtgagggttctgacacatctgtaccaattccagtagtgccactacggggtgtggacgactcctacccgccccagaagaagtccttcatgatgctcaagtacatgcacgaccactacttggacaagtatgaatggtttatgagagcagatgatgacgtgtacatcaaaggagaccgtctggagaacttcctgaggagtttgaacagcagcgagcccctctttcttgggcagacaggcctgggcaccacggaagaaatgggaaaactggccctggagcctggtgagaacttctgcatgggggggcctggcgtgatcatgagccgggaggtgcttcggagaatggtgccgcacattggcaagtgtctccgggagatgtacaccacccatgaggacgtggaggtgggaaggtgtgtccggaggtttgcaggggtgcagtgtgtctggtcttatgagatgcagcagcttttttatgagaattacgagcagaacaaaaaggggtacattagagatctccataacagtaaaattcaccaagctatcacattacaccccaacaaaaacccaccctaccagtacaggctccacagctacatgctgagccgcaagatatccgagctccgccatcgcacaatacagctgcaccgcgaaattgtcctgatgagcaaatacagcaacacagaaattcataaagaggacctccagctgggaatccctccctccttcatgaggtttcagccccgccagcgagaggagattctggaatgggagtttctgactggaaaatacttgtattcggcagttgacggccagccccctcgaagaggaatggactccgcccagagggaagccttggacgacattgtcatgcaggtcannnnnnnnnnnnnnnnnaacgccaagaccagagggcgcatcattgacttcaaagagatccagtacggctaccgccgggtgaaccccatgtatggggctgagtacatcctggacctgctgcttctgtacaaaaagcacaaagggaagaaaatgacggtccctgtgaggaggcacgcgtatttacagcagactttcagcaaaatccagtttgtggagcatgaggagctggatgcacaagagttggccaagagaatcaatcaggaatctggatccttgtcctttctctcaaactccctgaagaagctcgtcccctttcagctccctgggtcgaagagtgagcacaaagaacccaaagataaaaagataaacatactgattcctttgtctgggcgtttcgacatgtttgtgagatttatgggaaactttgagaagacgtgtcttatccccaatcagaacgtcaagctcgtggttctgcttttcaattctgactccaaccctgacaaggccaaacaagttgaactgatgacagattaccgcattaagtaccctaaagccgacatgcagattttgcctgtgtctggagagttttcaagagccctggccctggaagtaggatcctcccagtttaacaatgaatctttgctcttcttctgcgacgtcgacctcgtctttactacagaattccttcagcgatgtcgagcaaatacagttctgggccaacaaatatattttccaatcatcttcagccagtatgacccaaagattgtttatagtgggaaagttcccagtgacaaccattttgcctttactcagaaaactgnnnnnnnnnnnnnnnatgggtttggcatcacgtgtatttataagggagatcttgtccgagtgggtggctttgatgtttccatccaaggctgggggctggaggatgtggaccttttcaacaaggttgtccaggcaggtttgaagacgtttaggagccaggaagtaggagtagtccacgtccaccatcctgtcttttgtgatcccaatcttgaccccaaacagtacaaaatgtgcttggggtccaaagcatcgacctatgggtccacacagcagctggctgagatgtggctggaaaaaaatgatccaagttacagtaaaagcagcaataataatggctcagtgaggacagcctaatgtccagctttgctggaaaagacgtttttaattatctaatttatttttcaaaaattttttgtatgatcagtttttgaagtccgtatacaaggatatattttacaagtggttttcttacataggactcctttaagattgagctttctgaacaagaaggtgatcagtgtttgcctttgaacacatcttcttgctgaacattatgtagcagacctgcttaactttgacttgaaatgtacctgatgaacaaaacttttttaaaaaaatgttttcttttgagaccctttgctccagtcctatggcagaaaacgtgaacattcctgcaaagtattattgtaacaaaacactgtaactctggtaaatgttctgttgtgattgttaacattccacagattctaccttttgtgttttgtttttttttttttacaattgttttaaagccatttcatgttccagttgtaagataaggaaatgtgataatagctgtttcatcattgtcttcaggagagctttccagagttgatcatttcccctcatggtactctgctcagcatggccacgtaggttttttgtttgttttgttttgttctttttttgagacggagtctcactctgttacccaggctggaatgcagtggcgcaatcttggctcactttaacctccacttccctggttcaagcaattcccctgcctttgcctcccgagtagctgggattacaggcacacaccaccacgcccagctagtttttttgtatttttagtagagacggggtttcaccatgcaagcccagctggccacgtaggttttaaagcaaggggcgtgaagaaggcacagtgaggtatgtggctgttctcgtggtagttcattcggcctaaatagacctggcattaaatttcaagaaggatttggcattttctcttcttgacccttctctttaaagggtaaaatattaatgtttagaatgacaaagatgaattattacaataaatctgatgtacacagactgaaacacacacacatacaccctaatcaaaacgttggggaaaaatgtatttggttttgttcctttcatcctgtctgtgttatgtgggtggagatggttttcattctttcattactgttttgttttatcctttgtatctgaaatacctttaatttatttaatatctgttgttcagagctctgccatttcttgagtacctgttagttagtattatttatgtgtatcgggagtgtgtttagtctgttttatttgcagtaaaccgatctccaaagatttccttttggaaacgctttttcccctccttaatttttatattccttactgttttactaaatattaagtgttctttgacaattttggtgctcatgtgttttggggacaaaagtgaaatgaatctgtcattataccagaaagttaaattctcagatcaaatgtgccttaataaatttgttttcatttagatttcaaacagtgatagacttgccattttaatacacgtcattggagggctgcgtatttgtaaatagcctgatgctcatttggaaaaataaaccagtgaacaatatttttctattgtacttttcagaaccattttgtctcattattcctgttttagctgaagaattgtattacatttggagagtaaaaaacttaaacacgaaaaaaaaaacagaaaagtaggccgaagcgcgacccgcaccgacacgacacgcagctccacgcaccgcggcgacacaccagacccgcggcgcagaagcaggacccaaggcacaagcacaagcacctcggtggggcgcggccgcggcggagcgaggagagatctgtcccgcccgaggcagggagggagccgcacgccccaaggaagaagaaaaacacagaggaaacaccaagaggcttaaagaaaacacgacagcggacaaaaagaggagggggagcaaacacacagcaaaaaaaaaacggcggcgcggacacagccgagcgcatcagaaacaacaccaaacagaggcagctagacgacaacaacgaagctaaaataaaaacaaagagagagagtataacaagaaccggacgacatacaaaaaaatatccccccgcggagaagagatgtgtacaaagaagcaagacacaaaacaaaagaacagcagaacagaaaaaaacaaaaaacatcaacagaaacacaagcagaaaagagaagagagagacgagcaagcaaaaaaacagaaaaaagcacaagaaaagcaaaaagaacgacaacactaagccaaa

SEQ ID NO: 6029 - DNA, 2843 bp, Homo sapiens
ggcacggatggagctcacagtctagtgagaggtcatgggcaataagtgcataagctaatttccagatggtgataaatgtggtgggggaaaaatacagggtactgctatagagaatgattgtaagtgagggtggggttattcttgattgggtggtgagtgtgtgggaggaatattttaagcagaaagaatggctcagccacaaaatggaaataagtttgaaatgttgaaggacagaaggccagtgtggctgaagcatttaggaagctattatatagtctaaaggagttggtggtttggtctagaatggtggtaattctgtgtgcgcgcgtgtctcccccgcaccaaccttttttgcacactcgaagctgaatattttcttttttagagaatttacccgcacctcctgcggggttcctaagcactctctctgctcccctccccccaactccctaccacagggccgctcccagtagttttattcttcgatcttgcccgggccgagcctggcaggggccggtggctcagcgggcctcgcacccggcgctccgccgccgccgccgcccagctgcgccggggcgccctccggagatgctgccgtggaagaagcacaagttcgagctgctggccgaggcgccgccgcggcaggcgtccaagcccaagggctacgctgtgagcctgcactactcggcgctcagctcgctggcgcgggcgtgccccgaaggcgcgcttagccgggtgggcagcatgttccgctccaagcgcaagaagctgcacatcactagcgaggacccaacttacaccgtgctctacctgggcaatgccaccaccatccaggcgcgcggcgacggctgcaccgaccttgctgtgggcaagatctggagcaagagcgaggcgggccgtcagggcaccaagatgaagctgacggtgagtgcgcagggtatccgcatggtgcacgccgaggagcgcgcgctgcgccgcccgggccacctctacctgctgcaccgcgtcacctactgcgtggccgacgcgcggctgcccaaggtcttcgcctgggtgtaccggcacgagctgaagcacaaggccgtgatgctgcgctgccacgccgtgctggtgtccaagcccgaaaaggcgcaggccatggccctgctgctctaccagacgtcggccaacgcgctggcggaatttaaacgcctcaagcggcgggacgacgcgcgtcaccagcagcaggagctggtgggcgcacacaccatcccgctagtgccgctgcgcaagctgctcctacacggaccctgctgctataaaccgccggtggagcgcagccgcaagcgcgcccaagcttggctccatcaccgaggacctgctcggcgaacagctggagcaggagctgcaggaggaagaggaagaggagcaacccgagggctgcccggaggaggaggagaaccgtgcggcagagggagatccagcagaggaggaggccgaggcgcagcgtgcgctagtggtcgccatgcactttgagtgcggggacttgttggatactctggagaatggccgtggggaggcgctaggaggcggcgggggctccctgggcccgggggccgggccgccgcctctgctgctgggcagcgcctccgacatgaaggttgagctgtcgcaacttattagcgacctgggcgagctcagcttcggcaacgacgtgcgcaccctgcaggccgacttgcgggtgacgcgcctgctgtcaggcgacagcacgggcagcgagagctccatcgagggcgggggccctgacgccacttccgccaccgccggggactcgtcccgccaggccgacggcgccagtgcagacgagccccactcgggctgagctcctccgcgcgtcgccggcgctccaccgtggctacccatccgtggtcccgacaacctccctgtcccttgcccgcccccaggaagggggaaatggggcatttggggcccagacctacacttggagcccaggtccagcgttcccccgaccgctttcccctacctcccggcccccgctcccgccccagcacttttggctctgttgcgcgtggggatgcggggagatttgagaggggaaaaccccgccaggagggagagagaggcacccctctgggatgcgggtgagggaaggttggctgaagttcctagtctcaggccgtaggtgcctggccagtttcctgtttgtggggcagctggggcctgaggaggaggggttcacttcctcctcccaccccctgggagcggccctgcgctgtcactgacatctcattaaaaaaaaaaaaaaaaaaactctcaaggtgtttgaggctttaatgcaaccctttagcccttggttctttttggtgcaagaattctggctgtttacctcagactcagacccctgaaatgttgccaaattcttcaaataactgtttggggggtggggggagatgaaagagagtcgcgttttgtttacagttaaagacatccaatatcttaaaaaggagttttcctttagaaacacacacacccttcctcttgctcaaaagatctcactccatgatactgtgtaaaatatttttgcactgttgtgaagtatttttgacttttttctgtacataactgtgttctcagagctgaatgtttatatcttttgctgtgcaaaagaaacatgtaaaatgttgttcagttgtatatacagaaatgtgtataaaacattttgttattttttaaaagtagcactgttctggttctgtttgcacgccagtggggagagaataaagaggaaaatttaacagaaaaaaaaaaaaaaaaaaaaaaaaaaaaaaaaaaaaaaaactggg

SEQ ID NO: 6030 - DNA, 1392 bp, Homo sapiens
cgaacaataagaaaatagtcatattaaatgtaaagattggtgggacacagtggctcacgcctgtaatcccagcactttaggaggccgaggcagacagattatctgaggtcaggagttggagaccagcccgaccaacatggagaaaccccatctctactaaaaatgcaaaattacccaggtgtggtggtgcatgcctgtagtcccagctgcttgggaggctgagacaggagaatcccttgaacccggaaggcagaggttgcagtgagctgaattcgtaccactgcactccagcctgggcgacagaacaagactctgtcttaaataaataaataaataaataaaataaataaataaataaatagtatcttatacatttaaagcaacccgaggaagcaaatcaggggaggttcaaaaaaatgaataagggagtaagaataggaataaagaaagaaattgaaatcccggtgattaacattttcgtagcctgttcaaatgtaagtatgtagtctattctgggatcactgtgatttggggtctgctttctacctcttaagctattttaaaacactgagaaggcaatattccaactttcatttaaatgaaatattcagaattttgattaaaataaataataaattacacaagtttacaagtaacagttaaatatttagggacatgtactaagttttacaaacagtacaaatatttaagagtgttgattgggagtaagggaatgtcaactgccaataaagtggaagatgaaagaataggactttacacagagcatatttagttatgggtctctgtctcctccccacacagaaaaactcccagacattcatgacttcatccaccctgcctggcagataggccatatttcctgaccccctggctcttcacctcaaaaggtttatctttccaccacactagcaaagaccctcaggacacacaactcatactgccagctaagcatctaccccgagggacaaggcaagcacacactagggcagctgggccatcctggccctaatccctccagcggtgtccacactgagcattgcagcacttgtagaaggtggtcatcggctcatctgcagagcgggtctgaagctgcatgaagtaagcacgaggatgttcgcatttgggacacgactctgcagtagagtcaacattctcccaggcagctgctccaccaagcacatcatccacttctttcagttttgggtacttccgatttgttaccttgcgggtgatgttgtgcacgtaggggcacgtgttgcaggcgaagcggtggcagcgttgtccctcctccacgatcagcccgttcccgcagccggggcagaacagcagcatggtctcgaactccgcaggctccaactcccggcagctccc

SEQ ID NO: 6031 - DNA, 2550 bp, Homo sapiens
gcaggcacagcccctccgtgtcctttgtctctcctgtctgaaggccagagcaggctgctaggcctggggccaccactgcccctgggtgctacacccagtgtgctgggtcactgggaacttcctgaagtggtgtcacctgaactgggcccccaaggatggggtgcgggcagtaccgcaggaagaggagcagcccctgtgaagattgagaggtctgggaagcccctgcggcttgggagagtgggggtcgccaggcagggggaaagcccctgtgccaccgctttttgccagagactcaggctccagagaggcagtgagtggcatggggggtgaggctggggccctgggcctgacctccacacgcctgcctggcctctctgtttgccatgggatgagagagacagtgctgggactcagagcggggctggagagtgagagtgcgagaaagggcctgggtggggcttggaccccggggcgggctttctggagagcccccctacgagggcctctacggcggtgacggggtggggggcttctgcaaaccttggtcagggaagtggagctggctcgagtggaagagaccacccggctcagtcggggatgtgggagtggactgggtggtgcagactgggggtcgagcgccttctgaagtgacggggccgggacgcgcagggaggcggcccaagaagcgcgccctaggccagcccagaatgcgctcggccgcgactaggacaacggcgggtggggctgggggcggctgccgggcggggagcggtcccgcgccctcagctacccctcaagagccgttgtttccctaacttcagctgccagaggctctgtgattggctgcggcacgatgacccgcgcacggattggctgcttcgggccggggggccgggcccgggggacagaatccgcccccgaaccttcaaagagggtaccccccggcaggagctggcagacctaggaggtgcgacagacccgcggggcaaacggactggggccaagagccgggagcgcgggcgcaaaggcaccagggcccgcccagggcgccgcgcagcacggccttgggggttctgcgggccttcgggtgcgcgtctcgcctctagccatggggtccgcagcgttggagatcctgggcctggtgctgtgcctggtgggctgggggggtctgatcctggcgtgcgggctgcccatgtggcaggtgaccgccttcctggaccacaacatcgtgacggcgcagaccacctggaaggggctgtggatgtcgtgcgtggtgcagagcaccgggcacatgcagtgcaaagtgtacgactcggtgctggctctgagcaccgaggtgcaggcggcgcgggcgctcaccgtgagcgccgtgctgctggcgttcgttgcgctcttcgtgaccctggcgggcgcgcagtgcaccacctgcgtggccccgggcccggccaaggcgcgtgtggccctcacgggaggcgtgctctacctgttttgcgggctgctggcgctcgtgccactctgctggttcgccaacattgtcgtccgcgagttttacgacccgtctgtgcccgtgtcgcagaagtacgagctgggcgcagcgctgtacatcggctgggcggccaccgcgctgctcatggtaggcggctgcctcttgtgctgcggcgcctgggtctgcaccggccgtcccgacctcagcttccccgtgaagtactcagcgccgcggcggcccacggccaccggcgactacgacaagaagaactacgtctgagggcgctgggcacggccgggcccctcctgccagccacgcctgcgaggcgttggataagcctggggagccccgcatggaccgcggcttccgccgggtagcgcggcgcgcaggctcctcggaacgtccggctctgcgccccgacgcggctcctggatccgctcctgcctgcgcccgcagctgaccttctcctgccactagcccggccctgcccttaacagacggaatgaagtttccttttctgtgcgcggcgctgtttccataggcagagcgggtgtcagactgaggatttcgcttcccctccaagacgctgggggtcttggctgctgccttacttcccagaggctcctgctgacttcggaggggcggatgcagagcccagggcccccaccggaagatgtgtacagctggtctttactccatcggcagggcccgagcccagggaccagtgacttggcctggacctcccggtctcactccagcatctccccaggcaaggcttgtgggcaccggagcttgagagagggcgggagtgggaaggctaagaatctgcttagtaaatggtttgaactctcaaaaaaaaaaaaaaaaaaaaaaaaaaaaaaaccaatcggccaagtgagtgatacactcctggcgacgtcacgcctgatggcacctgggaccataatcctgagatcccttgaccgggataaaagtcaaaggctcacaggccactgaggactggcgagcgcatgtagcatacacgggaccatggtggcgccatgctggccattgcgggggtggtg

SEQ ID NO: 6032 - DNA, 2707 bp, Homo sapiens
  misc_feature (841)..(859): n is a, c, g, or t
tctgagaggcgaggccgggtgaggcggcgagggcggcccgacgggcgcgggacgggacggggcagcgagggcgccgggagccgcggcccggaatcggggcgcttcgccccgggccccccagcatgaagaccccggcggacacagggtttgccttcccggattgggcctacaagccagagtcgtcccctggctcaaggcagatccagctgtggcactttatcctggagctgctgcggaaggaggagtaccagggcgtcattgcctggcagggggactacggggaattcgtcatcaaagaccctgatgaggtggcccggctgtggggcgttcgcaagtgcaagccccagatgaattacgacaagctgagccgggccctgcgctattactataacaagcgcattctgcacaagaccaaggggaaacggttcacctacaagttcaatttcaacaaactggtgctggtcaattacccattcattgatgtggggttggctgggggtgcagtgccccagagtgccccgccagtgccgtcgggtggtagccacttccgcttccctccctcaacgccctccgaggtgctgtcccccaccgaggacccccgctcaccaccagcctgctcttcatcttcatcttccctcttctcggctgtggtggcccgccgcctgggccgaggctcagtcagtgactgtagtgatggcacgtcagagctggaggaaccgctgggagaggatccccgcgcccgaccacccggccctccggatctgggtgccttccgagggcccccgctggcccgcctgccccatgaccctggtgtcttccgagtctatccccggcctcgggnnnnnnnnnnnnnnnnnnncagccccttccctgtgtcgcctctggccggtcctggatccctgctgccccctcagctctccccggctctgcccatgacgcccacccacctggcctacactccctcgcccacgctgagcccgatgtaccccagtggtggcggggggcccagcggctcagggggaggctcccacttctccttcagccctgaggacatgaaacggtacctgcaggcccacacccaaagcgtctacaactaccacctcagcccccgcgccttcctgcactaccctgggctggtggtgccccagccccagcgccctgacaagtgcccgctgccgcccatggcacccgagaccccaccggtcccctcctcggcctcgtcatcctcttcttcttcttcctccccattcaagtttaagctccagcggcccccactcggacgccggcagcgggcagctggggagaaggccgtagccgctgctgacaagagcggtggcagtgcaggcgggctggctgagggggcaggggcgctagccccaccgcccccgccaccacagatcaaggtggagcccatctcggaaggcgagtcggaggaggtagaggtgactgacatcagtgatgaggatgaggaagacggggaggtgttcaagacgccccgtgccccacctgcaccccctaagcctgagcccggcgaggcacccggggcatcccagtgcatgcccctcaagctacgctttaagcggcgctggagtgaagactgtcgcctcgaagggggtgggggccccgctgggggctttgaggatgagggtgaggacaagaaggtgcgtggggaggggcctggggaggctggggggcccctcaccccaaggcgggtgagctctgacctccagcatgccacggcccagctctccctggagcaccgagactcctgagggctgtgggcaggggacctgtgtgccccgcaccccccatgcttcttttgctgccttaagccccctatgccctggaggtgagggcagctctcttgtctcttccctgcctcctcccttttccctccccacattttgtataaaactttaatttcttttttttaaaaatggtgggggtgggtgggtgcccagggctaggggctattccctgtctctgtgggtttctaagctctgggcaaattggtggtagggggagggagggggaagttaagggggtcacctccattctggggaatttatatttgaattgaggctttggccttaacacccaggaacttttctattacaatcgcttaggaagtaaagccttgtctccctccctgttctctgcctcttgtacccctctgacccacccgctctgccccactcccagccctcctcagccccagccctgcctgccctgcccctccagggggccatgagtgcctaggtttctcataccccacaaggtcacagcaggggagggagggacaattttataatgaaccaaaaattccatgtgttggggggtggggggcggaggagggtgaggggtgccgcccatgggccacaaatctctacaagtgcctgctatccctctcccactccccaccccagcaccggtccaaccccttcatccccagctgctcctaggactggcccatgggcaggcgggtggggggatgggaagggggtgccctgaaaccaaactggaagccccctctgcctcccagctggggcctctggggtggggtggggggctgtggtcaagccttattctgtattggggactgagggtggggggagtagaggggccgctggagaatgtattcaaaacaataaaactttggacctttggaaaaaaaaaaaaaaaaaaaaaaaaaaaaaaaaaaaaaaaa

SEQ ID NO: 6033 - DNA, 6014 bp, Homo sapiens
  misc_feature (1218)..(1392): n is a, c, g, or t
  misc_feature (1681)..(1720): n is a, c, g, or t
  misc_feature (4202)..(4223): n is a, c, g, or t
cccgcggacaccaggcaggcccggccgggtgcgcggccaaggcccgctccccgcgtccccgggcgccgcccccgcccgcggctgggctccgagagacgagtgggagagcgagtgcagcgagggcgagaggcgagccgagcaggccgccctgcccgcggccctagcgccggcgcgaggagggggcgccgcggcccaccctccttcctgcctggccgcgggccggccgggccgccgcgccccgacccccatggccacccaggcctccgggccgcgaagtcgcagcgccagacccaaggcccccgagtgagcgcgggcgccgaggatctcatctggccaccgcgttctggaagaggcgagagggagagcgtgcgcgagaggagagagacggcgggggaaagggagacggcgagacgcgcagcgccggcgcccgggagacccaggaggagcccgcagataaccagcccgagtcatgcagtcttttcgagaaaggtgtggtttccatggcaaacaacagaactaccagcagacctcgcaggaaacatcacgcctagagaattacaggcagccgagtcaggccgggctaagctgcgaccggcagcggctgctcgccaaggactattataacccgcagccttacccgagctatgagggtggcgctggcacgccctctggcactgcagccgcggtggccgccgacaagtaccaccgaggcagcaaggccctgcccacacagcaaggcctgcaggggaggccggctttccctggctacggcgtccaggacagcagcccctacccaggccgctatgctggtgaggagagccttcaggcttggggggccccacagccaccacccccacagccgcagccactacctgcaggggtggccaagtatgatgagaacttgatgaaaaagacagcagtgccccccagcaggcagtatgcagagcagggcgcccaggtgccctttcggactcactccctgcacgtccagcagccaccgccgccccagcagcccctggcataccccaagctccaaaggcagaagctgcagaacgacattgcctcccctctgcccttcccccagggtacccactttcctcagcattcccagtccttccccacctcctccacctactcctcctctgtccagggtggtgggcagggggcccactcctataagagttgcacagcaccgactgcccagccccatgacaccgnnnnnnnnnnnnnnnnnnnnnnnnnnnnnnnnnnnnnnnnnnnnnnnnnnnnnnnnnnnnnnnnnnnnnnnnnnnnnnnnnnnnnnnnnnnnnnnnnnnnnnnnnnnnnnnnnnnnnnnnnnnnnnnnnnnnnnnnnnnnnnnnnnnnnnnnnnnnnnnnnnnnnnnnnnnnnnnaaacctcgccaagtatcagcactacgggcagcaaggccagggctactgccagccggacgcagccgtccggaccccagagcagtactaccagaccttcagccccagctccagccactcacccgcccgctccgtgggccgctcaccttcctacagttccacaccgtcgccgctgatgccaaacctggagaactttccctacagccagcagccgctcagcaccggggccttccccgcagggatcactgaccacagccacttcatgcccctgctcaatccctccccaacggannnnnnnnnnnnnnnnnnnnnnnnnnnnnnnnnnnnnnnnccccttcagaaggacaagctccctgagaacctgctgtcggatctcagcctgcagagcctcacggcgctgacctcacaggtggagaacatctccaacaccgtccagcagctgctgctctccaaggctgctgtgccgcagaagaaaggtgtcaagaacctcgtgtccaggaccccagagcagcataaaagccagcactgcagccccgaagggagcggctactcagccgagcccgcaggcacaccgctgtcagagccgccgagcagcacgccacagtccacgcatgcggagccgcaggaggccgactacctgagcggctccgaggacccactggagcgcagcttcctctactgcaaccaggcccgtggcagccctgccagggtcaacagcaactcgaaggccaagcccgagtccgtgtccacctgttctgtgacctctcctgacgacatgtccaccaaatctgacgactccttccagagcctacacggcagtctgccgctcgacagcttctccaagttcgtggcgggtgagcgggactgtccgcggctgctgctcagcgccctggcacaggaggacctggcctccgagatcctggggctgcaggaagccatcggtgagaaggccgacaaagcttgggctgaagcacccagcctggtcaaggacagcagcaagccacccttctcgctggagaaccacagcgcctgcctggactctgtggccaagagtgcgtggccccggcctggggagccggaggccctgcccgactccttgcagctggacaagggcggcaatgccaaggacttcagcccagggctgtttgaagacccttccgtggccttcgctacgcctgaccccaaaaagacaactggtcctctctcctttggtaccaagcccacccttggggttcctgctccagaccccactacagcagcttttgactgtttcccggacacaaccgctgccagctcagcggacagcgccaacccctttgcctggccagaggaaaacctgggggatgcttgtcccaggtggggattgcaccctggcgagcttaccaagggcctggagcagggtgggaaggcctcagatggcatcagcaaaggggacacccatgaggcttcggcctgcctgggcttccaggaggaggacccccctggggagaaggtggcctcgttgcccggggacttcaagcaggaggaggtgggtggggtgaaggaggaggcaggtgggctgctgcagtgccccgaggtggccaaggctgaccggtggctggaggacagccggcactgctgttccaccgccgacttcggggacctcccactgctgccacccaccagcaggaaggaggacctggaagctgaggaggagtactcctccctatgtgagctcctgggcagccccgagcagaggcctggcatgcaggacccgctgtcacccaaggccccactcatctgcaccaaggaggaggtggaggaggtgctggactccaaggccggctggggctctccgtgccacctctcaggggagtccgtcatcctgctgggccctacagtgggcaccgagtcaaaggtccagagctggtttgagtcctctctgtcacacatgaagccaggtgaagaggggcctgatggggagcgagctccaggggattccaccacctcggacgcctctctggcccagaagcccaacaagcctgctgtgcccgaggcgcccatcgcaaagaaagagcctgtgccacggggcaaaagcttacggagccgtcgggtgcaccgggggctgcccgaggccgaggactccccatgcagggcaccagtgctgcccaaagacctcttgctccctgaatcctgcacagggcccccccagggacagatggaaggggctggagccccaggccggggggcctcggaagggctccccaggatgtgtactcgttctctcacggccctgagtgagccccgcacgcccggacccccaggcctgaccaccacccctgcacccccagacaaactggggggcaagcagcgagccgccttcaagtcgggcaagcgggtggggaagccctcacccaaggctgcctccagccccagcaacccggccgccctgcctgtggcctccgacagcagcccgatgggctccaagaccaaggagacagactcacccagcacgcctggcaaggaccagcgctccatgatccttcggtcacgcaccaaaacccaggagatcttccactccaagcggcggaggccctctgagggccggctccccaactgccgtgccaccaagaagctcctcgacaacagccacttgcccgccacattcaaggtctccagcagcccccagaaggagggcagggtgagccagcgggcaagggtccccaaacctggtgcaggcagcaagctctctgaccggcccctccatgcgctcaaaaggaagtcggccttcatggcgccggtccccaccaagaagcggaacctggtcttgcggnnnnnnnnnnnnnnnnnnnnnnacgccagtggcaatgggggagatgggaaggaggagaggcctgagggttcccccaccctcttcaagaggatgtcttctcccaagaaagccaagcccaccaagggcaatggcgagcctgccacaaagctcccacccccggagacccccgatgcctgcctcaagctcgcctctcgggcagccttccagggggccatgaagaccaaggtgctgccaccccggaagggccggggcctgaagctggaagccatcgtgcagaagatcacctcgcccagcctcaagaagttcgcatgtaaagcgccaggggcctctcctggtaatcctctgagcccatccctttccgacaaagaccgtgggctcaagggtgctgggggcagcccagtgggggtggaagaaggcctggtaaatgtgggcaccgggcagaagctcccaacttctggggctgatccgttatgcagaaatccaaccaacagatccttaaaaggcaaactcatgaacagtaagaaactgtcttctactgactgtttcaaaaccgaggccttcacatccccggaggccctgcagcctggggggactgccctggcgcctaagaagaggagccggaaaggccgggcaggggcccatggactctccaaaggcccgctggagaagcggccctatcttggcccggctctgctcctgactccccgagacagggccagtggcacacaaggggccagtgaggacaactctggtggaggaggcaagaagccaaagatggaggagctgggcctggcctcccagcccccggagggcaggccctgccagccccagacaagggcacagaaacagccaggccacaccaactacagcagctattccaagcggaagcgcctcactcggggccgggccaagaacaccacctcttcaccctgtaaggggcgtgccaagcgacgacgacagcagcaggtgctgcccctggatcccgcagagcctgaaatccgcctcaagtacatttcctcttgcaagcggctgaggtcagacagccggacccccgccttctcacccctggagcccagcctgggagcgcaaaacccaagaagcggccagaacgcacctccggctccggcggacgcgcgaccgttgtgcaccaccagggaccgccgcgcctactctgcacgggagcagggacagcgctagatttcgtgtacaaaacctgtgtacccctctatatatatgttacatagaatgtatatatgttgggaacatgctcgcttctcccgtgtgtcgccgccgtgcgtcgtgcgcccgcaacagagccccaaccgggcctttgccgggtaaggggctaccgcgacgccacttgtccacgcagccaccaccggcccgggccagtccctgccagtccgtccgcctgtccgtccgtgtcctcagctctgtccacgcttcgataggcctgacgcagcccccagcccagggccgccctagcaacttcctgtacatatgactgtaaaatggtaaacgtgtgtattatatctggcctcgttatatagtgtatatatatgtatacatatacatatatataatatatatgaagactgtaaatgttaagacgactagtgttcttattagtatattgcttcacactgaagattgtgtgtatcgagctgtttctaaaagatgtttattttccttaagagtaaaaaacagtcattgcattcagaaaaaaaaaaaaaaaaaagtcaataaagatacaacgattgttttggaaaaaaaaaaaaaaaaaaaaagaggaaaaaaaaaaaaaaaaaaaaaa

SEQ ID NO: 6034 - DNA, 4762 bp, Homo sapiens
cgtcggcggagctggaggtgcagcgcaggcactcgctggtctcgtttgtggtgcgcatcgtgcccagccccgactggttcgtgggcgtggacagcctggacctgtgcgacggggaccgttggcgggaacaggcggcgctggacctgtacccctacgacgccgggacggacagcggcttcaccttctcctcccccaacttcgccaccatcccgcaggacacggtgaccgaggtgagtgggcaccccgcgtgcgcaagggccgctatggcccccgcggtggggacggggctggggcctggctgcaccctcgcctcccagcccaggacagccgcttgcggcttttgtgtggaagaggctctgcttctagcgccagcagtgagcaagggggtgcagccctcccatactctcccaacccggggtcacagcaccgcagggaggacagcgggacgcgcgtcccgaggaggccgccccttcctggcctcggtttccagcccgtgttccgtgggatggctgagaggagtacatgggaccctgtccccaacagtggtgcagagggtacgctggacgctgggcagtggccccagtgaggccatacgcataccagaaggtgggcttctcggaccccaggccaacctcttcttcctccccagataacgtcctcctctcccagccacccggccaactccttctactacccgcggctgaaggccctgcctcccatcgccagggtgacactggtgcggctgcgacagagccccagggccttcatccctcccgccccagtcctgcccagcagggacaatgagattgtagacagcgcctcaggtaacggacatacaggtcacatgggacacacagcagccccgaaccctgccacagggcgaccaccaaacccgaacctaaggctctgagaaattccaagtagggattcgtagtgcgtactgcaagatggtgcttagaagatttaggattctgttgattcacacactgaagatgtgactcttgcacattatttgcagttgaaagcatcttacagggccacagcccagaggaaagaatgaaaggaggctccagacagtacctgagagactctgtcctgtcagacacgcacccacaggtgacctgtgtgtcacagctgacaaggaagcttgctaggatggccctgtgtggccaccgggtgacagctatgctgcagggcacctgtgggggtctcgggacccagccaccacacagctcggggctctgctcacaggcgccttggcctggggcggggcaggtgctggtgagcattctcctagctcttccaggcacctgctggacagggcaggctgggaacgctggggccaagtggcagttccctccctgctcagctgggtggcagccactggcctcacggagcgcctgtggtctggagcgcattgctgggtcgtgggtcagggcctgttggctctgggtctctgggtctcacctgatatgggtgtgggacagtcagtgtaggccccagacaacagcggacttcagactttcccgaggaggaactggagcccaccaacctggccatgggccccgtcgtcctccaccctccatgttgctggctggagttgaggcaggtacggggccgccccacacctgccccccaagccatgtggtagggacagatgtcgtcttgaggagcagcagtaattacaagcttactgtcagccgtccctggaagcaagggccaggtcaggtcagacaggaggccgcctggctggcgggaaccactccccagacagagactgtgcccagtcctgggtccctcctcatttgggatgaactgggcctccctgtgccagcctcggtgctgcccctgcccagtgcaggcttgggctcctcactcatttgtccacgcggatgccccattccaagcagatgtccccgagccacttacccaacaggcagacgtgccagcactgtccgtggtgtgcaactggtctggcgggaagagcccctcgtgggcagagggtccagagaggtgcggtttgccccacatttgggggcactgggccacagtgggcaggggagcacgtggccagtgccctgggctaggagagggataaagtcagctgtggccaagcagaagcagtattgcaggggaagggtggggagagactgtgctatgagctctgagcaggaggcaggacatggagagaagggtgggagacggacagagccagctgtgccagccgagggaccagagtgggcagtggggacggagcacagaccaccgcccacaagggtctctcctgtgacttctggcttcccgagggcagaggctgggatgggcatgtggcggctggcacccaggaggctccgccaggtccacgccaagccagcctggctcagctctggcttcctgctcacacgctggatgcctgtccccaggcctcctgacagggctctgcagcattggagaggcttgtggtggggccctcgctgtagaacaggcactgccagtgctcactgactcctcattgcagccagggcaggggcgctcccaccacctcggtttcagtcaggaagctggggggtgctgggatctgccagcagctctgtgtgctccccaggtgggctgcccggggccctggctctctggcttctacaccagtgcccctgcgaagcctcagcgcccaaggtctttgcaagccctgttcctgcatctctggagagggctgctccaggtgtgggcctggccagggcttccagaccagtccaggcactgcacctgcacattgacccccttctccactctctctcatccttcagtagccacaaagctggcagcagggtactcgcagatttgtgaggagagccgagcccttgctgactgtcctcccgtgcacggcagagtgaggcggggctcctggcctccttaggggctgcccgctctgggccacacagccagagaaacactgtccatctggctggcttggcctgtggggtgcaaaagaggtgttttcactttgctttggaaacatggaaattaccaagtgacttaaccataacaccaaatgatgatttttaaatttatgaaaattatggaaccagatgggacacagggaaacgagaacgatactgaaaaggtctgagtcctgtggggggctccaggtcccgcaagacagctaatcaggtgcccctgtctgttattcgggtaaatgtagcagctgggtccaggctcgggcagagcagctttctacagcaggggtgtccgccctctcccggggttcccacggggttcccaggggcctcttactctgccacgatgtgggagttccaccaccacagggacttgagcggcagctccggctcttacgtagaaacgcgcaactccagtccctaggttgtgtccgaggttgctatggtgccatcccatcttgccgctcactctgcgactgtgcggagaaacgcaagtgcccccgaagggtgggcgtggcctctgatgaatgcacacgttggtgggaggtggcttccgtttgtacgaagcgcctcttcacgcaagcgttcacctcggtctcccctttgcttggtccagttccagaaacgccgctggactgcgaggtctccctgtggtcgtcctggggactgtgcggaggccactgtgggaggctcgggaccaagagcaggactcgctacgtccgggtccagcccgccaacaacgggagcccctgccccgagctcgaagaagaggctgagtgcgtccctgataactgcgtctaagaccagagccccgcagcccctggggccccccggagccatggggtgtcgggggctcctgtgcaggctcatgctgcaggcggccgagggcacagggggtttcgcgctgctcctgaccgcggtgaggccgcgccgaccatctctgcactgaagggccctctggtggccggcacgggcattgggaaacagcctcctcctttcccaaccttgcttcttaggggcccccgtgtcccgtctgctctcagcctcctcctcctgcaggataaagtcatccccaaggctccagctactctaaattatgtctccttataagttattgctgctccaggagattgtccttcatcgtccaggggcctggctcccacgtggttgcagatacctcagacctggtgctctaggctgtgctgagcccactctcccgagggcgcatccaagcgggggccacttgagaagtgaataaatggggcggtttcggaagcgtcagtgtttccatgttatggatctctctgcgtttgaataaagactatctctgttgctcacaaaaaaaaaaaaaaaaaaaaaaaactcgagtttttttttttttttttttagaggtacaaatttaataaaaatttgccctaataaattaacggcagcagccccccaggggctcagttttcgcgtgcccccaaaaaaaccaacaaattgggggcaaaaatcttggggcggcttatttggttggaagagagagtctcccccaagaagattaggggcttctaaaaggggggaaaaggagacacagcctttggcctctctccacaaagagggggtgagagaaaagccccgtgaggggccaagagaaagaacatcccctgggggctcgcgctgtattctaggggggagccaatatgtcgcgcggagtgggcggcccccgggggagtgacccttgcttctcgccgggagggagggaggacgtgagcaccgccggcgggcccgggggggcgccggccaaggaagggagacggcgggat

SEQ ID NO: 6035 - DNA, 1470 bp, Homo sapiens
actaatcatgactcagatcttaatacagggatgatctcatagcatttagatatcagaaaaggttttgacctatatgtctttaatattgtttgaatacatgtataatctttatcattcctcagtgtttcatttctcaaattctgtaaaaggaatataagaggaaagacaattcatatacaaagacaacgagattaaaaatatgcagtaggaaaaataattacttaaggggagattttttttacatgaaatctgggcttggatgtgtgtgtgtgtgtgtgtgtgtgtgtgtgcacatatgcactgtggtgggagtggggcaacttggggaatatgttacatgtgtgactttgttttgccctggcgaagttaatgttgttcagaaagggtaaatgtttggacacttgcaattgctcatggatgaatttatatgttttagtcatagaaaaattgtaccctttgatagaagcacattttctttccaaagctggttattaaccacagaattatagcaggtattcataacttaagtttgaaaatcaatagcgtctgcaaatggattaacagattagagaatcaacagcatcggaaaataggttaatgcatattgcttctaacaagtgcatgaagaaatagaagaagctatgtagctttcagttctgacagaaaagggtgaaggagggtatcatttcaagaaaaaaaatagctatcacgcaatggttatctctgaaaatatttgtattaagatgtgtatacatggccaggcatggtggctcatgcctgtaatcccagcactttgggaggcaggtggatcacgaggtcaggagatcaagaccatcctggccaacatggtgaaacctcatctctactaaaaatacaaaaatgagcggggtgtggtggcccatgcctgtagtcccagctgctcgggagactgaatctcttgagcctgggaagcagaggttgcagtgaactgagatcgcgtcactgcactccagcctggtgacagagcgagattccatctcaaaaaaaaaaaaacagtatgcacgtacaaatttcttaacctgttatcaatgtctgagctacataattatctttctagttggagtttgttttaggtgtgtaccaactgacatttcagtttttctgtttgaagtccaatgtattagtgactctgtggctgctctcttcacctgccccttgtggcctgtctacaattctaaatggattttgaactcaatgtcgtcgcttctggtttcctgcatataccaatagcattacctatgactttttttttcctgagctattttcactgagctgagctaatgaactaaaactgagttatgtttaatatttgtatcaaatacataaaaggaatactgctttttccttttgtggctcaaaggtagctgcattttaaaatatttgtgaaaataaaaacttttgttattagaaaaaaaatttaaaaaaaaaaaa

SEQ ID NO: 6036 - DNA, 1439 bp, Homo sapiens
  misc_feature (1395)..(1395): n is a, c, g, or t
gtttctcttttccgcttcagcttttttctctggtgttgatgccctttgccctggctatttcttagttactgtgctgtggcctctgagtattgggcccctgttcacttttctcctgtagttcgcccccctgggtgtgcccgcctgtccactttatgtatttgcgctctacccccctgttgtgtccctctatttctggcccacttcggggcctagtcctcgctggtagaggcgttaccttcggacctgaacagctgtcctgactcgctgaaaaggtttgtgatgtggtaagtattccggcttgagtccccagaaagccaggcatgacccgggacgactgttcaacaccaatgccaccggatttgggcaaccctgaccgctgcctgtgcccagcactgcccgggagccatgatctgcgtcattgccaatccggttaattccgaccatccccatcacagcagaagttttgcaagaagcatggagtgtacaaccccacgaaatcttcggcgtgacgaccctggacatcgtcagagccaacacctttgttgcagagctgaagggtttggatccagctcgagtcaacgtccctgtcattggtggccatgctgggaagaccatcatccccctgatctctcagtgcacccccaaggtggactttccccaggaccagctgacagcactcactgggcggatccaggaggccggcacggaggtggtcaaggctaaagccggagcaggctctgccaccctctccatggcgtatgccggcgcccgctttgtcttctcccttgtggatgcaatgaatggaaaggaaggtgttgtggaatgttccttcgttaagtcacaggaaacggaatgtacctacttctccacaccgctgctgcttgggaaaaagggcatcgagaagaacctgggcatcggcaaagtctcctcttttgaggagaagatgatctcggatgccatccccgagctgaaggcctccatcaagaagggggaagatttcgtgaagaccctgaagtgagccgctgtgacgggtggccagtttccttaatttatgaaggcatcatgtcactgcaaagccgttgcagataaactttgtattttaatttgctttggtgatgattactgtattgacatcatcatgccttccaaattgtgggtggctctgtgggcgcatcaataaaagccgtccttgattttaaaaaaaaaaaaaaaacttctgaaaaaaaaaaaacaataattccctggaaagaccacttttaaaaggcctgcttacctcttctttaccattccgaattaaaatgtggtttaactgttaaaattgtaacggggaacctttccttcagaaccttctagaaaagcccaaaaatggtaaatttatgggaaatgtgacccccnctttccgtttttcccggaaaagtggtctcgcccgccccccctcc

SEQ ID NO: 6037 - DNA, 2828 bp, Homo sapiens
gcacgagggggaagacccctcacacagcctctcctgggctcacaggagggcggagcccggggagccagttcctgaaacatgccccccattccccccccgcccaccccccactccccgctttcctgaccagttcaactgagcagatgactggtcagaaaaaaatgccccgccccctgccaggcttcagcggggcaagtttaaagtctctagtccaggaatggaggtgggggtatgggcacctggcagtgcccacagcaagccttgactgtgtggcctggagatggggcctgagcttcagggtcactgaggcacctctgggatccaggccacctggagccccggacctcccagactccactcacccattccctctccccgcacggcactcacaccaggggcggcctggagcccggatcgcagggcggggccaggccactgcctgccttcctcctccctcccggctggcctgcccccttgcctgcctgcatgcaggcttccagcagagccagcttcttcagagccaggtggatcctgtttcggtcctgcctaggtgtgtgaccctgggcgaatctacctctctcagcttctgcttcccactttatgaaaatgggactgatgtcacagggttgttatgagattaaaagatatgaagaaccggggacagtgctcagtaatcaatagtctgcagttctgcacccacgtgctcctgggtactctgccgtccccacagggtcctcagctcagcccctgtcactgcctctcctgccaccctttgtccactcggcagtgttctcactcctcatccccccacacccaccacctgtctgccagcctcttgcaccatgagttgctactcctggggtgctggactgtccccacagccatctgtctcccctgctccccatgaagaagagccagtcccctcccaggtagcacatcagagcgggcaggctccagagctcttctggtcctcttgcagtggccagaaagtggggaaaggggcccagagaggggcagggactgacccatggtcacacagcctatttatggctgatctggagccaggccttctgactatcacccatcagagcccctggattcccatttcacccaacacaggtgttggggtagaactgggggccctccacccctactagcctgactgtctcctgagacctgtctcctaagaccacttacctgaccactggccatggggaaggaaaacacctggccaaggctcatgccctaggttcccaggcatgaagttgactgtctccgcccctgctggtgtggtgagggtgactggggactaggcactaggcctttggtgcaggcgcctgaggacgtggttgcactctcccttctggggatatgcccttgagcccaggcagaggagagcacagccagggcaggacctggcagccctggtacagagcccagagggggcatcagttcctgctggtcctgctctgtttacagacaagctgctgtcctccctgcaaaggggagtgggtggggcagagggcaagtgccaggggggcacaaggctgggcatgtggctggcatgagacggtgtctgagtaatgtcaggcacctggaggcattgaccccaggaccttggaccccagacctctgaccgtggggcagccagcgtccaggtaccccaacccctgccctgggtccggcgtccccccattagtgagtcttggctctacttatagcatctgacaccagaggggccgaaaatagcccctggagaagggggaggagggggctatttaaagggcctgggaggggagagagaatgaggagtgatcatggctacctcagagctgagctgcgaggtgtcggaggagaactgtgagcgccgggaggccttctgggcagaatggaaggatctgacactgtccacacggcccgaggagggctgctccctgcatgaggaggacacccagagacatgagacctaccaccagcaggggcagtgccaggtgctggtgcagcgctcgccctggctgatgatgcggatgggcatcctcggccgtgggctgcaggagtaccagctgccctaccagcgggtactgccgctgcccatcttcacccctgccaagatgggcgccaccaaggaggagcgtgaggacacccccatccagcttcaggagctgctggcgctggagacagccctgggtggccagtgtgtggaccgccaggaggtggctgagatcacaaagcagctgccccctgtggtgcctgtcagcaagcccggtgcccttcgtcgctccctgtcccgctccatgtcccaggaagcacagagaggctgagagggactgtgacttgggctccgctgtgcccgccctgggctgggcccttcctggctaggactgtggaggggagctgctggccatggctgctttgtagtttgcccagagttgggggctaggggaggggggagccagaggccaggatgcctgagccccctgagttcccaaagggagggtggcagagacagtgggcactaagggtggagagttgggggccagcacagctgaggaccctcagccccaggagaagggacaaaaggtactggtgagggcaagaggtgcctgggaggagtggccctgatccaggaaaatgtgaggggaatctggaacgctctaggcagaagaagctgggagggagggggaggtgaaaagggcagaggcaaggatggtggggcccccagcaccctctgttagtgccgcaataaatgctcaatcatgtgccagaaaaaaaaaaaaaaaaaaaaaaaaaaaaaaaaaaaaaaaaaaaaaaaaaaaaaaaaaaaaaaa

SEQ ID NO: 6038 - DNA, 4677 bp, Homo sapiens
  misc_feature (1349)..(1363): n is a, c, g, or t
  misc_feature (1596)..(1614): n is a, c, g, or t
  misc_feature (1729)..(1760): n is a, c, g, or t
  misc_feature (3063)..(3090): n is a, c, g, or t
gcggtagcggcggcggcggcggcggcggcggcggcggcggcggcggcgcggcgtgtggagcgagggagcggcgcgagcggcggcatgacgcggaggcggagcaggccgagcggcggtgcgggcaggcgcgagcgggctcgggccgcggggccgcagaagccccaggcgcccgagcccccgccgccgccaagcctggaggcgggagcgggtgcaggccctccggaggcgccggcggagcccgaccacgacggccccagggaggatgacgaacccaacctggtgcccggcccgcaggtaggagcgagcggggagacttcggcggctcgggcgctttcaccttccccgagcgggagcgggagtggggcggggttggggatgggccatcctgccgcggctggggtagcagccttcccccgggtccggcgccgaagctttctcccccggggcgggaatggaggctggacccctctccccaaagccgaggctcggtccgcgctcctgcgactaggctgaagctgctcccctctccccgccgcctccgggcgttccggccgtacacccacactgggactgggactgggactgggctgtgatcccgaggccgcagctccgctctcggcccgccacctcccccgggcccacctgctccctcagccacaggccatctcggggctctgggactggacgactgcagcctcttccctctgcccccgggaacggctccactccgtcccctgcagcgcctgcagccgcggccccctcagcagctgtgtctcctggcgcctcctcgccatacccagcagagcagttggagcagacagccaggctgcccggaggagtttttggtggggtttctgcactgaggtggaaacccagcagaacctgcccttcttccctcccctgctccgcaaggcagcccaccccgaccttgagatcccaggtttggagaatcctgctgagagcgaacagtaggaggattccccaaagcttccagcttgccacctggaagaaggtcactttcttttgagcaaaggagataacgggaggtaccctgccaaagttcactgagaggcgggggtgacatgggccacggttgctctgggagggttgtggcactcggggctgggtggctctccctaagcttgctctgacaaaagagttttgagttggtcttttggctgagcctgcccaggaaggcaggctcctgcaggagtcttggagggtcggatgcggcgccggatgaggatgaggcgtggcggaagatgcgtttggctctgcagacactgcatcgggcagcaggggactctgggaggctggtgcagccagaaggcatggctcttgacagcctnnnnnnnnnnnnnnnggaattgtgcatatgaagaaacagaaactcagagcaactaaacatttgcccaaatgactccaactgtaggtgtcagacaaaagaaaagaaaaggacttttaggtcccccccgcctccagccagcctgtgcagacttgctgcctgctgtgtcaccgggaacgcaaaggctgggaagaaggcccttctcaaaatggactggtgttgcagggtgagaagctgccccctgacttcannnnnnnnnnnnnnnnnnntctcctaggcgagatgcctctgtgggtctgccagagttgccgaaagagcatggaggaagatgaaaggcagacaggtcgagaacatgcagtggcgatctccttgtcacacacatcnnnnnnnnnnnnnnnnnnnnnnnnnnnnnnnnattcgtcctcgtcttcctcctcatcatcctcatcctcgtcctcctcttcctgccctgggaactcgggagactgggatcctagctcgttcctgtcggcacataagctctcgggcctctggaattccccacattccagtggggccatgccaggcagctctcttgggagtcctcctaccatccccggtgaggctttccccgtctcggagcaccaccagcactcagacctcactgctccccctaacagccccaccggccaccacccgcagccagcatctctaatcccgtctcaccccagctcctttggctccccaccccacccacacctgctgcccaccaccccggcagcacctttccctgcccaggcttcagagtgccctgttgctgctgccactgccccccacactccagggccatgtcagagctcccatctaccctccaccagcatgccgctcctgaagatgcccccaccattctcggggtgcagccacccctgcagcgggcactgtggtgggcactgcagtgggcctctcctcccacccccgagctctcagccactccctagcactcacagggatcccgggtgcaaggggcacaagtttgcacacagtggcctggcttgccagctgccccagccctgcgaggcagatgaggggctgggtgaggaagaggatagcagctctgagcgaagctcctgcacctcatcctccacccaccagagagatgggaagttctgtgactgctgctactgtgagttcttcggccacaatgcggcaaaaggaaaggaaatggcagagagaaagctatgattctgatgagtatgtatacgtgtgtaatcccagagaagtgaacgcttgggagtgatgaaggcagagtggaagcaaaaaggctctcagtcccccaagtgtgacagccagccgagggacaggccgtgagcacagacggcgccaggaaggaggctcagatcagagggcatgctggctctggccagggggaggaagcagtgcagaagtctcataagccacccgctgccccgacgagtcggaactataccgagatccgggagaagctccgctcgaggctgaccaggcggaaagaggagctgcccatgaaggggggcaccctgggcgggatccctggggagcccgccgtggaccaccgagatgtggatgagctgctggaattcatcaacagcacggagcccaaagtccccaacagcgccagggccgccaagcgggcccggcacaagctgaaaaagaaggaaaaggagaaggcccagttggcagcagaagctctaaagcaggcnnnnnnnnnnnnnnnnnnnnnnnnnnnnaggcctgccagggagaggctcttggagtggcccgaccgggaactggatcgggtcaacagcttcctgagcagccgtctgcaggagatcaaaaacactgtcaaagactccatccgtgccagcttcagtgtgtgtgagctcagcatggacagcaatggcttctctaaggagggggctgctgagcctgagcctcagagtctacccccctcaaacctcagtggctcctcagagcagcagcctgacatcaaccttgacctgtcccctttgactttgggctcccctcagaaccacacgttacaagctccaggcgagccagccccaccatgggcagaaatgagaggcccccacccaccatggacagaggtgagggggccccctcccggtatcgtccccgagaacgggctcgtgaggagactcaacaccgtgcccaacctatcccgggtgatctgggtcaagacacccaagccgggctaccccagctccgaggagccaagctcaaaggaagttcccagttgcaagcaggagctgcctgagcctgtgtcctcaggtgggaagccacagaagggcaagaggcagggcagtcaggccaagaagagcgaggcaagcccagccccccggcccccagccagcctagaggttcccagtgccaagggccaggtcgctggccccaagcagccaggcagggtcctagagcttcccaaagtaggcagctgtgctgaggctggagaggggagccgggggagccggccaggaccaggttgggctggcagtcccaaaactgagaaggagaagggcagctcctggcgaaactggccaggcgaggccaaggcacggcctcaggagcaggagtctgtgcagcccccaggcccagcaaggccacagagcttgccccagggcaagggccgcagccgccggagccgcaacaagcaggagaagccagcctcctccttggacgatgtgttcctgcccaaggacatggacggggtggagatggatgagactgaccgagaggtggagtactttaagaggttctgtttggattctgcaaagcagactcgtcagaaagttgctgtgaactggaccaacttcagcctcaagaaaaccactcctagcacagctcagtgaggccctgcccaggctgagctgcttcagggcatcctgaggccctgactgccagctgaaggcgtataatttttccctccgtgtgccccacctacccgtccaagaccctctgtgctccccaccatcctggaccaaccaaaagctgaacggatgccacactgtgctggggccccttgacctcagcagagccgcttcctggtgctacgcagcctccacactcagagcccgtggactgggctggcctaagggccagggctgatggtactgctggcccaacactgctctctttgtgtttggtttttttgtttttgtttttattttgtttttttccaattctttacttttgatactgtgaagatctttcgtgccgaaagataaagcaacatttggacacagaaaaaaaaaaaaaaaaaaaaaataaagaaagaaaaaaaaaaaaaaaaaaaaaaaaaaaaaaaaaaaaaaaaa

SEQ ID NO: 6039 - DNA, 6361 bp, Homo sapiens
  misc_feature (2476)..(2571): n is a, c, g, or t
  misc_feature (2916)..(2937): n is a, c, g, or t
  misc_feature (3099)..(3146): n is a, c, g, or t
  misc_feature (3957)..(3973): n is a, c, g, or t
aaaaaatcctgcggtgcagtttttataccagaaactgataggttggctaaatgaagatcaaaggaaggattttggtttcctggtggacattttgtacagtgctctccggtgctgtgacaatgatatggaaagaaaaaaagtcttggatgatctaaccaaggtggacttgaaatggaattctcttcttaagattattgaaaaggcatgtcctagttcagataaacatgctttagtaactccttggctcaaaggcgatatccttggtgagaaattggtcaacttggcagattgtctttgtaatgaggacttggaatccagggtatcttcagaatctcacttctcagaaagatggactcttctaagcttggtattatcccaacatgttaaaaatgattacttgattggagacgtatatgttgaaagaatcattgttagacttcatgaaactttattcaaaacaaagaaattatcagaagttgaaagcagtgactcatcagtgtcttttatctgtgatgtggcctataactatttcagctcagcgaaaggatgcttgctaaggccatcatctgaagatttattattaactctctttcagttatgtgctcagagcaaagaaaaaacacatttgccagattttcttatctgtaaactgaaaaatacttggctctctggtgtaaatttattggttcatcaaactgacagttcatataaagagagtaccttcctacatttgtctgctctgtggctgaagaaccaagttcaggcttcatctttggatatcaacagtctccaagtcctcttgtctgctgttgatgatttgctaaatacacttctagagagtgaagattcttatcttatgggagtttatattggaagtgtaatgccgaacgacagtgaatgggaaaagatgaggcagtctcttcctatgcagtggttacatagacctcttttagagggaagattgagtttgaattatgaatgtttcaaaacagattttaaggaacaggacataaagacacttcccagccatttgtgtacttcagcattattgagcaaaatggtcttaattgcactgagaaaggaaacagtcttagaaaataatgagcttgagaaaataattgcagaactgctttattcactgcagtggtgtgaagaattagataacccacctatttttctaattggattttgtgaaatacttcaaaaaatgaatattacgtatgataacttacgtgtacttggtaatacgtcgggccttttgcagctgttatttaacaggtccagagaacatggcacactgtggtctcttattattgctaagttgatcctttcccgaagcatttcatctgatgaagtaaaaccacattataagagaaaagaaagtttttttccactaactgaaggcaatttgcataccattcaaagtctatgtccatttttgtcaaaagaagaaaagaaagaatttagtgctcaatgtatacctgctcttttgggctggactaagaaagatctttgcagcactaatggaggttttggacatcttgccattttcaattcttgtctgcaaaccaaaagtatagatgatggagagctattacatggaatattaaaaatcataatatcctggaagaaagagcatgaagatatttttcttttcagttgtaatctatcagaagcaagtccagaggtactgggtgtaaatatagaaataatccggtttctttccctgtttctgaaatactgctcatcccctttggcagagagtgagtgggacttcatcatgtgctccatgttggcttggttggagacaacaagtgagaatcaggcattgtattctattccacttgtgcaactgtttgcctgtgtcagctgtgatttggcctgtgacctcagtgctttctttgattccacaactctggataccattggcaatcttcctgtaaatctaatcagtgaatggaaagaatttttttcccaaggcatccacagtttgcttttacctattttggtgactgttacaggagaaaacaaagatgtgtctgaaacatcctttcagaatgcaatgctgaaacccatgtgtgaaacattaacgtatatctcaaaggaacagctattgagtcacaaacttcctgcaagattagttgctgaccaaaaaacaaacttaccagaatatctccagactttgttaaatacattggccccattactcctcttcagagctaggcctgtgcaaattgctgtttatcatatgctatacaaattgatgcctgaattaccacagtatgatcaggataatctaaagtcatacggagatgaagaagaagagccagccttgtcaccaccagcagcactgatgtctcttcttagcattcaagaggacttactagaaaatgttttggggtgtattcctgttggacagatagttactattaaaccactgagtgaagacttctgttatgttctgggataccttctnnnnnnnnnnnnnnnnnnnnnnnnnnnnnnnnnnnnnnnnnnnnnnnnnnnnnnnnnnnnnnnnnnnnnnnnnnnnnnnnnnnnnnnnnnnnnnnngtttgaataaattgctctatcacctgttcaggcttatgccagaaaatccaacctatgcagagacagcagttgaggtcccaaataaggaccctaaaacattctttactgaggagctccagctgagtattagagaaacaacaatgcttccataccacattccacacttggcttgttcagtctatcatatgacattaaaagacttgcctgccatggttaggttgtggtggaatagcagtgagaagcgtgttttcaatattgtggatagatttacaagcaagtatgtcagcagtgttctttcttttcaagaaatatcttctgtacaaacaagtacacaactatttaatnnnnnnnnnnnnnnnnnnnnnncgagctactactcgagaggtaatggctacttatactattgaggacatagttattgaacttataatacaactgccttcaaattatccactgggttcaataatagtagaaagtgggaaaagagtaggagtagctgttcagcagtggcggaactggatgctgcannnnnnnnnnnnnnnnnnnnnnnnnnnnnnnnnnnnnnnnnnnnnnnnttagctttatggaaaaataacgtagacaaacgttttgagggtgttgaagattgcatgatctgtttctcagtcattcacggtttcaactattcccttcccaaaaaagcctgtagaacatgcaagaaaaaattccattcagcctgcttgtacaaatggtttacatctagcaacaaatccacttgtccactgtgtcgtgagacgtttttctgagatttttttcactggaagggatccctgaagtacatcaaacaaaggcattggatttggatccgtctgaaagtgtggatgtggggaagccagtgagcattacttttaaataggaccttctctggaaaattattttggttaatgtaataatcctaaaatcaggtttacttaactttagattgctttgtaaatgtttggaaactttcttttacaaaagaatattacatatttgagagaaaatatttctattaatggtttaatttctttgtatatttaaaaataaatatgaaaaacccctaaattacagaattggaatttgtgaaaagattgcacaactatattattgataaacccattccgtttgttgatctgtgttttagaatagtccaagtgaagcaaaacgaactgagagagctgatttacatctatagatattttaagccttatttattagttatgacaataaattagtattctgatatttgtagattattttaatgataaaaatgacactaagctattaatacggcttgtcttaagatatctggaggcatgctctgaaatcctatataaaagagtttaaactgaactttaaggtgcctcnnnnnnnnnnnnnnnnngaaactcagaaaattaaattcttgatgctgacctttttgcttgtgggagaattatttctatatattagtgaaatttgaattgtaaacttgtcagtgaatttatcactctgagcgagtctctagagggtgagaatttgagagaaatagtaatttgattatttcattcatgaagcggagtggtagttatccttctattgagagggaagaaataaatgagtattactgaaacttaaagatcagtggaaaaaaaaaacatttaaaaatgttgtaggagactttcaattttggaagcaaactgagctattcttaccagccaaagttatactaaataagagacttgggggagcaaatgtttttcagccttcagaaatgaaagttaaggattttagcactaggtaaaattcagtataataggctgaagtggagtaagtgaaaacctgccttttgccactcttaaaaattgtgcccaaaatataaaagtgtggaactttagaacttggaataattttattgcagtcttccattacatggaaatagcatatctaatatctaggttacttgagagaccagctaatcatctctgttgcacatgtttaattggcaaaaagcaattcatgataaataaaattactgctttccatctactgggtaaaatgactattgaaatagtatgaatgtggtcagaggattatagttgagagtgaagtactatgtgtgagttatagatctctcgaattatatttatagatgcagtgtcctgcccagttttgtttgcctcctacattttactgtaaaatatttattgtcttctagccttgagcctctgagggtcagtaagtgaagtacagatagcaaaattttactacctcgttaacccttttcttaaaatattctctatctttctatgtctctttctgacatagtaatcccaaaggattgtgttactccccgtgaaagttattacttttcctttaaaaatggttttataataagactgtttaaaacctttccagtattggtacatcttggcttctggcccaaaccccaagcagaaaagaaaatggaataatggagcattgtttttccacattagtattagggcatcagattcttggtgaaacactataattaagtagttataattaaataactgttcttcatacttaggactcttaatacatttctttaagacttgtaagtataattgtaaagcttgttaactgtttatatactaaagaaaaagctttacaagataagactgaaattcagaataccacattaaagttttatctgtacagcgttgacaactctaactaaaaggattacagcccttaaaattttagcttaaggacattttaaaattgcatgagattagcaaaattattaatttaaaaccccaaagtaaattgcaaattttaaaatttatttttgactcttttatcacatgctccaatgtatgtacataagtgtctgtggcttaaataatatgttgttatttgatacatttttgtggtgcaagtaattaatgttattatttgattgttataccatatgtgcccattaaaattctttttaattaaaaatatttcaaatatgcagaaaaataataatataaatgcccttgtacccttcacatactattttgccatatttgcttctgatttttaaataaataaaatgttactcttttgtacttctaaaaaaaaaaaaaaactacgcacccagtatgccggcggcgtccaccgctagaacccacaaaaagggcggccctttttagaaaatccctccgggggccccaagttgtcgcccccccccagttttcctgcccaaagggggtccctatagggggggcccaatttaaaacctaaggacctggcgcgtctgttttcacaccctttttaaatgggaaaaacctggcaaaattggggatcttttggggagggaaccccaaaatcctggtgggggggacacaaatttgggacaaacacccccttatcacaatatttcagaggcccctaaaggtgaaaaaataaacaccctttataccggtttttaagggggtgcgacaccaaacccgacaaaaaagctctgccggggtttgaggacattttgggacaaatcgaggaaagtaatctctcggaggaaattattattacacccgccgagctagcgggagccccaacccgggggcctggccttttcaagagatgccacctgcgccccacggggttattctctccatgggtccccccataagcccacacaacaacgcgattcgtgcaaccaccctaatccgcacaccaccaaccctcttgggaagagaggtgtttttctgtgcatatttaaagaaacactcccacaagactgccgctcgcgggtgcagatgga

SEQ ID NO: 6040 - DNA, 1375 bp, Homo sapiens
  misc_feature (3)..(4): n is a, c, g, or t
tcnnataattttttctttgtgtaggtggaaaggatgtgtgagtgtggcttgttaggtctctctctttctatctttttcttttcttgttctacgcttcgctattttgtgtgtacgtggtatccgttctccttgtcctgttgctccttttggctatcaggtcactcttggggttattttctgtgctattgtcttcgttcatggttgtggcttcttatttctgtttcggttggcttctttttctttgttcttttggccttctgtctctgttactgctacttttacaggtctcttttcttgtagtgtggtatcctttttctttgtgctgtatttttgattcttccttatcctgctgtatggcttgctgagctggccctggctcccacaggcccttcctctccactgccttcgatacaccgggcctggagaactagagaaggacccggaggggccttggcagccgtgccttcagctctacagctaatcagcattctcactcctacctggtaatttaagattccagagagtggctcctcccggtgcccaagaatagatgctgactgtactcctcccaggcgccccttccccctccaatcccaccaaccctcagagccacccctaaagagatactttgatattttcaacgcagccctgctttgggctgccctggtgctgccacacttcaggctcttctcctttcacaaccttctgtggctcacagaacccttggagccaatggagactgtctcaagagggcactggtggcccgacagcctggcacagggcagtgggacagggcatggccaggtggccactccagacccctggcttttcactgctggctgccttagaacctttcttacattagcagtttgctttgtatgcactttgtttttttctttgggtcttgttttttttttccacttagaaattgcatttcctgacagaaggactcaggttgtttgaagtccctgcacagtgcatctcagcccacatagtgatggttcccctgttcactctacttagcatgtccctaccgagtctcttctccactggatggaggaaaaccaagccgtggcttcccgctcagccctccctgcccctcccttcaaccattccccatgggaaatgtcaacaagtatgaataaagacacctactgagtggcaaaaaaaaaaaaaaaaaaaaaaaaaaaaaaaaaaaaaaaaaaaaaaaaaacacacaaaacggaacgaggaagaaagaagagaagaaaggaagagcgcagagaccggcagagcaccgagaggagaccgcgggagcgagaagagaccgcgagagagagtgaagagaggacgaaaggaagcgagatgaaggaaggagacagggggagaggcccgt

SEQ ID NO: 6041 - DNA, 2672 bp, Homo sapiens
  misc_feature (494)..(574): n is a, c, g, or t
tttttttttttttttggctttttgaaaaattatctagaggtactctttgcaagtgtgagtttacactggtctttatgaaacagagctaaagcaaaacagatataaacagcttctttttttttaattttttttggggacggagtctcgccctgtcaccaggttggagtgcagtggcacgatctcagctcactgcaacctctgcctcccgggctcaagtgattcttctgcctcctgagtagctgggactacaggcgtgtgccaccacgcccagctaatttttgtatttttagtagacacagggtttcaccatgttggccaggagggtatctcgatatcttgacctcgtgatctgcctgcttcagccttccaaagtgctgggattacaggcatgagcctaaacagcttcttgagggacagtcaaatcagtaccacagattctactttttctgttaacatagtgagtttctaaagttgatttctaatagcagtgtgcnnnnnnnnnnnnnnnnnnnnnnnnnnnnnnnnnnnnnnnnnnnnnnnnnnnnnnnnnnnnnnnnnnnnnnnnnnnnnnnnntgtttgcagatattgtgaaaaaatactgtacaaagcagtggttcttaagcctcaatgcactcagaattacttaatgaggagggagctttttaaaaatacagagccctgagcttcattttagaccagttaaaaccgccaggcaattgtaatgtggtcaggtttgagaagcactaataatataaaatatctttttgcactgctgatgtttttctactgtattcatcttagctctttgtgatgctttaattatttcatttatggtgatttacttttccagtgtgtctaaagtgagcacaacttggaagaagatcctagaagatgataagggggcattccagttgtacagtaaagcaatacaaagagttaccgtaagtgtttgcagatgatgtttttagttaaaaatgcactgttagtgctcttctagaaatagaaaagaaaagaggtaatctggaaacccttctttacagtcataaagtatttcagccttatactggaacttagaaaccacattcaaaaataaagaaatctcaactcaacatttatttcttggattcttcctagaaatagaatgtctaaagtaacaaagggaaaattactcatttctcagatagagtcgaccatttagtcaatcttagttgccagttgtgtgtatgtgtattttataacatctggaaaatttggaaaagctgttttactttttaggtattaagtaccatatagactgcatctaaagtgatttcccatagtatttggttgacagtttctgtctataagttaggcttgatatgtgtgagtatttaggttttgctttgtttaagtacgtgcaggtaaattgcatgtagggataagtctcttacctaatcttgtttgtcatttcttatatgtacaaacataaaaatgtctcattgaggatacaggaaataatttctaaattctattaaaacttttttttaaattaggaaaacaacaataaattttcacctcatgcttcaaccagagaatatgttatgttcagaaccccactggcttctgttcagaaatcagcagcccagacttctctcaaaaaagatgctcaaaccaagttatccaatcaaggtgatcagaaaggttctacttatagtcgacacaatgaattctctgaggttgccaagacattgaaaaagaacgaaagcctcaaagcctgtattcgctgtaattcacctgcaaaatatgattgctatttacaacgggcaacctgcaaacgagaaggctgtggatttgattattgtacgaagtgtctctgtaattatcatactactaaagactgttcagatggcaagctcctcaaagccagttgtaaaataggtcccctgcctggtacaaagaaaagcaaaaagaatttatgaagattgtgatctcttattaaatcaattgttactgatcatgaatgttagttagaaaatgttaggttttaacttaaaaaaaaattgtattgtgattttcaattttatgttgaaatcggtgtagtatcctgaggtttttttccccccagaagataaagaggatagacaacctcttaaaatatttttacaatttaatgagaaaaagtttaaaattctcaatacaaatcaaacaatttaaatattttaagaaaaaaggaaaagtagatagtgatactgagggtaaaaaaaaattgattcaattttatggtaaaggaaacccatgcaattttacctagacagtcttaaatatgtctggttttccatctgttagcatttcagacattttatgttcctcttactcaattgataccaacagaaatatcaacttctggagtctattaaatgtgttgtcacctttctaaagctttttttcattgtgtgtatttcccaagaaagtatcctttgtaaaaacttgcttgttttccttatttctgaaatctgttttaatatttttgtatacatgtaaatatttctgtattttttatatgtcaaagaatatgtctcttgtatgtacatataaaaataaattttgctcaataaaaaaaaaaaaaaaataaaaaaacaaaaagggggggtcaaaatatcccgcagggcccaagttagccttcccagttctg

SEQ ID NO: 6042 - DNA, 2217 bp, Homo sapiens
gaggctgccgagcggacagcgactcccggggaagcccgcgctccgggagcgggagcgggagcaggagcaggagcagcgccgtcccaggccagaggcgagcgccgggcgccgggagagcggagagcccgggcagctgccggagcgcgggggcgcggcccgaggaaaccacagagcgagccctcccgccgcagccgcagtggctggcgccgcagccaggagccatgggcaacatctcctctaacatctcggcccacgaggtccctgcatatcgtcatgttgggcttggactcggccggcaagaccacggtgctctaccggctcaagttcaacgagttcgtgaacacggtgcccaccatcggcttcaacaccgagaagatcaagctgagcaacggcacggccaagggcatcagctgccacttctgggacgtgggcggccaggagaagctgcggccgctgtggaagtcctacagccgctgcacggacggcatcatctacgtggtggactcggtggacgtggaccggctggaggaggccaagacggagctgcacaaggtgaccaagttcgccgagaaccagggcacgccgctgctggtcatcgccaacaagcaggacctgcccaagtcgctgccggtggcagagattgagaagcagctggcgctgcacgagcttatcccggccaccacctatcacgtccagccggcgtgcgccatcatcggcgagggcctcaccgagggcatggacaagctctatgagatgatcctgaaacgcaggaagtccctcaagcagaagaagaagcggtaatgcgcccggagcgaccggggagcgagcgagtgcgtcaagaaagaatgaatggatggatggatggttggatggatggatggatggatgagcgagaacccgcgcccgcgaacaaagagcgaaccaaagcgatgcttcgaatttttaaaacggaatctctgcacccaaatgcaggactggtgacttaaggagctgcgaagtctgatttaccggcctactctcgacctgccccccacccccagctcaggggaccttttgtctgaacgccagagctactgaccaggtcggggggccgcggtggggagtggaagagccggtcctgctgtccgccctcccagccccaggtggaaggctcagttgtcggaaagacaaaaagcgatttcttcccactcctgcagggccagaagttcaggctgccccgcctccactgggggatcgcacctgtgaattacctgaggtatgcatttcccagaaccgtgggcgtacccaccttggggggcatgttggttctggggggaccacctctccttgcattcaggggctgtgaagctgagtaattttcggtcacagggcaggcccctgttgaaatttcatttgtcctgctctgggcccaaaggtggtggtggtttgggtcatcagaggactgcctgggacggttcagcgggcacggagcgctgtgctggcctggctggggatggccgcggaggtgcccttttcctggtgctttgtggtggctgcagaagaccagttttgttgagaactgcttttcagcctggaatcagacatcttccagatggtttggaccctgtccatgtgtaggtcattatcacacaaagagaccaataaaaatacataccatcaactaaataatacgcactaacctatgggcggggggggccaatgatgcattttacggttggccaggatagtaaaggggttaaaggggtaaggcttgggggtaaatgctggatggggtgtgtgtgtgtgtggatatagggacctccctcgtgtagtgtgtactgtgtaactcggattatacctagactcatatgttgtggaatttaaattctctaagctactgattggtttggatgagcaccacagttgcaggtgtgtgctgaattgcaagatggtattttagtttaaaccaaggggatgcctctggtcaaaccaacccgggtgaaaaacggcgttcaccgaccttgatgaaagacaaccacttctcacagctgaatgcttaccgttgggaatatttcccgtgaggcagaaaagctctgccccgccttaaatatcccctttatgcgcgcgggtggactgtcaagactccaatcggccagcggcccaccggtaaggcatccaataacactgccgaagtatggcgctagggaaaataaccccacgttgcaaaaacacaaacag

SEQ ID NO: 6043 - DNA, 1567 bp, Homo sapiens
  misc_feature (108)..(108): n is a, c, g, or t
ccatgtcccagaaacaagaagaagagaaccctgcggaggagaccggcgaggagaagcaggacacgcaggagaaagaaggtattctgcctgagagagctgaagaggcanagctaaaggccaaatacccaagcctaggacaaaagcctggaggctccgacttcctcatgaagagactccagaaagggcgggtgtgcggagatatggaggagtatgaattagggcttggagttggtaaaaacattcctgactatccttcttaaccacgtggctgatgtggggtaggtatgaggggaaggaagtggagtagcctaatgaaaaggggttctagttgagctctgtagataaatgccttgtttcagtgtggttggagacctggtgtcagataaaagaaactccatccgcacagacagatgcaaacagctcctctagttctgcagagctagttgagaactcaacattaatcattttaaaaagtactgtccttgaaatagatttgctgtgggaagaagggcagtgagtgtgggagaaaggagccgtgagcgtggggaaccccacagagcccaaaggactttttcagtattcgaaataaacaaaacaaaaacccatgaaaaaacccaacccagaaaaaaaaaaaaaaaaaaaaaaaaaaaaaaaaaaaaaaaaaaaaaaaaaaaaaaaaaaaaaaaaaaaaaaaaaaaaaaaaaaaaaaaaaaaaaaaaaaaaaaaaaaaaaaaaaaaaaaaaaaaagggggggggccctttaaaaaattcccccggggggcccaaattttacccaccccctttttttttgaaaaaggggcccccaaaggggggtcttttaaaaggggggggcgggccggctttttaaaccccggggggggaaaaaatgctacttggggattttttggaaggacccttttttttgggggggggaaaatttgggaacccccctccccaaattttaaccccctgggggaaaaaaaatttttttcgggggaaaagggggaaaacacccccaaaaatgttctgggtctagaaaattttttctttcgcggggtttttttttggaaaaaaatttttcccccgggggcgagggggttcctcagtggggggggggtatttaaaaaacacccccccccccgagggtttttttttgagggccccctagttccctcaaagggggggtggggggagaaaaaaaaaccccccccccccacttctgtgagggggggttctctctttgttttttaaaaaacccccccccccctcccccctcctgggaacggggaagaaaaaaaaaaagagcgccccgttcgggccgggaaaaccctttttatatgcggccccttaaagagggcgcccaccaaaaagacggaaccgcccccccaaattttttccccaaaaagagggttttttttttccccgcaatctaaagagggggggggtgtccccacaacccccgcggggttttttttcttgtggtgggggccaccccccgccaaaaaataaaaaacaaccccacccccccctcgggaacaacaagcacaactcctctacaccccgctga

SEQ ID NO: 6044 - DNA, 16425 bp, Homo sapiens
  misc_feature (22)..(63): n is a, c, g, or t
  misc_feature (393)..(435): n is a, c, g, or t
  misc_feature (1161)..(1175): n is a, c, g, or t
  misc_feature (2062)..(2087): n is a, c, g, or t
  misc_feature (2410)..(2424): n is a, c, g, or t
  misc_feature (6326)..(6366): n is a, c, g, or t
  misc_feature (9298)..(9319): n is a, c, g, or t
ctgcagccatgggtgccctatnnnnnnnnnnnnnnnnnnnnnnnnnnnnnnnnnnnnnnnnnngattgacccaggaggcttcagtggacctcaagaacactggcagagaggaattcctcacagccttcctgcagaactatcagctggcctacagcaaggcctacccccgcctccttatctccagtctgtcagagagccccgcttcagtctccatcctcagccaggcagacaacacctcaaagaaggtcacagtgaggcccggggagtcggtcatggtcaacatcagtgccaaggctgagatgataggcagcaagatcttccagcatgcggtggtgatccattctgactatgccatctctgtgcaggcactaaatgccaagcctgacacagcgnnnnnnnnnnnnnnnnnnnnnnnnnnnnnnnnnnnnnnnnnnnattttgtgctcacaccccccggcacctcagccaggaatgtcaaggagtttgccgtggtggccggtgccgcaggtgcctcggtcagtgtcacgctgaaggggtcagtgacattcaatggcaagttctatccagcaggcgatgtcctaagagtgactctacagccctacaatgtggcccagctacagagctcagtggatctctcggggtcaaaggtcacagctagtagccccgtggctgtcctctctggccacagctgtgcgcagaaacatacgacctgcaaccatgtggttgagcagctgctacccacgtctgcctggggcacccactatgtagtacccacgctggcctcccaatctcgctatgatttggccttcgttgtggccagccaggccacaaagctgacctacaaccatgggggtatcactggctcccgtgggctccaggcaggtgatgtggtagagtttgaggtccggccatcctggccactctacctgtctgcaaatgtgggcatccaggtcctgttgtttggcacaggtgccataaggaatgaagtgacttatgacccctacctggtcctgatcccagatgtggcggcctactgcccagcctatgtggtcaagagtgtaccaggctgtgagggcgtggccctggtagtggcacagacgaaggctatcagcgggctgaccatagatgggcatgcagtgggggccaagctcacctgggagnnnnnnnnnnnnnnngagttctcgtatgctgaagtggagctcggcacagctgacatgatccacacggccgaggccaccaccaacttgggactgctcaccttcgggctggccaaggctataggctacgcaacagctgctgattgcggccggactgtactgtccccagtggagccctcctgcgaaggcatgcagtgcgcagccgggcagcgctgccaggtggtaggcgggaaggccgggtgtgtggcggagtccaccgctgtctgccgcgcccagggcgacccccattacaccaccttcgacggccgtcgctacgacatgatgggcacctgttcgtacacgatggtggagctgtgcagcgaggacgacaccctgcccgccttcagcgtggaggccaagaacgagcaccggggcagccgccgcgtctcctacgtgggcctcgtcactgtgcgcgcctacagccactctgtgtcgctgacccgcggtgaagttggcttcgtcctggttgacaaccagcgctcgcgcctgccagtctccctgagtgagggtcgcctgcgtgtgtaccagagcggaccacgggccgtggtggagctggtctttgggctggtggtcacttatgactgggactgccagctggcactcagcctgcctgcacgcttccaagaccaggtgtgcgggctgtgtggcaactataatggtgacccagcagacgacttcctcacgcctgacggggctctggctcctgacgctgtggagttcgcaagtagctggaagctggatgatggggactacctgtgtgaggatggctgccagaacaactgtcccgcctgcaccccaggccaggcccaacactatgagggcgaccgactctgtggcatgctgaccaagctcgatggccccttcgnnnnnnnnnnnnnnnnnnnnnnnnnnaggcccttcctggagcagtgtgtatatgacctgtgtgtggtcggtggggagcggctcagcctgtgccgtggcctcagcgcctatgcccaggcctgtctggagcttggcatctcggttggggactggagatcaccagccaactgccccctgtcctgccctgccaacagccgctatgagctctgcggccctgcttgcccgacctcctgcaacggggctgcggcgccgtccaactgctccgggcgcccctgcgtggagggctgcgtgtgcctcccaggcttcgtggccagcggcggcgcctgcgtgccggcctcgtcgtgtggctnnnnnnnnnnnnnnntccagctcgctccgggccaggaagtgtgggcggacgagttgtgccaaaggcgctgcacctgcaacggcgccacccatcaggtcacctgccgcgacaagcagagctgcccggcgggtgagcgctgcagcgtccagaacggcctcctgggctgctaccccgatcgcttcgggacctgccaggggtccggggacccacactatgtgagcttcgacggccggcgcttcgacttcatgggcacctgcacgtacctgctggtcggctcatgcggccagaacgcagcgctgcctgccttccgggtgctggtggaaaacgagcatcggggcagccagactgtgagctacacgcgcgccgtgcgggtggaggcccgcggggtgaaggtggccgtgcgccgggagtaccccgggcaagtgctggtggatgacgtccttcagtatctgcccttccaagcagcagatgggcaggtgcaggtgttccgacagggcagggatgccgtcgtgcgcacggactttggcctgactgtcacttatgactggaatgcacgagtgactgccaaggtgcccagcagctatgctgaggccctgtgtggactctgtgggaacttcaacggggacccagctgatgacctggctctgcggggtgggggtcaagctgccaatgcactggcctttgggaacagctggcaagaagagacgaggcccggctgtggagcaactgaaccgggtgactgtcccaagctggactccctggtggcccagcagctgcagagcaagaatgagtgtggaatccttgccgaccccaaggggcccttccgggagtgccatagcaagctggacccccagggtgccgtgcgcgactgtgtctatgaccgctgcctgctgccaggccagtctgggccactgtgtgacgcactggccacctatgctgctgcatgccaggctgctggagccacagtgcacccctggaggagtgaagaactttgcccactgagctgcccaccccacagccactatgaggcgtgttcctacggctgcccgctgtcctgtggagacctcccagtgcccgggggctgtggctcagaatgccatgagggctgcgtgtgcgatgagggctttgcgctcagtggtgagtcctgcctgcccctggcctcctgtggctgcgtacaccagggcacctaccacccaccaggccagaccttctaccctggccccggatgtgattccctttgccactgccaggagggcggcctggtgtcctgtgagtcctccagctgcggaccgcacgaggcctgccagccatccggtggcagcttgggctgtgtggccgtgggctctagcacctgccaggcgtcaggagacccccactacaccaccttcgatggccgccgcttcgacttcatgggcacctgcgtgtatgtgctggctcagacctgcggcacccggcctggcctgcatcggtttgccgtcctgcaggagaacgtggcctggggtaatgggcgagtcagtgtgaccagggtgatcacggtccaggtggcaaacttcaccctgcggctggagcagagacagtggaaggtcacggtgaacggtgtggacatgaagctgcccgtggtgctggccaacggccagatccgtgcctcccagcatggttcagatgttgtgattgagaccgacttcggcctgcgtgtggcctacgaccttgtgtactatgtgcgggtcaccgtccccggaaactactaccagcagatgtgtggcctgtgtgggaactacaacggcgaccccaaggatgacttccagaagcccaatggctcacaggcaggcaacgccaatgagttcggcaactcctgggaggaggtggtgcccgactctccctgcctgccgcccaccccttgcccgccggggagcgaggactgtatccccagccacaagtgtcctcccgagctggagaagaagtatcagaaggaggagttctgtgggctcctctccagccccacagggccactgtcctcctgccacaagctggtggatccccagggtcccttgaaagattgcatctttgatctctgcctgggtggtgggaacctgagcattctctgcagcaacatccatgcctacgtgagtgcttgccaggcggctggaggccacgtggagccctggaggactgaaactttctgtcccatggagtgccctccgaacagtcactacgagctctgtgcggacacctgctccctgggctgctcagctctcagtgcccctccacagtgccaggatgggtgtgctgagggctgccagtgtgactccggcttcctctacaatggccaagcctgcgtgcccatccagcaatgcggctgctaccacaatggtgtctactatgagccggagcagacagtcctctggggcagaatatggcagcagtgcacgtgccatgcgggtaaaccccacggcctgtctacttgcagctgcaagccggggcaggtgtgccagccctccggaggcatcctgagctgcgtcaccaaagacccgtgccacggcgtgacatgccggccacaggagacatgcaaggagcagggtggccagggcgtgtgcctgcccaactatgaggccacgtgctggctgtggggcgacccacactaccactccttcgatggccggaagtttgacttccagggcacctgtaactatgtgctggcaacaactggctgcccgggggtcagcacccagggcctgacacccttcaccgtcaccaccaagaaccagaaccggggcaaccctgctgtgtcctacgtgagagtcgtcaccgtggctgccctcggcaccaacatctccatccacaaggacgagatcggcaaagtccgggtgaacggtgtgctcacagccttgcctgtctctgtggccgacgggcggatttcagtgacccagggtgcatcgaaggcactgctggtggctgactttggactgcaagtcagctatgactggaactggcgggtagacgtgacgctgcccagcagctatcatggcgcagtgtgcgggctctgcggtaacatggaccgcaaccccaacaatgaccaggtcttccctaatggcacactggctccctccatacccatctggggcggcagctggcgagccccaggctgggacccactgtgttgggacgaatgtcgggggtcctgcccaacgtgccctgaggaccggttggagcagtacgagggccctggcttctgcggacccctggcccccggcacagggggccctttcaccacctgccatgctcatgtgccacctgagagcttcttcaagggctgtgttctggacgtctgcatgggtggtggggaccgtgacattctttgcaaggctctggcttcctatgtggccgcctgccaggctgctggggttgtcatcgaagactggcgggcacaggttggctgtgagatcacctgcccagaaaacagccactatgaggtctgtggcccaccctgcccggccagctgtccgtcccctgcaccccttacgacgccagccgtatgtgagggcccctgtgtggagggctgccagtgcgacgcgggtttcgtgttaagtgctgaccgctgtgttcccctcaacaacggctgcggctgctgggccaatggcacctaccacgaggcgggcagtgagttttgggctgatggcacctgctcccagtggtgtcgctgcgggcctgggggtggctcgctggtctgcacacctgccagctgtgggctgggtgaagtgtgtggcctcctgccatccggccagcacggctgccagcccgtcagcacagctgagtgccaggcgtggggtgacccccattacgtcactctggatgggcaccgattcaatttccaaggcacctgcgagtacctgctgagtgcaccctgccacggaccaccnnnnnnnnnnnnnnnnnnnnnnnnnnnnnnnnnnnnnnnnnaccggggcagccaggctgtcagctacacccgcagtgtcaccctgcaaatctacaaccacagcctgacactgagtgcccgctggccccggaagctacaggtggacggcgtgttcgtcactctgcccttccagctggactcgctcctgcacgcacacctgagcggcgccgacgtggtggtgaccacaacctcagggctctcgctggctttcgacggggacagcttcgtgcgcctgcgcgtgccggcggcgtacgcgggctctctctgtggcttatgcgggaactacaaccaggaccccgcagacgacctgaaggcggtgggcgggaagcccgccggatggcaggtgggcggcgcccagggctgcggggaatgtgtgtccaagccatgcccgtcgccgtgcaccccagagcagcaagagtccttcggcggcccggacgcctgcggcgtgatctccgccaccgacggcccgctggcgccctgccacggccttgtgccgcccgcgcagtacttccagggctgcttgctggacgcctgccaagttcagggccatcctggaggcctctgtcctgcagtggccacctacgtggcagcctgtcaggccgctggggcccagctccgcgagtggaggcggccggacttctgtcccttccagtgccctgcccacagccactacgagctctgcggtgactcctgtcctgggagctgcccgagcctgtcggcacccgagggctgtgagtcggcctgccgtgaaggctgtgtctgcgatgctggcttcgtgctcagtggtgacacgtgtgtacctgtgggccagtgtggctgcctccacgatgaccgctactacccactgggccagaccttctaccctggccctgggtgtgattccctttgccgctgccgggagggcggtgaggtgtcctgtgagccctccagctgcggcccgcatgagacctgccggccatccggtggcagcttgggctgcgtggccgtgggctctaccacctgccaggcgtcgggagatccccactacaccaccttcgatggccgccgcttcgacttcatgggcacctgcgtgtatgtgctggctcagacctgcggcacccggcctggcctacatcggtttgccgtcctgcaggagaacgtggcctggggtaatgggcgagtcagtgtgaccagggtgatcacggtccaggtggcaaacttcaccctgcggctggagcagagacagtggaaggtcacggtgaacggtgtggacatgaagctgcccgtggtgctggccaacggccagatccgtgcctcccagcatggttcagatgttgtgattgagaccgacttcggcctgcgtgtggcctacgaccttgtgtactatgtgcgggtcaccgtccctggaaactactaccagctgatgtgtggcctgtgtgggaactacaacggcgaccccaaggatgacttccagaagcccaatggctcgcaggcaggcaacgccaatgagttcggcaactcctgggaggaggtggtgcccgactctccctgcctgccgccgcccacctgcccgccggggagcgagggctgtatccccagcgaggagtgtcctcccgagctggagaagaagtatcagaaggaggagttctgtgggctcctctccagccccacagggccactgtcctcctgccacaagctggtggatccccagggtcccttgaaagattgcatctttgatctctgcctgggtggtgggaacctgagcattctctgcagcaacatccatgcctacgtgagtgcttgccaggcggctggaggccacgtggagccctggaggaatgaaactttctgtcccatggaatgccctcagaacagtcactacgagctctgtgcggacacctgctccctgggctgctcggctctcagtgcccctctgcagtgcccagatgggtgtgctgagggctgccagtgtgactccggcttcctctacaacggccaagcctgcgtgcccatccagcaatgtggctgctaccacaatggtgcctactatgagccggagcagacagtcctcattgacaactgtcggcagcagtgcacgtgccatgcgggtaaagtcgtggtgtgccaggaacacagctgcaagccggggcaggtgtgccagccctccggaggcatcctgagctgcgtcaccaaagacccgtgccacggcgtgacatgccggccacaggagacatgcaaggagcagggtggccagggtgtgtgcctgcccaactatgaggccacgtgctggctgtggggcgacccacactaccactccttcgatggccggaagtttgacttccagggcacctgtaactatgtgctggcaacaactggctgcccgggggtcagcacccagggcctgacacccttcaccgtcaccaccaagaaccagaaccggggcaaccctgctgtatcctacgtgagagtcgtcaccgtggctgccctcggcaccaacatctccatccacaaggacgagatcggcaaagtccgggtgaacggtgtgctcacagccttgcctgtctccgtggccgacgggcggatttcagtggcccagggtgcatcgaaggcactgctggtggctgactttggactgcaagtcagctatgactggaactggcgggtagacgtgacgctccccagcagctatcatggcgcagtgtgcgggctctgcggtaacatggaccgcaaccccaacaatgaccaggtcttccctaatggcacactggctccctccatacccatctggggcggcagctggcgagccccaggctgggacccactgtgttgggacgaatgtcgggggtcctgcccaacgtgccctgaggaccggttggagcagtacgagggccctggcttctgcggacccctggcccccggcacagggggccctttcaccacctgccatgctcatgnnnnnnnnnnnnnnnnnnnnnngggctgtgttctggacgtctgcatgggtggtggggaccatgacattctttgcaaggctctggcttcctacgtggccgcctgccaggccgctggggttgtcatcgaagactggcgggcacaggttggctgtgagatcacctgcccagaaaacagccactatgaggtctgtggcccaccctgcccggccagctgtccgtcccctgcaccccttacgacgccagccgtatgtgagggcccctgtgtggagggctgccagtgcgacgcgggtttcgtgttaagtgctgaccgctgtgttcccctcaacaacggctgcggctgctgggccaatggcacctaccacgaggcgggcagtgagttttgggctgatggcacctgctcccagtggtgtcgctgcgggcctgggggtggctcgctggtctgcacacctgccagctgtgggctgggtgaagtgtgtggcctcctgccatccggccagcacggctgccagcccgtcagcacagctgagtgccaggcgtggggtgacccccattacgtcactctggatgggcaccgattcgatttccaaggcacctgcgagtacctgctgagtgcaccctgccacggaccacccttgggggctgagaacttcactgtcactgtagccaatgagcaccggggcagccaggctgtcagctacacccgcagtgtcaccctgcaaatctacaaccacagcctgacactgagtgcccgctggccccggaagctacaggtggacggcgtgttcgtcactctgcccttccagctggactcgctcctgcacgcacacctgagcggcgccgacgtggtggtgaccacaacctcagggctctcgctggctttcgacggggacagcttcgtgcgcctgcgcgtgccggcggcgtacgcgggctctctctgtggcttatgcgggaactacaaccaggaccccgcagacgacctgaaggcggtgggcgggaagcccgccggatggcaggtgggcggcgcccagggctgcggggaatgtgtgtccaagccatgcccgtcgccgtgcaccccagagcagcaagagtccttcggcggcccggacgcctgcggcgtgatctccgccaccgacggcccgctggcgccctgccacggccttgtgccgcccgcgcagtacttccagggctgcttgctggacgcctgccaagttcagggccatcctggaggcctctgtcctgcagtggccacctacgtggcagcctgtcaggccgctggggcccagctccgcgagtggaggcggccggacttctgtcccttccagtgccctgcccacagccactacgagctctgcggtgactcctgtcctgggagctgcccgagcctgtcggcacccgagggctgtgagtcggcctgccgtgaaggctgtgtctgcgatgctggcttcgtgctcagtggtgacacgtgtgtacctgtgggccagtgtggctgcctccacgatgaccgctactacccactgggccagaccttctaccctggccctgggtgtgattccctttgccgctgccgggagggcggtgaggtgtcctgtgagccctccagctgcggcccgcatgagacctgccggccatccggtggcagcttgggctgcgtggccgtgggctctaccacctgccaggcgtcgggagatccccactacaccaccttcgatggccgccgcttcgacttcatgggcacctgcgtgtatgtgctggctcagacctgcggcacccggcctggcctacatcggtttgccgtcctgcaggagaacgtggcctggggtaatgggcgagtcagtgtgaccagggtgatcacggtccaggtggcaaacttcaccctgcggctggagcagagacagtggaaggtcacggtgaacggtgtggacatgaagctgcccgtggtgctggccaacggccagatccgtgcctcccagcatggttcagatgttgtgattgagaccgacttcggcctgcgtgtggcctacgaccttgtgtactatgtgcgggtcaccgtccctggaaactactaccagctgatgtgtggcctgtgtgggaactacaacggcgaccccaaggatgacttccagaagcccaatggctcgcaggcaggcaacgccaatgagttcggcaactcctgggaggaggtggtgcccgactctccctgcctgccgccgcccacctgcccgccggggagcgagggctgtatccccagcgaggagtgtcctcccgagctggagaagaagtatcagaaggaggagttctgtgggctcctctccagccccacagggccactgtcctcctgccacaagctggtggatccccagggtcccttgaaagattgcatctttgatctctgcctgggtggtgggaacctgagcattctctgcagcaacatccatgcctacgtgagtgcttgccaggcggctggaggccacgtggagccctggaggaatgaaactttctgtcccatggaatgccctcagaacagtcactacgagctctgtgcggacacctgctccctgggctgctcggctctcagtgcccctctgcagtgcccagatgggtgtgctgagggctgccagtgtgactccggcttcctctacaacggccaagcctgcgtgcccatccagcaatgtggctgctaccacaatggtgtctactatgagccggagcagacagtcctcattgacaactgtcggcagcagtgcacgtgccatgtgggtaaagtcgtggtgtgccaggaacacagctgcaagccggggcaggtgtgccagccctccggaggcatcctgagctgcgtcaacaaagacccgtgccacggcgtgacatgccggccacaggagacatgcaaggagcagggtggccagggtgtgtgcctgcccaactatgaggccacgtgctggctgtggggcgacccacactaccactccttcgatggccggaagtttgacttccagggcacctgtaactatgtgctggcaacaactggctgcccgggggtcagcacccagggcctgacacccttcaccgtcaccaccaagaaccagaaccggggcaaccctgctgtatcctacgtgagagtcgtcaccgtggctgccctcggcaccaacatctccatccacaaggacgagatcggcaaagtccgggtgaacggtgtgctcacagccttgcctgtctccgtggccgacgggcggatttcagtggcccagggtgcatcgaaggcactgctggtggctgactttggactgcaagtcagctatgactggaactggcgggtagacgtgacgctccccagcagctatcatggcgcagtgtgcgggctctgcggtaacatggaccgcaaccccaacaatgaccaggtcttccctaatggcacactggctccctccatacccatctggggcggcagctggcgagccccaggctgggacccactgtgttgggacgaatgtcgggggtcctgcccaacgtgccctgaggaccggttggagcagtacgaggggcctggcttctgcggacccctggcatctggcacagggggccccttcaccacctgccatgctcatgtgccacctgagagcttcttcaagggctgtgttctggacgtctgcatgggtggtggggaccatgacattctttgcaaggctctggcttcctacgtggccgcctgccaggccgctggggttgtcatcgaagactggcgggcacaggttggctgtgagatcacctgcccagaaaacagccactatgaggtctgtggcccaccctgcccggccagctgtccgtcccctgcaccccttacgacgccagccgtatgtgagggcccctgtgtggagggctgccagtgcgacgcgggtttcgtgttaagtgctgaccgctgtgttcccctcaacaacggctgcggctgctgggccaatggcacctaccacgaggcgggcagtgagttttgggctgatggcacctgctcccagtggtgtcgctgcgggcctgggggtggctcgctggtctgcacacctgccagctgtgggctgggtgaagtgtgtggcctcctgccatccggccagcacagctgccagcccgtcagcacagctgagtgccaggcgtggggtgacccccattacgtcactctggatgggcaccgattcgatttccaaggcacctgcgagtacctgctgagtgcaccctgccacggaccacccttgggggctgagaacttcactgtcactgtagccaatgagcaccggggcagccaggctgtcagctacacccgcagtgtcaccctgcaaatctacaaccacagcctgacactgagtgcccgctggccccggaagctacaggtcgacggcgtgttcgtggctctgcctttccagctggactcgctcctgcacgcacacctgagcggcgccgacgtggtggtgaccacaacctcagggctctcgctggctttcgatggggacagcttcgtgcgcctgcgcgtgccggcggcgtacgcggcctctctctgtggcttatgcgggaactacaaccaggaccccgcagacgacctgaaggctgtgggcgggaagcccgctggatggcaggtgggcggggcccagggctgcggggaatgtgtgtccaagccatgcccgtcgccgtgcaccccagagcagcaggagtccttcggcggcccggacgcctgcggcgtgatctccgccaccgacggcccgctggcaccctgccacggccttgtgccgcccgcgcagtacttccagggctgcttgctggacgcctgccaagttcagggccatcctggaggcctctgtcctgcagtggctacctacgtggcagcctgtcaggccgctggggcccagctcggcgagtggaggcggccggacttctgtcccttgcagtgccctgcccacagccactatgagctctgcggtgactcctgccctgtgagctgcccgagcctctcagcacccgagggctgtgagtcggcctgccgtgaaggctgtgtctgcgatgctggcttcgtactcagtggtgacacctgcgtacccgtgggccagtgtggctgcctccatgatggccgctactacccactgggcgaggtcttctacccgggccctgagtgtgagcgacgctgtgagtgtgggccaggtggccatgtcacctgccaggagggcgcagcctgtgggccccatgaggagtgccggttagaggatggtgtccaggcctgtcatgccacaggctgtggccgctgcctggccaacgggggcatccactacatcacccttgatggccgtgtctacgacctgcatggctcctgctcctatgtcttggcccaagtctgccacccaaagcctggggacgaggacttttccatcgtgcttgagaagaatgcagctggacatctccaacgcctcctggttactgtggctggccaggttgtgagcctagctcaggggcagcaggtcaccgtggacggcgaggctgtggccctgcctgtggctgtgggccgcgtgcgggtgaccgccgagggccgaaacatggttctgcagacgaccaaggggctgcggcttctctttgatggcgatgcccacctcctcatgtccatccccagccccttccgtggacggctctgtggcctctgtgggaacttcaatggcaactggagtgacgactttgtcctgcccaatggctcagcagcgtccagtgtggagaccttcggggctgcatggcgggtgcccggctcctccaagggctgtggcgagggctgcgggccccaaggctgcccagtgtgcttggcagaggagactgcaccctatgagagcaacgaggcctgcgggcagctccggaacccccagggccccttcgcgacctgccaggcggtgctgagtccctctgagtacttccgccaatgcgtatacgacctgtgcgcgcaaaagggtgacaaagccttcctgtgccgcagcctggcagcctacacggcggcctgtcaggcagctggcgtggccgtgaagccctggaggacagacagcttctgcccgctccattgccccgcccacagccactactccatctgcactcgcacctgccagggatcctgtgcggctctctccggcctcacgggctgcaccacccgctgttttgagggctgtgagtgcgacgaccgcttcctgctttcccagggtgtctgcatccctgtccaagattgtggctgcacccataatggccgatacttgccggtaaactcctccctgctgacctcagactgcagcgagcgctgttcctgttcctcaagctctggcctgacatgccaggccgctggctgcccaccaggccgtgtatgtgaggtcaaggctgaagcccggaactgctgggccacccgtggtctctgtgtcctgtctgtgggtgccaacctcaccacctttgatggggcccgtggtgccaccacctctcctggtgtctatgagctctcttcccgctgcccaggactacagaataccatcccctggtaccgtgtagttgccgaagtccagatctgccatggcaaaacggaggctgtgggccaggtccacatcttcttccaggatgggatggtgacgttgactccaaacaagggtgtgtgggtgaatggtctccgagtggatctcccagctgagaagttagcatctgtgtccgtgagtcgtacacctgatggctccctgctagtccgccagaaggcaggggtccaggtgtggcttggagccaatgggaaggtggctgtgattgtcagcaatgaccatgctgggaaactgtgtggggcctgtggaaactttgacggggaccagaccaatgattggcatgactcccaggagaagccagcgatggagaaatggagagcgcaggacttctccccatgttatggctgatcagtcatccaccaggaacgaagatttcctgaagaagacctggtccctctggaggttgcagtggctgaaggatgcatcatgtgctcctaccctgctctaccgcttttctgggtcacagaggccaaatgtgagagcattgaataaatatcttaagctaagctgcaaaaaaaaaaaaaaaaaaggcactatgcaaccacaa

SEQ ID NO: 6045 - DNA, 3560 bp, Homo sapiens
  misc_feature (279)..(305): n is a, c, g, or t
  misc_feature (3169)..(3214): n is a, c, g, or t
  misc_feature (3360)..(3360): n is a, c, g, or t
acattcccgcggtccttcagactgcccggagagcgcgctctgcctgccgcctgcctgcctgccactgagggtgtgcgagctggatgagaacaacacccccatgtgcgtgtgccaggaccccaccagctgcccagcccctcagcaagaagccctgcctgatgagacagaggtggtggaagaaactgtggcagaggtgactgaggtatctgtgggagctaatcctgtccaggtggaagtaggagaatttgatgatggtgcagaggaaaccgaagaggaggnnnnnnnnnnnnnnnnnnnnnnnnnnngccagaaccaccactgcaaacacggcaaggtgtgcagcaatgacaacaagaccttcgactcttcctgccacttctttgccacaaagtgcaccctggagggcaccaagaagggccacaagctccacctggactacatcgggccttgcaaatacatccccccttgcctggactctgagctgaccgaattccccctgcgcatgcgggactggctcaagaacgtcctggtcaccctgtatgagagggatgaggacaacaaccttctgactgagaagcagaagctgcgggtgaagaagatccatgagaatgagaagcgcctggaggcaggagaccaccccgtggagctgctggcccgggacttcgagaagaactataacatgtacatcttccctgtacactggcagttcggccagctggaccagcaccccattgacgggtacctctcccacaccgagctggctccactgcgtgctcccctcatccccatggagcattgcaccacccgctttttcgagacctgtgacctggacaatgacaagtacatcgccctggatgagtgggccggctgcttcggcatcaagcagaaggatatcgacaaggatcttgtgatctaaatccactccttccacagtaccggattctctctttaaccctccccttcgtgtttcccccaatgtttaaaatgtttggatggtttgttgttctgcctggagacaaggtgctaacatagatttaagtgaatacattaacggtgctaaaaatgaaaattctaacccaagacatgacattcttagctgtaacttaactattaaggccttttccacacgcattaatagtcccatttttctcttgccatttgtagctttgcccattgtcttattggcacatgggtggacacggatctgctgggctctgccttaaacacacattgcagcttcaacttttctctttagtgttctgtttgaaactaatacttaccgagtcagactttgtgttcatttcatttcagggtcttggctgcctgtgggcttccccaggtggcctggaggtgggcaaagggaagtaacagacacacgatgttgtcaaggatggttttgggactagaggctcagtggtgggagagatccctgcagaacccaccaaccagaacgtggtttgcctgaggctgtaactgagagaaagattctggggctgtgttatgaaaatatagacattctcacataagcccagttcatcaccatttcctcctttacctttcagtgcagtttcttttcacattaggctgttggttcaaacttttgggagcacggactgtcagttctctgggaagtggtcagcgcatcctgcagggcttctcctcctctgtcttttggagaaccagggctcttctcaggggctctagggactgccaggctgtttcagccaggaaggccaaaatcaagagtgagatgtagaaagttgtaaaatagaaaaagtggagttggtgaatcggttgttctttcctcacatttggatgattgtcataaggtttttagcatgttcctccttttcttcaccctccccttttttcttctattaatcaagagaaacttcaaagttaatgggatggtcggatctcacaggctgagaactcgttcacctccaagcatttcatgaaaaagctgcttcttattaatcatacaaactctcaccatgatgtgaagagtttcacaaatccttcaaaataaaaagtaatgacttagaaactgccttcctgggtgatttgcatgtgtcttagtcttagtcaccttattatcctgacacaaaaacacatgagcatacatgtctacacatgactacacaaatgcaaacctttgcaaacacattattatgcttttgcacacacacacctgtacacacacaccggcatgtttatacacagggagtgtatggttcctgtaagcactaagttagctgttttcatttaatgacctgtggtttaacccttttgatcactaccaccattatcagcaccagactgagcagctatatccttttattaatcatggtcattcattcattcattcattcacaaaatatttatgatgtatttactctgcaccaggtcccatgccaagcactggggacacagttatggcaaagtagacaaagcatttgttcatttggagcttagagtccaggaggaatacattagataatgacacaatcaaatataaattgcaagatgtcacaggtgtgatgaagggagagtaggagagaccatgagtatgtgtaacaggaggacacagcattattctagtgctgtactgttccgtacggcagccactacccacatgtaactttttaagatttaaatttaaattagttaacattcaaaacgcagctccccaatcacactagcaacatttcaagtgcttgagagccatgcatgattagtggttaccctattgaataggtcagaagtagaatcttttcatcatcacagaaagttctattggacagtgctcttctagatcatcataagactacagagcacttttcaaagctcatgcatgttcatcatgttagtgtcgtattttgagctggggttttgagactccccttagagatagagaaacagacccaagaaatgtgctcaattgcaatgggccacatacctagatctccagatgtcatttcccctctcttattttaagttatgttaagattactaaaacaataaaagctcctaaaaaatcaaaaaaaaaaaaaaaaaaaaaaaaaaaaaaaaaaaaaaaacaagaacaacaataaacaaaagaagatgaaaacaaaagaaagaacaacacagcaggcaagatagacaacgaaaaaacaacagagggggnnnnnnnnnnnnnnnnnnnnnnnnnnnnnnnnnnnnnnnnnnnnnnggggggggcctcttataaaaactccctcggggggggcgcccaattaacgcccccccccccctttttttgttaagaaaaggcgggcccccacggggggggcgggtttttataaagacgcgggccggggcgccgcttttttaaacacnccgcgggggggagagaaaaaaacgcaccctggcgagcttttgtggagaaaaaacaccctctctgtttggggggggggaattttttgggccaccacccccccccgagagaattttcgcgctcccggggagaaaaaaaaaatatttttgtggggggagagaggggggaaaaaacacctcgcgctatgcccgcggcgcgagat

SEQ ID NO: 6046 - DNA, 1702 bp, Homo sapiens
aaacgggcggccaaagaagggaggacgtttgtgtgtgtccccgcaaattgttgtgccccccgggcgaaggtgtgttgtatccgcgaagggcgcgcaaggagggggggtggggccccgtggggcggtgttcgaggaggtcatgcagtgaccgcgctttgtggaaaagggtggccaaaaatggtgcgcaggaaaagcgtgtttaggggggttttccaccacccatttttttccgaaataatggtgggcccaagggggcaggacggcaaatatgggaagattaagagagtggggcgcgggagggcccccgttgggtgagggggcccccagaagggagccccctagggagtcctcctcttcgggattttgggttcagaaaacacggccgattgtcccgcccggggcggtgttttttttttgggtggggagatggcaagcgcccatttcttgggcccagggtcttctttaggggaccacatattatgccccgttgtcgtttcccgttgggggccgcgcgcccaaagagaaattgttagaaaacttttctgagggggcgaggcgccccaccacatttttgttttgtttggttttttttttttttttttgagattcatattttatttacaagtaaatgaagactgtccctgtaaactctaatttgggatatgaagaacaatataaagaagtagttgctggtgccacagtgatgtgtgaaggagtctatgccactgtttctttaaacagtgattttgttattaaaaaaaaaacccacctacacgatttcttcatgttgcatatgtaaaataattaaaaataaaagtgacttttcaaaactctacagtctgtgatcaaatgcgtgaggtggccaggatgtcactttcactcagtgacagcccctactcttcaagagccaacagcctctgggcaaaagattagtactcatcaagagtatctgctcgaggaatggaaagacctcggtccttcagggcctgcactttcaacttctctgcttccagcttggtctgctgttccaccctttgtcttctagaatttcttcaatgggatacttgctggaggggtgtgtcactctccttttccaagtctatttctcctagtaggaccacattttctcctctgaccacaaaaatccctcgaggaatatcaccgtattttttgcccacatgaatacgctccacagtctgatgtagcactaagtttgcaaattgatcaatgcttcttaaaaagcctataagtgtccttccatctcgaagcagaaccaagtgctttttgtcaatgtcctcgatgaggctggcggtgccaggcatatagttcattttgaactgaaataatgctgcaatgcacagcggcgggaggccagcgcgtccaaaacctcttccctcctaccgcagtcgccgcctcggtgggaccaagcccggaatcccgaccgagaccagcacttctgccccggctttcagccgccggggcctgccggaagctcctccatattacccttacccacttcctgtaacacgtgtgggcccccaggaagaggcggggcagccgtaccgttgggggacaccctttccctgttcctgttaagtaggtaagaggaaactccattggataaatggcgaggaaacgtatactccctcttaaggaacacggtgtcttccttcgtctccgggttcccgagaccccagagtca

SEQ ID NO: 6047 - DNA, 3480 bp, Homo sapiens
tggaaattggccagtggagcccaaattgggccgcatttttttttttttttttttttttttttttttttttttttttttttttttttttttttttttttttttttttttttttttttttttttttttttttttttttttaattgttcaaatttttattttaatgcacagtatgagaaatgaacttttttaaatcaactgatttgtatggaaaatgacacggcaaataaattagacctatgttaaagcgaaggtcagctaaatatccaaacttaaggatataatgggcaccgataaacagattccacagtcttctttaatagagtatctttcaaacacaactttgctagaaactggtccaaagatcgacagcacgtgggaatgcttaacaggggtggtgatcagggacacgtttcctgggtgccgctttgatgatgttgtccacacgcagaatcacctctgctgcttcagctgcactcagaagaacctgtcgcttcacttgaaaactttctgttatacccaggatagccatatctccaatggtgccttccctcatatccaatccagcagtggtattgccttcactgtgagcagccctgagctgtgccaccaggtctgcactgtcatagcctgcattgtcagctatgatggttggcaacattctcagtgctttagcataagactccattgcaacagcttctttgcctggtgttctattggcaagctgtgtcacagcatgagccatcaacatctcagaacagcctcctccataaactgttctagagtcctttacagtttgcgcaagaacacaaagagcatcatgcaatgatctttctgcttcatctaaaatttgttgagtggcaccacgcaaaacaatggtacaagcctcaccaagggcaaccccagaaaagtgaatgagtttgtcttctccaatcatgacttcctcgataagtttgcaacttccaagctggggcctccaaccacccccactggtgttctcctgctgacagtgatttcaattttttctgggctggagctccctgatggaggggcaggccaccatctttgctgtttttgcaacttagccacttcaaccttcagtctttggagtgtccaaggagaccagggggtgatgtggaccctcagcataccacagctgctctataaaaatgaggccagactgcgtttttaagcactttcccaatgccattcctcctcactgggcaaaacctccaaactggggtctccagccacctcctacaggtgtgtttgggccagcaacaagttcattcatacctccctagggcaaagcttccaaagggagcggtaggctgccatctttgctgtttcacaggcttcactgatgataactccaggtactggaaaatctgaggctactagagactggagcgggccctgggcatactgcagcagccctagcctgtcctcctgcttccgaagcctgggttcccattcctatatcttctcactaggcaagtcttgcaggcctggacctctacctaaccccccctaccagaactgttgagccagtagcaactcagccactccctggagagagcctccaggggcaactgaaagcctctctgccactgcttctgcagtggaactgtccttgctaccctcagactgatgaaggagctaacacccttatctacaccttcaacaagctttaattgaccaaagcccatctctcatgggttctacacactccccactgctcatgacagggaacccctggattggcccccacagcacgaattctccatcctgattgctgattgcagtaaacagttgctgtattctccaggggtggtggaactctgaggagacaaacaaaagacccttggctacaaccactactaatgtcccttcctcttctgcctcaaagttaggaaagaaatataaacactgagattgccccagagctgcagtgggcagcctaggagtgccaagccatgacctacagccagcactcaagggggagagaagcacattttcagatcattgagagggaacatggctgcaactgtaaggaaacataggggagccacatgaccaagcaagagtctaccaactgaccagtaagcccaagtgccacctactggatcacatcccaaagcttcagcatcaaaaataccttactaatatactcccctctgaaaccagaaatgagaagtcagcttcaaataaagaccctgcacaaagcctcagcctggtgaaaacatccgaaaataagtctacggactgtactcaatctacactgcaattaaaggaaaacccataggtggaaatgagaagaaaccaatgcaagaactccagtaactcaaatggcctctgtgtcatatgtccttctaacaaccacaccagttctccaacaagagttcttaacctggatgaactgtctggaattacataaatataattcagaatatggataggaaaaaaaatcatcaagactcaggagaatggcaaaacccaatccgaggaaaataagaataacagtaaagtgttacaggagctgaaggataaagtagctggtataataaaaaagaacctaaccgatctgaaagcgccgaagaacacaatacaagaattccacaatgcaatcacaagtattaacagcagaaaaaaaaatctgaggaacgaatctcagaacttgaagattggttctctaaaataagatggacaaaaataaaaaagaatgaacaaaaccttcaaggaggatgggattatataaagaggccaattctacaaatcactggcatctctgaaagggaggtggagaaatcaaacaacttggaaaacgtagttcaggatatcatctttgaaagcttccctaaccttgctagaaaggccaacagtcaaattcaggagatacaaagaactcctacaagattctacacaagaccatcctcaagacacataaacatcaggttttccaaggtcgaaatgagggaaaatatgttaaaggcagccagagagaaagggcaggccatctacaaagggaaccccattaggctaacagcagatctctcagctgaaatcctacaagccagaagggattgggggactatatttaacattattaaagaaaatcttcaaccaagaatttcatatacagctaaactaagctttctaaatgaaggagaaatgagatcatttacagacaagcaaattctgaggtaattcattaccaccacatctgccttacaagagattttagaaaggaggactaaatatagaaaggaaagaccactacacgctaatgcaaaaacatacttaaacacacagaccggtgacactataaagcaaccacacaaaaaagccaacataataaccagccaacagcacaatgacaagatcaaatctacacaaatcgatactagccttgaatgtaaatgggcaaatgccccacttaaaaggcacagagtggcaagctagatttaaaaaaaaaaaaaaagc

SEQ ID NO: 6048 - DNA, 2382 bp, Homo sapiens
  misc_feature (896)..(984): n is a, c, g, or t
gaggggtgtccagagccaggcagcaaggaccagaggaaggtggacagagaccgaaaggacaaaggagagacacagagaaaaaaagagaccaaccccaaagggacaaagaccccaacgtttgtccacattgccgcagaggcagctggagccagtgctgcctgtccgtccccatgggccaccataggccatggctgcacgcttctgtcctctgggctggggtggccagcctgctcctccccccggccatgacccagcagctcagaggggatgggctaggcttcagaaaccggaacaacagcactggagtcgccgggctctccgaggaggcatcagcagagcttcgccaccacctccacagccctagagaccatccagatgagaacaaggatgtttccacagagaatgggcatcatttctggagccacccagaccgtgaaaaggaggatgaagatgtctccaaggaatatgggcacctactcccaggccacaggtcccaagaccacaaagtcggagatgagggtgtctcaggtgaggaggtctttgcagagcatggtgggcaggcccgtgggcacagaggccacgggagtgaagacacggaagactcagctgagcacaggcaccacctccccagccacaggagccacagccatcaagacgaggatgaggatgaagttgtgtccagtgagcatcaccatcatatcctcaggcatggacaccgaggccatgatggggaagatgatgaaggagaagaggaggaggaggaggaggaggaggaagaggaggcctccactgagtatggacaccaggcccacaggcaccgaggccatgggagtgaagaggatgaggatgtctcagatggacaccatcatcatggccccagccacaggcaccaaggnnnnnnnnnnnnnnnnnnnnnnnnnnnnnnnnnnnnnnnnnnnnnnnnnnnnnnnnnnnnnnnnnnnnnnnnnnnnnnnnnnnnnnnnnggcaccaaggccacgggattgaagaggatgaagatgtctcagatggacaccatcatcgcgaccccagccacaggcaccgaagccatgaagaagatgacaatgatgatgatgatgtctccactgagtatggacaccaggcccacaggcaccaagaccacagaaaggaagaggttgaggctgtctcaggtgaacaccaccatcatgtccctgaccacaggcaccaaggccacagagacgaggaagaagatgaggatgtgtccactgaacgttggcaccagggtccccaacatgtccaccatggccttgtagatgaggaagaggaagaagaggagatcacagtccagtttggccactatgttgcaagccaccaacctcgaggccacaagagtgatgaagaggacttccaagatgagtataaaacagaagtccctcaccatcaccaccacagagtccccagggaggaagatgaggaggtctctgctgagcttggccaccaggcccccagccacaggcaaagccaccaagatgaagaaactggccatggtcaaagagggtccatcaaagagatgagccatcaccccccaggacacacagtggtcaaggatagaagccatttgaggaaggatgattctgaggaggaaaaggagaaggaagaggaccccggctcccatgaggaagacgatgaaagttcagagcagggagagaaaggcacccatcatggcagccgggaccaggaagatgaggaggatgaggaggaaggtcatggcctcagcctgaaccaggaggaggaagaagaggaagacaaggaggaggaggaggaggaagaagacgaggagaggagggaagagagggctgaggttggggccccactgagcccagaccacagcgaggaggaagaggaggaggaggaggggctggaggaagatgagccccgcttcaccatcatccccaacccactggacaggagagaggaggctggaggtgcctccagcgaggaggaaagcggtgaggacacaggtccacaggatgctcaggagtatgggaactaccagccagggtccctgtgtggctactgctccttctgcaatcgatgcactgaatgtgagagctgtcactgtgatgaggagaacatgggtgagcactgcgaccagtgccagcactgtcagttctgctatctctgcccgctggtctgcgaaacggtctgcgctccaggaagctacgttgactatttctcctcgtccctttatcaggccctggcagacatgctggaaacgccggaaccctgacccagtcgctcgactgcgacgcaggtgtacctccccctgccttccaacccctttccacgagctatatttatttctccgaataaacgtgctccccgaaaaaaaaaaaaaaaaa

SEQ ID NO: 6049 - DNA, 1473 bp, Homo sapiens
  misc_feature (233)..(250): n is a, c, g, or t
  misc_feature (1457)..(1457): n is a, c, g, or t
  misc_feature (1460)..(1460): n is a, c, g, or t
agcgggcaggcggggagaggcggtggctgtgggcgtccggccccgaacctgtcagacctggggagccggcctccagcagcgggcgcggcgggcgcgagcacgaccccactctcctgcggccgcgggtggagcagcgcgagcccgcctcgctgagccggccgggggcggggagatgagttgcggccccgcggcagcgccccaggatggggagggacgcgcggcactgccctcgnnnnnnnnnnnnnnnnnnaagtaggcgccgccggccgtccgcctcccccaagccgttccgcaccgcggccgctcagcctctgccatggccggctctggcgcgtggaagcgcctcaaatctatgctaaggaaggatgatgcgccgctgtttttaaatgacaccagcgcctttgacttctcggatgaggcgggggacgaggggctttctcggttcaacaaacttcgagttgtggtggccgatgacggttccgaagccccggaaaggcctgttaacggggcgcacccgaccctccaggccgacgatgattccttactggaccaagacttacctttgaccaacagtcagctgagtttgaaggtggactcctgtgacaactgcagcaaacagagagagatactgaagcagagaaaggtgaaagccaggttgaccattgctgccgttctgtacttgcttttcatgattggagaacttgtaggtgagttgtgttgccaactcactttccgtttacctttcctcgagagtctttgtcaagctgtagttacacaggctttgaggtttaacccatcttttcaggaagtttgtatttatcaagacactgatctcatgtgaaaaggccacacggttccaaagtgcagctcaatctaagtacaatataaactccccgagataactttgactttctcttctagttgttcaaccactgtcatctaccgtaaagttaaggacgttatcttcattgtatgtcatgtaacttcctctttttacaaaggtctggtaaaataccaggttaattttcgcaacgtttaaaatagtaaatgatcgtaaataacttaagatcatagaattttacagtatgaagggaccttactgaacacctgctccacctcctttttttttttacatgtaaggatttccagggcacaaaccagtggaataagtcgtgagggccacttagggagttaatggaagagccacatctacagtcccagcatttttttcctctacatttgacctaagtggtttcttttatacgatttccttttgtatttatagccaagagatttgcaaaattaattaccaactaacatgaaatttttgcctcgtaagaagggcctgaaatgaaccagaggactccgccaaagttcttatgagcctggtttttcttgttcattttttaattatacggacaatccggtctcaatataaggtacattcttagtttagnggntattttcaatcaa

SEQ ID NO: 6050 - DNA, 1140 bp, Homo sapiens
gcccggtacctggtactcccgggggtgggaagagccagggtgagcctttaaaggactgctctttgtccaaacacacacatctcactcatccttctactcgtgacgcttcccagctctggctttttgaaagcaaagatgagcaacactcaagctgagaggtccataataggcatgatcgacatgtttcacaaatacaccagacgtgatgacaagattgacaagccaagcctgctgacgatgatgaaggagaacttccccaacttccttagtgcctgtgacaaaaagggcacaaattacctcgccgatgtctttgagaaaaaggacaagaatgaggataagaagattgatttttctgagtttctgtccttgctgggagacatagccacagactaccacaagcagagccatggagcagcgccctgttccgggggcagccagtgacccagccccaccaatgggcctccagagaccccaggaacaataaaatgtcttctcccaccagaaaaaaaaaaaaaaaaaaaaaaaaaaaaaaaaaaaaaaaaaaaaaaaaaaaagagaagaaaagaaaaagagagagagaaaagaagaagaaaagaaagagaggaagaagagggaagagaaagaaagagaagagaagaggaacgagcaaagaggcgagaggcgaccagaacacagccgacagaatcaaacagaaggagacgaaagcaagagcgagagaaggaacaccagagagaaggagaaggagagagccgcgagcgaacagagcgaagacgcgagagcagggaaagaagccacagagaacacaaacgaaagacagcggacgagaaggagcgggagcaacaacaagggagaggaggggaggagaggaggaggggaggcgcgacagacaggagagacggagggggcaggagcgagagaaggaggggaacgagagggaaggacggaggggcgacgggaggcgggcgagggggggaggagaggggggaaaggagaaggcgagaagagagggggaggagaacggggagaccggaggaggaggagggggaggggaagggaaggggcagggtggggggggagggaggagggcggggggggggggagggcgggggggaggcgggggggggggggggcgggggggga

SEQ ID NO: 6051 - DNA, 2217 bp, Homo sapiens
ctgggaccctcctcctccaggcccacacctcagcacccaggacatctgggccccccgcccccagcgctgtctagtttggttgcctggccgtcactcccagcctggttcccactcctgtgtcttctggggatggccctcaaggacagcatgttgacacatcaggcccagctctatcactggggagggagataggctgccagggacagaaagggctctttgagaaggccactctgcctggagtgggggcgccgggcactgtcccccaaggtcgcggcagaggagataggggtctgtcctgcacaaacaccccaccttccactcggctcacttaaggcaggcagcccagcccctggcagcacccacgatgcgggacctgcctctcaccagcctggccctagtgctgtctgccctgggggctctgctggggactgaggccctcagagcagaggagccagctgtgggcaccagtggcctcatcttccgagaagacttggactggcctccaggcatcccacaagagcctctgtgcctggtggcactgggcggggacagcaatggcagcagctcccccctgcgggtggtgggggctctaagcgcctatgagcaggccttcctgggggccgtgcagagggcccgctggggcccccgagacctggccaccttcggggtctgcaacaccggtgacaggcaggctgccttgccctctctacggcggctgggggcctggctgcgggaccctggggggcagcgcctggtggtcctacacctggaggaagtgacctgggagccaacaccctcgctgaggttccaggagcccccgcctggaggagctggccccccagagctggcgctgctggtgctgtaccctgggcctggccctgaggtcactgtgacgagggctgggctgccgggtgcccagagcctctgcccctcccgagacacccgctacctggtgttagcggtggaccgccctgcgggggcctggcgcggctccgggctggccttgaccctgcagccccgcggagaggactcccggctgagtaccgcccggctgcaggcactgctgttcggcgacgaccaccgctgcttcacacggatgaccccggccctgctcctgctgccgcggtccgagcccgcgccgctgcctgcgcacggccagctggacaccgtgcccttcccgccgcccaggccatccgcggaactcgaggagtcgccacccagcgcagaccccttcctggagacgctcacgcgcctggtgcgggcgctgcgggtccccccggcccgggcctccgcgccgcgcctggccctggatccggacgcgctggccggcttcccgcagggcctagtcaacctgtcggaccccgcggcgctggagcgcctactcgacggcgaggagccgctgctgctgctgctgaggcccactgcggccaccaccggggatcctgcgcccctgcacgaccccacgtcggcgccgtgggccacggccctggcgcgccgcgtggctgctgaactgcaagcggcggctgccgagctgcgaagcctcccgggtctgcctccggccacagccccgctgctggcgcgcctgctcgcgctctgcccaggaggccccggcggcctcggcgatcccctgcgagcgctgctgctcctgaaggcgctgcagggcctgcgcgtggagtggcgcgggcgggatccgcgcgggccgggtcgggcacagcgcagcgcgggggccaccgccgccgacgggccgtgcgcgctgcgcgagctcagcgtagacctccgcgccgagcgctccgtactcatccccgagacctaccaggccaacaattgccagggcgtgtgcggctggcctcagtccgaccgcaacccgcgctacggcaaccacgtggtgctgctgctgaagatgcaggcccgtggggccgccctggcgcgcccaccctgctgcgtgcccaccgcctacgcgggcaagctgctcatcagcctggaggagggcatcagcgcgcaccacgtgcccaacatggtgccaccgagtgtggctgccggtgacccctgcgccgcgcggactcctgccccgagggtccggacgcgccccagctcgcgccccttcccatatttattcggaccccaagcatcgccccaataaagaccagcaagcaaccggaaaaaaaaaaaaaaaaaaaggggggggcccggtaccccaattcgccttatggggggtgg

SEQ ID NO: 6052 - DNA, 3093 bp, Homo sapiens
  misc_feature (3022)..(3049): n is a, c, g, or t
gtgctctgctggctcagcctggtgtggacccacctcgcgggcgctggctgcaatgactttctctttccctttgcaattgccttgggtcctgccgcacagagcggcctgtctttatcagaggtccctctgccagggggagggccccagagaaaaccagaaagagggtgagagactgaggaagataaagcgtcccagggcctcctacaccagcgcctgagcaggaagcgggaggggccatgactacgaggccctgggaggtcactttgggaggccgaggcgggcagatcacctgaggttagatattcaaaaccggcctgggcaacatggtgggatcccatctctactaaaaatacaaaaaaaaaaaaaaattagccgggcatggtggcggtcacctgtgatcccagctactcgggaggctgaggcaggagaaccgcttgatcccatgaggcagaggttgtagtgagccgggattgcatccttgcattccagcctgggcaacaagagcgaaactccatctcaaaaaaaaaaaaaagaaatgagtggtgtatttttcaggtgcccaggtctctaatcagagccccatttcaagtactcagtagtcccttggccatgtcaccccccccgacatggacagtgcaggtccagtgggctccccactgactgcaggcagggaacaaggcagaccctagagggccaggccacagtaggggctgaggatgtctggtgaatggatgcctgggagaatggatgctagaattcacacacgaggccatgaacagggctgggaaaacttccaaactcagggaagcacgtgtcttggtgcaccttgtgatgcttcaacagcaggactgagatggggacatttacaatgaacagaaatgtatgggctcgagttctggactctgggaagtcccctgtcaatgcaccagcaactttccagggcctgcgagctgcacagtcacgtgggggtgaaggttgttgccagaagctcaggggatgctccagacagagtggcctgggatgtcgagtcactgctgctccgtgacatgggggcaagaggaagcagtttagtctgacatactgcccccccagctagagggcaagagacagaaagaggggctgaagtcgcccttgaataaccacagcagtggcacccacaaaggtgcagttcccacagcctcatagctgcttgtaggtgccacctcttaaggccattaccatagcaattaatactgaacatgagctttggagcagacaaacactcaaaccgaacagggggatggaggaaaggagcttcaatggcaagatctcctggactcctgtcctggcccctcctccccctgccccacccctgctctcctcctgctccccctctcagagcttgccctgaccctgctcctctcccaggtgtattccgaacttaagtaccacccagagatgagattcttccactggttcagcaagtggaggaagctgcatcgtgaccaggagtatgaggtcacctggtacatatcctggagcccctgcacaaagtgtacaagggatatggccacgttcctggccgaggacccgaaggttaccctgaccatctttgttgcccgcctctactacttctgggacccagattaccaggaggcgcttcgcagcctgtgtcagaaaagagacggtccgcgtgccaccatgaagatcatgaattatgacgaatttcagcactgttggagcaagttcgtgtacagccaaagagagctatttgagccttggaataatctgcctaaatattatatattactgcacatcatgctgggcgagattctcagacactcgatggatccacccacattcactttcaactttaacaatgaaccttgggtcagaggacggcatgagacttacctgtgttatgaggtggagcgcatgcacaatgacacctgggtcctgctgaaccagcgcaggggctttctatgcaaccaggctccacataaacacggtttccttgaaggccgccatgcagagctgtgcttcctggacgtgattcccttttggaagctggacctggaccaggactacagggttacctgcttcacctcctggagcccctgcttcagctgtgcccaggaaatggctaaattcatttcaaaaaacaaacacgtgagcctgtgcatcttcactgcccgcatctatgatgatcaaggaagatgtcaggaggggctgcgcaccctggccgaggctggggccaaaatttcaataatgacatacagtgaatttaagcactgctgggacacctttgtggaccaccagggatgtcccttccagccctgggatggactagatgagcacagccaagacctgagtgggaggctgcgggccattctccagaatcaggaaaactgaaggatgggcctcagtctctaaggaaggcagagacctgggttgagcctcagaataaaagatcttcttccaagaaatgcaaacaggctgttcaccaccatctccagctgatcacagacaccagcaaagcaatgcactcctgaccaagtagattcttttaaaaattagagtgcattactttgaatcaaaaatttatttatatttcaagaataaagtactaagattgtgctcaatacacagaaaagtttcaaacctactaatccagcgacaatttgaatcggttttgtaggtagaggaataaaatgaaatactaaatttttaaaaaaaaaaaaaaaaaaacttccaggcatctatgtccgggtgccggaaaaaaagggaaatgaaaatggcaccatggcccttagccttgtttccctgcaccccagctttccttgaaacaaaagggggaaaatctggcccggtctcccctaataagtggaggccgaattaaatttcccaaaaaccccaggttaaaccctggcattaattggaatccggccgtgcgcaaccccgcgggaattttaacccccccctaatggaagcgggcctttttttttttggggatcccaaaaggaaatctttcttgaaaaaatcnnnnnnnnnnnnnnnnnnnnnnnnnnnngcccgggccttggccaaaaacaaaaaaagaaccacccgccctat

SEQ ID NO: 6053 - DNA, 1262 bp, Homo sapiens
agggaggaagacagaagcgaaacgccgggagagcggcgcggggagatagcgcgcgctattggggcagccgggacaggccgcggacgaccgcgcgcgggagagtcggccgcggcacccgccagcgtgtcgcaggggaaggatcagggaccagccatgcccaagcgtggggacaccacgctctctccccagtgacaaggtgcacgcccagatccggaaggtgtcgggacagctgtgctcctgctggtcagcgtccgtcactccaggcagggagcgggtcaccaaagcttctagggtgggcctatccgtctccactctcagtgtggggggtggggggcgccaacagcacgcatttgctctctgcacttctcgtctgataatgggcagagggtccttctgcagccccaaaacatccctaggcaggagccctggggccccaagcagccagggaggtgagcaccaaggacctcccagagagcgtcaccttccgtcgagggaggcccagcctgggggcggtgtctgagacttggaatcaacgcttccgttggtggcagtaaatcctgtccctaaccctgcagtacagctgtgccgtgtacaggagggtgctgtctgacgccagacacctggactacagatcgcagcctgattcctggtcattgctccactgaaccccagaccccagcctcgttctgggccctcatcccctagatccagggaccccagccccatttcagcccttgggcccttgtaggatgcgaggccctgggccccagcccccagcccatccgtggcccaggcactggggggctgaggtcctctgagaagggacacagggcctggggggctctctcagcccatcagcaggagaggactgactccagaaaaatcagcgtttgtacccactcaggctgccaagacctgtgtccgtccttccaagctcaaccttcagagttcatgaggccccttgcccagaatgtccacagagttcatgaggccccttgaatgtccacagagttcatgaggctccttgcccggaatgtccacatttgaaacctcccaacaccgagccccatttcaagtataaccaggagggaaaatggtgcttgaaataagcatgccacaaaggaaaacctgctttctcgaaatgggccctggccgcccaggccctgacctccccggccaggatggaacgttccagagacccattagtgccaaaggcaaatgaaaacacaccctgtgaaaatgtcaaaaaaaaaaaaaaaaaa

SEQ ID NO: 6054 - DNA, 3265 bp, Homo sapiens
  misc_feature (1076)..(1115): n is a, c, g, or t
ggaaaacgacacctagaagtaggagtgagattcgctgaagttcccttctgaggaagacccacccctccgcctggagagccggggctggcggtgcctgaggaccccttcggcctggacagcccacgcgggcttggggggcctcgctctgccctcatggggcggccatcggttcccgaagcggcgagtgaaaattcaaatggccagtagggggcgcactcggaagtggccgccccgcatgaggcagttcagcggccccgagagtccggggagggaggtttattctccgcctgcacgagactgtgaaatccgcaaccatgagcaggagaggcggccctggtggggaagaggccaccaacatctggacggcaggtacccagagagtgagcagctccacgcgggactgtgcacggtggccgacacccgcagggacgcccgccggacgagcacgcggagggccctcgcctccacggatgcaccatgccggtgtgaggagcatctgttcttcccactctctgcagttaacaaacccaacccaaaccaccacaggtgctcctcctggggagtttcctgtctgacaaatgccaggctcacttcaaggagaatcacgcttctttctaaagatggattcaccatttaaaacagagctctgggagcctttcggcaaatcttgaaagctgcacggcgcagagacatggatgtgacttcccaagcccggggcgtgggcctggagatgtacccaggcaccgcgcagcctgcggcccccaacaccacctcccccgagctcaacctgtcccacccgctcctgggcaccgccctggccaatgggacaggtgagctctcggagcaccagcagtacgtgatcggcctgttcctctcgtgcctctacaccatcttcctcttccccatcggctttgtgggcaacatcctgatcctggtggtgaacatcagcttccgcgagaagatgaccatccccgacctgtacttcatcaacctggcggtggcggacctcatcctggtggccgactccctcattgaggtgttcaacctgcacgagcggtactacgacatcgccgtcnnnnnnnnnnnnnnnnnnnnnnnnnnnnnnnnnnnnnnnngtacagcagcgtcttcttcctcacctggatgagcttcgaccgctacatcgccctggccagggccatgcgctgcagcctgttccgcaccaagcaccacgcccggctgagctgtggcctcatctggatggcatccgtgtcagccacgctggtgcccttcaccgccgtgcacctgcagcacaccgacgaggcctgcttctgtttcgcggatgtccgggaggtgcagtggctcgaggtcacgctgggcttcatcgtgcccttcgccatcatcggcctgtgctactccctcattgtccgggtgctggtcagggcgcaccggcaccgtgggctgcggccccggcggcagaaggcgctccgcatgatcctcgcggtggtgctggtcttcttcgtctgctggctgccggagaacgtcttcatcagcgtgcacctcctgcagcggacgcagcctggggccgctccctgcaagcagtctttccgccatgcccaccccctcacgggccacattgtcaacctcgccgccttctccaacagctgcctaaaccccctcatctacagctttctcggggagaccttcagggacaagctgaggctgtacattgagcagaaaacaaatttgccggccctgaaccgcttctgtcacgctgccctgaaggccgtcattccagacagcaccgagcagtcggatgtgaggttcagcagtgccgtgtagacagccttggccgcataggcccagccagggtgtgactcgggagctgcacacacctgggtggacacaaggcacggccacgtcatgtctctaaactgcggtcagatgtggcttctggctcctcggggcctcgcgagggtcacgcttgcctggtcaccctggggctgcttaggaaacctcacgactggtcaccttgcactcttcacacagaattgctacaatcccaaagcgctcgccccgcagggtccaaaggccagcggtgaccagcctgtcacccagctcctccccgccaaccctgcctgccgctgcacctgcctgccgctgcaggaaacatttgacaccgtcgaccaggaaagccacacggagaggccactgtgggtgaagcgcctcagttacacaggaaccctaaagcaaatctgccaccgtgggggaactgacgctggagatgcaaggtgctggtgggtctgagctggacgtcgcggtgtgtcctctgtgcccacggtctgagctagctagcgcaccgccgagttaaagaggagaaggaaaacatgctgctctggtgcacgcctgagcgtcctccatcttccaggatggcagcaatggcgctgtgcggcctcaccaggcccacgaggagcagcagcgctcggcccggagcagcaggaaggcccctctgtggagcgcccgccgtctgctccggggtggttcagtcactgcttgttgacatcaacatggcaattgcactcatgtggactgggaccgtgcgagctgccgtgtgggttagtcgggtgccaggacaatgaaatactccagcacgtgtggctgacgaatttgtttctacagaaataacagctggggacaactgcggtgatgatgtaaaaaccttcccataaaatgtaagaaaagctgatgaggctggtgacgttcagcctttgtcaataaacctgtcatgtgcggatccttaaaaaaaaaaaaaaaaaaaaaaaaaaaaaaaaaaaaaaaacactgggggtggggcatgggggcactcggggagatccctccccccctcacagaaaacacagcccctcccctgccaccctggaaaactctcacaaggccagccctctgagtccggccagccggacctaacctggcattttccaggctggtcaaaaatgccgtggggggcactttctgtggcatgcttggggtgccatgacaagcttcccatggaatggtaggaaggaaggggctcagcctttggtccagcaaccctgtgcggacttaagctgccctttctagaagggctctcgggccgcgttgccagggcccaagaagctcggcggggacccaaagcgctccctggaacaaacccgggcccgggaaaagggtcccggggtcccttcctcccattaaacggggggctgggattctgggggggctggttcccccctctttttccccgcct

SEQ ID NO: 6055 - DNA, 561 bp, Homo sapiens
taaaacctcagctgataaaagtataaaaataaagttaaaacatattaaagacaaaacccaagaatcagcttcctcttccttcattactcttgcatgggtgttggctctaatttctccatctagttaggcagtcctttgctttttattgcttgtttattgatgacatttgccatttgtagcaatagtaatagaatcatctatatatttgtggccttgttgaatgtagaaaaaggatagtggcattttctaattgtgtaaccctataacaccttgacgggggactacagttcatatgctggaccttttgtgtttgttcatggcgggtgggttgctttaatatacttagcacattgtcctaattgccatccttttggggagggctatatatccaagctaatatggtagcatttttgttttaacatagagctgacccaaggtagacgtaagtgttgttcatttttgcctaatactaataaaattacctaattgttgaagcttggagcttgaatctaggcattttatgtcattcaagtacaccctagtattttaaaggcataaaat

SEQ ID NO: 6056 - DNA, 707 bp, Homo sapiens
  misc_feature (700)..(700): n is a, c, g, or t
aaatataaaatacaaagaaatgttattctctatttatttttatatagattatagtctttatctaactgttcttagttcatttgaactaaaccaatgaatttgtcaacagaacaagccttaccagtggcttcagaggaagagcaagaaaggcatgaaagaagtgaaaagaagcaaccacaggtcatagaaggaaataatacatacaaaagtgaaaaaatacaactttcagaaaatatatgtgatagtacattttctgctgctgctggcagattaacccaacaaagaaagattgggaaaacgtatcctcagcaatttcccaagaagctgaaggaagagcatgatagatgcaccttaaaacaagaaaatgaagaaaaaacaaatgttaatatgctgcacaaaaaaaatcgagaagaattagaaaggaaagagaaacaatataagaaagaagttgaagcaaaacaacttgaaccaactgttcaatcactagagatgaaaccaaagactgcaagaaatactccaaatcaggattttcataatcatgaagaagtgaaagatctgatggatgaaaattgcattttgaagacagatattgctatactcagacaggaaatatgcacaatgaaaaatgacaacctggaaaaagaaaataaatatcttaaggacgttaaaattgttaatgagacatgatgctgtccttganaagtatt

SEQ ID NO: 6057 - DNA, 1385 bp, Homo sapiens
  misc_feature (1374)..(1374): n is a, c, g, or t
agcgggtggggggagcggagcgcacgacgtgcgcgcaccctctcccctcgtccaccgctgccgcctccttcttctgcggcacgagggtgctgcttgtgtgctcgtttggtgcggacctggtacctcttttgtgaagcggcagctgaggagactccggcgctcgccatggccgacgaaaagcccaaggaaggagtcaagactgagaacaacgatcatattaatttgaaggtggcggggcaggatggttctgtggtgcagtttaagattaagaggcatacaccacttagtaaactaatgaaagcctattgtgaacgacagggattgtcaatgaggcagatcagattccgatttgacgggcaaccaatcaatgaaacagacacacctgcacagttggaaatggaggatgaagatacaattgatgtgttccaacagcagacgggaggtgtctactgaaaagggaacctgcttctttactccagaactctgttctttaaagaccaagattacattctcaattagaaaactgcaatttggttccaccacatcctgactactaccgtatagttttctctattctttcatttcccccttccccattcctttattgtacataaagtaactggtatatgtgcacaagcatattgcatttttttttttttttaactaaacagccaatggtatgttttgattgacatcaagtggagacgggatggggaaaaatactgattctgtgaaaataccccctttctccattagtggcatgctcattcagctcttatctttatattccagtaagttattttgctctcactgttttaacaaaaaaaaaaaacaacaacataaaaatccttgcataccttgttcaattggagaattttaatgtttttcatttatcattgtaaaaccaaggacaattttataacttttttgtacgtagctgttacatgtagggcaatctgtctttaagtagggataaattactctaaaacaaaaaagaatcctagatagttttcccttcaagtcaagcgtcttgttgtttaaataaacttcttgtttaaaatgaaaaaaaaaaaaaaaaaaaaaaaaaaaaaaaaaatcctcttaccacaataaaaacaaagttatgacagataagtaggtagtcagcagaaaaacaaacaaaaaaaaaaaaaacaaagaaaaaagaaaacaaagttaactcagaaaaaaataaaaggagattatacacggcagatgtggaacacaacaaaaataatactgttgttcactatgtgttaacagggactgaagctggctacagaaagaatgtcccagcaacaaagagtgggaagccctgagcaaattgttaaaagctccttctcagtttcttcccanagagaagtttt

SEQ ID NO: 6058 - DNA, 5526 bp, Homo sapiens
  misc_feature (3586)..(3602): n is a, c, g, or t
ctggcatccaggcagagcagctgtaggggatatttattgggcatcttgttaaaaaaaaaaaaggcaccgttcctggcacaagtgatttgatggacaagataagcaaggcccttgctcttagaggaggaaattgttcctcgtctgataagacaacagtggagaaaggacgcatgctgtttcttagggacacggctgacttccagatatgaccatgtatttgtggcttaaactcttggcatttggctttgcctttctggacacagaagtatttgtgacagggcaaagcccaacaccttcccccactggattgactacagcaaagatgcccagtgttccactttcaagtgaccccttacctactcacaccactgcattctcacccgcaagcacctttgaaagagaaaatgacttctcagagaccacaacttctcttagtccagacaatacttccacccaagtatccccggactctttggataatgctagtgcttttaataccacaggtgtttcatcagtacagacgcctcaccttcccacgcacgcagactcgcagacgccctctgctggaactgacacgcagacattcagcggctccgccgccaatgcaaaactcaaccctaccccaggcagcaatgctatctcagatgtcccaggagagaggagtacagccagcacctttcctacagacccagtttccccattgacaaccaccctcagccttgcacaccacagctctgctgccttacctgcacgcacctccaacaccaccatcacagcgaacacctcagatgcctaccttaatgcctctgaaacaaccactctgagcccttctggaagcgctgtcatttcaaccacaacaatagctactactccatctaagccaacatgtgatgaaaaatatgcaaacatcactgtggattacttatataacaaggaaactaaattatttacagcaaagctaaatgttaatgagaatgtggaatgtggaaacaatacttgcacaaacaatgaggtgcataaccttacagaatgtaaaaatgcgtctgtttccatatctcataattcatgtactgctcctgataagacattaatattagatgtgccaccaggggttgaaaagtttcagttacatgattgtacacaagttgaaaaagcagatactactatttgtttaaaatggaaaaatattgaaacctttacttgtgatacacagaatattacctacagatttcagtgtggtaatatgatatttgataataaagaaattaaattagaaaaccttgaacccgaacatgagtataagtgtgactcagaaatactctataataaccacaagtttactaacgcaagtaaaattattaaaacagattttgggagtccaggagagcctcagattattttttgtagaagtgaagctgcacatcaaggagtaattacctggaatccccctcaaagatcatttcataattttaccctctgttatataaaagagacagaaaaagattgcctcaatctggataaaaacctgatcaaatatgatttgcaaaatttaaaaccttatacgaaatatgttttatcattacatgcctacatcattgcaaaagtgcaacgtaatggaagtgctgcaatgtgtcatttcacaactaaaagtgctcctccaagccaggtctggaacatgactgtctccatgacatcagataatagtatgcatgtcaagtgtaggcctcccagggaccgtaatggcccccatgaacgttaccatttggaagttgaagctggaaatactctggttagaaatgagtcgcataagaattgcgatttccgtgtaaaagatcttcaatattcaacagactacacttttaaggcctattttcacaatggagactatcctggagaaccctttattttacatcattcaacatcttataattctaaggcactgatagcatttctggcatttctgattattgtgacatcaatagccctgcttgttgttctctacaaaatctatgatctacataagaaaagatcctgcaatttagatgaacagcaggagcttgttgaaagggatgatgaaaaacaactgatgaatgtggagccaatccatgcagatattttgttggaaacttataagaggaagattgctgatgaaggaagactttttctggctgaatttcagagcatcccgcgggtgttcagcaagtttcctataaaggaagctcgaaagccctttaaccagaataaaaaccgttatgttgacattcttccttatgattataaccgtgttgaactctctgagataaacggagatgcagggtcaaactacataaatgccagctatattgatggtttcaaagaacccaggaaatacattgctgcacaaggtcccagggatgaaactgttgatgatttctggaggatgatttgggaacagaaagccacagttattgtcatggtcactcgatgtgaagaaggaaacaggaacaagtgtgcagaatactggccgtcaatggaagagggcactcgggcttttggagatgttgttgtaaagatcaaccagcacaaaagatgtccagattacatcattcagaaattgaacattgtaaataaaaaagaaaaagcaactggaagagaggtgactcacattcagttcaccagctggccagaccacggggtgcctgaggatcctcacttgctcctcaaactgagaaggagagtgaatgccttcagcaatttcttcagtggtcccattgtggtgcactgcagtgctggtgttgggcgcacaggaacctatatcggaattgatgccatgctagaaggcctggaagccgagaacaaagtggatgtttatggttatgttgtcaagctaaggcgacagagatgcctgatggttcaagtagaggcccagtacatcttgatccatcaggctttggtggaatacaatcagtttggagaaacagaagtgaatttgtctgaattacatccatatctacataacatgaagaaaagggatccacccagtgagccgtctccactagaggctgaattccagagacttccttcatataggagctggaggacacagcacattggaaatcaagaagaaaataaaagtaaaaacaggaattctaatgtcatcccatatgactataacagagtgccacttaaacatgagctggaaatgagtaaagagagtgagcatgattcagatgaatcctctgatgatgacagtgattcagaggaaccaagcaaatacatcaatgcatcttttataatgagctactggaaacctgaagtgatgattgctgctcagggaccactgaaggagaccattggtgacttttggcagatgatcttccaaagaaaagtcaaagttattgttatgctgacagaactgaaacatggagaccaggaaatctgtgctcagtactggggagaaggaaagcaaacatatggagatattgaagttgacctgaaagacacagacaaatcttcaacttatacccttcgtgtctttgaactgagacattccaagaggaaagactctcgaactgtgtaccagtaccaatatacaaactggagtgtnnnnnnnnnnnnnnnnngaacccaaggaattaatctctatgattcaggtcgtcaaacaaaaacttccccagaagaattcctctgaagggaacaagcatcacaagagtacacctctactcattcactgcagggatggatctcagcaaacgggaatattttgtgctttgttaaatctcttagaaagtgcggaaacagaagaggtagtggatatttttcaagtggtaaaagctctacgcaaagctaggctaggcatggtttccacattcgagcaatatcaattcctatatgacgtcattgccagcacctaccctgctcagaatggacaagtaaagaaaaacaaccatcaagaagataaaattgaatttgataatgaagtggacaaagtaaagcaggatgctaattgtgttaatccacttggtgccccagaaaagctccctgaagcaaaggaacaggctgaaggttctgaacccacgagtggcactgaggggccagaacattctgtcaatggtcctgcaagtccagctttaaatcaaggttcataggaaaagacataaatgaggaaactccaaacctcctgttagctgttatttctatttttgtagaagtaggaagtgaaaataggtatacagtggattaattaaatgcagcgaaccaatatttgtagaagggttatattttactactgtggaaaaatatttaagatagttttgccagaacagtttgtacagacgtatgcttattttaaaattttatctcttattcagtaaaaaacaacttctttgtaatcgttatgtgtgtatatgtatgtgtgtatgggtgtgtgtttgtgtgagagacagagaaagagagagaattctttcaagtgaatctaaaagcttttgcttttcctttgtttttatgaagaaaaaatacattttatattagaagtgttaacttagcttgaaggatctgtttttaaaaatcataaactgtgtgcagactcaataaaatcatgtacatttctgaaatgacctcaagatgtcctccttgttctactcatatatatctatcttatatacttactattttacttctagagatagtacataaaggtggtatgtgtgtgtatgctactacaaaaaagttgttaactaaattaacattgggaaatcttatattccatatattagcatttagtccaatgtctttttaagcttatttaattaaaaaatttccagtgagcttatcatgctgtctttacatggggttttcaattttgcatgctcgattattccctgtacaatatttaaaatttattgcttgatacttttgacaacaaattaggttttgtacaattgaacttaaataaatgtcattaaaataaataaatgcaatatgtattaatattcattgtataaaaatagaagaatacaaacatatttgttaaatatttacatatgaaatttaatatagctatttttatggaatttttcattgatatgaaaaatatgatattgcatatgcatagttcccatgttaaatcccattcataactttcattaaagcatttactttgaatttcaaaaaaaattagaatgtttttaccaggaatggatgtcgctaatcataataaaattcaacccatcatttttttccttggttttaattagcaaaagaaaaacagaaaaaatcacacaaaaaaagaacagagagcgcagaactcaaagtaacggcagcagaggacaagatacaacagtggacgagagagttgggcaagagggagtctaagagagaccacaaataatacgcactggtgcactatataaataggcggatacagaaacagaataagaccaggcaaggaggagacacaaatgcgggcgagagatgtacgagcagaagggatacaacaggcgagaaagtaatgcagtaagaaatagaaagataaatagtgaacagcag

SEQ ID NO: 6059 - DNA, 6036 bp, Homo sapiens
  misc_feature (2)..(5): n is a, c, g, or t
  misc_feature (1701)..(1708): n is a, c, g, or t
tnnnngacctcccacaactcggccgcccgggcaggtctgaccacagtggttccggggagaagcctttccaggacccatgtgtaggcacaactgttttccctgatcaggatacttgcggcactcaacagaggaaagaaattcctaagggaacactgctcagaaagtactgcagcatgtcttcaaatgcctgaggatcaagttggaaaactagaagcaacagaaaacacaataagcgcaatggcggcggccgcggcggagcagcaacagttctacctgctcctgggaaacctgctcagccccgacaatgtggtccggaaacaggcagaggaaacctatgagaatatcccaggccagtcaaagatcacattcctcttacaagccatcagaaatacaacagctgctgaagaggctagacaaatggccgccgttctcctaagacgtctcttgtcctctgcatttgatgaagtctatccagcacttccctctgatgttcagactgccatcaacgagtgagctactcatgattattcagatggaaacacaatctagcatgaggaaaaaagtttgtgatattgcggcagaactggccaggaatttaatagatgaggatggcaataaccagtggcccgaaggtttgaagttcctttttgattcagtcagctctcaaaatgtgggactgcgggaagctgcccttcacattttctggaactttcctggaatttttgggaaccagcaacaacactatttagatgtcatcaaacgaatgttagttcagtgtatgcaagatcaggaacacccgtcgatcaggacgttatctgctagagctacagctgcatttatacttgcaaatgagcataatgttgctctgttcaaacattttgcagacttgctaccgggattcctacaggcggtaaatgactcgtgctaccagaatgatgattctgtcctaaaatccctcgttgagattgcagatactgttccaaagtatttgcgtcctcacttggaagcaactctacagctaagtctaaagttgtgtggagacactagcctcaacaatatgcaacgccagcttgcccttgaagtgatcgtcaccctctctgagactgcagctgctatgttaagaaaacataccaatattgttgcacagactattcctcagatgttagcaatgatggttgatttggaagaagatgaggactgggcaaatgcagatgaactagaagatgatgattttgacagcaatgcagttgcaggcgagagtgctctagatcgaatggcttgcggacttggtggaaagctcgttctgccgatgactcgtggcttgtgggttgaccgtggcttgtgggttgaacgtggcttgtgggcatgcaggattgatggccttatctgccattggtgaagggtgccaccagcaaatggaaggaattctaaatgagatcgtaaattttgttttactttttctccaggatcctcatccaagagtaaggtatgcagcctgtaatgccgtgggacagatggctacagattttgcacctggtttccaaaagaaatttcatgagaaggtgattgcagctctgctgcagaccatggaagaccaaggcaatcaacgtgtgcaggcccatgcagctgctgccctcattaactttactgaagactgtcccaagtcactacttattccatacttggataattggggaacannnnnnnnttccattatggtactgaagcttcaagagctgattcagaaaggcaccaagttagttttggaacaagttgtgacatccattgcatcagttgccgatactgcagaagaaaaatttgtcccctactatgatttatttatgccatcactgaagcacatccttgagaatggccggtcaaaaagaactgagacttctgagaggaaaaactattgaatgcattagcctcattggtctggctgttgggaaggaaaaattcatgcaggatgcatcagatgtgatgcagcttttgttaaagacccagacagacttcaatgatatggaagatgatgatcctcagatctcttacatgatctcagcatgggccagaatgtgcaaaatccttggaaaagaatttcagcaataccttccagtggttatggggcctttaatgaagacggcttcaattaagcccgaagtagcccttttagatacccaagacatggagaatatgagtgatgatgatggttgggaatttgtgaaccttggagatcagcaaagctttggtattaaaactgcaggactagaagaaaaatcaactgcttgccagatgttggtttgctatgctaaggagttaaaggaaggctttgtggagtacaccgaacagttgtcaactgatggtccctttactgaaattttatttccacgatggtgttcgagtggcagcagcggaatccatgcctcttctcctggagtgtgcaagagtccgtggtcctgagtatctcacacagatgtggcattttatgtgtgatgctctaattaaggccattggtacagaaccagattcagacgtcctctcagaaataatgcattcttttgcaaagtgcattgaagtaatgggagatggatgccttaataatgaacactttgaagaactgggaggtatattgaaagcaaagcttgaagaacattttaaaaatcaagaattacgacaagttaaaagacaagatgaagactatgatgaacaggtcgaagagtcactacaagatgaggatgataatgatgtttatattctgaccaaagtgtcagatattttacactcaatattcagtagctacaaagaaaaggtgttaccatggtttgaacagctgcttccattaattgtcaacctcatttgtccacatagaccatggccagacagacaatggggattatgcatctttgatgatgtcatagaacactgtagtccagcctcatttaaatacgcagaatatttcttaagaccaatgctccaatatgtatgtgacaacagcccagaagtcaggcaagcagctgcatatggcctgggagtcatggcacagtacggtggagataattatcgccctttttgtacagaagcacttcccctgctggtaagagttattcagtctgcggattctaagaccaaagaaaatgtcaatgctacagagaactgcatctcagcagtagggaaaatcatgaagttcaagcctgactgtgtaaacgttgaagaggtccttccacactggttgtcttggcttccactacatgaagataaagaagaagctgttcagactttcaattatctgtgtgacctgattgaaagtaatcatccaattgttcttggcccaaacaataccaatctgcccaaaatatttagtataattgcggaaggagaaatgcacgaggcaattaaacatgaagatccttgtgccaaacgtctggccaatgtcgttcgccaagtacagacttctggaggactgtggactgagtgcatagcacagctcagtcctgagcagcaggccgccattcaggagctcctgaactctgcgtgaagggccttaatgtcacccaccagaaaactaactccaaataaacgcttaccctttcctttaggtttctttgttttgtttttgagcaaaagagatcggtagtgttgtgtgtaggccattcttctggagagccacaagcaggaagagcagcgctgtgttgcagaatggagtttccatggatttctaccagaccactgaaggagttcctggaagccctgcggtagctagcactgaagactatttttctattggtataacccgcccacctgaaggggaaagggaaatcaaattaatttttctcgttagacataaggaaatttaaggaaaaacagctttaagaacagttactcagcgtagatgtgtgttcacacaaattgctctgcattcagtgttcattgtgaattgggagtgtgagtctttctgtagggtagaaagaagcctcctacccagcaaaccagtagacccaaaagttgaaaaaaactgatgacagacaacaagcatgaagatggcatatttgatgtcactttggttctttttcccagaaggcttatacagtgactcagtcgggaagctttccagcttccagcccttgaatgtgaagtgtcattggcatgtctggcagtagtctctcattcactcctcaataaacaacattgaatacaaaagaggcttgtgtaaaaactcagtactgtctggcttggattcatttcatgtttttaatataagaatgatctaatatttttttaaagtaatagctatcagtaatagctgagtgttttttcccctaatattttccttgtgcaattcagacttaagcatcgagtttttaccatcttccactttaagctaagttatgatacctattccattcacaattggtgttctttttaaggtttgcaaatttcagccaattttgtagctaagattgttctgatcagctcaaaaagatttggcttagtgttttcattgcaaattataattgctgtagagccacacacaacttttgaacttttaattataagtgttatggctaaagttatttactgaaaatttcagtaaaatgtgtgaatgtttctttatgtattaacctcatagcagtaaatgacttgctgttgtttaatttttctaaggcatcttaatagacttctgttgaaaacttcagtgttaacatttttatagtttgtactaaatttaaccgtgatataaaaatgaattttatgcatagatcagaattttaaattaaaggttttttctttaaatgatttgtattactttattaaaactaaatctgaaatggaatagaaaatagaatggattacatacagatggtttccttgttagcagatgcccttcaaatatattttacgtttgcagcacaacaccattgcccggaggcttccgaatctagcaaagcagcatattaaatgactccacctgcgcagtccttgtgttcagtggatgaatacctgtgggctcttgtaatgtgtggtaatatttggagctttatagcctgtattccttgggagaaaaaaatgggaattggagtaaaaagtgtgtcaagacaacccctttctgctttcttatgtagcatctgcaaagccgattcatgtactgatgccaatcagctagagcaatgtaggctttttttaatttaaattattactacactttattactacacttgcagaaaagaaacatgttaaaatcatggcacacctgcagaatttcagatgacagtgtggtcagaagatgttttttgggagaacctagtgtttgctgggcactatgctaagcactttgggagcaagaacctcctaccttccagtttaaacactagtggtattgtcagatgccgttagtatctgagatgtacttacagcagggttctaagagctctgaaagaagcgctctgttagatgcagactggcagcatcctccttgataaaagcagaaaagcaaagaggtaattggagttgaatcaagttaatagggaaggttggtagtaaatgctgttagtgtgacatgattctgaaacccagagctcagaactaactgtgagatgtaccatgaactaacaattctttgaaaggacctgcagaagcatttttaatacctcattctgtctatgcaagatgaaaatccatggagttttttcttggcttttgtaccaaatttaggggtcttgcatgtcagcaagtgatatatattgtttataaatgcaagctatttctggaggggaaaaatgtgtgtggctcttacgttttctgggaattttgtaacaagttacacgcacaagtgttagaaactttggcataactcaatttggagtattttttaaatgctgtatctttaaagaaaagtaaaattgtcttaaatctaattgacacttctgtaatgagaggcaaccttataactctggagttgtagtttgacagaaccatcagtaaagacataagcaaataaatggtcttggtgcaaaaaaaaaaaaaaaaaaaaaaagggcggcc

SEQ ID NO: 6060 - DNA, 1080 bp, Homo sapiens
agctccaggagcttccgaagaaacaggaccagagagggaaggtgacctgaaagtcacagaataattttttagagctgaacaagaatccaagcctgcaactgcagagacgagagatctttctgctgtctatactcttggaaagcacatcctaagatctttgcagattatcctgtggaaggaaaatgcctaaagtcaaaagaagccggaaagcacccccagatggctgggagttgattgagccaacactggatgaattagatcaaaagatgagagaagctgaaacagaaccgcatgagggaaagaggaaagtggaatctctgtggcccatcttcaggatccaccaccagaaaacccgctacatcttcgacctcttttacaagcggaaagccatcagcagagaactctatgaatattgtattaaagaaggctatgcagacaaaaacctgattgcaaaatggaaaaagcaaggatatgagaacttgtgctgcctgcggtgcattcagacacgggacaccaacttcgggacgaactgcatctgccgcgtgcccaaaagcaagctggaagtgggccgcatcatcgagtgcacacactgtggctgtcgtggctgctctggctgaggctggcgcgctccaccctggactctggacttcgcaggttcctgcctgtcacgccacccccttcctgggagcagcgagcagtgccccaggcccgagttggagcacggtctctatggggaaggcttcgctgtctatcagctgtgatttgtaaaaataaaatctttaaatctctcgaaaaaaaaaaaaaaaaaaacattagagcgatctgtacgcgagtcaggaaaacagaaaggggtactccgaggggttcttatgtcggggggcgaaaaaaaaggtgattgaaatgggcccttgggccaaaggtggttcccgggacccaactttttttggaaaaaggggggaaaatcttgccgggcccccctaataagggggccgcatttatttttccacaaaacccgcggataacccggcctttatagaattcggggtgggagatacccgggggaaatttacccccctccta

SEQ ID NO: 6061 - DNA, 1933 bp, Homo sapiens
ggcacgaggcctcgtgccgccgggctcttggtacctcagcgcgagcgccaggcgtccggccgccgtggctatgttcgtgtcgatttccgcaaagagttctacgaggtggtccagagccagagggtccttctcttcgtggcctcggacgtggatgctctgtgtgcgtgcaagatccttcaggccttgttccagtgtgaccacgtgcaatatacgctggttccagtttctgggtggcaagaacttgaaactgcatttcttgagcataaagaacagtttcattattttattctcataaactgtggagctaatgtagacctattggatattcttcaacctgatgaagacactatattctttgtgtgtgacacccataggccagtcaatgtcgtcaatgtatacaacgatacccagatcaaattactcattaaacaagatgatgaccttgaagttcccgcctatgaagacatcttcagggatgaagaggaggatgaagagcattcaggaaatgacagtgatgggtcagagccttctgagaagcgcacacggttagaagaggagatagtggagcaaaccatgcggaggaggcagcggcgagagtgggaggcccggagaagagacatcctctttgactacgagcagtatgaatatcatgggacatcgtcagccatggtgatgtttgagctggcttggatgctgtccaaggacctgaatgacatgctgtggtgggccatcgttggactaacagaccagtgggtgcaagacaagatcactcaaatgaaatacgtgactgatgttggtgtcctgcagcgccacgtttcccgccacaaccaccggaacgaggatgaggagaacacactctccgtggactgcacacggatctcctttgagtatgacctccgcctggtgctctaccagcactggtccctccatgacagcctgtgcaacaccagctataccgcagccaggttcaagctgtggtctgtgcatggacagaagcggctccaggagttccttgcagacatgggtcttcccctgaagcaggtgaagcagaagttccaggccatggacatctccttgaaggagaatttgcgggaaatgattgaagagtctgcaaataaatttgggatgaaggacatgcgcgtgcagactttcagcattcattttgggttcaagcacaagtttctggccagcgacgtggtctttgccaccatgtctttgatggagagccccgagaaggatggctcagggacagatcacttcatccaggctctggacagcctctccaggagtaacctggacaagctgtaccatggcctggaactcgccaagaagcagctgcgagccacccagcagaccattgccagctgcctttgcaccaacctcgtcatctcccaggggcctttcctgtactgctctctcatggagggcactccagatgtcatgctgttctctaggccggcatccctaagcctgctcagcaaacacctgctcaagtcctttgtgtgttcgacaaagaaccggcgctgcaaactgctgcccctggtgatggctgcccccctgagcatggagcatggcacagtgaccgtggtgggcatccccccagagaccgacagctcggacaggaagaacttttttgggagggcgtttgagaaggcagcggaaagcaccagctcccggatgctgcacaaccattttgacctctcagtaattgagctgaaagctgaggatcggagcaagtttctggacgcacttatttccctcctgtcctaggaatttgattcttccagaatgaccttcttatttatgtaactggctttcatttagattgtaagttatggacatgatttgagatgtagaagccattttttattaaataaaatgcttattttaggctcaaaaaaaaaaaaaaaaaaaaaaaaaaaaaaaaaaaaaa

SEQ ID NO: 6062 - DNA, 2154 bp, Homo sapiens
ggggccgggcggggccagcggcgcattagcgccttgtcaattcggctgctcagacttgctccggcctccgcgtccgcgcccagcgcgcccagcgacgtgcgggcggcctggcccgcgccctcccgcgcccggcctgcgtcccgcgccctgcgccaccgccgccgagccgcagcccgccgcgcgcccccggcagcgccggccccatgcccgccggccgccggggccccgccgcccaatccgcgcggcggccgccgccgttgctgcccctgctgctgctgctctgcgtcctcggggcgccgcgagccggatcaggagcccacacagctgtgatcagtccccaggatcccacgcttctcatcggctcctccctgctggccacctgctcagtgcacggagacccaccaggagccaccgccgagggcctctactggaccctcaacgggcgccgcctgccccctgagctctcccgtgtactcaacgcctccaccttggctctggccctggccaacctcaatgggtccaggcagcggtcgggggacaacctcgtgtgccacgcccgtgacggcagcatcctggctggctcctgcctctatgttggcctgcccccagagaaacccgtcaacatcagctgctggtccaagaacatgaaggacttgacctgccgctggacgccaggggcccacggggagaccttcctccacaccaactactccctcaagtacaagcttaggtggtatggccaggacaacacatgtgaggagtaccacacagtggggccccactcctgccacatccccaaggacctggctctctttacgccctatgagatctgggtggaggccaccaaccgcctgggctctgcccgctccgatgtactcacgctggatatcctggatgtggtgaccacggaccccccgcccgacgtgcacgtgagccgcgtcgggggcctggaggaccagctgagcgtgcgctgggtgtcgccacccgccctcaaggatttcctctttcaagccaaataccagatccgctaccgagtggaggacagtgtggactggaaggtggtggacgatgtgagcaaccagacctcctgccgcctggccggcctgaaacccggcaccgtgtacttcgtgcaagtgcgctgcaacccctttggcatctatggctccaagaaagccgggatctggagtgagtggagccaccccacagccgcctccactccccgcagtgagcgcccgggcccgggcggcggggcgtgcgaaccgcggggcggagagccgagctcggggccggtgcggcgcgagctcaagcagttcctgggctggctcaagaagcacgcgtactgctccaacctcagcttccgcctctacgaccagtggcgagcctggatgcagaagtcgcacaagacccgcaaccaggacgaggggatcctgccctcgggcagacggggcacggcgagaggtcctgccagataagctgtaggggctcaggccaccctccctgccacgtggagacgcagaggccgaacccaaactggggccacctctgtaccctcacttcagggcacctgagccaccctcagcaggagctggggtggcccctgagctccaacggccataacagctctgactcccacgtgaggccacctttgggtgcaccccagtgggtgtgtgtgtgtgtgtgagggttggttgagttgcctagaacccctgccagggctgggggtgagaaggggagtcattactccccattacctagggcccctccaaaagagtccttttaaataaatgagctatttaggtgcaaaaaaaaaaaaaaaaaaaaaaaatcgagggcccctatgtccggcgccggaaaaaaaacgccatgaaatgccccatgggccaaagccgttccccgacccccgccttttttttgcccatttggcaaaacctccccccctcccctaattgcgcgccccatcttcccccccaaaaaaactccggcacccccgcatttccccccccttttctcccccgcccctaatcactctaacctccccccgtaacctccccctttctttcacgcaaacaaaacccgccctcccccccaaacaccccgacttaaaaccgcacacaagtgggcgctatcctcgttgcccccccgcccccccacaaa

SEQ ID NO: 6063 - DNA, 2572 bp, Homo sapiens
agcgggggctggcgggaggggccggaggctcgcgaggggcgggggcggcgacggcggcggagcgtaggggaggggaccggagaggaggggatgagcacacgggagaggagaagagggagacccgccgcctccctccctccctagctgacttgctccctcccgggctgcggctgctgcaaaagccagcagcggcagcgggagctgtccggaggccggcgtcgagggtttgccgctgtctctgctattccatcctccccataggggctctctcccctctcccatctcaagatggcagccagcagctctgagatctctgagatgaagggggttgaggagagtcccaaggttccaggcgaagggcctggccattctgaagctgaaactggccctccccaggtcctagcaggggtaccagaccagccagaggccccgcagccaggtccaaacaccactgcggcccctgtggactcagggcccaaggctgggctggctccagaaaccacagagaccccggctggggcctcagaaacagcccaggccacagacctcagcttaagcccaggaggggaatcaaaggccaactgcagccccgaagacccatgccaagaaacagtgtccaaaccagaagtgagcaaagaggccactgcagaccaggggtccaggctggagtctgcagccccacctgaaccagccccagagcctgctccccaaccagacccccggccagattcccagccttcccccaagccagcccttcaaccagagctccctacccaggaggaccccacccctgagattctgtctgagagtgtaggggaaaagcaagagaatggggcagtggtgcccctgcaggctggtgatggggaagagggcccagcccctgagcctcactcaccaccctcaaaaaaatcccccccagccaatggggcccccccccgagtgctgcagcagctggttgaggaggatcgaatgagaagggcacacagtgggcatccaggatctccccgaggtagcctgagccgccaccccagctcccagctggcaggtcctggggtggaggggggtgaaggcacccagaaacctcgggactacatcatccttgccatcctgtcctgcttctgccccatgtggcctgtcaacatcgtggccttcgcttatgctgtcatgtcccggaacagcctgcagcagggggacgtggacggggcccagcgtctgggccgggtagccaagctcttaagcatcgtggcgctggtggggggagtcctcatcatcatcgcctcctgcgtcatcaacttaggcgtgtataagtgaggggctctgccccgcatcccaagacttttcttcctgttgggagctgccttgggcccatccctcccctggggggagcccaactgatggccctggcccccacccctaaggaccaagggagcctgagcggccttgtttacagcttctgtcctgctcctgcatcttgccaggctcctctgccaactgtaggcctgcctcatccctgcactggttccaacctccctgcactaatgcctgcatcccctccggcctcttggccccctatccctgcacttctggaaacctccctgcactctggaaacctccctgaacacctccccaactctgcgctctcagcctccctgcatctctcctggcctccctgcacttcttccagccccccaaattctctggacctccaccctggccgcctcctcccaactttcattgtcttggcatctctcaaccctcagtcctctcttccttcccttctttatcatctcccctttcctctccacgtcccgcccccttcctcttcctgcctcctcatctcccttaagcatcctcttctccaacctcccgtcaccgtttactctgcaaaactgacagcacttagacgaggcttgggggcagggagcagtgttgggagagggctccccaaccccaggctcggactgttctctgctgggaccacccagggtcggacacccaagggtgcctggcaggtcgcagagttggcaagccgggcctcgtatggggactcgggtgagggtggcgagtactggttccgaacgcacgcaggggagaagggagggacgcggcgctgacccttccaggtcagctggagttgacccgcccacctgggcttttcaaccccagtccgcgagtttctttcttgaaggtgtgggggctagattcattcacgtgcttcgtaatgaaataatccaaaaaataggaccaaagcgcccactggcaggagcgagggcggggcgccgcgctctataattattttctaagatgatgggggaggtttgttgcacgcgacagcccgctgaggaggcggggaccgagctacaacgcggttcggatttggcgggggtttttttccttaaaaaaaaaaaaaaaaaaaaaaaaaagtctgggggaagaaaaaaactaaaattcttaaaaaaaaaaaaaaaggctattatcaaactgatttctccctttttgtatgccggatgctgcatgagtttgaaacaccaataaacggagactgcatgagaatagaataaaaaaaaaaaaa

SEQ ID NO: 6064 - DNA, 2649 bp, Homo sapiens
agcggggcgtaggagcgcgccatggagcatgtgacagagggctcctgggagtcgctgcctgtgccgctgcacccgcaggtgctgggcgcgctgcgggagctgggcttcccgtacatgacgccggtgcagtccgcaaccatccctctgttcatgcgaaacaaagatgtcgctgcagaagcggtcacaggtagtggcaaaacactcgcttttgtcatccccatcctggaaattcttctgagaagagaagagaagttaaaaaagagtcaggttggagccataatcatcacccccactcgagagctggccattcaaatagacgaggtcctgtcgcatttcacgaagcacttccccgagttcagccagattctttggatcggaggcaggaatcctggagaagatgttgagaggtttaagcaacaaggtgggaacatcattgtggccactccaggccgcttggaggacttgttccggaggaaggccgaaggcttggatctggccagctgtgtgcgatccctggatgtcctggtgttggatgaggcagacagacttctggacatggggtttgaggcaagcatcaacaccattctggagtttttgccaaagcagaggagaacaggccttttctctgccactcagacgcaggaagtggagaacctggtgagagcgggcctccggaaccctgtccgggtctcagtgaaggagaagggcgtggcagccagcagtgcccagaagaccccctcccgcctggaaaactactacatggtatgcaaggcagatgagaaatttaatcagctggtccattttcttcgcaatcataagcaggagaaacacctggtcttcttcagcacctgtgcctgtgtggaatactatgggaagactctggaagtgctggtgaagggcgtgaagattatgtgcattcacggaaagatgaaatataaacgcaataagatcttcatggagttccgcaaattgcaaagtgggattttagtgtgcactgatgtgatggcccggggaattgatattcctgaagtcaactgggttttgcagtatgaccctcccagcaatgcaagtgccttcgtgcatcgctgcggtcgcacagctcgcattggccacgggggcagcgctctggtgttcctcctgcccatggaagagtcatacatcaatttccttgcaattaaccaaaaatgccccctgcaggagatgaagccccagagaaacacagcggaccttctgccaaaactcaagtccatggccctggctgacagagctgtgtttgaaaagggcatgaaagcttttgtgtcatatgtccaagcttatgcaaagcatgaatgcaacctgattttcagattaaaggatcttgattttgccagccttgctcgaggttttgccctgctgaggatgcccaagatgccagaattgagagggaagcagtttccagattttgtgcccgtggacgttaataccgacacgattccatttaaagataaaatcagagaaaagcagaggcagaaactcctggagcaacaaagaagagagaaaacagaaaatgaagggagaagaaaattcataaaaaataaagcttggtcaaagcagaaggccaaaaaagaaaagaagaaaaaaatgaatgagaaaaggaaaagggaagagggttctgatattgaagatgaggacatggaagaacttcttaatgacacaagactcttgaaaaaacttaagaaaggcaaaataactgaagaagaatttgagaagggcttgttgacaactggcaaaagaacaatcaagacagtggatttagggatctcagatttggaagatgactgctaattccagtgccacagatgaacccacaaggacatagctgttccctaacttggtggatggctccagtttgcttttaacgaaaatcacaacttcaggagacatctgaaaagaatgatgtctctgaaagctgtcctttcagatgagggagaaatgaaggatttcacacttcagaatattttactaaaaacattccagtcttggccgggtgcggtggctcctgcctataatcccagcactttgggaggctgaggcaggaggatcacttgagcccaggagttcaagaccagcctgggaacacagcgagaccctctcattaaaaacaacaaaacaaaacaaaaaaaaaaattggagtagtctaacagaagaaaatgtaaaattatttgagtgtaaataatagatgtcagtatttatcatgatgggtcacatatagacatatgtacatattatatatatatatatatatatatatatatatatatatatatatatataaaagctcttttttctgaggctattttatagttatttttaaacataaagatacagaagtcttcttgacttctgattttcaaaaccattcctcagtatcttcaggcatttgacctcctgaatgtgcttggccctgggcttcagttatcctttgatgtcctgcaggggtggctaatgtgctggggtttttctgtgttaatagtcacagtattgttttattggtgaatagctgaaaaacagagggattaagtcatattccgggaaagagaattatagtttttatgcctcctgttgaataaatggtgtcctgataaaaaaaaaaataaaaaaaaaaaacga

SEQ ID NO: 6065 - DNA, 2483 bp, Homo sapiens
  misc_feature (1165)..(1167): n is a, c, g, or t
tacggctgcgagaagacgacagaaggggagtgacggtcgcgagatttggagctcgcgggaaaacttgtctctgcgttgtggggaggacgcgcgctctgcgcgggattttcaagcgtaggcccccgggaactcgagctgccatgagcctctgggtggacaagtatcggccctgctccttgggacggctggactatcacaaggagcaggcggcccagctgcggaacctggtgcagtgtggtgactttcctcatctgttagtgtacggaccatcaggtgctggaaaaaagacaagaattatgtgtattctacgtgaactttatggtgttggagtggaaaaattgagaattgaacatcagaccatcacaactccatctaaaaaaaaaattgaaattagcaccattgcaagtaactaccaccttgaagttaatcctagtgatgctggaaatagtgaccgagtagtcattcaggagatgttgaaaacagtggcacaatcacaacaacttgaaacaaactctcaaagggattttaaagtggtattattgacagaagttgacaaactcaccaaagatgctcagcatgccttgcgaagaaccatggaaaaatatatgtctacctgcagattgatcttgtgctgcaattctacatctaaagtgatcccacctattcgtagtaggtgcttggcggttcgtgtgcctgctcccagcattgaagatatttgccacgtgttatctactgtgtgtaagaaggaaggtctgaatcttccttcacaactggctcatagacttgcagagaagtcttgtagaaatctcagaaaagccctgcttatgtgtgaagcctgcagagtgcaacaatatccttttactgcagatcaagaaatccctgagacagattgggaggtgtatctgagggagactgcaaatgctattgtcagtcagcaaactccacaaaggctccttgaagttcgtggaaggctgtatgagcttctaactcattgtattcctcctgagataataatgaagggccttctctcagaactgttacataattgtgatggacaactgaaaggggaggtggcacaaatggcagcttactatgagcatcgtctacagctgggtagcaaagccatttatcacttggaagcgtttgtggccaattcatggcactnnnataagaagttcatggaggatggattggaaggcatgatgttctgacttctgtcagttattcttgcaaagatttctcagtatcagtatttacatacagcttatattaaaagagctgtgggtaaattaactgaacttaatcatgtcgtatttgggtttttttggtaataacttctctgtgaactattaatcatcctctgagttaaataattgctcctatactattgaagtatgtagttttgtacataacttagagactttagagtctaagaaaatgatcttaatttactttaagcattggttattcaagtattcattgttgatcctcctattctcttccgtctaatctctcacctgctaaaggagatttacacattagaaagcaaagattattttcatttatccagatgaccattttctgccacaggtaacatgattgtttgacggaccattatatttaattctagtttctctcaatgaataattgtatttttgtaggaaatgtaagatttcattctgaaacataattattggtatggacaaaattgcagataccatttctgttgaggctgcagatttccaacttttatttcagtggttcagattagtattaggtcggtactaagaaataagcatgttttcactaatttaagtacttgagactcttgaagaaaattcagaatgaagttctggagaaaggtatgttactgtagtaattactctttgaacaggttttgtgttttgtcattagctctgccctttttaattaaatattttggttcatggaccaaagggtttacttgacaaatttgtgtgacagactccgaacaattcctttactacgaagtataatttataaaataaaatatacccattttaagggtacagtttgatttttgaccagtgaaactatgatcccaatcaaggtatagatgccgtcaccccaaaaagttccctccatatccctttgcagtcagttcatccctaccctggcccagatgatcactgatcttgtcattatagatgagttttgccagttcaagaatttaatggaatcagatattgtaagcattcttgtgtaatacttcattctctctcattattgagattcatccatattgttgaatgtttcactagttaatgtttattgttcaatatttttgtatatacttttaaagcctattcacttgctgatggatctttggtttgtttccaggtttggttattatgaataaagttgctgtgaataaaaaaaaaaaaaaaaaaaaaaaaaaaaactcgagggggggcccggacccaattcgccctaatgtgagtcgt

SEQ ID NO: 6066 - DNA, 6977 bp, Homo sapiens
  misc_feature (972)..(988): n is a, c, g, or t
ggcatggaacctaaagactagaggcggttgtgtgagtcaggaagaggggccagatatctgagtgttcctctttagtttcttcaattgcagataatatggtgtctaattttatgttgttcaggaaagacagtggttcctgactcaggaagacagtctcagaaacatgtggaatgatattgagctgctaacaaatgatgataccggaagtgggtacctgagtgtcggttcaagaaaagaacatggaactgctttatatcaagtagatttgctagtgaagatctcttctgaaaaggcctcattaaatccaaagatacaggcatgcagcttaagtgatgggtttattattgtagccgaccaatcagtgatattgcttgacagtatttgtagatcacttcaattgcatcttgtctttgatactgaagtggatgtagttggcctttgtcaagaaggaaagtttcttttggttggcgagagaagtggcaacctacatcttattcatgtaacatcaaaacaaacactactcactaatgcatttgttcagaaagctaacgatgaaaatcggcggacttaccagaatcttgtcattgagaaggatggttcaaatgaaggtacctattatatgctacttcttacatacagtggatttttttgtattacaaaccttcagcttttaaaaattcaacaagcaattgagaatgtagacttcagtacagcaaaaaagttacaaggacaaatcaagtccagttttatttctactgaaaattatcatactcttggttgtctcagtcttgtggctggagatttagcaagtgaagttcctgtgataattgggggaaccggtaattgtgcattctcaaaatgggaaccagattcttccaagaaaggaatgacagttaagaaccttattgatgcagagattattaaaggtgcaaagaagttccagctgatagacaatctactttttgttcttgnnnnnnnnnnnnnnnnnagtttatgggatatttacactctaactcctgtatggaactggccctctcttcacgtagaagagtttcttcttactacagaagcagactctccttcatcagtcacgtggcaaggaattacaaatctcaaattaatagctctgacagcttcagctaataagaagatgaaaaacctcatggtttattcattacctacaatggaaatactatattctttggaagtatctagtgtttcttctctggtccaaacaggaattagcacagataccatataccttttagaaggagtttgcaaaaatgatccaaaattgtctgaagactcagtctctgtgttagtactcagatgtcttacggaagctttaccagaaaacagattgagtcggttacttcacaaacacagatttgctgaagctgagagttttgccattcagtttggactagatgttgagcttgtttacaaggtcaagtcaaatcatatattggagaaactggcattgagttctgtggatgccagtgaacagaccgaatggcaacaacttgtagacgacgctaaggaaaatctacataagatccaggatgatgaatttgtggtgaattactgcctgaaagctcagtggataacctatgaaaccactcaagagatgctgaattatgccaaaaccaggcttttgaagaaagaagataaaactgctctcatttattctgatggcttgaaagaggtgctaagagctcatgcaaaattgactactttttatggagcatttggaccagaaaaattcagtggcagttcttggattgaatttctaaataatgaagatgatcttaaagatatttttttacagctaaaagaaggaaaccttgtttgtgcacagtatctttggcttcgacatcgggcaaactttgaaagcagatttgatgtgaaaatgctggagagcttgctcaactcaatgtctgcatcagtctctttgcaaaagctgtgtccatggtttaaaaatgatgtgattccatttgtaagaaggactgtgcctgaaggacagataattcttgcaaaatggttggaacaagcagccaggaaccttgaattaactgataaggcaaattggccagaaaatggacttcaattggcagagatattttttacagcagaaaaaacagacgagttgggattggcatcttcctggcattggatttccttgaaagattatcagaacacagaggaagtatgtcagctaaggactttggtaaataacttgcgagagttgatcacgttgcataggaagtacaactgcaaattagccctctctgattttgagaaggaaaatacaaccaccatagtgttccgaatgtttgataaagtgctggccccagagcttattccctccatcttagagaagtttataagagtttacatgagagaacatgacttgcaagaggaggaacttctcttgctgtacatagaggatttactgaatagatgcagctcaaagtccacatcactctttgaaacagcatgggaagcaaaggccatggcagtaatagcgtgtttatctgacacggacctcatatttgatgccgtgctcaagatcatgtatgcggcagtggttccttggagtgcagctgtggagcaactggtgaaacagcacctggaaatggaccatcccaaagtcaagttattacaggaaagttacaaactaatggagatgaaaaaacttttacgaggctatggaataagagaggtaaatctcttaaacaaggaaataatgagagtggttagatacattctcaaacaagatgtcccatcttctttagaagatgctttaaaggtagcccaagcgtttatgttatctgatgatgagatctacagtctaagaattattgacctgattgatagagaacagggtgaagactgtctccttctgttgaagtctttgcctcctgctgaagctgagaaaactgcagaaagagtcatcatatgggcacgactggcattacaagaagagccagatcattctaaagagggcaaggcctggagaatgtctgtagcgaagacatccgtggacattcttaagatactatgtgacattcagaaagacaatctgcagaagaaggacgaatgtgaagaaatgttgaaactatttaaagaggttgctagcttacaggagaactttgaggtctttctttcatttgaagattatagcaatagttccctggtagcagatctccgtgagcagcacattaaagctcacgaagttgcacaggcgaaacacaaacctgggagcaccccagagcccatagctgctgaggtgaggagcccaagcatggaatcaaagctgcacagacaggcactggccctgcagatgtccaaacaagagctggaggcagagctgaccttgagagccttaaaagatgggaacatcaaaacagcactgaaaaaatgcagcgacttgtttaagtatcactgcaatgctgacactgggaaattgctatttctgacatgtcagaagctttgtcagatgttggctgataatgtcccagtgacagtgcctgtgggactgaatcttccttccatgatacatgatctagcaagccaagctgccaccatttgcagtccagattttttactagatgctttagaactatgtaaacatactttaatggctgtagagctttccagacaatgccaaatggatgactgtggaatcctcatgaaagcttcttttgggacacataaagatccatatgaagagtggtcttacagtgacttcttcagtgaagatggaattgttcttgagtcacagatggtgcttccagtgatttatgaactgatttcatctcttgtgcctctagctgaaagcaagagatatcccttggagtctaccagtttgccatactgctcccttaatgaaggagatggccttgttttacctgttataaattccatctctgccctgcttcagaatcttcaggaatctagccagtgggagctagccctaagatttgtggttggttcatttggtacctgtcttcagcactctgtgtcaaacttcatgaatgccactttgagtgaaaagttatttggagagactacattagttaaatcaaggcatgttgttatggaattgaaagaaaaagctgttatatttatcagggaaaatgctacaacactactgcacaaagtatttaattgtcgcttggtagatcttgacctggcgttgggttactgcactctcttacctcaaaaagatgtgtttgaaaatctctggaagctcatagataaagcatggcagaattacgacaaaatcttggcaatatctctggtgggctctgagctggcaagtctctatcaggaaatagaaatggggcttaagttccgtgaactcagtactgatgcccagtggggcattcgtcttggtaaacttggtatttcttttcaaccagttttcaggcaacattttctcaccaagaaagacctcattaaagctcttgtggagaatatagatatggacacaagcctcattttggaatattgcagcacatttcagttggactgcgatgcagttcttcagctcttcattgaaacgctgctccacaacacaaatgccggccaaggccagggagatgcaagcatggactctgcaaagcggcggcatcccaaactcctggccaaagcccttgagatggttcctttactgacgagcacaaaagatttggtcatcagtcttagtggaatactacataagttggatccttatgactatgaaatgattgaagttgtcttgaaagttatagaacgagctgatgaaaagataaccaatattaatattaatcaggcattgagtattctgaaacatttgaagtcatacagaagaatttctcctcccgtggatctagaatatcagtatatgttggaacatgtcataactttgccatcagctgcccaaactagactgccttttcacctgatattctttggcacagcacagaacttctggaaaattctctctacagaactcagtgaagaatctttcccaacattgctcttaatttcgaaattaatgaagttctctctggacactctgtacgtgtctacagcaaaacacgttttcgaaaaaaaactgaagccaaagctcctgaagttaacacaagctaaatcctcaacactgattaacaaggaaataactaagatcacgcagaccatcgaatcctgcttactctctatagtcaacccagagtgggctgtagctattgccatcagccttgcccaggatatccctgaaggttccttcaagatatctgctttgaaattctgcctttatttagctgagagatggctacagaatatcccatcgcaggacgaaaaacgtgaaaaagccgaggctttgttgaagaagcttcatatccagtaccggcgatcgggcacagaagctgtgctcatagcccacaagctgaacactgaggaatatttaagagtgatcggaaagccagcacatcttattgtcagtctctacgaacatcctagcatcaatcaaagaattcagaattcatctggcacagattatcctgatattcatgcagcagctaaagaaatagccgaagtcaatgaaattaatttggaaaaagtctgggacatgttgttggaaaaatggctatgcccttcaacaaaacctggtgaaaaaccatcagaattatttgaacttcaagaagatgaagccctacgaagagtgcagtatctcctcctgtctcgtccaattgattatagttcaagaatgctgtttgtatttgcaacatcaactacaaccacattaggtatgcatcagttaacttttgcccatagaactcgagctcttcagtgtctcttctatttggctgacaaggaaactatagaatctctctttaaaaaacccattgaagaagtgaaatcttatttgagatgtataacttttctggcatcatttgagactttgaatatccccatcacatatgaattattttgcagcagtcctaaagaaggaatgattaagggtctgtggaaaaaccacagccacgagtccatggcagtaagattggtgactgagctgtgtttagaatacaaaatctatgacctgcagctttggaatggactcttgcaaaagcttctgggcttcaatatgattccttatctaaggaaagttttaaaagccatctccagtatccattctttatggcaggttccctacttcagcaaagcgtggcagcgtgtgatacagataccactgctttcagcctcttgtcctttaagtcctgatcagctgtcagattgttctgagagtctcatcgctgtcctcgaatgtccagtctcaggtgatcttgacctgatcggagtcgccaggcagtatatccagttagaacttccggcttttgcattagcttgtctgatgctcatgccccactcagagaaaagacaccagcaaattaagaattttctgggttcctgtgaccctcaggttattttaaagcaattggaagagcatatgaacacgggccagctagcaggattttcacatcaaattagaagtctgattttgaataatatcatcaataagaaggagtttgggattttggcaaagaccaaatactttcaaatgttgaagatgcatgcgatgaataccaacaatatcactgagctagtgaactatttggcaaatgacttaagtttagatgaagcttcagtcttgataactgaatattcaaagcactgcgggaaacctgtgcctccagacactgctccctgtgaaattctgaagatgtttcttagtggattatcgtaaatcactgaacctttttttcaagaaggacaagaattttggagtctgctattaatggaccatatttattacagtttttaaattgtacaatctctgtattatagctatttgtctaacattaccccacatgtaataaataaaacaatatgagcataattgccccataaagaaaaaaaaaaaaaacgtt

SEQ ID NO: 6067 - DNA, 2434 bp, Homo sapiens
  misc_feature (1208)..(1232): n is a, c, g, or t
ggcggcggcgccagcgccaccgtccggtccacccgccagcccgcacagccgcgccgccgccgagcgtttcgtgagcggcgctccgaggatcaggaatggggcttcgggcgctgggcgcgctccgaacccggcgcacgtaagagcctgggagcgcccgatgcctgccctgtgctgccctggatgccccatcgcctatggacctgggagatgcttggaaattgcaacctgcctgttccccgtaggagcctgctgcccccgggaccccctgtgcactgtgctgcaccctgtgtcagcatggcccccggatgagagactggctgcctcccgaactgcgcctgatccctgcgttggcctgtgtgcatgctgccacgctgatgccctctaggctgaccgcagggccacagcagctcagccgccggtgccccctcggaaaccatgacccccggcgcgggcccatggagccatggcctatagggtcctgggccgcgcggggccacctcagccgcggagggcgcgcaggctgctcttcgccttcacgctctcgctctcctgcacttacctgtgttacagcttcctgtgctgctgcgacgacctgggtcggagccgcctcctcggcgcgcctcgctgcctccgcggccccagcgcgggcggccagaaacttctccagaagtcccgcccctgtgatccctccgggccgacgcccagcgagcccagcgctcccagcgcgcccgccgccgccgtgcccgcccctcgcctctccggttccaaccactccggctcacccaagctgggtaccaagcggttgccccaagccctcattgtgggcgtgaagaaggggggcacccgggccgtgctggagtttatccgagtacacccggacgtgcgggccttgggcacggaaccccacttctttgacaggaactacggccgcgggctggattggtacaggagcctgatgcccaggaccctcgagagccagatcacgctggagaagacgcccagctactttgtcactcaagaggctcctcgacgcatcttcaacatgtcccgagacaccaagctgatcgtggttgtgcggaaccctgtgacccgtgccatctctgattacacgcagacactctccaagaagcccgacatcccgacctttgagggcctctccttccgcaaccgcaccctgggcctggtggacgtgtcatggaacgccatcnnnnnnnnnnnnnnnnnnnnnnnnntggagagctggctgcagtacttcccgctagctcagattcacttcgtcagtggcgagcgactcatcactgacccggccggcgagatggggcgagtccaggacttcctgggcattaagagattcatcacggacaagcacttctatttcaacaagaccaaaggattcccttgcttgaaaaaaacagaatcgagcctcctgcctcgatgcttgggcaaatcaaaagggagaactcatgtacagattgatcctgaagtgatagaccagctccgagaattttatagaccgtataatatcaaattttatgaaaccgttgggcaggacttcaggtgggaataagcccacgaaaggaaagggctctcaagggctcttctgctcatctcttccgtgagatttgctcccagaccctctgatctccctccaacaaaccctggctccagccccctttcccaacttgagttgcatcatcttggaaccaggaagcccagctaaagccaagagaccagagagtccctgccactagttttcatcagtctgttcaagcaaagttgatctgctcctggcacgtccagtaaattccagaatcattctcctttctgcccataaagggccttggagaattgctttaagaagagtgaatgttccaatgatgatagatattataagcgatgatggttctgttgctatgaacacagcagtcggtccctgtcattgtccacccaggagtggccttgttaattccaagtggcatgtatcttccctctgagcttcatttcttcaagatgctctgggtggtgggatgggagaccatcctcagccctcctcagaccttatcaattcattgagagattgcaaagctgaaagcacctccggccactcctgggagacagaccctttggtgatgaaataaaccagtgacttcagagcctatggtctcaactgtgcttgaaaaacactgtctctgaaaacaactttgtgattctccctgctccctgtggacaaaagcacataattctgctgttacgggtactttgctcatacgagctttcatgttcagcatgcaatggaatcatgcttgtccatgtgaaataaatatggctctctcgtgtccttaaaaaaaaaaaaaaaaaaaaaacagaaccaagaaagaccaacaacaaaccccacacagaacacaaacaaacacgcacgaccaaaaaaacccag

SEQ ID NO: 6068 - DNA, 2473 bp, Homo sapiens
  misc_feature (910)..(928): n is a, c, g, or t
actgtcccgcgaacccacatccctacaaagcaggaaagtatgcttgggagaggccaagtgagtggggaatcagcccaaagccaggcgtccagggtctccctcacctgaagctgactttttccccaccttggacagagggcgggagatgccatccccactgaacccagtgctttcaccagccatattagctcccactcaccccccgtcgtggaagcctcggccgtcacacctgcagggccggggcgtgcatggcctcagggatggcctgttcagctgctgggtgactcgggtccaggtgcctcaccacctgctgagctctgtgtgatttctggacacttctgctcgttgcctttgggctcagtgaagagtctggagtttatctggagtgaggtggccggttcttggtgggatctgagcaggtctctgcactcgctgttgcctctgcctggaacagtctccctcctggtgtcattgtctccgtggtgtgtccttcctgaccttccacctccaccaggtgccgacacttccctgaccccagtaacctcttctcttgggtgggtgaatgccacctgctgatgtctgatttattcatcggttttcttgtctgtagtctgtcccccttggggacagggactcgttgctcatgttcacccggcaggctggacacttcgtggagggctccaaagccggcagatcccggggccgcctctgtctctcccaggccctgcgtgttgcggtgagaggagcatttgtgtctctgtggtttgctgctggagctggtgaccgggagagaaacaagggagacaagggtgcccagacaggtgcggggctcagccaggaggcagaagacgtggacgtgtcccgggccaggagggtcacagatgcaccacaaggcactctgtgtggcacnnnnnnnnnnnnnnnnnnngagtcagtctgcaagggtggtgggcgttgctcacctgggagaagcctttagagtgggcgttgagcaggccattagctcgtgccctgaggaggtgcatgggcggcatgggctctccatggaaattatgtgggcgcggatggatgtggctctgcgctcacctgggcgaggacttctggccggtgccggggcactctgcatgaccctggcagaatcgagctgccctgactatgaaaggggaagaagagcatgcctgaccctccaccggcaccccacccctcactgctccacctggggcctgcctctgcgggtggctgggtcctggctgactgttgtgactgttgaggccctgggggggcggcgcatgggagttaggaggactggccaggtggggcccactatgcacccacccccagtgtcaggtgcttctcctctcctcctccaccacctcctcctcctcctcctcatcatcatcctcacttgttgaggacgtcctgtgtgccaagtggtttatatgcccagcctcatttaatcctcagaatgactccatgaggtagctactaaaaccccccacttaacagatgaggaaactgaggcctagagaagctcaacaagttgcctaagttccaagtttcctctcccaactctcctaccctctcctcttccttctcctttctcccattcttccctgcctcttccctaactagacaattttttattgagtgtctcccaggtgcaggcatgagccaggtgctgggaaaatcatgataacccagctccttctggtcattttctcagctggttagaggctgggaggacacgcaagttcagctccagccgactggggcattggtggtagcccctggagacattgtgcaatggggctacgaggctgcatctggctccagggaagcgtgttgcaatccatgagtgatgtctgccatgcgtacaggcatggagagtgaggcgcctgtactgtctttctgtagaccctagactggtggggcctctgaaatgcatccagacactgtgctgggtgtgttgcatggccctcccaaccaattcagtatttttctccccattttccagggagaaatctaaggcgtcagaatgtaaggttcttattggaacccaggctccagggtccctggttttctgtgacatcatgctgcaggaccctgtttctctctttgctttggctgctggggagctcagaagggagctttaggcttgctctcagtcaccacattagctcaggggtttgggcatttttgtcgccgtctcctttgggctctgtctcctccctgctgtgcttcctgaggagcaggccggatgtaagttatcaactataaataaaaccaagacttccgttctggctctcaaaaaaaaaaaaaaaaaaaaaaattttttttaaagttcttaatcaagggaggggatactcctaactgaagatgacatcagcatcagctggccccggggggcaggcccccagcccccaggcccgtgtgggccctgaatgcccccattatgaggggtaacctcattaca

SEQ ID NO: 6069 - DNA, 3559 bp, Homo sapiens
  misc_feature (2912)..(2928): n is a, c, g, or t
atataattttttaaccaaagtgcagtctttaccctgtcagggccctgccttcacctctgccaggactatcttccatgtcaagtttagacccgtgtcattttcaaagctaataatggttcccccatactttaggcagcatttagatatttggatttgggatggccttttatgttttaactacagtgttagaaatcagagcccttggaaccactgggatcagagggcagcagcagaaggcgcccttggtcctctttgaggggcccagggctccggagagggcccccgttcctagcagccacagtggcctgttggcacgcatgtgtgtgttccagctgctctgtgacatttccctttgtttcagactcttgaaaggccacggccgtcgtgggaattagttgaccttgtgtgttgggccacccttgctggacaggacaaggtggtgctatcaactccctgtgctctgaggtccttcgcatgctagatgaggcagcttcaccagaaactatccatgtctcttctgttatctgggataattccacgtgcctttacaacacagctgtctggttacctggggtctggaaatgccctcggtgcctcagtggtgccttcccacaggccccccatggagccaggcgatgcctacagatgcctcagtggtactttctcaggtccctttgcagagaagaggttcaggattcctgcccacattgataaggcggcttggccagtaagtggcaggcatgaacaggtgcattccagaagcgctggggctggtccagtgccctgagtggtctagagcataccagagtgaaacgttaggctgcgtcggcctggtgactgtcagggagatgaggactcagagaagggagctgtcagaattgctacctatgtggcaggggtctcactctctcctccctcctcttggggcccctggctactctgtgacttcaacagaggacagaaaggatgaccaacaaggcctcagggcatacccccagctgcactgtccttgtccccagaagggtccccagagtctgggagggaggaggggccatggccaggattagaaaagaccgtgccccaaggagagagcacagagatgggccggggaagcagtgggatcctcgggaaaagaggctgggagcaggtgtccgggtgaggcccgggcagcgggtacaggcagggacaagccaggagtcccatcatggaagacatgatggccagcggccagcactgtgtgcagagaatggcccctctggggatgtgcccgctgccccattagttgcaggaaggccacctggatgtgagtttgggagatgggctggccccgaggcagccagccctgaggtcagagtgagccacatgcatggggatgccgggaggacacagaggagtgctgcaggagatggcagtgggggcactttccaggatgggcccgagcaactcagtcactgggtggatgtctcaccacccctccaggccttcctcagggcgaggccactgcccagagggcacctggtttgtcgcagagtagaatcagctccatattttgtaatcacatccacgaagctctgaagccatggtggtcctggcaccagctggctccgttagaggcttggggtgggagtgagcaggtgggaggtgccccagtgacaggctgagtgctggagcccaggctgccaacagcctccccagactcctgagttgatgtaataaacccagccctggtgaataaacctggcccttgcttataccaaggtgatcagtcttctcacgacagtcctagctgtaggagaaagatcattacctacggcatctgccacagcagttaatttgccttcaacttaagctagttgcagtgacaggaagggccagggggaaatatctgtcctcaggacctctaccctagatccttgtaagccacaacaacttcccttctttgagggcgcgaccagtgtcacctggctcgccactgggaagagccaaggcacatccaggttggtggctgctgagccccacagcatcagaccagcctcttgtccccaccccacagaggccaagggggtgatctgggagtagcaccccagcctggccgctctcttgaggtaacagggttggatggttagggagcttggagcactggcccaagcaagaaaacagtggtgttttcaggaggccctgctgggagatggaagacagctccccactgggggcctaggattccaggagctccccagcagtcctccgtgggacatacgtgggtttgcacctgctgccctgtcccgctgagggtgcggtgctgatggggtggccctgcacactgatggtaactctcactttccctctctctcatgcattcagaaagagatggatagtttaaaaacgaatacatggaacgtcctgcagacattcgctttgtctgggagaagaatgggcgagctctggagacctgtgtccctgtgcagacccatgcactgcccgatggcagggcccatgcactcagctggctgcaggacgccatcagggaaagcgctgagtatcgctgctctgtcctctcctcagcagggaacaagacttcgaaggtgcaggttggtgtgagtgagacctgaagtgacccaccaggagaggtggaccagagagctctctgcctggagggctgtggctggggagcacgaccggatgatgcagagctggaggaaggcgtgggaaagctgtagcaaggacaccctgtagccaccaggaaggagtccctgacaccgacctcaaccccaacaagaccctgctgccactgaccacagccacccccggagaaggcctggtcccccacaactgtgaactgtcttgcccaagcctgctctgaacacagccattgggccaccacctgatgggcagaggcgggacagtggagaagnnnnnnnnnnnnnnnnncctgtgacaggaactaagacttaaaaaattaggtgcttacctgggacagtaagttctgtctggcacaagcaggtaaccaggatggctaacaggctttgatagctgctcgtgaactaaaacagcagggtgtgtgcaggttcctcctctacggtcaggcagcaggctctgaaggctgatcctacaccgtcccagtgactccccttgacagagtgcccccaccccctaatagccaacagggttagcatggccagcacagatcgctgcttttattgatgcaaatcaagcctgctgcttctcctccctgcagacttagccaaggaactccaagatgcatgactgggacaagaaaaggtgagactccacatggaaatgccttgccctaaaccttgaatgactgtgagatgcgatctgggagtgcatctgtcaagtctttgtgttttcttcactaacctcagaatactgggctctattttatcaagcgctgcagtttatgcctctgtcccgtcaatgctcagcttctgcaacaggacaccaaacttgatgcagaaagccaaataggtcaattatgcaaatctcctggtgccatattaaatttcttgacgatggaaaaaaaaaaaaaaaaaaaaagttg

SEQ ID NO: 6070 - DNA, 1611 bp, Homo sapiens
  misc_feature (28)..(29): n is a, c, g, or t
  misc_feature (1248)..(1264): n is a, c, g, or t
gaatagaacaaacagccgagtcgggaanngtcgcgacagtcataggggaatcgcggggtggaatagaggaatatacataggggcgggaacggagaatgagaaacgaaagggcgcggatagcggggaccagctggcgtggggaagtgcggaaagacaccgcagttagacaaaaaggggggggggggggaggaagcggtggttaaggtggggggcggggaaaagggggaagggaaaaaggggcgggaaaaggggggaacggggggggggaaaaagtcgggaagaaagggggtaggaaaacgaaaaagagaagaaaaaaagggcgagagaaaggcggggtaaggaaaaaaagggggaaaaaaggaaaaagcgaccggagggggaggggcaagggggcaaaagagaaaaaaaaaaggggggtgacgtggggcggggccattgatgccgtaagaacacagtccgcgcgtcgcgggaagacctgggctgggccggttggatcctgtcgccacgggaggtgcaagtgaccatgtgcatcggcgcgtgcccgagccagttccgggcggcaaaacatgcacgcgcaagatcaaagacgaagcctgcaccgcctgaaagcccgaacacggtgcccagcgcccctggctcgtgcccgcccagctaccaatccccatggtgcctcattcaaaaagaaccgacaccggggtgtcgctccagacctatgatgacttgttagcccaaagactgccactgcatatgagcagtccctggtccttccactgtgcacctgcgcggaggacgcgacctcagttgtcctgccctgtggaatgggctcaaggttcctgagacacccgattcctgcccaaacagctgtatttatataagtctgttatttattattaatttattggggtgaccttcttggggactcgggggctggtctgatggaactgtgtatttatttaaaactctggtgataaaaataaagctgtctgaactgttaaaaaaaaaaaaaaaacaaaaaaacaaaaaaacacacaacacaaaaaaacaaaaaaacaaaaaaacaaaaacacaacaaaacacaaacaaacaacaccacaacaacacacaacaacacacaaaaacaaaaaacaaaacaacaacaacaaaacaaacaaaaaaacaaaacacacacacacccagccgcccacccggcggagagagacaaagagacgtcgccagcaaacacagacacatggagaggtggggggggannnnnnnnnnnnnnnnngaagaagaataggaaaagagagaggccagcaacaaaggggcgtgggcagcgagacaacgaacgaccagcggcgagggcagacagaggggcgcgcgcgggaaagcagacacacgacaaaccacaaaaaaaaaaaaaaccaacaaccagcacggcagcagagaggagaaggaaagcacggtgcgagtagcccagccaaccaaacaccaaagacggaaaatagaaaacgagaaaaagaaagaaagacgcagcaaagagaaatacaagaagaacaaggagacagcaagcaccacgacgcagcacaacaaagacaaacacacgaccacagacgcgaacgggaggagggggga

SEQ ID NO: 6071 - DNA, 471 bp, Homo sapiens
tctttttctttttttttttttttttggactgagagccctaagtgaaattcttgaattttctgcaaagccctaagttaagaaaaaagcctctatttgtccttttgtcccctggggctgcagaacattctctgtggtggttactggggctggacaatagggctttgttatctgatgttctgtattggggtgcacatagggagggaagaaggggctctctttatctatctatttgcagaattgagtaatcaagaaagtgcatcatggcctggcctggcctggcctttggtgacagacacacatcagccactaacctaagtccccctgccctaataaacttcccgagtgcccaggggcttgggagagtgcagaagagcacagcaggagggagagctggttgtgtgactcactcctggtttctgagaccagagagggatgcagagcgggctgtcagcctttctctgcttctgcctg

SEQ ID NO: 6072 - DNA, 2489 bp, Homo sapiens
  misc_feature (1146)..(1164): n is a, c, g, or t
ttagagccactgctgaaggcagggctggatctggggccagagctagaatctgtgctggagtccactctggagcctgtgatagagcccacactatgcatggtatcacaaacagtgccagagccagaccaaggacctgtatcacagccagtgccagagccagatttgccctgtgatctgagacatttgaacactgagccaatggaaagtaagtgatgagatggagctatggaagatggcacacattccctttcctacctcttctccctctcccattacagaaaaagctgaactccaagctcctcattggagagaggtccattctgtgattcctttttttaggaattacacatgccttcccccacctccctgctctttcatcccacaagttcccactcaggctcttcccaggcctttcctgccatcctccctccctttccctgctgggttgggaactcctaactaagatcggggcctcacttttctctctggattacctagtcttcagaaactgtgtaaagattgaagaaatcatgccgaatggtgacccactgttggctggccagaacaccgtggatgaggtttacgtctcccgccccagccacttctacactgatggacccttgatgccttctgacttctaggaaccacatttcctctgttcttttcatatctcttgcccttcctactcctcatagcatgatattgttctccaaggatgggaatcaggcatgtgtcccttccaagctgtgttaactgttcaaactcaggcctgtgtgactccattggggtgagaggtgaaagcataacatgggtacagaggggacaacaatgaatcagaacagatgctgagccataggtctaaataggatcctggaggctgcctgctgtgctgggaggtataggggtcctgggggcaggccagggcagttgacaggtacttggagggctcagggcagtggcttctttccagtatggaaggatttcaacattttaatagttggttaggctaaactggtgcatactggcattggcccttggtggggagcacagacacaggataggactccatttctttcttccattccttcatgtctaggataacttgctttcttctttcctttactcctggctcaagccctgaatttnnnnnnnnnnnnnnnnnnngttgagagctttctgccttagcctaccatgtgaaactctaccctgaagaaagggatggataggaagtagacctctttttcttaccagtctcctcccctactctgcccctaagctggctgtacctgttcctcccccataaaatgatcctgccaatctaatgtgagtgtgaagctttgcacactagtttatgctacctagtctccactttctcaatgcttaggagacagatcactcctggaggctggggatggtaggattgctgggaatttttttttttttttaaacagggtctcactctgttgcccaggctagagtgcaatggtgcaatcacagctcactgcagcctcaacctcctgggttcaagcaatcctcctacctcagcctcctgggtagctagcaccatggcatgcgccaccatgccctattttttttttttaaagacagggtcttgctatattgcccaggctggtcttgaactgggctcaagtgatcctcacgccttggcctcccaaagtgctgggattataggcatgagccactgtgcttggccaggattttttttttttttttttgagatggagtttctctcttgttgtccaggctggagtgcaatggtgtgatctcggctcactgcaacctccgccttccgggttcaagtgactctcctgcctcagcctccccagtagctgggattacagatctgcaccaccatgcccagctaattttgtatttttagtagagacggggtttctccatgttggtcaggctggtctcgaactcctgacctcaagtgatctgtccacctcggcctcccagagtgctgggattacaggcgtgagccactgttcccagcaggaatttcttttttatagtattggataaagtttggtgtttttacagaggagaagcaatgggtcttagctctttctctattatgttatcatcctcccttttttgtacaatatgttgtttacctgaaaggaaggtttctattcgttggttgtggacctggacaaagtccaagtctgtggaacttaaaaccttgaaggtctgtcataggactctggacaatctcacaccttagctattcccagggaaccccagggggcaactgacattgctccaagatgttctcctgatgtagcttgagatataaaggaaaggccctgcacaggtggctgtttcttgtctgttatgtcagaggaacagtcctgttcagaaaggggctcttctgagcagaaatggctaataaactttgtgctgatctggaaaaaaaaaaaaaaaaaaaaaaaaaaaaaagaaatggtggaagctttagaggatcc

SEQ ID NO: 6073 - DNA, 2532 bp, Homo sapiens
  misc_feature (476)..(495): n is a, c, g, or t
  misc_feature (1476)..(1490): n is a, c, g, or t
atcaaaacaatgactaatgctgggcaacatatagcagaagtcaaacaaaaatgattcctcctgaaatggtaccttcattggttctgatgttcttttgcaaaaaatgtccggaagcagtatagaaaaccccctgtatgtgaaccttagattgtaaggcaagccagtgcactgtgtaatatgcaaagggagtggtgcaaaagagaaggcacccgtcccagctctccatgccctttccctggcaggcgctgactgagatggcgctgagtgaatgtggaaggtgctaagacccagtctcttcactgcagggctgtttacagccagtttcttttactctgaccttaaggtttccactgagctcattggacttcaacatatggtgtttaaaagtttcccactcaaatgcacacttgaaaattgggtccctcagcctcattactgaactaaataagtgaagaagttgtatctttggggtaaannnnnnnnnnnnnnnnnnnntttttaaccagttaagtacgcatcttcctggtggttcagactttttaagtcagtgctaaagctgaaaagcgccttctaaatatgactgtgagtttagtttgtatcttacatttagtaactgttctgttgggccaggactatgactttaattactatgtacttattcatcccacactctgcactaaatacaccatagctactatagcattgtggcaggcactcatttttgtggactcattccatacttctgctggcatatttcgtttaaaatctagctaaagattttcatagtactgtgttaactagccagggctgaaaagtgtgacaggatatcaaattgactttccttggggaaaatgttgctttggcaatagtgaagtccaactccttcatttacagaattagtgattactcatcaatttttgaaagttgtagattaagtagttttatttactaaattcttaaccactttgaagatttaagccagttgaaatgaaacattggctggatgcagttggctagcacctgtaatcccaacactttgggaggccaaggtgggaggattgcttgaggccaggagctcaagaccagcctgggaaacatagatttgaaatcttttcaaaaatgtataaaaatttaataaataaataaatgaatccttactcaaccataattatggctttaaaacccaaccaacagtaaacacttacttgaagccaaaacagtaaattttgaatgaaatttgaattatgcttttggaagctgccatgtcttaattcttgctggattttgattttcaattttggaagtttttatcaaaactgtccagtcatgagtatatcaggtagcagcctttaaggatctaagtttcattcctataaagaacaggaggtgctggtatttcttgtcttagcaagtgatctgatgcaggtctaaatgggggttagcatctatactatggcttaaaagtttcctccttgnnnnnnnnnnnnnnngtgatggcttcaaagctaagctttgctctcatgtgacccttctttatcttaatacccaataagatataaacctctcagagtcaacccagtgtagactcaaagggtcttagcttcatctatcagataagatctatctgatttatacaaagaatggtgctgtttttatatacatactaaaaaaatctaattctcaaacaattttcttaatatttatgccagcaaggtcaggaaagactattttgtcctgtttaactttagtagtgaacaaactgctagagacatctgtcatccttaacaggccactgtggtccttatatactgaccctcctttccaattaacgtcctttaatcccatactagttccataagagacttggcacataaaagcagtattttttttaatgcctagtaaactggccagaaaaaaatattgccatggtggacctgtttctatccacctctttctatggctatataagtctatacatgccagttccgtacatactccatttccaaagagcccccaaaccctggacagtagcactaccatgaattttagggtcacaaaacatttccttctgaaggaagcagctgcctcagcagtgtcactttagtgaccactgcccaggcttacttcactttgcctccccctacacatcactgccctctttctgccaccaaacctcactattccagcaatgatgcctccctggtgtctggaaaacccatctggtgcactaaaatgctatgcaacaccaaatggcttcttcccctaatattgctcaacaatgtaaattcttcaagaataaacttcatgctaggttaacatcaatgtatggttacagcttccttttttttttttcccttttaaaatgaagcaaaccacctccattaaaatccatgttttggggcttgtttttgtctctcaagtgtgaaatataaatcatgtttttatgatttttgtaaatctttttacaccttgtttttgtaagcaaaagtttcttattaaaagaataaaatgacaaaaaaaaaaaaaaaaaaa

SEQ ID NO: 6074 - DNA, 1475 bp, Homo sapiens; identical to SEQ ID NO: 5560
  misc_feature (798)..(817): n is a, c, g, or t

SEQ ID NO: 6075 - DNA, 735 bp, Homo sapiens
cttgacaccagcagggtgacatcgactactactactaaattcgcggccgcgtcgacctggacttctctggaccacagtcctctgccagacccctgccagaccccagtccaccatgatccatctgggtcacatcctcttcctgcttttgctcccagtggctgcagctcagacgactccaggagagagatcatcactccctgccttttaccctggcacttcaggctcttgttccggatgtgggtccctctctctgccgctcctggcaggcctcgtggctgctgatgcggtggcatcgctgctcatcgtgggggcggtgttcctgtgcgcacgcccacgccgcagccccgcccaagaagatggcaaagtctacatcaacatgccaggcaggggctgaccctcctgcagcttggacctttgacttctgaccctctcatcctggatggtgtgtggtggcacaggaacccccgccccaacttttggattgtaataaaacaattgaaacaccaaaaaaaaaaaaaaaaaaaaaaaaacaaaagaggggcgagccgtctcttaacagtttctcccttgcgaaggcgcgccccctcgcttatccgcggtgtaccccagctttctattggactacaaacaggtggctcccctattagcgtgcggctcgcctataatataccgcgaagcgacccgttggccgcgcagcgtctttccacacacgtctgtgtgcactcggggcacaat
